United States Patent Application Publication US 2015/0315605 A1 - sequence listing, part 33

SEQ ID NO: 63806 - protein, 187 aa, Zea Mays
MDLQEKTTPTHKGKGKKKESAKKKERSRKRTSSVLDSTNDTVISEEMSEYNLDEPTMEEKLATLNLINRENEIHGTEKQSLSVAPPSADSVHILLKQALRADDSVALLTCLYNRDEKVITKSISLLTPADVVKLLKFFVLQIQSRGAVLVCLLPWLQTLLNRHMSSIVSQESSLSLLNSLYQVCKMK

SEQ ID NO: 63807 - protein, 357 aa, Zea Mays
MSTLALALIAVLGFLWICLLSRKKSVGGNYVKMDKKTVPDGAKLVTYQWNLPYSSSEIIRRLELLDEEDVVGCGGFGTVYRMVMDDGTSFAVKRIDLSRQSRDRTMEKELEFLGSIRHINLVTLRGYCRLLPAAKLLVYDFVELGSLDCYLHGDGQEDQPLNWNARMKIALGSARGLAYLHHDCSPGIVHRDIKASNILLDRSLEPRVSDFGLAKLLVDNAAAHVTTVVAGTFGYLAPEYLQNGHATEKSDVYSFGVLLLELVTGKRPTDSCFIKKGLNIVGWLNTLTGEHRLEDIVDERCGDVEVEAVEAILDIAAMCTDADPAQRPSMSAVLKMLEEEILSPCMSELCYEQHLEL

SEQ ID NO: 63808 - protein, 836 aa, Zea Mays
MDGKSGNIVQSLPDTLSSLMGLNKYLAPRTSYIESVSHIIEELSPTKPKMKVMVHTAQNICSDDTDSDAEAAKVQEELVLLDGKLKQITLQRRQSLNNYLDLKGNIRVFCRVRPFHHEENYQSRTLYTLDESNIFLKVAETKIKQYKFDKVFNQCSTQGDVFAEVEPVIKSALDGYNVCIFAYGQTGSGKTYTMEGKPTDLGVIPRGIQALFDRTSESNRRFLFTFSMLEIYMGNLRDLLVPRGKAQGFKKVPSLSIKTDPDGGIEIENLVAVTVSSFHEVKRLYEVGTHFRSTASTMANSTSSRSHCLIRISLTSFDAPERKRARNKLWMIDLGGSERLVKTKATGKRLKEGKAINLSLSALADVIDALQTKKSHIPYRNSKLTQILKDSIGCESKTLMLVHIRPNEDDLCESICTLGFATRVRSIRLENEEPQEVKARKEHLLMELEKEISDLEQECEGIVRKIKKLKETMEHFKGHQPSAEANFDISHPSSEELKTVMPKNTKDSKNRRDVSSRLPRFMKPTASSQHRIDLNKQIPVSNKTKPPVPPKRRPSSVYAESVRLPVNAATWQSECSSECSISMTSDMNWIPSIQDGTECSQDTSEYETKQVIFSEHEKPPQSQVISFEESGEMQDKTKEMGIIDIDSWIHQQIIENTGICQCHTERTLDVIEVNEYETYNSNTASPVQKEFTNGSKPSLDEDSNLNLCPPTQNTEDSKETRAVNQFTKTELYTPPLKELCGSAKIKEHKNEKLGRHGSCRRSLQEELGNCKPEQPDKEPKADPNMQPEIEFHDNKHHIGKLTKFIQALRTAWIGALLGLGTMNLGLEQDFFKSLTL

SEQ ID NO: 63809 - protein, 1914 aa, Zea Mays
MAESVSFLLRNAPNNQLTQGLLKVLLEAAKQPSPARIDGVVSLLWHVMKGTSTKLHSKAGQVLKFLLSKSIVSTLRDKFPDGSSTVHAVMTGLIQRLCDEVDPKELPLMYTCLCEEINCCLEDGCLEHLKCLIVFLAFALQKKQNNAFDKVKMIKLVELLVSRYVFPGSNITGSSSIEVLGSILDFMLSVLDVPTILGNLSIISPFYAPVFKLKNPRVIVFIKKLLVKGPQVAQHFESQILSAMDNFIVSSPEDVIFILLNFFKGSKKQIFLCSTDGNHLDSVEKTCKFFESKFSLWIELLDDTAGTGNRSSNQLVFLNGINSKDLHAGNMNGLPMTTWRGLLGAALSSYHKLLLVNTSRNSEFSFFLSLAKSHSTCPQVLSAVAEYLDSLQGVSSMEVTKEFDPQNLLELFSIFAFNLSSPTKDVRILTLRILSYFVKMDQRLITDEERPHKRQRTEVSGEEAVAKYANVVDILLIIESMPISVSTSRKIAIFISRIQMSLSSKMVHDDYIPPLLHGIIGILYNRFSDLWPQTLDCLAVLIRKHKELVWGQFVPFIAIHQSKGLTVKNQEKLEAATQPQSIFDCFNLYLAMDFDCTPAVTVATLLLQSLQRIPDVAESRSRQLIPLFLNFMGYDDSSIFSADSYMPEKCKGKQWKAILKEWLNLLRLMHNARSLYQGNFLQEVLTKRVLDDSDPEIQAKALDCLLNWKDEFLIPYSQNLKNLIDVKTLREELTTWAVSHDSLSILKDHRSRVVPLVIRVLAPKVRKLKLLGSRKHTGASHRKAILRFLLQFDSNELELFFSLLLRSLIPGSLQLKMFGSQPDNLLGSFSDIVGTSTEICVENFTWKKANGFIHLVEEIFGTFDMPHISPFLNVLLIIVARLLESCMRNLRNESDGKYPCNQTNDHGNGCSINSEVGNSVNVDECFKEMHLEGHMETASGSITTYALEFIENLLRLDIDLQQQDEHLVKKVLLQHMDVLIHSLHDFVNHRKELNRRSGTWLGQRELRLFKLLLNYITDPSAADNFIDLILPFFSKKDLNSDDCLEALCVVRGIIQNLRCKVSEKVLNALNPLLAIVGLELRLCICDIYAGLSLNDPSMLFLAGLIGDLNAVSASELGELDYDTRLNTYDKVRPQLFLGLTEEHVGAILSHCVYDMSSEELILRQSASRALQSFLDFSASVMNNDVSKYSIDDKFRENNTRSICTMGCIQKILEKTYLHNMGVAMTKDVSIQKEWIILLREMVSNFNHLASLSSFRPLCKVDIEEDFFHNITHLQAGKRSKALLLFRQGIKENNFSEDITMKVFVPLFFNMFSDDITMKVFVPLFFNMFSDVKAGKGEQVRDICLDTLSAVAAKVQWEHYRTILKRCFRELNLRPDKQKIILRLICSILDAFHFMKPANDASGNSDALSEDIDSSLTFSLVTVSSDKQQYMQKVVFPQVQKLLGSDPEKVNVNINLVALKILKLLPVDYFESQLSSIIHRICNFLKNRLESIRDEARSALAASVKELGIGYLQFVVKILRAILKRGFELHVLGYTLHYLLSKNITADMYGRLDYCLEDLLAVVDSDLLGDVAEQKEVEKLASKMKETKKRMSFETLKLIAQSITFKTDLLKKIISPVSLHLQKQLTPKLKTRLEMMLHNIALGIECNSSTETSNLFIFVYCLIEDTITGSRSECKENTQSSPDQDSTVRKTFLGLGESGSQNSYILTKFALDLLRNRLKSIKLDKEDEQLVKMLDPFVDLLRKCMSSKHASVLSATFRCFALLVKLPLPSLRDNAITIKNVLMEILQRAGNSNGHLVTSCFKLLADLLRGFRISLSDNELQMLVHTPMFVDLQTNPSPVALSLLKTIVRLKLVSHEIYDIVVKIGELMVTTLTESIQQQCIQIMLQFFLNYPLSEKRLQQHIDFFLANLRYDEYP

SEQ ID NO: 63810 - protein, 882 aa, Zea Mays
MGQIDRHVFRRDYNFFLSRNSTIFDIDIEAFQLKPWRQQGADLTDYFNFSLDEEGWRKYWCSMLSTPLFVQKQLRLGARSLVNETSGLEQESYKLKSAKAMSNVANDSGSEGRNDIGKPKGRAIHVEGSACERVPSADLWRPIQRDSDVVIQVNMTLSPSNQSTSDDSSKLNHKGVATERVFDKEVYDGGSSEGVGSKLDRRDSYFARDQSPSPDYSDVLSGESKENHYFKRSNRHSDFRDFFEATKLQDEHVKSDFYCYPSKPDRENSESCRRGYTPSTDDRNMASKLLWMGEAPFTGRGKSGDLFLGHNSDRDFKSRHKARKGQRRQSLDDRRNAIFVEKEKPTDSYHSTCDRKFVKRRSSSSSLRTNYHNSVCNQSYEQRYSPLEKKALKNDEHYFSDESNYHHRQSLSCDINEGDIDKCFSSAKEWQRDGDHIYHSMVKTDMPDANDGRMYRDRYSPEKKIARHDHSMDVEFSHYTDYRFCEWRSLEVRGRYRDKGKFAKSNDGHFRHANHLELYSGLNNFERDKPATGFPVMSSRNRCIDNKEVCNAKMTQNNCHGYHQKNKQHDSSFCIGNIPRYALRTDTYAEKGHFVLPIKRKLYSDLGSMDQRTLADLPLLKGRLMHGQSIASDRRIYALKLHKSTKKINTEAICSSSDMRNINTLSNICVGRRHELDNADNIHLNDRKIKFEREGNELRRVIEDNQKGSHPVDKDLHTSRHKHVHQKLWKQNLSHRHSGNQDLEKSADQNCLNKDVEIEEGELIEEDHNNIIYKSKLKQENVVLKSVIETSSAEQLQVNNATSKDATCNNRATRESDEKHILEVMEKMQKRRERFKEAIAPKKEVGDKKDLSALACSTDFIQNQRPARKRRWGGNCWMLEMP

SEQ ID NO: 63811 - protein, 789 aa, Zea Mays
MEDPVAVPSSSLTDPAAAAAARVPGAVAAAPGVTSAPSALAPTQPPATAAAVSEAATPCQRQLFTVELRPGETTIVSWKKLLKEAGHTAAAPPVAVEPAFAAHAGPSGPAHPAENDPKDPTQPNRFNAVIEKIERLYMGKHSSDEEDLNDVPDDDQYDTEDSFIDDAELDEYFEVDNLKTKHDGYFVNKGKLEQIEPGTAANVAPKKRRRKDASSSYLESNHLGPIDYFDIGDVPEKSSARGTVQTGKQLVSSNVSSYGQYHEDNRVVKNKISGPGGAPKRKSSEFSGDAAARAKIIKDVSHAPLELRDMEKHKAAALPVDYAHKSKISETFDYAYPAYRDKGTSGQLDFQQRKISRENQGPSNRTYRKEKHGTNEYPGIAMATAVYSTQTMHPVVGREGSGTKPKGTRLERAIRDLQKIVAEYRPPTIDINEVDPNGQVAVKRRLPPEIKQKLAKVAKANNGKIQEHELMNRLMGIVGHLVQRRTLKRNMKEMVESGISAKLEKADRFQRVKLEINEMIKERMATKSKVNEQDGSADDFQVANDERRALKTKYTMDTALEDKMCDLYDMYVEPDKALARIVSFIICMLVKGMDEDKGPQSRKLYVELAELWPHGCMDNVGIKDAIYRSKERRRLLYSQQKVRSEERMKRKRLAATAKLPDGLAVAMQSGVAPQVAQPPITNPITYHTADYGQNPGLKYFDRARETSSSAIPDDGNRIAGEVKKKKRKPEYDPVDTQANLPRAPMPHGSEKQKPSKPADEASAGSLPSMATTQTVLGLPSVLGHNQQPS

SEQ ID NO: 63812 - protein, 1941 aa, Zea Mays
MATPSYAAVKCLNTSSSSRKRFSFKSFSQRVEEIDIDVYRSLHTLKAEPSSGSSFFLDAIVEWRELNTAEDFISFYEEMIPLVQTLPQIVLHRDKLFSALLQRVNMSARLSLEPILMLIAAFSRDILEDFLPFLGRHASALLSLLNDGGDRDPEILEQVFTSWSYIMMYLQKYLVKDTVQILRITAALRYFPKDYVREFMAESVSFLLRNAPNNQLTQGLLKVLLEAAKQPSPARIDGVVSLLWHVMKGTSTKLHSKAGQVLKFLLSKSIVSTLRDKFPDDKVKMIKLVEDVPTILGNLSIISPFYAPVFKLKNPRVIVFIKKLLVKGPQVAQHFESQILRVSSMEVTKEFDPQNLLELFSIFAFNLSSPTKDVRILTLRILSYFVKMDQRLITDEERPHKRQRTEVSGEEAVAKYANVVDILLIIESMPISVSTSRKIAIFISRIQMSLSSKMVHDDYIPPLLHGIIGILYNRFSDLWPQTLDCLAVLIRKHKELVWGQFVPFIAIHQSKGLTVKNQEKLEAATQPQSIFDCFNLYLAMDFDCTPAVTVATLLLQSLQRIPDVAESRSRQLIPLFLNFMGYDDSSIFSADSYMPEKCKGKQWKAILKEWLNLLRLMHNARSLYQGNFLQEVLTKRVLDDSDPEIQAKALDCLLNWKDEFLIPYSQNLKNLIDVKTLREELTTWAVSHDSLSILKDHRSRVVPLVIRVLAPKVRKLKLLGSRKHTGASHRKAILRFLLQFDSNELELFFSLLLRSLIPGSLQLKMFGSQPDNLLGSFSDIVGTSTEICVENFTWKKANGFIHLVEEIFGTFDMPHISPFLNVLLIIVARLLESCMRNLRNESDGKYPCNQTNDHGNGCSINSEVGNSVNVDECFKEMHLEGHMETSVSIKQLKDLRSSCIRVVSSALSHYESHEFGENFWGVFFSSVKPLIDCFTQEASSSEKPSSLFACFMAMSRSPKLAPLLGSNNLVPAIFSILTVKTASGSITTYALEFIENLLRLDIDLQQQDEHLVKKVLLQHMDVLIHSLHDFVNHRKELNRRSGTWLGQRELRLFKLLLNYITDPSAADNFIDLILPFFSKKDLNSDDCLEALCVVRGIIQNLRCKVSEKVLNALNPLLAIVGLELRLCICDIYAGLSLNDPSMLFLAGLIGDLNAVSASELGELDYDTRLNTYDKVRPQLFLGLTEEHVGAILSHCVYDMSSEELILRQSASRALQSFLDFSASVMNNDVSKYSIDDKFRENNTRSICTMGCIQKILEKTYLHNMGVAMTKDVSIQKEWIILLREMVSNFNHLASLSSFRPLCKVDIEEDFFHNITHLQAGKRSKALLLFRQGIKENNFSEDITMKVFVPLFFNMFSDVKAGKGEQVRDICLDTLSAVAAKVQWEHYRTILKRCFRELNLRPDKQKIILRLICSILDAFHFMKPANDASGNSDALSEDIDSSLTFSLVTVSSDKQQYMQKVVFPQVQKLLGSDPEKVNVNINLVALKILKLLPVDYFESQLSSIIHRICNFLKNRLESIRDEARSALAASVKELGIGYLQFVVKILRAILKRGFELHVLGYTLHYLLSKNITADMYGRLDYCLEDLLAVVDSDLLGDVAEQKEVEKLASKMKETKKRMSFETLKLIAQSITFKTDLLKKIISPVSLHLQKQLTPKLKTRLEMMLHNIALGIECNSSTETSNLFIFVYCLIEDTITGSRSECKENTQSSPDQDSTVRKTFLGLGESGSQNSYILTKFALDLLRNRLKSIKLDKEDEQLVKMLDPFVDLLRKCMSSKHASVLSATFRCFALLVKLPLPSLRDNAITIKNVLMEILQRAGNSNGHLVTSCFKLLADLLRGFRISLSDNELQMLVHTPMFVDLQTNPSPVALSLLKTIVRLKLVSHEIYDIVVKIGELMVTTLTESIQQQCIQIMLQFFLNYPLSEKRLQQHIDFFLANLRYDEYP

SEQ ID NO: 63813 - protein, 578 aa, Zea Mays
MDAYEATKVVFSRIQALDPDHAAKIMGLLLIQDHGEKEMIRLAFGPESLLHAVMAKARKDLGLLLPASPTSVAAAGHAPFLQLPRQNSGRAGAPSPLSVSSPSSWGHAPAFSRSNSTSNGTGTAEEAAGAGEELPSPVNGGAAPFFPHQSGDALLDDLQLQEQLAFLNEGSANPAHQLPGFVGGECRSPGPGDASGMFAFGLGWPNGGPAHRRSSSVNEFCLGGGGGGDGFGWKPCLYYARGFCKNGGSCRFVHGGLSDDAAAFAGAKMEAAADQQQQQQCQDFLIRSKSQRLGSAAFPYSSTGSLPGSPSAASKCLSFLLQQQQQQHDRAAAAASLMLGGGDEAHKFMGRPRLDRADFANMMNPGSRQIYLTFPADSTFREEDVSNYFSIYGPVHDVRIPYQQKRMFGFVTFVYPETVKLILAKGNPHFICDARVLVKPYKEKGKVPDKCRKPQQGDFSGCTTPTGGLDGGYPFDLHQLGGRMLQHSSSANELLLRRKLEEQQQAIELQSRRLMGLQLLDLKARAAAAAASPLPTPIGDAFASSQPVSTTAVESPSPPESAAQAEERICSGGEGQRW

SEQ ID NO: 63814 - protein, 1384 aa, Zea Mays
MDFVRINDGILLDKKSALYPLKPDGTCSHFPCFILFEEVKIIDFPSKDAFKSLVLIQSEKAEMNTSEEIFKDDFDQAKHFYESVVSSELALVDDTFKSLPTPILHDDKAMRSMLPPIEEVLCSLKPLPLSAADGIYLDWHLLSEGPCNRESCSTYESMVEEVKPCSLNSELQISGQQMPALDIGFLEDFPRSAKPQHEDKQNEVYVPGPISHDPSANLEATQKNMLENVVRGHTHMDKLSSEKESSLFESTSQSNGLSFYLNVRNGTNKVRKAEDISTLDIPSSKQAASISTRPKVNKLIEIHPVNLSDIIQGLINDIHVSYTSALQESAYLRHSFSDGQGLSISKQKLLELITGEGSEGLYSCCKYEDKMELIVLYALKQVAYYLCFFGLHAAYLYVGNLTGTFEIIPERLRHLQRCIGEARLKAEKQLQESHPSLSVIETILRSNTQIDQKILIVSDRAFWLPLGQKLTAMKITSVEFGTYHSTTYSDAVIETNSKRCMLQELWKSDCILLDNKNIPASFPFSEFCMIVEYGGPNKSSILLSLAPKLDGLPPLHFLYVTVDGEGLPNALVEDNHTDPDLKSTLDAALHTLQKDLQEKMNKMRIVDSLNFIPATNQQQHLQTNHLTVDSSKKIPADVQLHNAGNLNEKNIVDSHNLVTATEQPNGLNQITIANLQNFVPVVEKSSSTVVSANVIKAPQVNQSAGVLPLSEKMDSTKAGRLPGPEVAIVVNTGNHGKNMLFSRRSSYQQILALERGGMQVVERDVDLPVDLILTAAVCLLWYDTRTSGSSELTISAGTSGITNFLEDIATNVLMALSFCFCGCIMVFEGENHLLSAVMEASDSLYASAVNLDMNLQLFFSEMPKSTDQIILNCIRNAVRINQALCPQITESESLVESFLTAFPSVSPLSAHMILSSGSLMDFLRWSHEQRTQAVEKYHLPPQSISLFSALCKFGELGESKSVMTECSSVDSDISSTLLQSPRKKKRRAAQDFSVAVSNPAFPNPCTQLHGDCVENDKIFSPPKLRKFFHIEDTMSDLPEVFMIDQRLNMGSEGVSCQPRKYDVDAVTGINIIDDDFINELTPNFRTYNERTSSMVDTCNFSKQSELGAKQPIRSSFPASLPSVCTTSSHPTFPSALEINNDPGSWDVPCSINQTWAGHVHGDFATSSGRNDQGVRYHEPRQEIMQTPVPSLSFLKQDFGCHGASQGSGWEIDYLRRMNENRKACREQSRCSVSTQPNSRTRDGSSRILSAPPIESFRYERNKDAPFRDQNRSDIESFRYRRDINTLLRDQSPSNEVRRYGKGRGGTKAQSHRVRKDFKAQPSINHEKSIMPSIEPTWTPLDKRARQKLTFATYGNEKQSKLVWRHQSSPGVGCGFPKKYHEEGT

SEQ ID NO: 63815 - protein, 232 aa, Zea Mays
MNQRMPLIYVKLYMYQICRALAYLHNCVGVCHRDIKPQNILVNPHTHQLKLCDFGSAKVLVQGEPNISYICSRYYRAPELIFGATEYTTAIDVWSAGCVLAELLLGQPVFPGDSGVDQLVEIIKVLGTPTRDEIKRMNPNYTEFKFPQIKAHPWHKIFHKRMPSEAVDFVSRLLQYSPNLRCTALEALIHPFFDELRYPNSRLPNGRSLPHLFNFKPNGKFMLFRHLHGLKL

SEQ ID NO: 63816 - protein, 129 aa, Zea Mays
MEPATPPAPAAGVTATVDLSSVAADLGGAHLLPCGIRQNGGAPVSDYFKPRDTGYVLEKSRGQNSDAEVSNFTSRAEFQSITYWNHDTAPSAEDSLPRCFHWLTVANAMHRAVTAEDLTNMAAMQNQDK

SEQ ID NO: 63817 - protein, 310 aa, Zea Mays
MMLFQYLVNTLEADFVPRQIATKESLDWVIFRESLLSMLLGSRKLVFKSFVKNCMCILLNQYYHEAKDDYEDIIPSERETESTSYHNFSLNYLSFELKKTLISLRKLFVMVMKLDLTRKEADTLGLTSRADRFRNSIMDIILDELTYNSSYLSPFLLAFVERKWKLEIILQYFSKYCGKGAVRTRRSDNSQEDLKLENVLNFFVTATSAKAIVRKMSAEIAQLLLTHAYQACLSAEDANSNSADTPEKVGATLQEISSNFIAAFQNIRKVSPDIQISPFEKEALFTAATLVRKLKSKERFKQEGTPGLAA

SEQ ID NO: 63818 - protein, 274 aa, Zea Mays
MPSNGGSLANMWGRASAKPKPPSTTNSTAVASVAATADAQICAKEEADGNSSDDEHGIKYKRGSTNANNRKRRAVFDYSDDEEDDNIVSIASPELPKQHTPDPVVGIAEDAEVNQKNLETEHHVPNNGKGSSTGVDSDFTSECKIKTIDPMNDSGITLKEKSSDPPINDKKQDSAAEPASTSPKRRKVLKTRIDERGREVTEVVWENEASADDKAEQNVNTIDATASGATVPSKPKPATNADKSKAPSKTAAGNKKAAKAGAKQGSIMSFFKKA

SEQ ID NO: 63819 - protein, 722 aa, Zea Mays
MAPRDPKEDGFGVGGAADPEADIEAPLLVSSGSSFLLDPALEDGGGGDEEQRRRRRRFLHGSHTHSNTTSQVALVGADVCPIESLDYELIENDVFKQDWRARGRGHILRYVALKWALCFLVGALAAAAGFVANLGVENVAGAKFVVTSDLMLDGRHGSAFAVFLASNFALTMLAAVLTVYVAPAAAGSGIPEVKAYLNGVDAPNIFSLKTLIVKIVGCIAAVSSSLHVGKAGPLVHTGACIASILGQGGSRKYRMTCRWLRYFKNDRDRRDLVTCGSAAGIAAAFRAPVGGVLFALETVSSWKGKAYKLLLAATVTVCTSCCLFGLPWIAACKPCPTDTREACPSIGRSGNFKKFQCATDEYNDLASLFFNTNDDTIRNLYSAGTDDEFHISSILVFFIASYFLGIFSYGLALPSGLFVPVILTGAAYGRLVGMLIGSQSTLDHGLFAVLGSAALLGGSMRMTVSVCVIILELTNNLRMLPLVMLVLLISKVVADAFNANVYDLLVRLKGFPHLEGYAEPYMRQLSVSDVVTGPLQTFNGIEKVGHIVHVLKTTGHNGFPVVDEPPFSDTPTLYGLILRDHLLVLLRKKDFIRSCTASTLNALNHFSHAEFAKRGSGKHDRIEDIELCPEELEMFVDLHPFTNTSPYTVLETMSLAKALILFREVGLRHLLVLPKSSKRAPVVGILTRHDFMPEHILGLHPFLFKSRWKKVRLGKVKVTNIF

SEQ ID NO: 63820 - protein, 354 aa, Zea Mays
MANLFVKAKFILANKRCACYFWLYKTLTVDCDIAFYLFSVNSSEMRSISDRIAASPLRVPASPSRFSLSSPPSYFGKVYRAALLDGRVVAIKRAKKENFLSLRAEFSNEVALLKSIEHKNLVQLLGYIDKANERILITEYISNGTLREHLDGQHGLVLGFNQRLEIAIDVAHGLTYLHLYAEKPIIHRDVKSSNILLTEAFMAKVADFGFARTGPTEPDQSQIETDVRGTAGYLDPEYMGTSHLTIKSDVFSYGILLLEILSGRRPIERTRGPAERITVRWAFNKYRRGNVRGILDPMLTEAVNEDILNKIFDVAFQCVAPTREDRPSMKEVVERLWKIRRDHTKIQRIAELTL

SEQ ID NO: 63821 - protein, 889 aa, Zea Mays
MAPTKRLEKLKLSTLLTFMRCHGGSSDDHLRIGTVGFSRVVYVNEPDRLEEEGFSYLLNEVSTTKYNLATFLPKSLFEQFRRVANFYFLVSGILALTPLAPYTAVSALAPLCVVIVATMAKEGVEDWRRKQQDHELNNRIVKVHRGNGHFEESKWKNIKVGDVIKVEKDNFFPADMILLSSNYPDGICYVETMNLDGETNLKIKQALKVTLDLHEDIKFREVRQTIKCEDPNANLYSFVGSMEWRGQQYPLSSLQLLLRDSKLRNTDYIYGAVIFTGHDTKVMQNATDPPSKRSKVEKKMDQIIYLLMSSLLMIALLGSVFFGIWTKEDLRDGELKRWYLRPDATTIFYDPKRAALASFFHLLTSLMLYSYFIPISLYISIEMVKILQALFINQDIRMYHEESDKPTHARTSNLNEELGMVDTILSDKTGTLTCNMMEFIKCSIAGTAYGQGVTEVERAMAMRKGARLDDDIENGDHKDKKNDNSPHVKGFNFKDQRIMDGKWVHEPNRVMIRDFFRLLAICHTCIAEIDENEKVSYEAESPDEAAFVIAARELGFEFYKRSLATIIVRERNPSQNVVEKRKYELLNMLEFSSSRSRMSVIVKEPEGRILLLSKGADSVMFKRLAPIGRKFEEETRSHINQYSDSGLRTFVLAYRVLDEKEYKEFNEKLNAAKASVSADKDEKIEQVADSIERDLILLGATAVEDKLQQGVPECIDKLAQAGIKMWVLTGDKLETAINIGFACSLLRQGMTQIIVTLEQPDIIALEKNGDKPKIAKASKQRVMGQIEDGIKQIPPSTQISTASFALIIDGKSLTYALEDDVKFKFLDLALKCASVICCRSSPKQKALVTRLVKEVTHKVTLAIGDGANDVGMLQEADIGVGISGAEGMQ

SEQ ID NO: 63822 - protein, 624 aa, Zea Mays
MGTGGDGDKAGPALPLEALLALGLDQRTAENALVNAKVTANLAAVIAEAGIKECDKSIGNLLYAVATKYPTNALVHRPVLISYVLSTKIKSPAQLDAALSFLTNTGPDSLDVDKFEEACGVVGMLCGQVRKRHPWGDAKAVKEEIDKRLAEILGPKTEADSIKPVKKKKEKTAKVEEKKVAVATTAPPSEEELNPYTIFPQPEENFKVHTEIFFSDGNIWRAHNTKEILEKHLKATGGKVMTRFPPEPNGYLHIGHAKAMFIDFGLAKERNGHCYLRFDDTNPEAEKKEYIDHIQEIVHWMGWEPYKVTYTSDYFQPLYEHAVELIRKGLAYVDHQTAEEIKEYREKKMNSPWRDRPIEESLNLFEDMRRGLIAEGAATLRMKQDMQNENKNMSDLIAYRIKFTPHPHAGDNWCIYPSYDYAHCMVDSLENITHSLCTLEFDIRRPSYYWLLVALGLYQPYVWEYSRLNISNTVMSKRKLNRLVTENWVDGWDDPRLLTLAGLRRRGVSSTAINSFIRGIGITRSDNSLIRVDRLEYHIREELNKTAPRTMVVLRPLKVVITNLEEGKVLDLDGKMWPDASDTDASSHYKLPFSRTVYIEKTDFRLKDSKDYYGLAPATQYDGN

SEQ ID NO: 63823 - protein, 153 aa, Zea Mays
MDLERPPPASAAEAAGAAACSICLDPVLACVAGRSVAKLQCGHEFHLDCIGSAFNAKGAMQCPNCRKIEKGRWLYASGRHPPADIDMGGWVTSDNYDITSELPFGFQWCPFSGFTQLASMLGVREAEPTCKHFDLNFNMLKFFLFYCIDISLL

SEQ ID NO: 63824 - protein, 298 aa, Zea Mays
MVANRKESCYSRCGRTDKGVSATGQVISLYLRSNIKDVGGDMLDERSEIDYVKVLNRILPRDIRVLGWCPVPADFHARFTCLSREYKYLFWKGDLDILEMQKAASKFIGEHDFRNFCKMDAANVSNYRRHITEFTISACDRRSNNDELCSMTIKGSAFLWHQVRCMVAVLFLIGQGLESPSVVDSLLDIMKTSRKPQYKMAPELPLILQSCLFDKANFMCSADASRSLTEHLNDEYRHHMLQAEIFHIASSCLPFPEPNSSETPQKKRNHIPLLSRETEPSYEERISKVKAKLADNLK

SEQ ID NO: 63825 - protein, 241 aa, Zea Mays
MTAPKPGGGAAAAARAAAAGPRTVLITGVSRGLGRALALELARRGHSVVGCGRSAEHLRSLEEEITSPSRHFFTVADVRSDSSVAELAKTVVEKKQVPDIIVNNAGTINKNNKTWNVPAEDFDMVVDTNIKGTANVLRHFVPLMIEKRHGIIINLSSGWGRSAAAEVAPYCASKWAIEGLTRSLAKELPPGLAAIALSPGVVNTDMLNSCFGSSAALYQTTETWAPKAATMILSLSLDDNA

SEQ ID NO: 63826 - protein, 300 aa, Zea Mays
MAAAPSSLVSSHLSRLADLRRAAAPATPTVPQQLRVGFSRRRAQRVVAMAGSGKFFVGGNWKCNGTKDSVSKLVSELNAATLETDVDVVVAPPFIYIDQVKNSLTGRIEVSAQNVWIGKGGAYTGEISAEQLVDIGCQWVILGHSERRHIIGENDEKAAYALSQNVKVIACIGELLEEREAGKTFEVCFEQMKAFADSISNWADVVIAYEPVWAIGTGKVATPEQAQEVHAAVRDWLTTNISPDVASSTRIIYGGSVNAANCAELAKKEDIDGFLVGGASLKAPDFATIINSVTAKKVAA

SEQ ID NO: 63827 - protein, 91 aa, Zea Mays
MMLLVTPNLYGNLVANTAAGIVGGTGIMPRDFVAYGTSWSFLLWSSSSFIPMTLSPATPTRSSRPSTPSRSIWRPTRSWTSSSLTSATWSW

SEQ ID NO: 63828 - protein, 398 aa, Zea Mays
MLLRERVICLLAHELQIQEDCLGRRIGPSFLGRQGGDSTRLVQDLYRFFDQVNKEEFPSDEKLPESFRDFLLEMKDNHYDARTFAVRLKATMETMDKEVKRSRLAEQLYKHYAATAIPKGIHCLSLRLTDEYSSNAHARKQLPPPELLPLLSDNSLQHYILASDNILAASVVVSSIVRSSSLPEKVVFHVITDKKTYPGMHSWFALNSIAPAIVEVKGVHQFAWLTRENVPVLEAIENHRGVRNHYHGDHGTVSSASDNPRVLASKLQARSPKYISLLNHLRIYLPELFPNLNKVVFLDDDIVVQRDLSPLWAINLEGKVNGAVETCRGEDSWVMSKRFRTYFNFSHPVIARSLDPDECAWAYGMNIFDLAAWRKTNIRDTYHFWLKEILYCVQCSKI

SEQ ID NO: 63829 - protein, 587 aa, Zea Mays
MYLDVADSGVLPYGWTRYAQFSLSVVNQIHNKFTIRKETQHQFSARESDWGFTSFMPLGELYNHSRGYLVNDTCIVEAEVAVCKVVDYWSYDSKKETGYVGLKNQGATCYMNSLLQTLYHIPYFRKAVYHMPTTENDMPSGSIPLALQSLFYKLQYNDSSVSTKELTKSFGWDMHDSFMQHDVQELNRVLSEKLEDKMKGTVVEGTIQQLFEGHHMNYIECINVDFKSTRKESFYDLQLDVKGCQDVYASFDKYVEVEQLEGDNKYHADKHGLQVVHFRSLEKPKEDDFFLEMSKIFTYDQVVEKVAEKLGVDDPSKIRLTSHNCYSQQPKPQPIKYRGVERLLDMLIHYNQTSDILYYEVLDIPLPELQALKTLKVTYHHATKDEVSVHSIRLPKNSTVGDVLNDIKTKVELSHPNAELRLLEVFYHKIYKVFAPNEKIENINDQYWTLRAEEVPDEEKNLGPFDRLIHVYHFTKDTQNQTQVQNFGEPFFMVIREDETLSSIKERIQRKLKVPDEDFSKWKFAYISLGRPDYFEDSDTVALKFQRNMYGAWEQYLGLEHPDTAPRKAHTINQNRHSFERPVKIYN

SEQ ID NO: 63830 - protein, 455 aa, Zea Mays
MFFLASMYFAFPRHAGGPGQAFAAGIPIWVPNSERKVVPANYCYRGFLANAAGFRTIVLVPFESGVLELGSTQHIAESSGTVQTVRSVFAGTSGNKSAVQRHEAERSPGLAKIFGKDLNLGRPSVGLAVGVSNSKVDERTWEQRSAVGGTSLLPSVQKGLQNFSWSQARGLNSHQQKFGNGVLIVSNNEGAHRNNGAVDSPSAAQFQLQKAPQLQKLSVVQKTPQLVNQQPMQAQVPRQIDFSAGSSSKPGVLVTRAGVLDGESAEVDGLCKEEGPPPVMEDRRPRKRGRKPANGREEPLNHVEAERQRREKLNQRFYALRAVVPNISKMDKASLLGDAITYITDLQKKLKEMETERERLLESGMVDPRERAPRPEVDIQVVQDEVLVRVMSPMENHPVKKVFQAFEEAEVRVGESKVTSNNNGTAVHSFIIKCPGTEQQTREKVIAAMSRAMSS

SEQ ID NO: 63831 - protein, 427 aa, Zea Mays
MNQSAENLFGYPASEALGQDALMLLVDSGDHNVVNDIFRRISMGESWTGKFPVKSKQGDRFSAVATNTPFYDEDGSLVGIICVSSDSRHLEQIFCKPPTSARPQSESSRTSCDGSCSNTSRRINLLNRSPFDPQIPLQSTFASRITNLATKVTNKVRSRVSTDDYGIEREGGSGESHCSDRGAKEEPTSSGTNTPRGNAPHGPFSTDENSPGKSTNPSSDELEGKVGLHKFLSSKAEALLNKKGISWPWKVRENDGPDERNHVILLHGDQENVMNHQKVSDSSIAPDSQGAEHNLPSKNEASGSWSSYNNNSTSSASSTGSTNSSALYKVDHEADCLDYEILWEDLVIGEQIGQGSCGTVYHALWYGSDVAVKVFSRQEYSEDVILSFRQEVSLMKKLRHPNILLFMGAVTSPQRLCIVTEFLPRNC

SEQ ID NO: 63832 - protein, 109 aa, Zea Mays
MSESPIFLLDTFTNLIVYYSSTADPSVPFPPPHDCLLRKTINGLKQDRCITPKLTFIHGGKDDSTLFESYLIEEQDVDGSGLTTGSGFVAFRESVRNVAGEIIQEEIGS

SEQ ID NO: 63833 - protein, 158 aa, Zea Mays
MAFFSHHHLQQPHAQQPVLPSFRNALPVPVDGQIPAPLTFFNPPPAFPEQPAQAPLVDAVGLTAAAGLGWRQPREQELLGENSQMSSIDFLQTGSAVSTGLALSLEDRRHVGGGAGNSSGDSPLLLLPMLDDDISREVQRLDADMDRFIKAQIWTSRG

SEQ ID NO: 63834 - protein, 152 aa, Zea Mays
MPYKKLIASVVLDKNKPKIQTVVNKTDVIQNNYRTMQLEVLAGNGSLRTMVIESGLRFQVDLGTVYWNSRLATERQRLVNIFRNLDVVCDMFSGVGPLAISAAKKVKYVYANDINPNAVGYLERNMVLNKLEKKIEMCSKGFYAILNQNCIV

SEQ ID NO: 63835 - protein, 172 aa, Zea Mays
MQPPTLLPPGLLHKPLQRASTRRRNAASAATTPAGHTEPGNNLPHASHCRAPKPKPAVAVGPGTRGHQSHLPSGAPPPSPPSCACPGHLLSLPCHQTRGGPRRRRHLGRPRSPAGAPRRATGRLSPSVQPPNAQADSYFARYHCLMVKILSVRSLFLSLSISVTSSVICSSA

SEQ ID NO: 63836 - protein, 604 aa, Zea Mays
MRGSRMNPGDRRTRSTMTIVIVMGLSCFFYILGAWQKSGTGRGDSIALRVNQETDCTILPNLHFETHHTISGANPLIMSNKMIEPCHIRYSDYTPCQDQNRAMAFPRQNMTYRERHCPVENEKLHCLIPAPKGYVTPFSWPKSRDYVPYANAPYKSLTVEKAVQNWIQYQGDVFKFPGGGTMFPNGANAYLDELASIIPLADGTIRTALDTGCGVASFGAYLMDRNVLTMSFAPRDSHEAQVQFALERGVPAVIGVLGTIKVPYPSRSFDMAHCSRCLIPWESNGGMYMMEVDRVLRPGGYWILSGPPINWKKYYQSWKRSKQDAEEDQHRIENIAEMLCWDKIFEKDDIAIWQKQGNSYSCHQKDGHASKMCKVQDSDDVWYKKLESCITPPIEAAQLKKFPERLSAIPPRILEGQVPDITEEVYEEDNKLWKKHVNTYKRVNKLIGSSRYRNIMDMNAGLGSFAATLHSSSSWVMNVVPSISERNTLGIIYERGLIGIYHDWCEAFSTYPRTYDLIHGNDIFSLYQNKCDAEDILLEMDRILRPEGAVILRDNADVLNKVRSMVAGMRWKSKLLDHEDGPHVPEKILISVKEYWVGSEEQNS

SEQ ID NO: 63837 - protein, 193 aa, Zea Mays
MLEIAPSFWGRWKRRHSNFDKSIPFALLSQVAGIREYFAANPALTSELPSTVVKSKASETLIIQSEHEDSELGDEFYDALTRGESFEDGDSDDDDDATTPKARKVKLKNVSWAIAGLALKTTKALVETSELVTNSSPVTVDPSHFHGTLHRAKTQNDQNSWSAPGGEKFMIRGKTYLTDYHKEADKMWSFEMG

SEQ ID NO: 63838 - protein, 1062 aa, Zea Mays
MACHLSPLFNLRLLLLLGAVLGNAVLVRAGGAEASDRAEPDPYSILTWHDYSPPSPPLPPPDPASSTATCEGDLHGKGDFRTHCEVFEEVELGDDIYITGNGSLVLLSGASLTCEKVGCVISANLSGEVHLSRGVRVRAGRVSLVATNITVADTVVVNTTALAGAPPDRTSGVPTGTHGDGGGHGGRGASCFVKEGQTQEDSWGGDAYAWSDLEHPWSYGSKGGSTSVEKDYGGAGGGIVWLFADDLVMNGTVLAAGGDSNEKGGGGSGGSIFIRAASMYGGGKISASGGDGLAGGGGGRVSINVFSRHDDTQIFVHGGRSSGCPDNAGAAGTLYEAVPKSLIVSNNNLSTQTDTLLLEFPNQPLWTNVFVRNRAKVAVPLLWSRVQVQGQLSLLSGAILTFGLTGYPYSEFELMAEELLMSDSIIKVFGALRMSVKMLLMWNSRMEIDGGGDSIVATSLLDASNLIVLKESSVIHSNANLGVRGQGVLNLSGDGDTIEAQRLILSLFYSIQVGPGSVLRGPLVNRSSDDVAPKLNCEADSCPVEIIHPPEDCNLNSSLSFTLQVCRVEDIDVWGVVQGTVIHFNRARSVTVHTSGTISATGFGCRSGVGQGKMLRSGVCGGGGHGGKGGNGFYKGDLAEGGAIYGNADLPCELGSGSGNDSTELSTAGGGIIVMGSWDYSLPSLALYGSVESNGGSYASGSVGGPGGGSGGTILLFVHTLSLAESSVLSSVGGFGSTGSGGGGGGRIHFHWSNIPTGDEYVPVAAVKGSILTSGGVSKGLGYSGGNGTVTGKACPKGLYGTFCKECPLGTYKNVTGSSKSLCFPCPPGELPHRAIYTNVRGGAAETPCPYRCVSDRYRMPHCYTALEELIYTFGGPWLFGLFLSGLLILLALVLSVARMKFVGTDELPGPAPTHQGSQIDHSFPFLESLNEVIETNRAEESQGHVHRMYFMGPNTFSEPWHLPHSPPEQITEIVYEDAFNRFVDEINTLAAYQWWEGSIYSILCILAYPLAWSWQQWRRRKKLQRLREFVRSEYDHSCLKSCRSRALYEGLKVSNVPDLWR

SEQ ID NO: 63839 - protein, 664 aa, Zea Mays
MSFFDTYGNNGDIVSQVLSDVLLIQSAISEKVGNYIHNMATFVGGLIVGLLNCWQIALLTLATGPLIVAAGGISNIFLHRLAENIQDAYSEAASIGEQAISYIRTLYAFTNETLAKYSYATSLQATLRYGILISLVQGIGLGFTYGLAICSCALQLWVGRHLIHRGKADGGEVVVALFSVILSGLGLNQAATNFYSFDQGRIAAYRLYEMISRSTSSTNQEGTTLPQVQGNIEFRNVYFSYLSRPEIPILSGFFLTVPARKTVALVGRNGSGKSSIIPLMERFYDPTLGEVLLDGENIKNLKVEWLRSQIGLVTQEPALLSLSIRENIAYGRSATFDQIEEAAKTAHAHGFISSLEKGYETQVGRAGLALTDEQKIKISIARAVLSNPSILLLDEVTGGLDFEAEKAVQEALDVLMLGRSTIIIARRLCLIKNADYIAVMEEGHLVEMGTHDELLNLDGLYAELLRCEEATKLPKRMPTKNSREHKSLQSEDALVSQYFQESSSPKMAKSPSLQRTHGMLQFWRSDANRNSHDSPKDLSPPSEQTMDNGIPMVAIETERTPSIKRQNSFEMKLPDLPKVDVHPIQRQSSKNSEPDSPISPLLTSDPKNERSHSQTFSRPQSEQDDTSSERSELDEVQHQKPPSFWRLATLSIAEWPYALLDRNP

SEQ ID NO: 63840 - protein, 194 aa, Zea Mays
MEFGFRAGNSTQRRPSPDRRVTAQQAGPFHGDHPPPSPLQWEAAARRERIKREVERRLIEEEVRLELALERARLHGGFGPAPFLGTDGSVVPVPPPPPPPGRFSRADGPSMTPAMSWDSPRRLARFEQPMLLSETGTWSLLPKPRHTLRLREIAPSESSEVREHHCRSMPMHAACLFVFFFDILVVHILFGIWH

SEQ ID NO: 63841 - protein, 382 aa, Zea Mays
MTSSESGAPAALATAFKEAQKYSPCIILLRHFDAIGNASSNEGPQSEQSGIASNIESVIKQYIGQRWVAKDSLPGKDVNGSSYLVEPECVSSLQIILVATADSSEGMQQSIRRCFRYEIDMKTMNEEQRNELISETLQGIPKVADESICDKFIKDLAAQTSGFMPRDILALVADAGVSFAHKIAAGKDSKAISKHTEVLPESSSATQNEEHHFSKEDIMSSLERAKKRNRAALGTPKVPNVKWEDVGGLEDVKKVILDTIQLPLMYKHLFSSKLRKRSGVLLYGPPGTGKTLLAKAVATECSLNFLSVKGPELINMYVGESEKNVRDIFEKARSARPCVIFFDELDSLAPARGSSADSGGVMDRVVSQLLVEIDGLSDNSQA

SEQ ID NO: 63842 - protein, 200 aa, Zea Mays
MGVKASVLPAGTDCHHFILEDNWNNLEKPYGSIFLSIPTVLDPSLAPEGHHILHIFTTAGIEDWEGLSRKEYEEKKEVVANEIIRRLEKKLFPGLQDSIVLKEVGSPKTHRRFLARNDGTYGPMPRGKPKGLLAMPFNTTSIDGLYCVGDSCFPGQGVIAVAFSGIMCAHRVAADIGLEQKSPVLDAGLLGLLRWLRTLA

SEQ ID NO: 63843 - protein, 415 aa, Zea Mays
MVKLNKRTIVLEDKDQIQGFPKYTFSLTPLDKLDQYKNKTDRFIDVIAKISGVSNVAKVPTTSGDQQMRRVVLLEDLKGNMIELSLSGKRALEFDGDQVLDVGQQHHVIAIFVGTLVKLYKGEYTFLSGTSACRWYINENDIAEIKAFQKSLPSEPVPIKKTYLQNDDATHKFEEKSLEQLKHVDPFLDMGQRYQCTATIIGITENQTWCYKACKICNSAIIQKENGYKCTKEGCPSTQFEWKYKIPFIASDHTYNLEFMFFEKKGMELIGKSASTLRKQYEPKEIPPDITSWIGYKFTFVVRVLSKKSVKTIDPSFEVLMIKEKYQKEPIISFISSSGVVPAESSSSTMAEYKELPLLVPITSKDIEKKERSTSQPEHTEETQDMDIEPSGIWEESQISNKRSFGDPNYDKQAS

SEQ ID NO: 63844 - protein, 291 aa, Zea Mays
MADEWWSCTRAADDDDDAGGSPCSTAPATTDQLDAADEPAATSTASIDFRRPTSLLHVVRHAAVPPSSPLILADPPHHIDDWTQAYLCGRAPLAAAAAAEASTSLSALLQLHGGDAAGRHFLLAQHLHGDAADSAAAHVAAASQSSALYAAAGNQPYSSSYGGGAPAAGALMAQQPPFPHQDEFEFSSASLFVGSSSSTRDSAGVPAAAARRPAVTTTKPLLLQALEQKAFAFHSHHKERTRQHDASSATTASAPGSPAPAKKPRVVATPSPLPTFKVCAHGLLAPHRPGS

SEQ ID NO: 63845 - protein, 268 aa, Zea Mays
MAAATEKTAEDIRRELQELQRQHREITERLRDPRGLRRGAPGPGPGPGAPRPLRGFARPAVGPESGDQPPQKRRLLSAVVKVDGAENNEEGTKDADAEGHGTGSGATEGSAGRGFNNGGFRRDGGLRMQRRVDYNSLPEPAPRELPRNEDPNLVRRNKRMLGQLLVGTLEKFQQEDKKLSNSEAFLRRSETQRKAEQKVREESERLRQKEREQIAEKRKRDMTLRARVAAKAEEKRLELLYIQWTEHHKRLSNFLRYSKNGNLCAGMS

SEQ ID NO: 63846 - protein, 497 aa, Zea Mays
MPTSHDDMMDLDGPLDNTFQRSLFPENFRDPFALMDPNFQHQFFDRVGSTDGVTRGPLVSHPREVREIPIEVKDSDPQTSPSGQAPVIEDVTGHESSNGLEVHETIIIDDEDSGLLSAPSAPHASVPSNTSSEPTAPPLVHVNDYDDDIEEEMIRAAIEASKKDSEGLANIAEQGDQHQEGVNLGEHSSDKAVMRTTDGIVERQVLASGKAGTSRQPIDEESFQEETEDVEEQPLVRRRSRRAPSENTELAQMPHPGASPVLNNHQSSGGDFPSEWGGISSEEHDEAVMLEAAMFGGVFGRPMHPFSMPSHRSSTYYPQITHSSSPALAEQRLLREQQDDEYLASLQADQEKELKALQDAELHRLEETTTREVALKKQKQEQEERRKKQLEEEELESSLASKQASLPSEPPPDAEGAVTVVVRMPDGSRQGRCFLKTDKLKFLFDFLDIGRICKPGTYRLVRTYPRRTFTSSEGDVSFSDLGLTSKQEALFLEQITE

SEQ ID NO: 63847 - protein, 188 aa, Zea Mays
MTGYRSRSPSRSYSPRRRYSRSPPRRKRYDDPRDRYRWAGAGGGGDRRGYGRPLAQSGLLIRNISLTARPEDIRATFEQFGPIKDVYLPRNFHTRELRGFGFVKFRYPEDAAVAKREMHHQVIGGREISIVYAEENRKTPQEMRMRTRTSGRYMDERYTRLSRSPRSRSHSYSPPPSPVRRDFSQQRI

SEQ ID NO: 63848 - protein, 414 aa, Zea Mays
MAREILILRRLDHPNIIKLEGLVTSRMSCSLYLVFEYMEHDLAGLAASCDVKFTLPQIKCYIQQLLSGLEHCHDNNVLHRDIKGSNLLLDNNGILKIADFGLATFFDPRHKRPMTSRVVTLWYRPPELLLGATEYSVGVDLWSAGCILAELLYGKPIMPGRTEVEQLHKIFKLCGSPSEEYWKKSKLPHATIFKPQQPYKRCIRETFKDFPTSALPLVETLLAIDPAERQTASAALHSDFFSTEPYACNPSSLPTYPPSKEMDAKLRDEEARRLRAAAKAKGEQKRTRPRDRSRRAGPAPEANAEIQANLDRRRMITHANAKSKSEKFPPPHQDGGTGNPLGSYHHMEPMFEHQDASFSTVVPIEKGTSQTWSGPLFDPAALGQSRRKKQTTLDAKAAAYSKQLQKEKGGIRAR

SEQ ID NO: 63849 - protein, 579 aa, Zea Mays
MDNLITLVNKLQRACTALGDHGEESALPTLWDSLPAIAVVGGQSSGKSSVLESVVGKDFLPRGSGIVTRRPLVLQLHRIDGDREYAEFMHLPRKRFTDFAAVRKEIADETDRETGRSKQISPVPIHLSIFSPYVVNLTLIDLPGLTKVAVEGQPENIVQDIENMVRSYIEKPNCIILAVSPANQDLATSDAIKISREVDPKGERTFGVLTKIDLMDKGTDAVDILEGRSYRLQTPWVGVVNRSQQDINKNVDMIAARRREREYFATTPEYKHMASRMGSEYLGKMLSKHLEQVIKSRIPGIQSLITKTIAELETELNRLGKPIANDAGGKLYTIMEICRMFDSIYKEHLDGVRPGGEKVYHVFDNQFPVAIKRLQFDKQLSMENVKKLITEADGYQPHLIAPEQGYRRLIESCLISIRGPAEAAVDAVHAILKDLVRKAINETHELKQFPTLRVEVGNAAFESLDRMRDESKKNTLKLVDMECSYLTVDFFRKLPQDVERGGNPSHSIFDRYNDSYLRRIGQTVLSYVNMVCSTLRNSIPKSIVYCQVREAKRSLLDHFFTELGARESLPHAICKTPLM

SEQ ID NO: 63850 - protein, 427 aa, Zea Mays
MQHEEVCDTTTCGEGNGRGGEEELEMEGHSLMRMKRRDHLLLTDGAGAGAGAGPLAVQTPMEPMEFLSRSWSVSASEISKVLAGGVGGRRSSNFVVDRLSGMLMPETLALAASSSSAGTNNISPRKRTLRSRSAISAHQVHHTVHAIGKWFHHWDAGSSKVDKARAERARVHAAVSVASVAAAVAAVAVAAGASPEVDVTDDGARMGSALASATQLLASHCVEAAELAGADHDQVASAVETAVDVRSPGDLLTLTAAAATALRGAAAMRHRAQREARSRAAVAPYDKACSYRADVWCKEGALLKRNRKGALHWKQVAVYISKKSQVIVKLKSKHIGGAFSKKKKGVVYGVYDDIPAWPAREGVAAQSSAPETCHFGLRTAHGLLEFQCESRAQRRDWVEAVKDLIRQVAGGTALLEHSFESLRLSAS

SEQ ID NO: 63851 - protein, 1771 aa, Zea Mays
MDPDAGGAGAGGRAGFERACRLPNTVHSEVLPSLPLPTLPRELGFDALRDDEPLAAPDRPDMIMQAANIARILADTDVSHLGFTAADNVEVDPSRCSWLWREVLKHNPDAFKVKAPGPSSQGPFGGPGYHNQEREKHFEHLTPNMSKTRNGSAFSQDEINSHREHFRNELTPDSVASKKPKVRKKEINNSVSTSPHSIPNNQEVIATFCEAVEDFCGKAEIPDDGDGGDWLSIPLDDVKVLVNEITSVRSKRILHEVPMDTVTRLLDVIDRQIRCSQGLSIDVKENSDAFDAEPLVFSALESSHAALAIMTHHDMPKQLYREELIERIIDFSRHQITDCMAASNPTFRALYKPAGNVANDGDDDEGDLENGQVSKRRRTATNLSMRKSSNRVSASVYSAVQKLCLILGFLKELLTTVRLSDSCILQLAKTCFTTFLVDNMQLLQLKAIGVICTVFSSYTQHRSYLVDETLHLLRKLQFSKNAVRTYHLADEDQKQIQMITALLVHLVQFSAIVPDSLKGTVDWTTIVDASSDADYYPIQCHEAATEACCRFWTDVLQRFTAAKSQDMSETKGIIDNLVQDFLTILNLPEYPAAASILEVLCVLLLQNAGLKSKDINARCFAIDLLGGIASRLKRDSVVCSEEKLWILQDFTDKGSDGSIFLKNKCCVCLGGRGINIACNECGRCFHSDCMGAGSQDNLQRDSVCPLCFCKQQLNVLQSYCQSQIKENGKKTAASASKKSAKPTEVSAVEIVQQILLSYLQEAGSQDDGNLFTRWFYLCIWNKDDQHSQEKIIYYLARLKSKEILRDSGNGLAISRDSAKKICLALGQKNSFCRGFDKILALLLASLRENSPVIRAKALRAVSCIVEADPEVLGDKRVQYAVEGRFCDSAISVREAALELVGRHIASHPDVGLKYIEKVAERIKDTGVSVRKRAIKIIRDLCASNPNTDTTHAFVEIISRVNDEESSVQDLVCKTFYELWFEEPTGSHKHLVADGSSVPMEIAKKTEQIVDMLRKMPNHQPLITIIKRNLTLDFLPQSTKAAGINSSMVASIRKRCELICKRLLERILQVEEGAANEMEIHTLPYIVALQAFCIVDPTLCIPVTDPSKFVVTLQPYLNIQVDNKSSAQLLESIIFVIDAVLPLIRKPPQNVVEELEKDLKHMIVRHSYLTVVHACIKCLCALSKSAGRGPGLVENLVNIFYKHLCGANSDSQLLGRSLFCLGLLLRYGYQLMLTSENQLDFPKIINLLQRKYLLKDDFSLKVRALQTLGYILIAKPEFMLQKDMLNLIETALSSEVDYRFKIQGLQNLYEYLRDAESQLTAESTAKPPGQCEINGRSEVPVAAGAGDTNICGGIIQLYWSSILERCLDTNDQVRQSALKIVEVVLRQGLVHPITCVPHLIALEMDPLEGNSKLAHHLLMNMNEKYPSFFESRLGDGLQLSFKFFESIVSNHKMSANIKSNPIAFVKPGISRIYRLIRSNRNSRNKFVHSIVRKFESDSRSRSTVSFLVYCAEVLASLPFTCSDEPLYLIYDINRAIHLRAGGVEGNLKRWTSMSQSQEMAGMPTLPGESHVVMQEEPGGYYDNMGDATERVNDNPCSTSDVDIAKVQGDCHDAIALQLLLKLKRHLKVVYGLDDARCQAFSLKEPPKSGETFSRQNVSFNIGNTNLSLPSCLQDAASVYQDFKTVLREDSMDFAVFVPSVQTRKRPTPRNTTSPTPRSMTRVRRTAAPSVTKARGGARGDDSDDTDDDDWTGGPRVLDFSGGGRVTRQRVQV

SEQ ID NO: 63852 - protein, 281 aa, Zea Mays
MAHQKREGSYADDDSTSKRIKGTDTASETGDSVESSVSQQMDAEARRTCQKESEAPSDKCVSDGECAANSKVLGEQKMVLTVVEADAADDKGCRHTMEDAWVVLPNAGAESPGSLRCVHFAIYDGHGGRLAADYAQKHLHQNVIAAGLPRELMDIKAAKKAVIEGFRRTDESLLQESTKGNWQDGATAVCVWILGQTVVVANVGDAKAVLARSISTEGEGVVDETKSQLKAIVLTREHKAIFSQERSRIQKAGGSVGSNGRLQGRIEVSRAFGDRQFKKVC

SEQ ID NO: 63853 - protein, 82 aa, Zea Mays
MQLRKMCKEGAYWGTVAGVYVGMVYGVERVRGRSDWKNAMIGGALSGALISGASNSDRGKVVKDAITAGAVATAVEFINCIT

SEQ ID NO: 63854 - protein, 98 aa, Zea Mays
MKEEIEGREHSGSEDKFSVILSSDDSAAAAGFAVACGHWHPRASPRASASPEQLASRPRGIHHSPYGGNVDRPQSALLFQWQYVYGHYEASYWSSQCG

SEQ ID NO: 63855 - protein, 497 aa, Zea Mays
MAGTPQFQSPHFPPPSPPLGPTFVPPAMNSGGRGGKRRGPPPLAPSGAAAKRVNPSPGTPHVPPPASAAAAVEEDMMDEDVFLDESILAEDEAALLMLQRDEALASRLARWKRPAIPTDLAAGCSRTVAFQQLEIDYVIGESHKELLPSSSGSAAILRIFGVTREGHSLCCQVHGFEPYFYIGCPSGMGPDDISRFHQTLEGRMKESNRSSNVPRFVKRVELVQKQTIMHYQTQQSQPFLKIVVALPTMVASCRGILERGITIEGLGSKSFLTYESNILFALRFMIDCNIVGGNWIELPAGKYRKAACIMSYFMSILNTTNRYSDLVSHAAEGEYSKMAPFRILSFDIECAGRKGHFPEPTHDPVIQIANLVTHQGEDQPFVRNVMTLKSCSPIVGVEVMSFDAERDILLAWRDFIREVDPDIIIGYNICKFDMPYLIERAEVLKIAEFPILGRIRNSRVRVRDTTFSSRKKMFIIQLYLIFKMETQRHEGDLQFIA

SEQ ID NO: 63856 - protein, 99 aa, Zea Mays
MALRASPVSHRMAPTAEGRGSATAAVRAEEDGPWGVSGHGVHHHQQVSTVDPSPLAVFLTYSSRQVAAPSTPSRVPELLDLDYASAVSSYSVCDRARIC

SEQ ID NO: 63857 - protein, 381 aa, Zea Mays
MERPRCYSPLALHLLLCLFSLRACSAASITAGTPDESELWGYVEVRPKAHLFWWYYKSPQKTSTPSKPWPTVLWLQGGPGASGVGLGNFLEMGPLDVDLKPRNSTWLHKADLIFVDNPVGTGYSYVEDDSLFVTSDWQQAADMTTVVRALAKEVPTLASSPLFLVAESYGGKYAATLGASIARAVRAGELNVTLGGVAVGDSWISPEDFTLSYTPLLLSVSRLDDNAGDEANKKAETVKEQIVAGQWAASQKSWGSLLDFIDTKSGNVDVYNFMLDSGMDPVALPVGSSSLMSSLQAMKYSTYGQDSQPGSNTIDGIMNGVIKQKLKIIPKNFTWGEQSDSVYNALVNDFMKPKIDEIDELLSYGINVTVYNGQDFNDASG

SEQ ID NO: 63858 - protein, 260 aa, Zea Mays
MQIQVQRQLNEQLEVQRHLQLRIEAQGKYLQAVLEQAQETLGKQNLGPANLEDAKIKISELVSQVSNECFSNAITDVKESSSVHRLEPIQIEFVESSTNSYLSVAEGFIKEHKLQHHGVLKAYDDSSLFCRKRSHEHETQFALNRSLSEHRMAHLQNEEGYHKAEFGYESDTEMAHEYTAPQKNGRCSTTSSASGSKVDAEKLYLEEQKCARQAVEYPRESKLVDFEHPCSVNKLDLNTHNVDDTNQAYRHFDLNGFSWG

SEQ ID NO: 63859 - protein, 95 aa, Zea Mays
MKGNIEIGSVREVNVKSGLPATRSTERLELLDDDERILSVRFVGGDHRLQVCSVLHLSIFCAAHARYFAHHLKCVLEFLCQMHLDVLPCDDAILE

SEQ ID NO: 63860 - protein, 347 aa, Zea Mays
MNLKYMDTISLHYCNCSSYLISSELHKKETCEAVTIIETPPLVIVGLVAYVKTPRGLRTLNSVWAQHLSEEVRRRFYKNWCKSKKKAFTKYALKYENDAGKKEIQLQLEKMKKYASVIRVIAHTQIRKMKGLKQKKAHLMEIQVNGGTIADKVDYGYKFFEKEVPVDAVFQKDEMIDIIGVTKGKGYEGVVTRWGVTRLPRKTHRGLRKVACIGAWHPARVSYTVARAGQNGYHHRTEMNKKVYKIGKAGQETHDASTEFDRTEKDITPMGGFPHYGIVKGDYLMIKGCCVGPKKRVVTLRQSLLKQTSRLALEEIKLKFIDTSSKFGHGRFQTTDEKQRFFGKLKA

SEQ ID NO: 63861 - protein, 158 aa, Zea Mays
MVDKKPQPAENQREPPPDHAGSKETNKQDVAAWKPKASPKHEGNKPPATDVPPQKQPPYGYPHPGWGGGEGGYYGGGGGGYPPPPYQAGGYHGGGGYGGAHMGWPAPAPPAGAYAGYGAYHGGYGGGHGGAGSYAGNGKYTLRNEGKFKHYAHLHGKF

SEQ ID NO: 63862 - protein, 84 aa, Zea Mays
MAKGEVPAIGIDLGTMYSCVGVWQHNRVKIITNDQGNHTTPSYVAFTDTERLIGDAAKNQVAMNPTNTVFGNSSGIASMLCMTF

SEQ ID NO: 63863 - protein, 163 aa, Zea Mays
MAPQISRLDHLPTPQNFDYKTALLPWSSKKKGTKERDLDPHTSRLSSSRPKDNENIKQENQRKQSKSIALEAKRAPRRRRPATSHVRRTRTHRCIYGAPEPAVGRHGGRAAPGLRPRQAPQLQRRRPGERAGRRSCAGKPGWAAAAVTTPPARRGAPPCTTGW

SEQ ID NO: 63864 - protein, 193 aa, Zea Mays
MALPPGAGAVAPATPFAANPCRLRRASGPPAAALRLGPLFWPWEKVKIGPLSVSPMGFGTWAWGNQLLWGYQESMDNELQDCFNLALRNGINLFDTADSYGTGRLNGQSERLLGKFILEFEGRIKSPDDVVIATKFAAYPWRLTSGQFVSACKSSLERLQLDRLGIGQLHWSTANYAPLQERALWDGLVEMAL

SEQ ID NO: 63865 - protein, 371 aa, Zea Mays
MTGSAWDIVQSFAPRDQGSELGLGGSVDSRCNSDKEEENDVEDGDAAVEGELKELRIGETFEGFTGTSSLSTTNDDDASSTTTEAMFIISPNGKFKRNIKSWMRGALLGSGSFGMVYEGISDEGAFFAVKEVSLLDQGSNAQQSIVALEQEIALLSQFEHENIVQYYGTDKEESKLYIFIELVTQGSLSSLYQKYKLRESQVSAYTRQILNGLVYLHERNVVHRDIKCANILVHANGSVKLADFGLAKEMSKINMLRSCKGSVYWMAPEVINPKKMYGPSADIWSLGCTVLEMLTRQIPFPNVEWTNAFFMIGRGEQPTIPNYLSKEAQDFIGQCVRVDPESRPSASQLLEHPFVNRPLRASFESSSPPAI

SEQ ID NO: 63866 - protein, 74 aa, Zea Mays
MCSSPPPPPGVALLNSKSRPPSVSPLLLSRVLHCYSASTQVPALLPSAPLQVRCSASLSGCADQAIHEWEMEEI

SEQ ID NO: 63867 - protein, 642 aa, Zea Mays
MPQGPIWNILHFGTYKNVVGSNSSLCIPCSVDSLPNRAEFIYIRGGVTELPCPYRCISDKYKMPNCYTPLEELMYTFGGPWSFSIILSLTVILLALVLSALRIKIGESDITYRATNAIHNDGCSFPFLLSLAEVPGASRAEETQSHVHRMYFMGPNTFREPWHLPYSPPDAIIGIVYEDAFNRFIDEINLVAAYEWWEGSIHSILSVLAYPCAWSWKQWRRRKKNHRLQEYVKSEYDHSCLRSCRSRALYKGLKVGSTPDLMVAYIDFFLGGDEKRLDVASTIQKRFPMCLIFGGDGSYMSPYYLHSDTLLSNLLGQYVSTAIWNRLVAGLNAQLRTVRQGSVRSTLGPVVSWINSHGNPQLERHGVRVELGWFQSTASAYYQLGIIVAVNENFYKNLRHHEHATEFCERSRKNVAVPLQDFNQANLDQPCTSYAVSRKRLTGGVNGGIINEGTLKSLHYKRDYLFPFSLLLRNSRPLGYAETLQLLICIVLLGDFSITLLMLVQYYWISVGAFLAILLIPPLALLSPFLAGLNALFSRGLKRSSVTRIFALWNITSVVNIIVAIIYGSLYFWLSSLAVSSVHQVYNTKSFKSREDNEWWILPTILFLIKSLQAGLVNWHVANLEIQDYSLFSPDPDRFWAM

SEQ ID NO: 63868 - protein, 219 aa, Zea Mays
MESPISRTNLNCISLADPNVQKSVALLKGLGTSFLGNLVSFHKACLDSGFFYVVDHGISQEFMDEVFAQSKKFFDLPHSEKMKLLRDEKNRGYTPMLDEILDPENQVNGDYKEGYYIGVEVPADDPEANRPFYGPNQWPSKEVLPKWREVMEQYHREALIVAKSVARIIALALDLDVDFFDRPEMLGESIATLRLLHYEGGQETGHAFVSDGYFTPQGT

SEQ ID NO: 63869 - protein, 1276 aa, Zea Mays
MPPKKRAAAAASSKKPQPSQPSQPAKFGILHFFERQTQASQNAKRQKPDPPAPPPPPPPPPEKEPSEVSPEVTKTLAPKRVRFSPGMLIKQSQDDGVAEVVTWKISPVNHRLGTTKSKQFLGMAPHPYSSEKNSSLDAMKKWHSSPLGLSRCTTLGSNSGVLGSAIVGCDGVGDTQSPFRTPPSLSYGCNEQQVSSGVTSEGGAEPSGAGQHKKALLDLLDQVEDAIMEEELPADPGNKGGQTTNEDITNNSRSPVADTDLTIPSKKTIHVPPFNSFLVLEVSEKHKADDSSCDRYPVKVLRLLNEHSGTECAVHLCDEWFDSIVGPGDTVNVIGEFSNHGKCIVDHDNNLVIVHPEQLISGTRAASSFQCLRRSVLDERLKSNEYSTSALTGTLLHQVFQAGLLNDAPSWQFLEQQAKEVLLKNIETLYACGVNESNMYSTLIEAIPKMLNWFKCFLKGSKCSDVDFGHNEVRKTVGVTEVMDIEEMAWAPRYGMKGVIDASVRSRVESHNGGSYDRIMPLEFKTGKATSGQAAMEHSAQVMLYTLLMTERYLNEDIDLGLLYYLHTDQTLGIKVKRTDLIGLIMRRNELATEILKASMSQSFPPMLQSPSTCNRCRHLISCTIYHKAHGGSGTTSGLGDLFDNLVNHLTVTHHNFLKHWDRLIDLEARASQVKKNILQPHNSNYGSGSSAVPYFVLDIKNGHSIDSSGKSKRYIYNFVQQKMQPETADQLDAQFDSIDFSLKVGDFVVLSTQSGRIAVANGCIREIISHSHITVSLPRRLRIPDSNSLSEQEDLTREIWRIDKDEFSSSFGIMRLNIVQLFAQNPQNSHLRKLIVDLEAPRFDSGGLFSQDPALSYIRSLPNLNNDQQRSLHKILGAKDYALILGMPGTGKTYTMVHAVKSLLIRGESILLTSYTNSAIDTLLMKLKTEGVDFIRIGRPEAVHPDVRAHCLSTTEAQSVDAIKARMEQVQVVGVTCLGMYHPLLAHKKFDTCIMDEAGQITLPVSLGPLMLATKFVLVGDHYQLPPLVQSSEARENGMGISLFWRLSEAHSQAISALRCQYRMSSGIMELSNSLIYGNRLCCGSLEIANAKLKFSGREPMQLKLKEILNPDRAVIFANTDQIPALEAKEHRTVNNPTEAHIISWIIKELLRRGVAQDAIGIITPYNAQVNIIQQYTDCLVEVHTIDKYQGRDKECIIVSFVRSTANSRASGSSLLGDWHRINVLLTRAKKKLIMVGSRGTLSTIPLLRLLVDKVAEIGGLLDLTNKDAHSFSRT

SEQ ID NO: 63870 - protein, 735 aa, Zea Mays
MALRHLVTGQNNCAPDGASSSNPLNALANAFLGQSSKAQSIKELPGSVSVPSTSGFSAPAPLSNIPGSENEFKQDQRPFVQGSDFIHGGPANDWIKSFRPPGVPELGGIEAHFPDFEQIYNNAGTTFQPPLDGPPQRVLSGVLHSFLTSGPAGVPFQPLPVPAALGLSESDKQCIRDRSCIMARHIFSDQPEEYIQAQVNTLLHSLDIDNRMRGPMHGQYPELQEYWNQSQSSMGPALMHNTADKWITEFGKQNNNPENWAKSFEQQYGPNGWASEFEQHQSQMAMGQMGGVNMANLAAMEQSRMLAQTLASNNDPKFQNSKFFQFVSKMSRGELIIEDNQVKEGLASQSSGWADEFQTQYKANANSWADQFAREELSQGADKWVSEFSSQHNQGALNESWVDEFSKLNVTDEWAEEFSGGGFGESSADPWVDEFQEHLSSFKQSSGASRGVYVYSENNPYVGHPNPMQEGQELFRKGLLSEAVLALEAEVLKNPDNAEGWRLLGITHAENDDDQQAIAAMMRALEANPTNLEVLLALGVSHTNELEQGEALRYLYRWLQNHPKYGGLVPPQSTDSPYGPDVVRLFNDAAQMSPEDADVHVVLGVLYNLSREYDKAITSFKTAVQLKPQDYSLWNKLGATQANSIQSADAILAYQQALDLKPNYVRAWANMGISYANQGLYEDSIRYYVRAVTMNPKADNAWQYLRISLGNASRADMIAACDARNLDALQKEFPL

SEQ ID NO: 63871 - protein, 132 aa, Zea Mays
MDRRRAPLPITSVGTLSKQKAPVGNDATVSRDAVISGPNFLGRSSGSSRRPVISSSRDAVVTDSSEPSRARTTDASPGVFRRASGPQRSSPVHSAEQKRSSSGRHPSNAKNYDSALKGIEGLTLDGDERVQY

SEQ ID NO: 63872 - protein, 532 aa, Zea Mays
MAYHLISSPLFLLAQLLAVAVPLLLLLLHQRSSIRRRRRSSSSRSAKQGGQLLPPSPPALPIIGHLHLVSDLPHVSLRDLAAKHGGDDGLMLLRLGAVPTLVVSSPRAAEAITRTHDHVFASRPTSTLSDEILYGSSDIAFSPYGEHWRQARKLVTAHLFTVKRVHSYRRARKEEVRLVVAKVREAAVAGTATDMSLAMNTFANDIISRAVSGKFFRAEGRNKLFRELVEANSALFGGFNLEDYFPGLARALGFLSRRLLFLRNRRRVQETHRRWDELLETILSDHEGRRGSVSVDGGGDFTDVLLSVQTEYGMTRDHLKAILVLAMAELMRNPQQMAKLQAQVRRHTPEGQETVEEENLSDMPYLRAVVKETLRLHPPAPLLVPHLSLADCVVDGYHVPSGTRVIVNAWALGRDPGSWEKPEEFLPERFMDGGSAAGVDIKGNHFHFLPFGAGRRICPGLNFGMATVEIMLANLVYCFDWQLPMGMEEKDVDMTEVFGLTVHPKEKLMLVPKLPATAAPTATARQLHPPSC

SEQ ID NO: 63873 - protein, 552 aa, Zea Mays
MAYHLISSPTFLLAQLLAVAVPLLLLLLYHGSSIRRRRRSSRSAKQGGQLLPPSPPALPIIGHLHLVSDLPHVSLRDLAAKHGGDDGLMLLRLGAVPTLVVSSPRAAEAITRTHDHVFASRPTSTLSDEILYGSSDIAFSPYGEHWRQARKLVTAHLFTVKRVHSYRCARKEEVRLVVAKVREAAVAGTATDMSLAMNTFANDIISRAVSGKFFRAEGRNKLFRELVEANSDLFGGFNLEDYFPGLARALGFLSRRLLFLRNRRRVQETHRRWDELLETILSDHEGRRGSVSVDGGGDFTDVLLSVQTEYGMTRDHLKAILVLAMAELMRNPQQMAKLQAQVRRHTPEGQETVEEENLSDMPFLRAVVKETLRLHPPAPLLVPHLSLADCVVDGYHVPSGTRVIINAWALGRDPGSWEKPEEFLPERFMDGGSAAGVDIKGNHFHLLPFGAGRRICPGLNFGMATVEIMLANLVYCFDWQLPMGMEEKDIDMTEVFGLTVHPKEKLMLVPKVARVLQLLVNNSIVQVADRRDSRSIMHVYGLFGVENCMQRV

SEQ ID NO: 63874 - protein, 341 aa, Zea Mays
MALVKSDAEEEWSDSDFDDASDSEVAEALDWLDAVEGPDGSARPHVAFSASGGGAAARRPNAHGGVLSRPLQPLSNRTQKLASHISATPLEEWEGRMNVAMSNSVTTAIRDSIRDTAIGKIRNTEKADRATVEQAIDPRTRMVLFKMLNRGVFNNINGCISTGKEANVYHATKTDGQELAIKVYKTSVLVFKDRDRYVQGDYRFRHGYCKHNPRKMVKTWAEKEMRNLLRVRAAGIRCPAPLLLRLHVLVMEFIGKGGWAAPRLKDAALSDDKLHESYFEIITTMRTLYQTCKLVHGDLSEYNILYFEGHLYIIDVSQSVDLDHPSALDFLKEDCLHVSHF

SEQ ID NO: 63875 - protein, 206 aa, Zea Mays
MEKRDLAKSILLELESEHHLKVQEEVRSKLALLEVCHQNEIHRTISAFARLQKYAESRKEIDRRLDVHFQRRMAEVLDKHLSMVQRDHEQKSQIVERRIRDDAALEEAKRKEQAVKEEKLRQERAQQEAEARQKEAAKLAAEARKTAFEAAKKEAAEKQAAKLRDAAATSQSSPDLQNNIAGWSYVKGGPGAVLEPTVCNRKVPGS

SEQ ID NO: 63876 - protein, 506 aa, Zea Mays
MYFLSTQRKSEDGPEVHIHWKGAAEIILDSCTSWLDTDGSKHSMTPEKIAEFKKFIEDMAVASLRCVAFAYITHEMDDVPNEDQRAEWKLPEDNLIMLGIVGIKDPCRPGVRDSVRLCQAAGIKVRMVTGDNLQTARAIALECGILDDPNVLEPVIIEGKAFRVLSDLEREEAAEKISVMGRSSPNDKLLLVKALRARGHVVAVTGDGTNDAPALHEADIGLSMGIQGTEVAKESSDIIILDDNFASVVRVVRWGRSVYANIQKFIQFQLTVNVAALIINVVAAVSSGNVPLNAVQLLWVNLIMDTLGALALATEPPTNHLMERPPVGRREPLITNIMWRNLIIMALFQVSVLLTLNFKGISLLQLKNDDPAHADKVKNTFIFNTFVLCQVFNEFNSRKPDELNIFKGISGNHLFIGIIAITVVLQALIVEFLGKFASTVRLSWQLWLVSIGLAFFGWPLAFVGKLIPVPKRPLGEFFACCCICKGSKQAPDDATSNDKEDNKPEP

SEQ ID NO: 63877 - protein, 74 aa, Zea Mays
MAGSAADAEQEQKRAAAAAYDYEGDARWAEYWSNVLVPPNLASRPDVVDHLKRKFYQRYITAPEHGMLDRDSMC

SEQ ID NO: 63878 - protein, 254 aa, Zea Mays
MIGRRSMDKSRSAGLPPEVSFMLDLWYEETLLRYYAPALGFLMFAVGVNSSAKDLIETIKRPDAIAAGYIRQFVKLVTVDDPFITTDYMVSGGSTGSWPGSPSRNVGKIDEASELRRTVSDIKHNVQTQLSENAKTNKRVIGIHKELQKLLREAIQNTINSVTMVATLIASIAFVVIFNLPGQYFQDVNSGGDIGEAQTTMIVSEAVVVDTRRTGRTKHLPSRGRALSKQPATKAFAGAAGGVQRRGNQEGYCC

SEQ ID NO: 63879 - protein, 70 aa, Zea Mays
MSSVFPSAHLAFASIDLNAHTVFAITTALAILQTVCLRNLSLLSYLSADGVMATIAVILCLFWVACSGLL

SEQ ID NO: 63880 - protein, 202 aa, Zea Mays
MRMACNITCPSIEIGGYGDALLNLIYASPSSQFEELSLECELDATGNHSRVKDAQVHGSPIPESNGRLSTTAQTKMMSTVSEDAILVGSSFRYQSSLGNNNKRVGLFDMGDGSSEPAAEDNNQMHQVYHGFYSAYDNTTLLYEILKSIKWARKTYVNRPVNVVGHSIGGDLASFCALDLFDVELMTFGQPRLGNPAFVVCLG

SEQ ID NO: 63881 - protein, 260 aa, Zea Mays
MNHVSVGRGLKAAMEGGINRKDLFVTSKLWCTELAPDRVRPALEKTLKDLQLDYLDLYLIHWPFRLKDGAHMPPEAGEVLEFDMEGVWREMEGLVKDGLVKDIGVCNYTVAKLNRLMRSANVPPAVCQMEMHPGWKNDRIFEACKKHGIHVTAYSPLGSSEKNLAHDPLVEKVANKLDKTPGQVLLRWALQRGTSVIPKSTRDERIKENIQVFGWEIPEEDFRALCGIKDEKRVLTGEELFVNKTHGPYKSATEVWDHED

SEQ ID NO: 63882 - protein, 372 aa, Zea Mays
MSTMAQLVPWRSHSPVEYKEGRDKDYGTSGKKDKSRDLDDTCDARRGHETDRHSDKHSFGTSRESKKHDDYRRYHDKYGDDYGRSHPRASRSDRESRADTYYDRSKHDNTSGRSRGDQRDVGSRYGEKSVNRDQRSINEGKQESPRGYQKNDGGEYNKHMDARKQEYKGYGDDRDHYRVVRKNKETIKEEEDSKRRNGKEIEKEALVETRDKKRSLFSSTGPNVDNPDVKLSSATNEALDNAAETVDGVNAAKVAAMKAAELVNRNIAAFGAGTGRLSTDQKKKLLWGNKTSNPSEETSKRWDLFSDRERQEKFNKLMGVKSSAPVQENTVENKVGSSAEEAKKLEELDTNLEKHYIAGLRRRDGRTVGLGL

SEQ ID NO: 63883 - protein, 1055 aa, Zea Mays
MEQEEYKSEEINWSYIEFIDNQDVLDLIEKKPIGIIALLDEACMFPKSTHETFATKMFRNFSSHLRLERTKFSETDFTISHYAGKVTYQTDSFLEKNRDYIVAEHCNLLSSSRCPFVSGLFTSLPEESIRSSYKFSSVASRFKLQLQALMETLNSTEPHYVRCVKPNSANRPQLFENQSVLHQLRCGGVLEAVRISLAGYPTRRTYAEFVDRFAVLVPELMIGSYDEKMMTKGILEKMKLENFQLGKTKVFLRAGQIAILDMRRAEILDNAARHIQGRFRTFITRKEFVKTREASISIQAYCRGCLARKMFANRRETAAAVIVQKYVRRWLLRRAHLQACLAALLIQSYIRGFIARRYFSVIREHKAATVIQSTWRRRKFVILFQNYRQATVAIQCSWRQKLARKELRKLKMAANEAGALREAKNKLEKKMDDLALRLTLERRLRASSEESKSVEILKRDKIIESLSAECAAAKSAAQNEHAKKLLLQKQLDDSLREITMLQSKKIMSAEAAEENSNLKNLVESLSTKNSILENELIVTRKSSDDTMEKLKEVEGKCNHLQQNLDKLQEKLTNLENENHVLRQKAFNMPTMNNLSVAPKTLSEKFSASIGLPNSEPKHIYESPTPTKYLASLPQTLSTSRRSRLPVERHEQNHEILLRCIKENLGYKDGKPVAACIIYKCLLHWRAFESERTAIFDHVIEAINDVLKGNEADGRLPYWLSNTSALLCLLQRNLRSNGLFTTPSRRSGGALGKIAQTLRSPSKFIGRSDTLPHVDARYPAILFKQQLTACVEKIFGQLRDNLKKEISPLLNVCIQAPKSTRGQSGKASKSSGVGAHPASNSNWDNIVNFLDLLMDTLRENYVPSFFIRKLITQLFSFINIQLFNSLLLRRECCTFSNGEYVKAGLSLLEKWITDVTDEFAGTSWHELNYIRQAVGFLVIHQKRKKTLEEIKQDLCPSLSVRQIYRICSMYWDDKYGTQGISTEVVAAMREMVNKDTQNLVSNSFLLDDDLSIPFSTEDLSMAIPSIDYADVDLPESLQHYTSVQFLLRQQDPQPAQ

SEQ ID NO: 63884 - protein, 512 aa, Zea Mays
MVMTSCLPKGGRVLSVSIYPSEFGLKCMEIESTQGPAALVNANVDKKDSDEDEDDTDDDEESTDDDVDEEEEEVDSDKENNKLRAYELNRLRYYYAVVVCDSSATANHLYMTLDGTEFLKTANVFDLQFIPDSREFKHPARDAATEAPPSYKEPDFETRALQHSRVKLTWDDDEPERKKVLRRKFNDDQLDELNMYLASDDSASDNEGVDDSEDESLPNGGSKRKLTKEERLALLLQGDKSDEEQTDDQDMEITFNTELEDLSKRILERKNNEEKTIWEKHQEKMKEKRKGRKRGLKDEDDDNHYISDDEPENDDDFFADEQSDEEPKPSKSKKHKAKAKGEAKRKGNDGTTDEHLEQEATKDELELLVAGDQDTANGAKGYNLKRKKGKKGKEESADDKLPDIDLSKDERFSAMFTSHLFALDPTDPQYKRSAAFMRKQAGKPGVHGGKSSREPPLEGSSLGGTVPPDDAVTNNDGQKPDGSATEKLQILSAVKSLKRNLGAFKNSKTGDR

SEQ ID NO: 63885 - protein, 455 aa, Zea Mays
MAASSPRKRLPAARLIFALLLMSSVLPRDAGAVELGLKLPFSPGDVLPVLPRQVAWPVMNTLHSAVDLLPSFVAAVAPGAPAPAAWKGACFSENEAAIELTPGDRNGTDVGGAVLRLKTASAHSWACMDLYVFATPYRITWDYYFAAREHTLEIKSWEEEAELKYVKEHGISIFLMPSGMLGTLLSLIDVLPLFSNTAWGQHSNLAFLEKHMGASFEKRTQPWVANIRKEDIQSGDFLALSKIRGRWGGFETLEKWVTGAFAGHTSVCLKDEKGDLWVAESGYENEKVMAVMSMWTRLQPVYAANMWNEALNKRLGTEDFDLQGIIMEIERRGMSFDQLLTIPEQDEWVYSDGKSTTCVAFILAMYKEAGIFTPFSESIQVTEFTIRDAYMLKIFEDNPARLPGWCNAGTDKLPFCQILGEYRMELPEYNTIEPYAKMNENCPSLPPTYKRPARC

SEQ ID NO: 63886 - protein, 131 aa, Zea Mays
MILYGIYLYTTVSHTTYMLHFSCRSELVGDQKQATQLEDGTATGSRMVGRGGYATRVKALLPVNAADCGHLLRRWWSGFLGPRITVPRSLRWASCGAVSMSATSALLVRLFSPECEPQNIAAFDKPELKAQ

SEQ ID NO: 63887 - protein, 326 aa, Zea Mays
MMLYGAIFGCLSPILSVAAFLSYKSPFLSPKDEKQNVEKAKATLLNENLDGSSSVTDNKQSDHLLMVIAYDKWSRILLQNGDKSARQFCHSFYLNSTVMHMIRDMRLQFGTLLADIGLIDLPKDTLRHKVGSRKNNLESWFSNMSLPFNAYARCTSVIKSVMCAGLYPNVAASLEGVDPGALGGRKPSDVLFSKDRPRWYDGRREVHIHPSSVNHSLKAVQYPFLVFLEKVETTKVFLRDTSVVSPYSLLLFGGSMVIQHQTGVVVIDGWLRLSAAAQTAVLFKQLRMTLDAVLKELTRKPEMATFVDNEVVRSIIHLLLEEDKAR

SEQ ID NO: 63888 - protein, 168 aa, Zea Mays
MSPPSVMGQFGDTTYTKVFVGGLAWETQKETMRKYFEQFGEILEAVVITDKNTGRSKGYGFVTFRDPDAAMRACVDPAPVIDGRRANCNLASLGVQRSRPPTPQHGGARNFRVMKSFNQQAGIQGGLGAAFPSHATFPHYAIPQGLPFHVYGLYSLTDISSVPHTSIK

SEQ ID NO: 63889 - protein, 957 aa, Zea Mays
MYGNDNWINSYLDAILDAGKGAGPARGRGGGGGGGGDRPSLLLRERGHFSPARYFVEEVITGYDETDLYKTWLRANAMRSPQEKNTRLENMTWRIWNLARKKKEFEKEEANRLSKRRLEAEKPQNDATADMSEDLFEGVKGEDVGDPSVAYGDSTAGNTPRISSFDKLYIVLISLHGLIRGENMELGRDSDTGGQVKYVVELAKALSSCPGVYRVDLLTRQIIAPNFDRGYGEPDEMLALTSFKNFKCERGENSGAHIIRIPFGPKEKHLAKENIWPFIQEFVDGALGHIVRMSKTLGEETGSVCPVWPAVIHGHYASAGVAAALLSGALNVPMVFTGHFLGKDKLEGLLKQGRQTREQINVTYKIMRRIEAEELSLDASEIVIASTRQEIEEQWNLYDGFEVMLARKLRALVKRGANCYGRYMPRMVIIPPGVEFGQLIHDFDIYGDEDNPSPASEDPSIWFEIMRFFTNPRKPMILAIARPYAEKNIATLVKAFGECHPLRELANLTLIMGNREAISKMNKISAAVLTSVLTLIDEYDLYGQVAYPKHHKHSEVPDIYRLAARTKAAMHGLPVIATKNGAPVEIHQVLENGLLVDPHDQHAIADALYKMLSEKQFWSRCRENGLKNIHQFSWPEHCKNYLSRILTLGPRHPAFACKEDHKVPVKCRKHIFVIAVDSVNKEDLIQIIRNSVEATRSGTMSDLTGFVLSTSLTIAELQSVIVRTGMLPTDFDAFICNSGSDIYYPSQSSDVPSNSRVTFASDHNYRSHIEYRWGGEGLRKYLVKWASSVVERRGRTEKQVIFEDSEHSSTYCLAFKVINPSHLPPLKELQKLMRIQSLRCHALYNHGATRLSVIPIHASRSQALRYLSICWGIELPDAVVIVGETGDSDYEELFGGLHKTVILKGGFNTPANRIHTVRRYPLQDVVALDSSNIIAIEGFSTGDIRSAMQQKLGIPTR

SEQ ID NO: 63890 - protein, 143 aa, Zea Mays
MTRIVCLHGVPKKIVSDRGPQFTSRFWRSFHENMNTKLNFSTAYHPQTDGQTERTNQVLEDMLRACALQHGGSWDKILPYAEFSYNNSYQASLKMSPFEALYGRKCRNPLYWDQTGERQFFGPELIQEAEEQVRIIRENLRVA

SEQ ID NO: 63891 - protein, 756 aa, Zea Mays
MDVLNLSIGGPDYLDLPFVEKVWELTANNIIMVSAIGNDGPLYGTLNNPADQSDVIGVGGIDYNNHIASFSSRGMTTWELPHGYGRVKPDVVAYSRDIIGSKISTGCKTLSGTSVASPVVAGVVCLLVSVIPEDKRKLILNPAAMKQALVEGASKLSGPNMYEQGAGRLDLWQSYEILKNYQPRASIFPTMLDFTDCPYFWPFCRQPMYAGAMPVIFNATILNGMGVIGYVKDQPLWQPSEDIGNLLSVHFTYSDVIWPWTGYLALHLQVKDEGSQFSGIISGNVTLTIYTPAAHGESSPRSSTCILHMKVKVVPTPVRSKRILWDQYHNIKYPSGYVPRDSLNVHNDILDWHGDHLHTNFHILFNMLRDAEYYIETLGSPLTCFDASNYGTLLMVDLEDEYFDEEIQKLRDDVIHKGLGIAVFAEWYHVDTMVKMTFFDENTRSWWTPITGGANIPAINELLAPFGIALGDKILTGDFSINGEQTHYASGTDIVQFPAGGFLHSFQLQENSKTVQDHIGTLDTESTQGKGKLSSILGVIEAGEGRIAVYGDSNCLDSSHMVTNCYWLLRKILEFTGNRVKDNVLFSEAAQLKFPVFENIHHPSRRTDVNFSTYSTVVGKELICHQDSRFEVWGTKGYGVQPIGTSRKLPEYQMHESSSSPNVTIQIAGSRQDKVERLQRNLSIPNAAKFDDKRDYFGFIGHEEVDIGMLMASQWMIPCFAATACLMLYLSCRVQQKRRRRRKGSVASANRLTSMV

SEQ ID NO: 63892 - protein, 263 aa, Zea Mays
MKAAIQLSKAGNAAIIVDPSSMQIVAKATDHTHKHDTAEEGNTFSEANADVTCPWNTSTDDDNNLSLPGSFLPKLNSLNMEIPCINPWGWMKKRTCEQKPSPWDGCSAWHPLRHAPMAAIENAAERDRTMFPSSISITKPDSDGSPENCCDNEPAKRLKTDTKDNEKPASESSGGDLFETSRPYLCTGFDIYLVWEPCTMCAMALVHHRFKRVFYAFPNPVAGALGGVYRLHGERSLNHHYNVFRVSVPEAYLNGLNCYSKEC

SEQ ID NO: 63893 - protein, 73 aa, Zea Mays
MAASATTRRGAALSSALASRATSPDRQPKLQQVSRTKQTAALLLLLLLGEQREAMASRPEQSYCRNGASSSEL

SEQ ID NO: 63894 - protein, 117 aa, Zea Mays
MESQCNISSTLKGLDPQPGSKRKCPHLKSNEEDVELSDSFTRSVHLTPIKRLKESHDARYGAGESAKTTHFSNSSSGGYHEDMNLHNSRGCLQNSPCNVEDALSKGFEGCISMKCPF

SEQ ID NO: 63895 - protein, 67 aa, Zea Mays
MQGGGSSAAKEVCSHHGPFQEQEASGGLQESCTGVRLRRSEILNSTGWPRGGSVTVGVVRSVEIELL

SEQ ID NO: 63896 - protein, 619 aa, Zea Mays
MSNWITMLRASRHRSLLIQSKMGLQEKHSRSRKEGAALAETAPAQRKSYSFRLFSCQGDISRNVISHPKAAKKEPVVSVEKELDSSELAPAVVPLLERAVSVVSSSDSLSQCEDAVHEVARACSAWDPSLVNLLSCASFIQGLLEVTLTSKDDAVLESAMSIMGKLVLGNEVIRQLVLNADPQLEVFLRLLRSSELFLKAAVVLYMMKPKAKQMLSLDWVPLVLHVLECGDEVQSLFSVRCAPKIAAFYFLDQLLMGFDVDRNVENAKQMIALGGLDLLIGRLGAGDARESRHCIALLTTCVQADGSCRHYLADSLKKEPLVQLLAGNQRKASAASLNLMSELVCLNRTSKIVEFVKELKNSGCLNTMHVLLVYLQQAPLVQHPLAATMLLQLDLLGDPSQYSVYREEAIEAIVAALEHSSQSRKVQEQCARALLILAGRFSSSGEPVAEAWLLKRAGLDDSLSESFRRSEVFKDKSVRAEEEKLVEERQKNLALMLLKSGGRRFLTALSSCISDGTPSLSRSCLVSVAWMSSSLSPLRGCNDFQPLACSVLASKLLDSLSYDRVLEERVLASLSLLNVVRHPECMEKVFPLKKETIESLQDLAEVTWTAKELLFACCR

SEQ ID NO: 63897 - protein, 766 aa, Zea Mays
MAPKAGRGKGRGGKGDKRKKEEKVVPSVVDVTVVTPDESQVTLKGISTDRVLDVRKLLGSNVETCHLTNYSLSHVARGHRLEDGAEVVALKPCALRIVEEEYATAEQAEAHVRRLLDILACTTAFARPRDGAAKHRASRHGRPATPPSSPTPASTGAHGVASGEAAPPISEAHDMAAIRPPPKLGEFYDFFSFAHLTPPVHFIRRKEANGASQEGDHFEIEVKVCNGKLLHVVASVKGFYLSGKPHNVSHSLVDLLQQLSNAFANAYEALMKAFVDHNKFGNLPYGFRANTWLIPPIYVDSATRCPALPVEDENWGGNGGGCGRDGKYDRRRWSKEFSVLARMPCKTEEERVIRDRKAFLLHNLFVDTAIFRAASTIRRLIDQSMNSVGSHSGTHGSNVFEERIGDMNITVKKDGADASLKVEDKVDGVAFCQTGAMDIAQRNLLKGLTSDENVVAKDSSTLGVVIVKHCGYTATVKVSGRAKDSNDVKQTNDISGKFDGMLTIDVHDHPDGGSNALNVNSLRIPLPRVIHPETVVGNQHHSPKSHASNPAKKLARKILKDSLVKLDSMPSINSRIIRWELGSSWLQQLQKKDTPASENGKGNAMKTDKEPAVRGLGKHFEQLRKLKKKECNNEGSSSEKEECSNNYSSMNGTQVSDMIAADEANNGADISKLMSEDAFLSLKSLGAGLHEKSLEELTKMAHNFYDDTALPKLVADFASLELSPVDGRTMTDFMHARGLNMSSLGRVVELAEKLPHIQSICIHEMT

SEQ ID NO: 63898 - protein, 567 aa, Zea Mays
MPSRSGSRGRRPRPAPEVAAPTAVQVSSSGSSEEGSDEEEEEGSEGSGDGARSPGGSASKYKAAESEAEAEDPCLPSCPICMVAWTADGSHRVSCIPCGHVYGRHCLEMWLLQYGKKKAPCPQCGKRYTQNNIINLYVPEIVVPNNDLEKQVLSLRERNEYLEKQQAKLLEEIKEHKRQIMLQQNIIYESNKKRQRVTEQSSDGILGAELIASHTKDIDHNNLSSFALQNEFLVDGARVMGIDASSQIILTSGRAHGVSAEHILTKVSMFHGHGMEKIHLPPDTKAIRDICVLPGGHVVFASLGRKLSIFSMATNNVVLQYDLPAPGWSCSGDYTTSSHIYAGLQNGMLLVFDIRQTSAPLHSSMGLSTHPVHTIHCAVDGSGSRKVFSASSIGPCVWDASENRPSLVSGMENQGVCISLACSSPSSDVLVASYRPRVELPDAIATSQASTPQSPAPTGSGKLGCHTLLRRTTATSFARDHICSGSVSELRMSKSAIIPCRDNQHLFAYGDESLYGVRTWRLPSFQRYTDLKPHRQPVLDLRYAESSTGERYLGCLSAEKLQVFTIR

SEQ ID NO: 63899 - protein, 349 aa, Zea Mays
MTTLSRMLPRLRSSATRALRKVFGLEPAAPPRRLPAPEAFVASERSLLRPLPGLDLPPCLPDNLSRSPTRVTTLPNGLRVATEDIPGPSACIGFFVNSGSVYESGETTGVSYLLERMGFKDTKHRSHLSIVSELELAGASVSVSASREQMVYSYDTLKGYMPEALEILIDCMRNPLFLQEEVQRQLVLAREGFQELQRSPERFLHEQLNIVGFSGALANPLIAPEHVLARINDRIIQKFYHENFTADRVVLAAAGVDHEHMLGYADFLLKDWHRGAPMEKPKSTYVGGYSKHRAYSDMTDVALAFEVPGGWFQERDAAIMTVIQTLMGGGGSFSTGGPGKGMHSRLCKA

SEQ ID NO: 63900 - protein, 93 aa, Zea Mays
MRQSGSGGRVDCPIGNPVPPMSLASSDPHEHIEVDLLGARIIFCAMDLLRHGGVVMKAGVAVGLGPVIRVVGDVGRHLALMGHSIGREDGASP

SEQ ID NO: 63901 - protein, 462 aa, Zea Mays
MDAYEATKVVFSRIQALDPDHAAKIMGFLLIQDHGEKEMIRLAFGPEALLHTVMAKARKDLGLLPSPGPGTPTSVTAAATHSPFLLSRQNSGRCGAGTAPSPLSVSSPSSWAPPPHFSRTNSVVSNGAPAEALAADLMSPAAAGNAPPSPFFAAGEPLLDELQLQEQLAFLSDAAAGGHQLPLFDASECRSPGSGDAAGFFPYGALGWANGGPGHRRSSSVSELCLGGADGLGWKPCLYYARGYCKNGSACRFVHGGLTDDATAKMDTATLEQQCQDILLRSKSQRLAAFPYSPTGSVPGSPSAATKCLSLLLHQQQQQNENQRVAAAAAAAALMLGGDDAHKFIGRPRLDRADLASLVNPGSRQIYLTFPADSTFREEDVSNYFSIYGPVHDVRIPYQQKRMFGFVTFVYPETVKLILAKGNPHFICDARVLVKPYKEKGKVPDKYSSCKARGRWISSPTG

SEQ ID NO: 63902 - protein, 289 aa, Zea Mays
MDTDKVKIYGAQVRVDSMSKVADIEAAEKQKMREKVQKIIAHGINCFINRQLIYNFPEELFADAGILAIEHADFEGIERLALVTGGEIASTFDNPDSVKLGHCKVIEEIMIGEDRLIHFSGVAMGQACTIVLRGASEHVLDEAERSLHDALCVLSQTVNDTRVLFGGGWPEMLMAKEVDELARKTPGKRSHAIDAFSHALQAIPTIIADNAGLDSAELISQLRAEHHKENCTAGIDVITGTVGDMQRLGIQESFKVKQAILLSATEAAEMILRVDEIISCAPRRREDRM

SEQ ID NO: 63903 - protein, 106 aa, Zea Mays
MDSEHWISRLAAAKRYYAAQLGRVDDVPGMGTEEVEMEVEDDGDMEMELEMALELGDATWPEVACPYCYEDHDVASLCIHLEEDHPYEPHAAVSQSARFFLQDSSR

SEQ ID NO: 63904 - protein, 986 aa, Zea Mays
MASAVAAPPPTPPESDPRLVEIFSPFLEKLIKNASWRNKAHSKLSHTAKSILDRLQKPPPPPAAEAQAPSTPTSSPSTPTSSSAQPGPLRSLSLADSELLLAPVISALGSGSAKLAEAALELLHRLIAHSYIHGEADPSADPSAQLVASLLDAACNALGLDDEHIELLLLKTLLSAVTSTSVRLHGDCLLRAVRACYDMYLGSRSAVNQATAKASLVQMLVIVFRRMEADSSTVPVQPIVVADVIELPDAISGSSPTADPNVVQGFISKIIGDFDGALTPLARTTSSAGAGPTVAHDGAFETTAAAEEGANPADLLDSTDKDMLDAKYWEISMYKTAIEGRKDELGVEGAVVGTLDDDADVRIGNKLRRDAFLVFRALCKLSMKTPPKDAPADPIVMRGKILALELLKILLENAGAVFRTSERFLGAIKQYLCLSLLKNCASSHMIVFQLSCSIFISLVARFRPGLKAEIGVFFPMIILRVLENIAQPNYQAKMIVLRFLEKLCGDSQILVDIFLNYDCDVHSSNIFERMVNGLLKTAQGPPAGVPTTLVPPQDTTMKSEAMKCLVAILRSMGDWMNKQLRIPDPASPNVESEKNDNDDGNELPQADNNGDESSEASDSHSELSNGISEAASLEQRRAYKIELQEGIYLFNRKPKKGIEFLVNASKVGETPEEIAAFLKSASGLNKTMIGDYLGEREDLSLKVMHAYVDSFDFQRLEFDEAIRAFLQGFRLPGEAQKIDRIMEKFAERYCKCNPKAFSSADTAYVLAYSVIMLNTDAHNPMVKNKMSPEDFIRNNRGIDDGKDLPEEFMRSLYERIWKKEIKMKEDEFVPQQQQSTSSNKILGLDNILNIVVRKRGSSMETSDDLIKHMQEQFKEKARMSESVFYPATDVVVLKFMVEVCWAPMLAAFSVPLDQSDDEIVVSQCLEGFRSAIHVTAAMSMKTQRDAFITSLAKFTSLHSAADIKQKNVEAIKMKMEITCKKHGSIY

SEQ ID NO: 63905 - protein, 60 aa, Zea Mays
MFPKHNICIGTFGLRMKLYTIWKAGSERRLNQRRSYAQGCFGSVAERGTNLRRKRLSSPR

SEQ ID NO: 63906 - protein, 844 aa, Zea Mays
MPTTAPPVDAEPPECPVCLSPFDAASVVPRVLPCGHSLCGSCIAALPPASAAAGASSLRCPLCSQCVPYARALGPSSLPKNLALLTLLPSPSHALSAATLVTAPLPHPHPLHAAHSRLLSRFRHAVLPESASPLGSEPSPVHLAFGSLGSDLGAPWFCARGRPVSLLPIETQPVPPTKQEAEFYRPSHATRVLAAVDALSDATKEELAGLIASSARLARMVSRLYGVWMSPHAPPLWMVSERHPRTVSQLLEEEIINREETVVRAGFLVMEACEVIMGLHSEGLVLGCLGLDCFCLDRFGHCMLDLNQALALCRGVQAGASSNSVRAFIAPEVAAVLGDTLRTEGRDFDGLVGCTSDIWSLGCVFVALLTRDEQLVPVAGWNSEGLYDDWEKEVVTRLDATLLGTILEPLAAVIASCLRYDPKSRPEIADVWKCIRGLLTKFGDVTLAPDDDVAAQKSFRCLLLGELSSMFVDSGAVESDDKTQLSRGADGNSSNQDHGSNDGFLNNSGNDLSGIDGPQSVGVFKSSTLLAHRDCVTGLAVGEGFVMLAQELPIFILSFTAGGFLFSSSYDKTINVWSLQDFSHVHCLKGHEHKITAIVVVDNDSHSLCISGDSGSGIFVWRVDSTLKEEPLNKWYEHNDWLYRGVNCLAVSGTGYLYTGSRDKTIKAWSLEDYSLRCTMTGHKSTVSCLAVASGILYSGSWDGTIRLWWLTDHTPLSVLEDDAAGSIAPVLSISAGTNFVASSYENGYFKVWKNDVLVKSEKLQNGAVYAVKLSGKWLYTGGWDKVINIQELLDDESEVELRDVASITCDSIITSILPWDERLIVGLSNREIKKLSEAETNRA

SEQ ID NO: 63907 - protein, 124 aa, Zea Mays
MMLVYLKSNVGQRVLGQIEEREREREEMQRLTGRDMWDVEECQSPRMGSVILGVGGTSNTVCVCIPAAMPFNDPLPVLSRTVAGYSNHNSVGGTYFQAMSSCSWRTTRWRRWPVEPWASCTDVC

SEQ ID NO: 63908 - protein, 278 aa, Zea Mays
MISSTRALPVTKIAAAKRYFGLPDDFLASLVPRYPGLFRLVGDPGPDASGNAFLELVAWDDELAKSVIEAKADKEADVVGIRPRPNFTVKLPKGFYLKKEMREWVRDWLELPYISPYADASGLHPASPEAEKRSIGVLHEVLSLTVERRMAVPIIGKFCDEYRLPNAFANAFTRHPGIFYVSLKGGIKTAVLREAYDENGELIDRDPMLELKERFVAIMEEGHKQYLEDLKRKREALQKDREDAGRQDAKAEIEDRVEEEWHSEASEGDDDTDDAYRQ

SEQ ID NO: 63909 - protein, 395 aa, Zea Mays
MVLWRTGGAWWCYLARAPHYKAPPHTIPQLRASSHHLVERKSESEIDLTTCLRSKPLCMHHHHQDQAMGDALWDLLGEEMAAAGGEHGLPPGFRFHPTDEELVTFYLAAKVFNGACCGIDIAEVDLNRCEPWELPDAARMGEREWYFFSLRDRKYPTGLRTNRATGAGYWKATGKDREVLNAATGALLGMKKTLVFYKGRAPRGEKTKWVLHEYRLDGDFAAARRPCKEEWVICRILHKAGDQYSKLMMVKSPYYLPMAMDPSSFCFQEDPTGHPLPNPSGCTPFHHGHPHHSMQPPPPLPPSNHAGKAVFTGAAAACCMQQEPADGSNSAVLPMPPFPPFTPIVAGKPAAPAPPPQVVNAGPQEPPPPTWLEAYLQHTGGILYEMGPTAAPRGA

SEQ ID NO: 63910 - protein, 1270 aa, Zea Mays
MPAAAPTTPRRHPSPNAGGRASSPTPAGSQAKRSQSTERRPVTPSRPSSGGSRPSTPSRISAPASPSSATSSPSSFSSSSTPVGDAVPETQIALRRLPGGRAPDGLWPSMRSLSSSFQLESKGKKISSSSSADQAKTRDAAPADRKRSPLRGRATPEQSENPHAKVIDHHRWPAMMGGRVSASTMSKSMDLTDKISRSALPSVPSRGVSPKRTTVSSAANTLSRSIDLADKIDRLVSSSMSSQGESPRKSPCNGADDVSKKVGVRKDLKLSSLAISRRVSPVTTDDKIDRLVSSSMSSQGGSPRKSPCNGADDVSKKVGVRKDLKLSSLAISRRVSPITTAASDGTRTLSGSMDLTEKDNSTLSPVSSPSISPSASLSSVSNAASQTTTKSSERLIGPVSNLSSSRGLSPRRTTSGGIVDLMKSIDFPEKDRRPASSRGFSPRRRLVSDGVNDIGKNMDFAEKDSRVVSSSIPSRGVSPRRRLASDGVDTMCRSSEFSGKDNRPSTSSSTSRGMSPRRRLASDGISAVTKGMDFGDNANRPSTSKGVSRGISPRLQLASDGVGNVSKGTDLADGLDRPSTSYATPRGMSPRRRVASDASNATSERIKFTKEDSGTVSSSVAPRGVSTLRQLASDGVESVSKSMDLVEKDTRPTTSSASSRGLSPRRRLSSDGVNVISKSMDLVENNNKLVTMSAAARGVSPRRRLASDGVKVTSKSIDLVENSNKPLTVSAATRGASPRRRLTSDGLAFISKSTNITEKSIRPSTPSMSSRGMSPRRRLASDGINAVLDTEFADKNCRPSSSSAALRGVSPRSRSASNAISTGMTNAENDSRPSTTSSPSCQTLQSSRLESNGVNILSKDMEISSTVSGCTSDSRLDGAGALVKSIDVTEKLTVSTEDGGGEDDPGRIDSSDVVTSAVSSSLASQEVSSRHVTDDVKNASESVGATQKGNRPLSVKVPSRVASPRRRLASDGIDTISKSMDFAEKDKKPMTVSVPSRGMSPRRTARSDSADIMSKSMDFPLQVFSTRRVLGPDGANAMSRSMDLTDKIRQKISSTMQSSRVSPRKMPLAYNRIKGPEILSGDAESPGSADGNESQEENASSSPDAPSNSSEKSTPPKQLARRSPSPSHILICPSSSSNASSTPSFVSRRLPSPSRTRPSTPVSPCSSARSDSASSILSYIGDATRGKKSPTHTEDAHQLRLLHNRNLQWCFTTSYVDELLSIQKISAETMLYSVWDANSRMCDSMVIKRNYVQQLRQEVKLGIVLKEQSW

SEQ ID NO: 63911 - protein, 131 aa, Zea Mays
MFVDDTPVRVLRNLTGAVPGYPFPGKQTMLIRASVWDGSDWATDGGRTKVDWSRGPFTAGYRGFDVDGCANNGSDACQSPDLWWNAAEYRNITAEQRAAYEDVKRSYMNYDYCADKARFNSTTVPIECNYA

SEQ ID NO: 63912 - protein, 451 aa, Zea Mays
MAAPPQPLASLDYWRCFFSGARASIFDAIDAAIRVAAADHPDALRARRDAIAERLYTAIVALPATQEAPGQSTPGQPALLLPEGAASVPSLCSSDRAEVVNNDGGGAPLTNSDDDVVAEAFRIKAALSNAQDKSEAELLELLGRLGQLEFTVDAIRATGIGMDVRPLRKHGSKQIRQLVRSLIEGWTATVNEWMNNGDPVVDHTPQSVDASCLDEEEGGLPSPPMDEAALFAAPCTSIELSEFFDEMDDDGNIRADVKDGGQRNPASQESVSKQSPTVQQYDPEQNWKLDQSATKQLRPNEAFGWQTTQRSNSGAQAKASSAAFGPGRPQASQMGRPRCSEVKPEQQQQQQRDVSVAQRRPKPTVPKPPPTEHDEYPVRAKQQQQLAKDGKLEATKRKLQEGYQEFNNAKKQRTIQMVDPQDLPKQGSRNLALSGKPRNSSNIRNRLAVRR

SEQ ID NO: 63913 - protein, 315 aa, Zea Mays
MFLSSSDSSCKELKKTPFQFAANCRLSDASHSVPSDDSINRQPREGGGQEAEEPGQDLRHGRLRERRHGHGFLQGPEAARRRPERSPAPPPRGRRRQVGGRRALPRGQQLLLVALAHPAGAHLQVVRGAAGSVGVDVRPVHAPVRAARLLPPAGPQRLEDPLALRALLLRLLGRVRVRRHVLPAVVVHLREGPALLRHVQPALHRDHHRVRRRRPPRRAARRQLAGRDRRHRGAVRGAVGQSGRRQQGRGGARAPLGRSGEDVISAVGSQFDGRRRQWHRRAPPGGRRSNGEVDGILLLFKCSVRARAVFSGSVC

SEQ ID NO: 63914 - protein, 569 aa, Zea Mays
MHHFCFEKRDWMTVQPNELPRGSQLIMGLNPPFGVKASLANKFIDKALTFKPKLIVLIVPKETKRLDKKKIPYDLIWEDSECLAGKSFYLPGSVDLNDNTVEGWNASAPPLYLWSHPHWTKKHMQVAEEHGHTCMGKIASHVEKRNLSDDLPVRKQSEAANKWNSRSGKETTCNDRKDNLLDDVTAKKQAGPEEEKETLGKMDHHVKKATIPDSLTVKKQTEASSKALSHCGNDRKIGRYSSRKYDDWRSKRTPDHEESFPPEKQVEVAYEETKVIIPSKKITHNEQSGACRENRKNSCVEETKNVEYNYEQQTAAGMRFREGEDSDMSISPPSRPVEPFDMIAHPIGSLTKEPFDPVLNRGATHQDSYAVTKEEYLGQFKRKNDRTFTDIDDSSRMRGSSIEEVTRPYIAAPTSDPYSLRYRGDGSFYRHPSSEDLNTTGISAGYGQIGGDSYPQATGSQTHNTRMHGGTSDDNYLSARYSLGYSGSRFSQPASTVPAFGLSGASSQRGSVIDKYSYGLSGPTGPQDSGINRYAPPDDGTSTRSKSSLAEQQYPFGQSGSSGGEWPHI

SEQ ID NO: 63915 - protein, 290 aa, Zea Mays
MQGRMRGARRSARGESSRKAAGREVEPFTLCGEMSHLTRATSEPCRRARGAAFARRARPFSAYELVSAREAGRAGGAGFSAADRAYLGRQHIPTKGPWGVDDVESEAYVSQFSADGSLLIAGFRGSRIRVYDAEKGWKIHKDISCRSVHWTVSDIALSPDQRFLAYASLTPIVHIVNVQNAGKESHANITEIHEGLDLTGGDEDEDFGIFSVKFSKDGKEVVVGNNEKSIYVYDLSANKVSARIRAHKADVNAVTFADETGNVLYSGSDDSLCKVWDRRCLSGEKSAVAQ

SEQ ID NO: 63916 - protein, 277 aa, Zea Mays
MEEGGDPQLPSISAPRTTSEGAGGVDLDLLEQLLSGDNGWLEVVSRSPNSVAFPPLSAFFSADATATTVTTAAPAANASWWIQTGGASPSSVEERFSQALSYIRDTQSDGDVLVQLWVPVNRDDGKLVLTTSEQPFTLDHRSDSLLRFREVSTKYQFSADVKSGDSPGLPGRVFIGRLPEWSPDIRYFTSYEYPRVRDAQYLDVHGTMGLPVFEKGSYNCLGVIELIMTRQKINFTSELNTICSALQAVNLRSTEVSSIPRIKCALRPSKEFAGSMV

SEQ ID NO: 63917 - protein, 805 aa, Zea Mays
MANAGTGRGGQTPESTHQHTLRTAVSNTREAAESPPLAVDDKIFVAVPEELKHGKSNLLWALHNLARDASSSRIAIAHVHVPAQMITTNCSTVPEEINLSDYRQINILCTKFCHEVNCDIVAIQNDDIANGVINLISLHGIKKLVVGAASDKKYSKTMKAPTSNTALKIMEGAASPCKIWFTCKGSLIVVKGGNADTPTVPSSQNTAPLPVFNISSQMRSMMIHNSKDKASSSNLSMANDMGESRTDVPCSLYENAGDTLLQSFEDVESTFKGKPRRLRSLEDFTVDSGRSQTQNSDSSCPPNDGAASISRTAVVDNDNISEVASNMHLSTNNSYDHISPTPHDLDKLKETLTKIQLLEKEVQEECNKQQNAERELQSALQKSKELEKSYMNELRQQKALKEMLEKQRQEIDVMRRQQEEAYAALYNANEQKVTLEQRISEIELYVKDKEDELARNKHQLEALQADCDRIQQERDAAIREATELHEKNRLGVFAPSEALNTKFSLIELQQATQDFNPMFKVGEGGFGSVYKGFLRNTTVAIKLLHPESMQRQSEFHQEASVLSTVRHPNLVTLIGTCPEAFGLVYEFFPNGSLEDCLGCKNNTRPLTWQTRTRIIGEMCSALIFLHSNKPHPVVHGDLKPDHILLDANYSSKLGDFGISRLLIQTNTCSTNLYRTTNPRGTFSYMDPEFLTTGELTPRSDVYSFGIIILRLLTGKQPQRIAEIVEDAIEKENLHSIIDSTAGSWPFIQANQLAHIALRCAELSRRRRPDLTVDVWKVVEPLMKAASMTARPLSCTAPSDETCIPS

SEQ ID NO: 63918 - protein, 246 aa, Zea Mays
MSSSGKMEGPSAPVVRRDPYEVLSVPRDSSDQEIKSAYRKLALKYHPDKNASNPEASELFKEVAYSYSILSDPEKRRQYDTAGFEELENEGMDMEIDLSNLGTVNTMFAALFSKLGVPIKTTISPTVLEEAMNGTVTVRPLPVGTSATGKVDKQCAHFFGVTISEEQAHSGMVVRVTSPAQSKFKLLYFEQEVNGGYGLALQEDSQKTGKVTSAGMYFLHFQVYRMDSTANALAMAKDPEAAFFKR

SEQ ID NO: 63919 - protein, 98 aa, Zea Mays
MHLNHCEGGDKDFFKFKVGSGQVIPAFEEAISGMAPGGVRRIIVPPDLGYPDNDYNKLGPKPTTFSGQRALDFVLRNQGLIDKTLLFDIELLKIIPNQ

SEQ ID NO: 63920 - protein, 208 aa, Zea Mays
MAAAAAETQMGDGAPPPGALYSFGTPWPELNQGLTYTDTFRCADADAATTLIEFYSTNHKSSAPLPGWIKRIRNGQITVDGEVVTDPDMTLVDGSKLVYHRFPWQEPFAPYLLEVLYEDDDMVALNKPSGLQVLPKGLFQQRTVLAQLQLKDWKMASSCRFKRKDVQSHPVPVHRLGRGTSGLLLCAKTKVAKVRLASYFAEVQVIEM

SEQ ID NO: 63921 - protein, 346 aa, Zea Mays
MSSNPDIVYTLPVLKGRTPIQVYTDYMRSFRERFRDYLGNVIAEIQVGMGPCGELRYPSYPEANGTWRFPGIGEFQCYDKYMRASLEAAAVAAGHQEWGRGGPHDAGEYKQMPDDTGFFRREGTWSTEYGHFFLAWYSGMLLEHGDRVLAAAEAVFGGTGATLSAKVAGIHWHYRTRSHAAELTAGYYNTRDRDGYAPIARMLAKRGAVLNFTCMEMKDEQQPKHASCSPELLVQQVKTAASAAGVELAGENALERYDEAAFSQVASTARGAGLAAFTYLRMNKTLFDGDNWRQFVSFVRAMADGGARPALPRCDTGHSDLYVGFLDAAKKSKAPEAEGAATAAAL

SEQ ID NO: 63922 - protein, 1005 aa, Zea Mays
MAAPAARRIVGAEVPIPGSDKLRWIDLTIPSSSAAAPASPSDPFVCVPPRAASGCHIIPSGDSQYYLSWRIHEEHPNVLEVIELSPSKEFPSFGLRLAFQEALSPFAFLCEREGRRQGELVYMLYVLTVSGVALLCHLRSPFSYVSGSVLHQDDIAEFNLQTQAQSAKVTAVTAKPGCIVIGRQDGSICSYSLGKLAPNSPGFSNELRDDAGIGRLWTLMSRTKTVGPVQDIVATVVNERDLLFVLHLDGHLRIWDNHMKLLNYNVHSNDIEGHPSRLWVGKADDDQELISLAILHQNTVVQGCDYVAVYGFGFSAAERFMFSSEPSISTIPLLEGKLADLKIATYKLWILKEFGSMLYEILQYDIDTETAKCCSEKVCCYVLQEDAISEQLFQSSDNALDDLVWTADSMFSSLKAFTLISSMFLRRLLQPGVNHCSALRETLLEHKRFLSDSEFQSLTANGLRKEILSIIEQEGSSQTASATAYHWKQFSARYLHNWCWHNKPYGLFLDTTNEVFGLVRKGSFSLFRCLEGLEMLIYGYDHGVNLLDDVSDFELLNEVLRCMGNIHHLLGRSSTAAYYESLISSIISSDEIVSHIVKILETGFSHQSSSSLSTLLGMDTYVERRQAAHKSQRKFSVEMLRSFHTLQSRSASWSAVFDVIEKFMKCLNTNMNVQSYGSKRVCNVNSVLLVQATSQVARTMFECAFDLFLFLSYLVGVGGQVSLLQNDVARIKLKLFPMIQDILGQWIVLHFVGTSPTSPPTIDDFSYQLSSLQLGKSDELSLHRKLGCSDFTLASLLDFPKSPEGDVMSPCFLGPAEIINLVRRFSSLIMHGGNFECVHTFLGCTINLSAVLIRHSQYEAAQNLLGILETYLNNGKVSHTGQDADTACSAYLHLNGFCLLMIAHDEANIILRESKVHDAIRCFFRAASGYEAPKALENFSLETGFQVSGESRSISLWRLNYYEWAMQIFEQHSMSEGAYQFALAALELVLLDGIDNGIEAEGLQR

SEQ ID NO: 63923 - protein, 187 aa, Zea Mays
MCVTYVAEIYRNLMASELIRRPRSNYMETLQQDITASMRGVLIDWLVEVSDEYKLVADTLYLTVYLIDQFLSQNCIQTHKLQLLGITSMLIASKYEEYSAPSAEEFCNITAGTYAKAEVLEMEQQVLNDLGFHLSVPTTNTFLRRFLRAAQASRTVRSVPKPHCNESFQSICIVLNTKLASYISRLI

SEQ ID NO: 63924 - protein, 265 aa, Zea Mays
MAAPQHVRAAPLARALRATATATATATASVPVPVPVPAGIKSQGTSRRALLGLSEPQLRQLAIDLGQQSYRGKQLHDLLYKSRAKQIQEFNHVPKAFREALLGAGWSVGRSPVHHAVTASDGTTKILLKLEDNRLIETVGIPVDDDNKGSSRLTACVSSQVGCPLRCSFCATGKGGFARNLQPHEIVEQVLAIEETFKHRVTNVVFMGMGEPMMNLKSVLEAHQCFNKELKIGQRMMTISTVGVPNTIKMLASHKLQSTLAVSNT

SEQ ID NO: 63925 - protein, 199 aa, Zea Mays
MKISNYANIVLLALKVYATIKSGSIAIAASTLDSLLDLMAGGILWFTHLSMKSINVYKYPIGKLRVQPVGIIIFAAVMATLGFQVFIQAVEKLVVNEAPDKLNQVQLLWLYSIMIFATIVKLGLWLYCRTSGNKIVRAYAKDHYFDVVTNVVGLAAAVLGDRFYWWIDPIGAIVLAVYTISNWSGTVWENAGSEPSSTG

SEQ ID NO: 63926 - protein, 115 aa, Zea Mays
MQSLQDKASEWSGVAAADAFAIDDVNIFEYLGGTPQPFVDLSTNFYTRVYEDEEEWFREIFGGSKKEDAIQNQYEFLIQRMGGPPLFSQRRDGLPKMIEETSIFMCDATIVSGPF

SEQ ID NO: 63927 - protein, 189 aa, Zea Mays
MASFSPSGRMTRTAASSLAARVVLALLLLIGVSGSGATQAASPHTHHSRQLDVNHKKPVQTFRPINIAHRGSNGELPEETAAAYLRAIEEGADFIETDVLASKDGHLVCFHDVTLDATTDVADHAEFAGRKRTYEVQGEDVTGWFIVDFTLEELRSLRVKQRFSFRDQRYNGPSGSTRRSRTPCSSTST

SEQ ID NO: 63928 - protein, 113 aa, Zea Mays
MRINMAISAAFFLCFAFFCRILQKLRATEPLITPIYNEYGEVEGRGIRMAKRVVRALGLIFGCVFTASLAYTAASNMVELSLQYTPRMFYYYQELIVTVAASVLLYITASWYR

SEQ ID NO: 63929 - protein, 172 aa, Zea Mays
MGISQDTHESMATDAANYLCHQLQHLLGPISSATSQSGPWEERSAMVRLTQKLQKSKRNKRWRQRRRKHVEELFQKERADYDRVDQEADEWRAKQIAKDIAKQRVESMQQIARKKTNVERKRLESELELALMVEKLQELRSIRVQKMKKQDPYLNTDASTMSPFEHASMVST

SEQ ID NO: 63930 - protein, 172 aa, Zea Mays
MTFCWTDKASILDETIEYLKSLQMQVQIMWMTSGMAPMMFPGVHQFIPQMALGMNPGCIPAAQGLSQMPRLPYMNHTLPNHIHLNSSPAMNLMNPLNAANQVQIGHLRDASSHLLHLDGGRAAVVPQVPGPGPHVHGHQIAQAEEHNKILEVAASTVIPTSKAGQPPTLHRV

SEQ ID NO: 63931 - protein, 88 aa, Zea Mays
MMVRSSRCGWRTTLSLISSCTVPTARRKLTGVFDLLKIMLYKVCANGSSALPDWEMEASIMEFYAVASSKWHHRAGRQETEKIVPEKI

SEQ ID NO: 63932 - protein, 1683 aa, Zea Mays
MAQPGRSFESDSKTETAYAYIDDDVCCAVTTFLKSFLETLRGECWNDDGVELGYDAFRALCLPPFMRGLVSGNSKLRSNLNTYALPALIEVDAESIFTMLGFISIGPSTNETKLDVVLKNDQCIAALVSLLKVSRNLALVEGDIDLDPDELSQIQQMDSKGAAVISVKGIKVTVPFNWFALALTHSDESLRIDAAESLFLNPKTSSLPSSLELSLLKEAVPLNMRCSSTAFQMKWTSLFRKFFARVRTALDRQVKQGSWIPSLTSSVKGAGSIDTSKATVVKRAEDLFQFMKWLSSFLFNSCYPSGPYERKTIAMELILTLLDVWPICRSEGKIDLYPYNDSIILPDSTISFVGSIIDSWDRLRENSFRILLQFPTPLPGISLSTSINDVIRWAKKLVLSPRVRESDAGALTFRLIFRKYVLQLGCILVFSKESDCLECYTQSMNGDTEVTSQNPVAQYISSLIQWLCIVVEEGERDLSEACKKSFVHGVLLTLRYTFDEMDWNSEVVQSCISEMRYLVEKLLQLIMRVTSVALWVVSSDALSLPYDMDDMIDDGSFLSDIYDDQPTTTSEREEKNAKPGSNGKPAEQVVMVGCWLAMKEVSLLFGTIIRKIPLPGCSHSASSQNGLPDSIEETSISEEILDVGQLKMMGDHFLQVLLKMKHNGAIDKTRAGFTALCNRLLCSNDSRLCKMTESWMVLLMDRTIAKGQTVDDLIRRSAGIPAAFIALFLAEPEGTPKKLLPRALEWLIEFAKNSLANFQKDSNQRSGVMKELLESQSETTSVYSNGNLSKGRDEGVVPTVHVFNVLKAAFNDANLATDTSGFSAEATIVAIRAFSSPYWEVRNAACLAYTALVRRMVGFLNVQKRESARRSLTGLEFFHRYPALHPFLSSELQTTTEQLADGVSSNLESHITKAIHPSLCPILILLSRLKPSPISCGTDDSLDPFLLLPFIQRCATQSNYRVRILASRALTCLVSNERLQYVISDILDNLPRGSHKAMAHSVQHTDPAISANMGKANVLLLSKSFNSIHGLLLQLASLLDNNFRGLTDGSMKDQIIGLLLEVLSRCSWLGCTKLCSCPIVITSYLRVLDLMLDVARTGKSRHTEVIQALLLELTSQCLSNTASTQYAFHDPTRIELKQQATESFLSCVGLSKKTDETNDDDVQLQILGEPTLEMPRVDYSLHEVHKEILSCLTDPSYDVRITVLKRILWLTKSIRHGYADNILHQWAGVNLQPALMERLFVEEHPKCLYYNLKIIFSWNMEFPFNNGEDSSTLLSLWDRLVHLNSTMSHAKTREIVLCCMGMCMKLFTKQSRGGISMDCLKTSEISASFVRINEGDGLSDAMLRLNLFVTLVKNQSEPSESMNARRAAAEAIVASGLLEEASYVASSVSNMYSPSEFDEDHTKEKCMEDSVFEFVSLYTCKILDLWFVCIQLLEDEDAYLRQKLAKDIQKIIAKGSANTFCDDSTPLQVDRVIELSLDYLTSLFGLWLKYVEFLLRIVLGTGNALNSRGDLVRQIFDKEIDNHHEEKLLICQICCSNIQKLLNSKCQMEAGAETKLFLQNWREIFLKQLTSLTGGYIEKEGKNDWIGGIGNHKDVFISVYAVLLGLYALTQSGSLDQLEDHCAVYLQEFANLERSITPFLKNPLISNLYALVKLSHERFISSDKPEDQVGDSGSSFDPYFLIR

SEQ ID NO: 63933 - protein, 284 aa, Zea Mays
MLQEADIGVGISGAEGMQAVMASDFAIAQFRFLERLLLVHGHWCYRRIAAMICYFFFKNITFGFTLFWFEAHAMFSAQPAYNDWFISFYNVAFTSLPVIALGVFDKDVSSHVCLEVPSLHQDGVNNVFFSWSRILSWMLNGMCCSIIIYFGSLNAILVQAVRQDGRVAGFDILGVTMYTCVVWTVNCQLALYISYFTWIQHFVIWGSILIWYTFLVIYGLFSPAISTTAYHVFVEACAPSPLYWLSTLMIVVTALIPFFVYKISRTLYYPQYHDQVQRANSKNW

SEQ ID NO: 63934 - protein, 414 aa, Zea Mays
MGNNALCGLPRLGIAQCYNISNHSRSKNLLIKVLLPSLLAFFALSVSLYMLVRMKVNNRRKILVPSDTGLQNYQLISYYELVRATSNFTDDNLLGKGSFGKVFKGELDNGSLIAVKVLNMQHESASKSFDKECSALRMARHRNLVKIISTCSNLDFKALILEYMPHGSLDDWLYSNSGRQLSFLQRFAIMLDVAMALEYLHHQHFEAVLHCDLKPSNILLDKDMIAHVSDFGISKLLVGDDNSITLTSMPGTVGYMAPEFGSTGKASRATDVYSYGIVLLEVFVGKRPTDSMFVSDISLREWVSQAFPHQLRNVVDSSIQEELNTGIQDANKPPGNFTILDTCLASIIDLALLCSSAAPDERIPMSDVVVKLNKIKSNYISQLGKQRHIYHNTFYSQLLPYSGNDPGPSNLQHF

SEQ ID NO: 63935 - protein, 605 aa, Zea Mays
MNQDNYLEEAYKMRNVLQEFVRHPRDKAPTILGLREHIFTGSVSSLAGFMSYQETSFVTIGQRFLAEPLRVRFHYGHPDIFDRIFHLTRGGISKASKTINLSEDVFAGYNSILRRGNIIYSEYIQVGKGRDVGLNQISKFEAKVANGNSEQTISRDIHRLGRRFDFFRMLSCYFTTVGFYFNSLISVVGVYVFLYGQLYLVLSGLQRALLLEAQTQNIKSLETALASQSFLQLGLLTGLPMVMELGLEKGFRAALSDFILMQLQLASVFFTFSLGTKAHYYGRTILHGGAKYRPTGRKFVVFHASFTENYQLYSRSHFVKGFELIFLLIVYHIFRRSYVSNVVHVMITYSTWFMAVAWLFTPFLFNPAGFAWQKIVDDWADWNRWMKNQGGIGVQPEKSWESWWNSENAHLRYSVLSSRILEVLLSLRFFIYQYGLVYHLNISQDNKNFLVYLLSWVVIIAIIGFVKLVNCASRRLSTKHQLVFRLIKLLTFLSVVTSLVLLYCLCRLSIMDLIICCLAFIPTGWGLLLIVQVLRPKIEYYAVWEPIQVIAHAYDYGMGSLLFFPIAVLAWMPVISAIQTRVLFNRAFSRQLQIQPFIAGKTKRR

SEQ ID NO: 63936 - protein, 563 aa, Zea Mays
MAAVKVDKATNELLLGPDWTLNIDICDAVNSDHGQGKEVIKALKKRIQHKNANVQFLALTLLETLIKNCGDHVHYQVVERNILEEMMKIVKKKADMQVRDKILMLLDSWQDAFGGPGGKHPHYYWAYAELKPESLPTYLQAGYGMPVDSSSRLDEAMSSNGAPLSISDLERMLGAVELLNEMLRAVNPNEKDAANDEIITELVTQCRSYQKKIMSSVSLVRDEDLLGQALDLNDRLQILLEKHDSIASCSPSSADVIDVVCEVPSGTAPNQGTNFPPQAALRTAIVPTNVLDDEDEENEDDEFSMLARRNSRFQPTNTQSTSSPTVHDETASSTASVPYTASPSVANNALPPHDPPAPPVRVSPEEQVMSDLLALTVSSNPSPSSYTPVTPEPGRLNQSSAPTGELPRAYHGDQGHVSAPYVAPWAQPQSQTAGSQQPTRTQAQVSYSSYAYPPPPWASQDSTESNPFVAAASSSQQYQSTSRTPTMPPNLRPLLQQSHSFGVPLPTASLDSPINGNLKQPLSAGARRPSYVSSNKFFDDLFERNSDGSLKVGSTRHSDVYGK

SEQ ID NO: 63937 - protein, 358 aa, Zea Mays
MRSRPASMAAGPTPSAAAASLRPPPPCFDYRAAVLADTRAAAAGNPALAGLIESGALVRVPRRRFGPVPAWRPPDFVEPEDVWILGTSHLSRDSVADVERVLRAVQPDNVVVELCRSRAGIMYASSDSSDEPLLKSNMFSLGGSKFFGAVSRSINLGGQSALALRLLLAVFSSKIASSANRPFGEEFRAARRVSEDIGAQLVLGDRPIEITLERAWKSLTWDQKAKLLISLFRGITSKTHTPDEKAAVSPYELYEKLSTSYPALLQPLIHERDMFLAWSLKRSKAVNKSRTVVGVVGKGHINGIVYALISDQGDLRFRDLVGRASSDTWVSSLVKGLVRDTVIGLVLWALYEQLQAVL

SEQ ID NO: 63938 - protein, 184 aa, Zea Mays
MASPYAGGVQPPSPAGAVQQQQQNHSLAFRVMRLSRPSLQPDLAALLRFDPRDVFLPEDALTGSDPSAAAKFLHGLLHPADSATAVPGDFTFRDRFLLRDPADALALPGLLVLPQSFGAIYLGETFCSYISINNSSSFEARDVVIKKYKQRDREYFFWIHQNPLLSQLDLGVDMISLWNMMSKN

SEQ ID NO: 63939 - protein, 795 aa, Zea Mays
MEAEPDPEIDVVPGPGGEPKVGMVFLNEDKAYEFYANYAETAGFSVRKGWLDKTAKNVTKSRAYVCSKEGFRPRSASIESKKPSLEARTGCQAHMTIKITASTKYVVTEFVADHNHDLETPLVDIQILKSEKLLAKVQQPPDPPKVVLIPNEYKNYTRTKRTKNMQLGDTQAICEYLQRMKGENPSFFYAIQVDEDDMFTNVFWADAKSIMDYNYFGDVVCVDTRYCTSDYGRPLLLFTGVNHHNQLIIFGSALIYDDSAQSFRWLFETFKSAMSGKQPKTVLTDQSAALSDAVSSWPGTIHRFSLLHLYLNATKISRDTLQGLETFASDFSRWLYEYEEDNFYSSWEILSEKYNIKDNEWFCKLYEDRERWALPYGRDTFCADIATTLRRDNTNTILTDLIKPEIDLQNFFNNYDKFLEEKRLAEQQADYLGAQITQRVAPLHLLWQAANLYTPTLFEMFRMEYEQISKCVVYSCGEIGPISEYQVTVKDRPQGQFVRFDSTECMVVCSCKKFEFMGLLCCHVLKILDLRNIKELPRHYILKRWRKDAQSESPENYGFAAIDEDPKFSLSKRYNALYRNLYKIAAKASESVEAYAFLENQYEQLVEQVEVLLQAKLHDKSSLSTVLKGNQPNMLNSEVNSSEHRRATGKKIKNVEVRRQQQSLDPNKKKKGRQVLLEPEIEIPLRVEPPTVSNDIQNHLRTTNQFLAPSHMMQAPYVAQQFGLGSLQGFPGMSPFGQIQEPTPLQQPHLQPPSFHSGPQITQQSSAWPPDHGSRPVHHSSLGFPVTYSILLFGC

SEQ ID NO: 63940 - protein, 727 aa, Zea Mays
MAAAAPSSSSSSSARARARAPPRPLHPLARGGPEREEMEAVAATHPGAPPMRRKGRKQKQLWPRTVLRKWLNIRSPESDFSADEGDTTGDDTDSEVDYEEMCAWERKLHDEERSVRGFGAEAIGNQLGVVPCGLRRRRKSETLRAQYIDVRELRICAGTWNVAGRLPPNDLDIQEWLDMEEPADIYVLGFQEIVPLNAGNIFGAEDNRPVAMWEHIIRETLNKISPDKPKYKSHSDPPSPSRFKPSDDAFVMEDELISESDSEGDGEVHPLNEQDLVDSVDGIHGNKCEPQTILQDEEFSRLPSVKTFDRSNNLSFKESNLEEKICQKILTKTFSHSERLGMIWPEPPLDMFAQCLPDSTKPFASGKVLRSYLSFKSVNGDSGPFAEDNSVPDFYMSCAAVKRKRPYFVRIISKQMVGVYLSIWVRRSLRKHIQSLKVSTVGVGAMGYIGNKGSISVSMSIYQTHFCFICCHLTSGEKEGDELKRNADVQEIHRRTIFNLVSRVNMPKTIYDHERIVWLGDLNYRINLPYEKTHELISKQDWNKLFGKDQLKVELKKGHLFEGWTEGVINFPPTYKYKVNSEKYISDDNKSGRRTPAWCDRILSHGKGMRLLSYKTVDLRLSDHRPVTAVYMADVEVFSSKKLQRALTFTDAEAEEQLSFEEDNASGIYNLGLYESSSEVYTPLVRAKVFSKVTWLKPQPLMRALSRPRRNGLPAVSRSFPTLRLRR

SEQ ID NO: 63941 - protein, 168 aa, Zea Mays
MPSAMPNFREMNKVVVTGRASQMHQVFSAETRAKEKKQPSLRKLQSIARLPSQRARSASPAQRAHPMAPAKNATPTNRDKRSESPVPSTAPAPLTRSASLSKKASLLKTSSVRAQPKKLAPMRTQVDRSDDSKDGERTPKKSKKFLKSILSRRKSRKDEPLPSYFDDY

SEQ ID NO: 63942 - protein, 128 aa, Zea Mays
MELQSRPLFSLRYGVQGTCFFSLETDASMALEDSRRPIEALPGRLFFFPPSLYKRQQSLSPILPTRALSHSSHSLTRRSSPKFAGVRHHRSPWSSPELRHPPSVVKPLLFSIRPKLVDSSPSHARTQG

SEQ ID NO: 63943 - protein, 160 aa, Zea Mays
MITGKILELLSPSLRQTLLLLNSLQGSVSTMLTNQCIHHGETYHHLWSTIVRIEHSVVGVRSRIGSNVHLKDTVMLGADYYETAVERGELLAEGKVPIGIGENTTIQKCIIDKNARIGKKVVISNSEGVDEADRTSEGFYIRSGITVVLKNAIIADGLVI

SEQ ID NO: 63944 - protein, 261 aa, Zea Mays
MARLFFLLLLFPLLYSSVTGLNRSDFPPSFLFGASTSSYQVEGAYLDDSKGLSNWDVFSHVPGNIDDGSNGDVAADHYHRYKDDIEMMHSIGLSSYRFSLSWSRILPKGRFGGVNQAGVKFYNSLINGLLEKGIQPFVTINHYDIPEELQERYNSWLNPEIQEDFTYFVELCFKMFGDRVKHWVTFNEPNLIVKLAYSIGAFPPNRCSEPYGKCDSGNSSTEPVCLLLNTHESCIICFPCSPSFSVQARWLCRNFITSKMV

SEQ ID NO: 63945 - protein, 367 aa, Zea Mays
MARYTFETMEHHRRRGTFNRPPMHGIWAHRNSDMLHSPAQDAVVRVYSRISEASIDRSSHTPARLLVPSQHIGCLLGKGGSIISEMRKITGANIRIFGNEQIPRCAQRNDEMVQVTGSFQSIQDALLHITGRIRDVILPKPHPSGGMPPYPPVGNIPVHQSRQEQPPPHLHPSGGMPPYPMHPFRPDAPMGHFEMGDHRPPPVHSMEYMGADRMPYLYGVEQGGPRPFLEQPSPRTCPPEAPRTNSEVPRNMSDAVPATDFRKGPVAIENQVATPTGTTEVIIPCNYIGFVCGNNGSEIEEIEKMSGASITVHDPKAGDANSKVVICGDPRRNKEGTEPDSCLHILWSVSNIIDDLITVQYHRRLCS

SEQ ID NO: 63946 - protein, 182 aa, Zea Mays
MGLSEEQQKQALELRSMTNGGKESLEETETDGASCNPAATGGCCQGNGGFTRALEQQKQALELRSMTNGGKESLEETETDGASCNPAATGGCCQGNGSFTCCHPDLPKEKRDKSIAIEQNPKSCEENGKEGGGAGSKKGNSKTCPMPTWFETWERADTYAALAVVAAAAAVFISFRIYKNLN

SEQ ID NO: 63947 - protein, 387 aa, Zea Mays
MRSCSGEHMPTKFSPQLVPSNIPLRRWNIPAVPTQARLLHRLQSFSRLYTQRRPRPLPCSYKSSHAATQVEHKRRARLRKPKDCRSALSPPVAAGAMAIGGKEVKDDLEEAPPPVLDEAMRPRRVALFVEPSPFAYISGYKNRFQNFIKHLREMGDEVIVVTNHEGVPQEFHGAKVIGSWSFPCPMYGKVPLSLALSPRIISEVAKFKPDIIHASSPGIMVFGALAIAKLLGVPLVMSYHTHVPVYIPRYTFSWLVEPMWQVIRFLHRAADLTLVPSAAISKDFETAQVISANRIRLWNKGVDSASFHPRFRSHEMRVRLSDGEPEKPLVIHVGRFGREKSLDFLKMVMERLPGVRIAFIGDGPYRRTPAAMFSSCHRSQKRSAKWS

SEQ ID NO: 63948 - protein, 950 aa, Zea Mays
MPTSSPFVGDSGTAGSPIRAERAVGEHGRRYDVFASDAMDTDAAEAASASAGAFALDGVHSPGRASPANMEDAGGAAAGHAARPPLAGSRSGFRRLGLRGMKQRLLVVANRLPVSANRRGEDHWSLEISAGGLVSALLGVKDVDAKWIGWAGVNVPDEIGQRALTKALAEKRCIPVFLDEEIVHQYYNGYCNNILWPLFHYLGLPQEDRLATTRNFESQFDAYKRANQMFADVVYQHYQEGDVIWCHDYHLMFLPKCLKDHDINMKVGWFLHTPFPSSEIYRTLPSRLELLRSVLCADLVGFHTYDYARHFVSACTRILGLEGTPEGVEDQGRLTRVAAFPIGIDSDRFKRALELPAVKRHINELTQRFAGRKVMLGVDRLDMIKGIPQKILAFEKFLEENPDWNDKVVLLQIAVPTRTDVPEYQKLTSQVHEIVGRINGRFGTLTAVPIHHLDRSLDFHALCALYAVTDVALVTSLRDGMNLVSYEYVACQGSKKGVLILSEFAGAAQSLGAGAILVNPWNITEVADSIHHALTMPSDEREKRHRHNYAHVTTHTAQDWAETFVFELNDTVAEALLRTRQVPPGLPGQTAIQQYLRSKNRLLILGFNSTLTEPVESSGRRGGDQIKEMELKLHPDLKGPLGALCEDERTTVIVLSGSDRSVLDENFGEFKMWLAAEHGMFLRPTYGEWMTTMPEHLNMDWVDSVKHVFEYFTERTPRSHFEHRETSFVWNYKYADVEFGRLQARDMLQHLWTGPISNAAVDVVQGSRSVEVRSVGVTKGAAIDRILGEIVHSENMITPIDYVLCIGHFLGKDEDIYVFFDPEYPSESKVKPEGGSASLDRRPNGRPASNGRSNSRNPQSRPQKAQQAASERSSSSSHSSTSSNHDWREGSSVLDLKAENYFSCAVGRKRSNARYLLSSSEEVVSFLKELATETAGFQSSCADYMFLDRQ

SEQ ID NO: 63949 - protein, 190 aa, Zea Mays
MLHEDRANEIYKKVEDLKSIRGRNQDAILAACLYIACRQEDRPRTVKEICSVANGATKKEIGRAKEFIVKQLEVEMGQSMEMGTIHAGNFLRRFCSTLGMNNQAVRAAQDAVKHSEELDIRRSPISIAAAVIYMITQLSEDKKPLKDISLATGVAEGTIRNSYKDLYPYASRLIPNTYAKEEDLKNLCTP

SEQ ID NO: 63950 - protein, 514 aa, Zea Mays
MYKQQPEEDHIVCSRPDITSSGPIKVQDIQGLPKQPNQASNLQVVAGVPDLLIGQPKPQTIKTEPSSQENKAAHCVDLVSDDHESNKQGLGDAAVLSIVQKDSSNLKYGSVSHEHLKSEAQNPRHTVAENPNSTLGSAKVCTSFSGSVSTPPELSHSLASKEPSSGNSDCSKKEELLSPTVSKHDPVKFSEDSSQEVTRYSEKVQLKDSQPSAPKSSQASRIHLSTVKHRLPVSKEQSQKIALTGGTSARSFHGEVPSLQSRNKAAACSSSQKKDKIYQRIINVTQDSSNNSAPTELRASDSAAPLSDEQLALLLHQQLNSSPRVPRVPRCHQAAGAQMLHSTGSSVFSKRYSSHGGRDHAAVIKKRNREDSLKDSEDTKRTEKRHRVSSTEHAPVKNSCRSAENIASEQKIRGICPTGANAGLSKDDLMDTIVSHNLPGLIDEIVSKDRNITYVELCDAIHQHFRDSRKSNGGDSLYRSYADAIKGCLRKRREWAHLFDQASKANRGKQLIVT

SEQ ID NO: 63951 - protein, 160 aa, Zea Mays
MSISMRLAIPAPAVTAAAPTRLRVRAAAAGNRGSLSVARAAVRAETGALRGCASLPKKPLGAAQPCRSRGAAAVCHSSAHLSARTIQWISAGASAVLLVAKGTAIHKSFLVPFFALQAPCSIISWIKGDYGQWTAFLALLVRLFFFIPGELKVVPYCHWP

SEQ ID NO: 63952 - protein, 316 aa, Zea Mays
MGDPETAWGSVRAAMGHPEPFQLYYVSIGNQECSKYYYKDNYVKFYSAIKASYPDIKIISSCDRSAISSDNPADLYDVHVYTSSGDMFSKSRMFDNTARTGPKAIVSEYAVTGNDAGRGTLIAALAEAAFLIGLERNSDVVEMASCAPLFVNDNDQRWNPDAIVFNSWQHYGCPNYWMLHFFKDSSSATLHPSTIQLPNYDQLVTSAITWNNPHDGNTYMKIKVVNFGSKAVSLNISVTGLETDIQTFGSIKTVLTSGWLRDENSFQQPDKVVPAASPITNAGKQMGVILNSYSLTSFDLLLDSESQVRASIQAYD

SEQ ID NO: 63953 - protein, 52 aa, Zea Mays
MMAFQEKSYHLITKLNCMQTGNGSNFCIIAKLLTTATETYLVLVDHAKVNCR

SEQ ID NO: 63954 - protein, 438 aa, Zea Mays
MYAAVFAAFVAGMACLVGVDFSAKILASIAKSFEDEYSKEDGLSLRNLTLLFCYLCIFGVTSSDLVYDLLSILSKRLTELDVSTVLTILQCCGMKLRGDDPCAMKDFVLSIQNSVNDLKLHSGVGADGKTDIRSRRMEFMLETICDIKNNKKRPKEDPSHHTRIKKWLQKLKAEDVLLRGLTWSRLLDPDKKGQWWLSGDVPSTVAKIEDVAAVISKDVAETKKLLQLAAAQRMNTDIRRAIFCIIMSAEDYVDAFEKLLRLGLSGKQDREIIRVIVDCCLHEKMFNKYYTVLASKLCNHEKNHKFSLQYCIWDHFKELDNMESSRSMNLAKLVAEMLLNFTLSLATLKVVNLANPVEMTPARVSHFRMLFETLLQKDDARVWNVFTRVAGLPELEVLRDGIVMFIKQHVIAEDSGKDLASKFKIAKKALDNTAGVLM

SEQ ID NO: 63955 - protein, 389 aa, Zea Mays
MFPASNSTEESHTVCGDVEVNINNMNSFSRNINIEETSKLNQDMDGVSVSPTKILECTSNIVSSKFPLHRCMRIVPHDQNSGAFFIAVLHKLSPLNGSQIKDTKIQHRLGTDRTIQFQKEPKPETRPYETTLTRRQHNVSEVDDTEVLGRGQKLGTDSQTSKDKNSSEVEIVSILAESGDRMELQKQSRWEGVDPVLVLNDEAVIKSIQSFFGIKESFPLEGHLVTRSPDNARRIYYVSKSVKEILELNSKVGGQLKIASLGVKMFERHRSKDPCPCAYRLSYDGLSLVLPSISKRILYASALEFHRLVQYRSISFAHFTDTRFGEQAASLTPGCCVVVLLEGNRRVDSICKDPSTIAVVCWRGKGTINVMVSPSDRKDLLERMAYRFG

SEQ ID NO: 63956 - protein, 576 aa, Zea Mays
MSALADAKKTTKGVAAQLLDSVNKLESNMKTNLERAMKENDRVYLMRVPAAGSLGALPAASLVKPTSLAEVLDASKERLFSSLVPDGSMKALSKYTEMVDNSIRTQAEKLQQASEITRVRLKEMDLPDSILSLEGNITLPMDLKEDVEAVQISGGPAGLESELQQLRDLSRVNQELLVQTEELLQKEANEDAQFRTQFGSRWTRPQSSTLTKNIQDRLNLFASNLKRAADSDSLIERGVKENYSLMSILDKRPIESALPSISRPIMSLDGNEDAIVGALKQSLRQLESLGAQRAGLEDMLKEMKRKDDILPKLMVGVGSHDDLFKKEIAKYDPICADIADNIVAQEQLLLQIQAQNEQFAAVFNLEDYKAARERCYKQIAAAVVKYQEFKKNINEGLNFYVTLQEAIGKIKQQCSDFIMTRNIQCREMMEDVQRKLPGFRFSSSSRSSMQRNAASVPPDESSPSPPPPHAQAPYASPPGVDSRHGYSQPEARPAYSQPYPPSYGATPQQPTYGAQHPGQYQPPPGHDCGQPAYPGWRGPYPYYNAPQPQQSVPCPQAPYNATGAYPPHQSNYYRPQ

SEQ ID NO: 63957 - protein, 427 aa, Zea Mays
MEAAAAAPHLLHCGGFGRVAHLPALHRRGQFPRVRAVATEPKLSTSTSSSSRGRTRSRNDLSDTRFGEVSKEIQRVRKQMEQDEQLATLMRGLRGQNLRDEQFADDNVRLRLVEVESADNNEGLPLVYSPEIISAYWGKRPRAVATRVVQLLSVAGGFISHLVSDLINKKLKENEVARAIELREIVTSLGPAYIKLGQALSIRPDILSPAAMTELQKLCDKVPSFPDDIAMALLEEELGQPWQAIYSELSPSPIAAASLGQVYKGRLKETGELVAVKVQRPFVLETVTIDLFIIRNLGLVLRRFPQVSIDVVGLVDEWAARFFEELDYVNEGENGTYFADVMKEDLPQVVVPKTYHKYTSRKVLTTQWIEGEKLSQSTEDDVGSLVSVGVICYLKQLLDTGFFHADPHPGNMIRTPDGKLAILDFGF

SEQ ID NO: 63958 - protein, 1166 aa, Zea Mays
MAFELYGMLAGNVSPMTGENVKPAYGGDEEAFLIKVVTPIYKVIEKEAERSKTMKSKHSHWRNYDDLNEYFWSVDCFRLGWPMRADADFFKTPKDAYLNLLNGENRSAGNTHWMGKVNFVEIRSFWHIFRSFDRMWIFLILSLQAMIIIAWNGGTPSDIFDAGVFKKVLSIFITAAILKLGQAILDLIFGWKARRNMSFAVKLRYILKLICAAAWVVILPVTYAYTWENPTGLARTIKSWLGDGQNQPSLYILAIVIYMAPNIVASMLFLFPFMRRFLESSNVKVITIIMWWSQPRLFVGRGMHEGAFSLFKYTMFWVLLLATKLTVSFYIEIKPLVQPTIDIMREPIRTFQWHEFFPHGTNNIGVVISLWAPIILVYFMDTQIWYALFSTLIGGIYGAYRRLGEIRTLGMLRSRFESLPEAFNERLIPSDANKSKGLRAAFSSRPKASGDERQKEKRAARFAQMWNVIITSFREEDLIDNREMDLLLVPYCKDRELDIFQWPPFLLASKIPIALDMAADSGGKDRDLTKRIKSDPYFSFAIRECYASFKNIINTLVFGQREKDVLAQIFAVVDQHIEDETLIKDLNMRNLPALSKKFVELLELLQKNKEEDLGQVVILFQDMLEVVTRDIMEEQDQLGTLLESAHGANSRKHEGITPLDQQDQLFAKAIKFPVDESIAWTEKIKRLHLLLTVKESAMDVPTNLDARRRISFFANSLFMDMPNAPKVRNMLAFSILTPYYKEDVLFSLQNLEEPNEDGVSILFYLQKIYPDEWKNFLERVGCKNEEGLREDEELEEKLRLWASYRGQTLTRTVRGMMYYRKALELQAFLDMAEDDDLMEGYRATEVMPEDSQLMTQCKAIADMKFTYVVSCQQYGIQKRSNEPCAHDILRLMTEYPSLRVAYIDEVEAPSQDRNKKIEKVYYSVLVKASVTKPDEPGQSLDQVIYKIKLPGNAILGEGKPENQNHAIIFTRGECLQTIDMNQEHYMEEALKMRNLLQEFEKKHGVRYPSILGVREHIFTGSVSSLAWFMSNQETSFVTIGQRVLANPLRVRFHYGHPDIFDRLFHITRGGVSKASKIINLSEDIFAGFNSTLREGNVTHHEYMQVGKGRDVGLNQISLFEAKIANGNGEQTLSRDIYRLGHRFDFFRMLSCYYTTIGFYFSTMVFW

SEQ ID NO: 63959 - protein, 248 aa, Zea Mays
MRPCSRILAARHFVRSFRFDPSQTTSPAAGFRRLTGANRPFVPKPLFGILLGGFRSNCGVLPGKGVPLGSLGSFLPDSAYQLHGARLQRDTRGNAFSTSANAVTVKKPVGDKVQKDASKKDIDEEIADSQILKNLGKYLLLNDSPDFRFRVALSLVLLVGAKVINVQVPFLFKLAIDWLAALGGAEASLASFTETNATLLALFASPAAVLIGYGIARSGVSACTELRNAVFSKVTLRAIRSVSRKLSR

SEQ ID NO: 63960 - protein, 311 aa, Zea Mays
MALRRITPRRRPVLPVPRAFSSSPPFPPPPPPANDPDPDAAQPPSSSPPPNSGAPRNPESSFFQDIKDRLRSSPTSPSPRRIPTTLPRPDPARGAPSSGPPIGDIRRMLQNFRLTGSTSDAPSTSAPGSNPSFMDLLKNHLDQGANARQAELGFNAIGESLKRPRPPKPFITPSSRNIFCRELERTSKALGARQEENGSAIELKGSYSYEELGKRLGELRPAGAGKDGKEWFSLKELQGRIAKLAEQESQLAGPFSEMRRGIRNLQKQGKPGRPVNIQALLNPVGQPTPDYMSGPPQVELLEKGRMWSTTA

SEQ ID NO: 63961 - protein, 493 aa, Zea Mays
MFAASNATATRLILPRPSVPFRALLIPRRRGRLRRAVHANAVAGGGGGSEGVAKEPPRTLFPGGFKRPEIQVPALVLRVGTEEALRCGDEVADAVSRGVGIVVLEAGEEGGGRSYEAARALRATVGDRAYLLIAERVDVASAVGASGVVLADDGIPAIVARSMMMKSNADSIYLPIVARRIQSANSALSASSSEGADFLIVNTGSGDFVDVINDVVGQHVKIPIFVTLNHLSEGTYSDFTSRLLQSGASGVVTSLAGMELLNDDLIKKDFTKVGSAEELPQASYSSAGMLEDVNNVMVLTRDCEKTKVAGFTKLDEEVIKLIEIEKPILNEAITIIRKAAPMMEEVELLVDAASRLSEPFLLVIVGEFNSGKSTFINALLGRQYLQEGVVPTTNEITLLSYSEVESENFERCERHPDGQFMCYLSVPILKEMNLVDTPGTNVILQRQQRLTEEYVPRADLVLFVLSSDRPLTESESQFQLILPILDKIEHSMD

SEQ ID NO: 63962 - protein, 328 aa, Zea Mays
MDEVPATAAVLDFRPGSSVPRVSAVPRRAVQCPPDTGGAEAATGGRPGIGNTAAVSAKLTGSSSAGPDIQSVDCDTSGGLAGGDAGDVGVLCLENAAETESVEPGVSDVRLGAPVEERHGRTLDSTGLGSGKAGETNEISLVEVSQSGATSSLDATASIGGGYSLVEGSLPEASGARRCKPEVHEVPTGTPATVGFPIEDGGYGFGIGPNDDVDGRNDPAGGEWEPPTDGNDAEDVTDMGGILCDERVERMETNSVEREASNGSTVSSEEGVDRMGTSLDDSEASDGSTTQDSDTDVETESSVSSIEEQEAGYGAHIPQPVCVSCQLL

SEQ ID NO: 63963 - protein, 135 aa, Zea Mays
MAMVASTSFAYHKEEQGRPGQGAGRQGAQAPLQGRRDHAASAVPRRPLLPHQHPLRRERDDRGAGVHGVGGDAPVPAAQGAVRAEREAPRRPLHRQIHPQPLPPEPARPVLATISVSVLYISIASLCIDIHTYIC

SEQ ID NO: 63964 - protein, 89 aa, Zea Mays
MFRPCPGGQSDTSNWGMHIREATFWPLLVQMYASGISKAQSSRSYQWAIGNDRTDCWIDSGSSDRKRHLRAGADDTCNGMMSLLLRFNV

SEQ ID NO: 63965 - protein, 252 aa, Zea Mays
MQRGGDQAGASLGMEMGVGYAGGGGGGECSSSSAAAAAAAAAEGEERQLLKGEIAVHPLCEQLVAAHVGCLRVATPIDHLPLIDAQLAQSSGLLHSYAAHHRPFLSPHDKHDLDSFLAQYLMLLCSFREQLQQHVRVHAVEAVMACREIEQSLQDLTGATLEEGTGATMSEDEDEAPMLEVGLDMGSDGHDMMGFGPLMPTDSERSLMERVRQELKMELKQGFKSRIEDVREEILRKRRTIRLSSSKRPACS

SEQ ID NO: 63966 - protein, 160 aa, Zea Mays
MGGVTSTIAARFAFFPPTPPSYTVVVADAATGRLAIPEISRALSRRRRRDGAGAGGSSSASSVAAAENEEGAEVVRLRTRRGNEIVGVYVRHARASATLLYSHGNAADLGQMYGLFVELSRRLRVNLFGYDYSGYGRSTGKTLKQHITASRKNIVSQMRI

SEQ ID NO: 63967 - protein, 960 aa, Zea Mays
MVLLATSDPTGVAHVQTVNLDGETNLKTRYAKQETHVMFSQNGGVGGVLHCERPNRNIYGFQANLEIDGKRVSLGPSNIVLRGCELKNTTWAIGVVVYAGKETKVMLNSSGAPSKRSRLETQLNRETVILSIMLIGMCTTASVLAGIWLLNHRRELEFTQFFREKDYTTGKNYNYYGVGMQIFITFLMAVIVYQVIIPISLYISMELVRLGQAYFMGADKDLYDESSRSKFQCRALNINEDLGQIRYVFSDKTGTLTENKMVFQCASIRGVDYNSGKDTGGYSVVVGDHLWTPKMSVKIDPELVKLLRDGGSNEEPKLVLEFLLALASCNTIVPLVLDTRDSKQKLIDYQGESPDEQALAYAAASYGIVLVERTSGYIVIDVLGDRQRFDILGLHEFDSDRKRMSVIVGCPDKTVKLYVKGADSSVFGITNNSSELDIVRATEAHLHKYSSLGLRTLVVGMRKLSQSEFEEWQLAYENASTAVLGRGNLLRSVAANIEINVNILGATGIEDKLQDGVPEAIESIRQADIKVWILTGDKQETAISIGYSCKLLTNDMTQIVINNNSKESCQRSLVEALATTKKLRAASSIGTQGPLLASETSNVTLALIVDGNSLVYILETDLQDELFKLATECSVVLCCRVAPLQKAGIVALIKNRTNDMTLAIGDGANDVSMIQMADVGIGISGQEGRQAVMASDFSMGQFRFLVPLLLVHGHWNYQRMAYMILYNFYKNAMFVLVLFWYVLYTAFTLTTAITEWSSLLYTVLYTSLPTIVVGILDKDLNKATLIAYPKLYGSGQRDDKYNVNLFVLNMLEALWQSLVVFYLPYFAYRRSTIDMSSLGDLWALAPVIVVNMQLAMDIIRWNWIIHAFVWGTIAATTVCLFVIDSIWVLPGYGAIFHIMGTGLFWFLLLIIVVTAMVPHFVFKAFTEHFRPSDIQIAREMEKFANVNQVNRLEFPTRGLS

SEQ ID NO: 63968 - protein, 429 aa, Zea Mays
MGDGASGRGGRSGAGRRVGEYELLRPIGSGAYSQVWLGRHRVRGTEVAVKEIAMERLSKKLRESLLSEVDILRRIRHDNVIALHDSVKDHGSIYLILEYCRGGDLHAYLQRHKRVSEKVAKHFIRQLASGLKMLRDNNVVHRDLKPQNILLVENNENTLLKIADFGFAKFLQPFALAETLCGSPLYMAPEVMQGQKYDAKADLWSVGVILYQLVTGIPPFNGDNQIQLLKNILRTHEIRLPSDCELSHDCIDLCRKLLRLNSVERLTVEEFVHHPFLSEHAPERTLSRTLSEIRDGFPINNISPTRPSSQSSQEDCMPFPLDDESSGQDEGPIPDSKSPMKSYGFPTGKRLDKTSGQSPSKHTSLFSRYVLGNNHAPSSQHHGHTDKMTKESKIHEVQGPKGVYPEGICICVWTTPRGIIVFNKCFSAA

SEQ ID NO: 63969 - protein, 80 aa, Zea Mays
MDLQDYSENGTVTVVYRVILKGTDGEAYRDATGTTQFHEGRREDAVAAAEEAAFSKACAWFGFGLYLYHQDESHYDDHFH

SEQ ID NO: 63970 - protein, 79 aa, Zea Mays
MANSIILVFANKQDLRGTMSTDEVSEGLGLHDLRNRIWHIQGTCALRGEGLYDGLDWLASTLKQLQESGHATSVAGPSI

SEQ ID NO: 63971 - protein, 95 aa, Zea Mays
MHGGLSPEWTSLDQIKDIERPAEIPDYGLLCDLLWSDPSPDGEGWGESDRGVSCTFGADKLVEFLEKNDLDLICRAHQVCESLSSILFYQLSFTF

SEQ ID NO: 63972 - protein, 138 aa, Zea Mays
MIRQWSTPELYIHLDMHTQCSDAVFKGPEGLEGAEGARWVPGKHTGFWYLFFCLLFCLRSRSEEGSWRMKRITRSIPLPLLKRERRRLQGWRQMIMGATIRLRRFPSLASSLYPTDSLCCLASLCHTKVSKKYGFVDV

SEQ ID NO: 63973 - protein, 420 aa, Zea Mays
MLGDILHPAINWADKESHLDPDEMAKMKSAFIGNLPEDVNEEYLRKLFGQFGEVVRVAISRKGQCPVAFVHFAKRSELENAIEEMDGKTVRGPGRGPSFKIQVSVARPTADNDKKRSREEVRTRRSNASGDRRDYSHGRYGHDSLDRQVKAPRLSNYVADAADPYESAVNSLPSAVKEVLLRILRLRIGTRYDIDIHCVKSLDELPESSALAVLNQFLISGGDKHNKGDYFASLVAKHQAETFGLTHALHGTTYLSRNPEMHSKRYPHEDYDFVTPSRYDSSAHHPSTYYEDDPPVSESRVRRYAEERSTIVRSPEPRPRYDETDIRINPEPRLPYESRHNAEKHLDRRYIQEHSSNIERPAEEALLSRERRFLPAAGYMPNPGGSDFRSRGAHQARSEPAPLRKPVLIRLVGAICQIRP

SEQ ID NO: 63974 - protein, 213 aa, Zea Mays
MFLSDSTIVTRSRKQKQYMSSTNRQLQIVFKSPIRNSESNLQKSNTVWCERRMHVYVITRQVPRELSPLFMNQRIYFQVLRLSNKGHELAKLRVMQGSKATKWIHVMKLKGTRTDVGGPVYRLLVLAKVQTHRQHVTKVQHLEGNECIVRKAKLNPAIGIFIFLHNGLSKLLFIYISVHTTSLAKPFGGFLLYACIGTSAKKNKDDIFNIPLQ

SEQ ID NO: 63975 - protein, 50 aa, Zea Mays
MRPRARSGQCLGRWVGRMDPCGEPAWSSLCMSRMVLCRQADALRMAEVRC

SEQ ID NO: 63976 - protein, 172 aa, Zea Mays
MSSSTSLTSLSSYPLPLPPLSRTPSSSADSIALSVVPHVASTPLALPRVAPASPALPRAAPPPFVDTTSSRFADPVHVYQRCGRAAALAPSRTEPQVYHLVALCWDPGLVLLASNSSTLSLEPSYACGALVEPNWRHTMEDYEALLANRTWDLVPRPLMPMWSPGNGSSSTR

SEQ ID NO: 63977 - protein, 67 aa, Zea Mays
MDGDEENVGPFRRTSARTRRMATRMASALASSDNRAQVTVGLDWLLLFPRCFPTVCQFPFVYEYSLC

SEQ ID NO: 63978 - protein, 99 aa, Zea Mays
MNTMDWLGQSQYATQTVYWSSLSSAISEVVFSKNATVRLLVAYWAHLIPNTEKYLKSLLYSNVLCASSAYNHCGGKVEIKYYVVPGHNETGPALSQGGE

SEQ ID NO: 63979 - protein, 297 aa, Zea Mays
MDPPPRRLAAPLLLLLLAAASPAARAWKKDEFRNCNQTPFCKRARTRAPHSLEAPLSLAAGSLAVSPDGSISAELSHPSRPRPLVLRLSVLPPHALRLQIDEDYSTATPCWPGSSSYPDMLNPEIREWWADKFSYENYKGSTPTLYIWNDMNEPSVFNGPEVTMPRDAMHYGDVEHRELHNAYGYYFHMATADGLLKRDKGKHRPFVLSRAFFAGSQRYGAVWTGDNSADWDHLKSSIPMVLILGLTGLPFSGADVGGFFGNPEPDLLVRWYQVGAFYPFFRGHAHHDTKRRSEELP

SEQ ID NO: 63980 - protein, 597 aa, Zea Mays
MMSHEQQIVPPSKGSVNGFPHRKLDKEGSGTQSRINLVRSSSGGFTNSGHGSHSRDRLIYVLTQLIGHHVDVHVNNGSIISGIFHATNPDKDFGVVLKMAQVIKDGSARGQRYPAVLVKKPETMIIPARELVQVFAKDIELGGELPKVPGNDKRKDLLIDSAITRYHYLEERELERWAPDGGDSECIELEKYDRKGNRSWDQFETNAALFGVKSTFNEEIYTTKLERGPHMRELEKHASRIAREIEGEDTRDIHLAEERGLFLGDDLDHDEEIKYSAVRRDTDNSKYKPPFTKVPSSTCHVDSFNRTVNIDPNDSLACSSTMDKESSSHIFDDTDASATIHTNSVSQPTSDYLSDRPLSNDENRLDRKLNKESNENMDNRKLQHEDNLPDGARPLISEALDGRSSSSHAYEPSFSGQGFKSPETPDSTVPVKHPSAMEPVTSSQRPGSSTSSTSERIGANSAAGAPGLSPSSSIGSLTAEKSTLNPNAKEFKLNPNAKSFTPSASLRPPHPTSSDASYYYPNNMPAMPLGPGLPVGMGFPPAYGAQPVMYNTQPGASPHGYMHPAGPQYGQQMTIGGQTRPVYYYAPEMQQYRGRNF

SEQ ID NO: 63981 - protein, 52 aa, Zea Mays
MAEEKKVVDPALAGFYEAMEKTNTKKITNEMVVGLSEDPSDSESFDLESGNE

SEQ ID NO: 63982 - protein, 76 aa, Zea Mays
MTGLMSFASLITCEGAVNALSREGCGHFEVFDRSDEDFEREIFQVEDPVLKRSAGVLYDRMWGPHGRETVRERFDR

SEQ ID NO: 63983 - protein, 51 aa, Zea Mays
MRTTDDDPNYSLTALPLSPQRRFQQDADGEVDDGLTTVAGFLCRVKEKGER

SEQ ID NO: 63984 - protein, 237 aa, Zea Mays
MAATAAVAGTGSSLSSRRSRSVVSSSFRAAASRFRSPRCVLGSEQLRVAHEGKRMSGAESRTAWAPKVPAPESRLAALPRELRDSRMKIFSGTANRPLAQEIAAYLGIELGKILIKRFADGEIYVQLQESVRGCDVFLIQPTCSPVNENLMELFIMIDACRRASARSITVVIPYFGYARADRKAQGREPITAKLAANLLTEAGSDRVIVCDIHSTQALGYFDIPVDHIYGQCHPWCL

SEQ ID NO: 63985 - protein, 329 aa, Zea Mays
MSRIRSGVEVVASRGCARMVIPGMHHNPSSAASVSSSAASRAAPAAGSGPAAHADGPFAGLVICVTGLSKEARVQVKEATERLGGEYSGSLHPKCTHLVVQSFAGRKFEHALKHGPRNGLFLVTLGWFVDCVRRNMRLDESLYAIKSIGENGVPPGEFSRLVGVPVNEKSCLPPLIFQDKACSDMTQKHSLQTPGNGGGHDGLVFMNDTIYIDPGISDEMRKKISDAVTREGGKLLEHWFIGCPTTYIVCEDVCVKRYVGHSENIVTPLWILKTVKEKNLQRLVHLSSDLARHVAMVLENVQTSEEETWKCTFYKHKLMWSSINQRGDQ

SEQ ID NO: 63986 - protein, 698 aa, Zea Mays
MWSLPLLLESKDLAELSIGETDARQEILEFLDHWGLINFHPFPPDGHEESKPEETQDNSNDEKASLIEQLFKFESVQSYMTPLPMKEDVRAPPPLPSLIPESVLIQDVVAAAEPSVEYHCNSCSVDCSRKRYHCRTQADFDLCCDCYNEGKFDPGMAKTDFILMDSAGVSGASGTSWTDEETLLLLEGLEIFGGKWAEIAEHVATKTKAQCMLHFLQMQIEDRFHDGKDINQNIPVSTDQATTEKAIAETSEKMEVEDKVEGRGTVDEKASEKTEGNCEETKTENASVVVNKDTQNSDGRDSGASPSTEEPKQSSDEQPVVKENSADVDTSGEKLSNVAIDILKSAFEATGHSPEYEGSFADAGNPVMALAAYLAGLVEDDNTTTSFRSSLKSVSDVSPALQLSSRHCFILEDPPDELKDICASVSKKNRDGDQKQDEDMIQNSIDTEKKEINEKEGIKSVSSDDCSLVEPKTNNAKESGDSTAIGDKSATETTKGNTEQVNDLPSVEVEAPDDSSSKGKDELNKTKDAVATPATVQEQKHSQTLGNGDREEPNNIESVVVGEEKGSVVTANRPDSIARLKRAAATAVSAAAVKARFLGDQEEYQIRRLTALVIEKLFQKIEVKMSLFSEIEQVVFRTREYTEKTRKKLLKERNAIIAARMGALPSRPNQTGVAGNRLPPGYGNPPVRPPNAMPRPTS

SEQ ID NO: 63987 - protein, 168 aa, Zea Mays
MNEKDWLSLVAVHSDSWLMSVAFYFGARFGFDKESRKRLFTMINNLPSIYEVVTGTAKKESKEKTPKSSNKTNKSGSKPSRQVEPNSRVPKMPPPKDEESEGEEGEPQEDHESALCGACGLGYDDFWICCDLCETWFHGKCVKITPNKAEHIKQYKCPSCTGSKRAKA

SEQ ID NO: 63988 - protein, 650 aa, Zea Mays
MYVVKRDGRQETVHFDKITARLKKLSYGLSQDHCDPVLVAQKVCAGVYKGVTTSQLDELAAETAAAMTASHPDYASLAARIAVSNLHKNTKKSFSETIKDMYRHFNERSGLMAPLVAEDVYEIIMNNAARLDSEIIYDRDFDYDYFGFKTLERSYLLKLGGKVVERPQHMLMRVSVGIHKEDIESAIRTYHLMSQRWFTHASPTLFNAGTPRPQLSSCFLICMKDDSIEGIYETLKECAVISKSAGGIGVSVHNIRATGSYIRGTNGTSNGIVPMLRVFNDTARYVDQGGGKRKGAFAVYLEPWHADIFEFLDLRKNHGKEENRARDLFYALWVPDLFMQRVQSNGEWSLFCPNEAPGLADCWGEEFDNLYKKYESQGKAKKVVPAQTLWFDILKAQIETGTPYMLYKDTCNRKSNQQNLGTIKSSNLCTEIIEFTSPTETAVCNLASIALPRFVREKGVPLESHPSKLVGSSDSKNRYFDFEKLAEVTSTVTYNLNKIIDINYYPVETAKRSNMRHRPIGIGVQGLADTFILLGMPFDSLEAHQLNKDIFETIYYHALKSSAELAVKEGPYETYEGSPVSKGILQPDMWNVVPSTRWNWPSLRETISKAGIRNSLLVAPMPTASTSQILGNNECFEPYTSNIYSRRVLR

SEQ ID NO: 63989 - protein, 65 aa, Zea Mays
MSDSAHLVVCAGGGCPRARMMADPRPVAAVVVVPRHRRAVAVTPRSKGRATARPLCGHAAPTQGP

SEQ ID NO: 63990 - protein, 223 aa, Zea Mays
MATGAVTPPPLAGARRFPRGRSFLHRRLATSPMKDESVISTDGGNEETDTDSLHVARGLSHPGLSSSLSNKASVVPTPLLPSGQSDLRFNRLRPSIDESDCKYKRLFGCYVAREAVIDEEYWIAAWLRAEDQYENESGNRYVESFKRKFASKEFHALKKRCNTQHREKYICLVAVKNDDIRRTVLNSVVGTLDVCVRHPLYGEKFPEVGCNCTFSMCLFCCCI

SEQ ID NO: 63991 - protein, 920 aa, Zea Mays
MMGLHSGVDTSAVTMDGVVVVDLEYNRITITEEIPPIPETEHNFLRVEILKLLQPNVMGIDFMKINLANMGDLRAGTKSWSQEHDFQLRLIFLRFFAQILSGYRNFIDTTSATGFNSQAFLKKRSRATNQPVDSMSMIMQFLETQGFLDYLERCNTAEENAHNLLDKLQDATGRGQNPLTIFPSQVSDPEIITIANPEIEGSRLDNRHCYKRFPANARTEEQEEKRKSILALASGASKQVPSSPSIRVNGGPKAESLSPRERAAERERMVLDIKVKLQGLWLRLLRLGATEDPLSSFEYGTILALIESDAEGIGGSGFVECIREHIHSGWQCRLTDEQFIAVKELLKMAITLANSRNDLATIRDALEVSAEMYRKDPNNVQDYVQRHLLSLSVWEELRFWDGYFEYLMENCSNKSANYVTLVTAQLILMATHMAGLGLPDIDSWNMIEKIAERNNLGYKQLIKLRALLTHLQQLRIGYWGVATGKSQPLQSYGMASPHAIDVIDESQQPAEASGLGRSWVQSMFSRDRSLRASSFNRASDGNAVAATGKTEISAAQKKTQTNMRTLRGHTGAITALHCVTRKEVWDLVGDREDAGFFISGSTDCTVKIWDPSLRGSELRATLKGHTRAIRTISSDRGKIVSGADDQSVIVWDKQTFKLLEELKGHEAPVSSVRMLSGERVLIASHDGTVKMWDVRTDTCVVTVGRCQSAVLCMEYDDSTGILAAAGRDITAHVWDIRSSKQMFKLQGHTKWIRSMRMTGETIITGSDDWTARVWSLNRGTCDAVLACHAGPVLCVEYSPSDKGIITGSADGLIRFWENEGGIKCVKNLTLHTASVLSISASDHWLAIGAADNSMSLFHRPQERFGGFSNAGSKVAGWQLYRTPQKTAAVVRCIASDLDRKRICSGGRNGLLRLWDATTSI

SEQ ID NO: 63992 - protein, 134 aa, Zea Mays
MIIADSLYYTKFKLHCRPGMEDGRNCYADEHYLPTVFHMMDPDGIANWSVTHVDWSEGKWHPKAYRAKDVTFELLKNITSIDISHHVTSDSKKVVTEKACLWNETKRPCYLFARKFYPESINNLLTLFANYTLI

SEQ ID NO: 63993 - protein, 110 aa, Zea Mays
MLDDRPIRVDFDRGFEEGRQWGRGRSGVQALQTMIYADKTELVPTSPHQLEMGTIEDVRTEPDVSQEQTTKENGSQTTFSYERLISKSTDPVSGIDNKHREAKLFTIKSK

SEQ ID NO: 63994 - protein, 243 aa, Zea Mays
MECIAEMPRAPLDSRLRKRQRLGWDVGPAEMYKAVRPRHGWDVGPAEMYQLELCGQEVVNAISAAALGLSSGCVSSQVKQEQPHDGSPPLREDDRDGHYVFAVGDNLTSRYKINAKMGEGTFGQVLECWDKERKEMVAIKIIRGIKKYRDAAMIEIGMLEQLGKYDESRSSCVQIRNWFDYRNHICIVFERLGPSLYDFLRENSYRSFPIALVREIAKQLLECIACFIPIPKGGILLQAGAQV

SEQ ID NO: 63995 - protein, 749 aa, Zea Mays
MVSRCCMYEMAAHRPAFKAFDMAGLISKINRSSMGPLPACYSVSMKTLIKSMLRKSPEHRPTASEILKNPYLQPYVNQYRPLYDSSNPMRMPEKQLHTSRSSQRSMSDSQSSSISSSDIDSAQSSDRSTSGGTTSTDRKTIDTASIRDVDQGKSDENGATPEDVRGNKDNGSVQFKRQDSLKCIHVDHHPRPESKQPKIIEKIMTTLREESRLREINCPVRGGVKPNSGHSNNNQVEQPLQVSRTNSDMPCSLKSGNILSHDEHVNEVEASPPLKKLSPIVEHSPKMKTAGPSTPEPAKQITENGAAASGRTKNKSPLPARRPSPQRQAGAGTSSFPVTMTRRTHTKFITEREKTLEGPSCSPDNTLRDHPQSLMISSNPSEGQHMKLDSSQANPTNLWELFTVSAKEHSSACSSSTVGCTEPMDQPELSEPNSPVCLVSPCTGCSPNTTEEDDKSTIPCSEINTDKNIATKNGGSSLRSDLEPSFLSSEQEFISKEVQSSKHEKSNITFQSGEDKFTVQELLSSAPEVAPPVSSAPEAAHSIPATKGTLLDSPTSLQSWKKHVVSHLNPPVDDALQTIRHSTFCLSDEQPTQGSVQREAQSADMIKLLDVVPEEADARSSSLNTLLPARSPSVTATSQVSEANVATKALAASDNTKSSAASSGTSNGVQEEASPTKEVLDVTSFRQRAEALEGLLELSAELLETQRLEELAIVLKPFGKNKVSPRETAIWLARSFKGMMTDEAGRTSL

SEQ ID NO: 63996 - protein, 76 aa, Zea Mays
MNLGFSHPVRMAIPEGLAVKVEENTRITVSGYDKSAIGQFAATIKKWRPPEPYKGKGIRYMDEVVRRKEGKAGKKK

SEQ ID NO: 63997 - protein, 124 aa, Zea Mays
MKRSVALKKGLPILGVFRSFAAVGVDPADMGVGPAVAIPAAVKFAGLEIGDIDLFELNEPFASQFVYCCNKLGLDRSKVNVNGGAIALGHPLDATGARCMATLLNEMKRQGIDCRFGVVTMCID

SEQ ID NO: 63998 - protein, 56 aa, Zea Mays
MLGSSAAYSGGSGARRAKAQGGSRVAIQPTPSRTHAAAPCIPGRPCLLRPRSYHRA

SEQ ID NO: 63999 - protein, 101 aa, Zea Mays
MKIVLGAAKGVAFLHGGPKPVIYRDFKTSNVLLDVEYNAKLSDFSLAKAGPQGDKTHVYTRVVGTYGYAAPEYVMTDAFFLGPSPMGNNGDDQRLGLSRGS

SEQ ID NO: 64000 - protein, 258 aa, Zea Mays
MLAGRRPGLRSSGAWCRVVPQAPIPLQDPSSPAAPPNSSSSPPPDLNMSDATTAPATGAGDHVVDAAAHKPPAAPSPDMASIRRGGSSVTETVTQATQQQQSRLDDDQLAELREIFRSFDRNADGSLTQLELGSLLRSLGLTPSADQLDALITRADTNSNGLIEFSEFVALVAPDLLQDRSPYSEDQLRKLFAIFDRDGNGFITAAELAHSMAKLGHALTVKELTGMIKEADTDGDGRINFQEFSRAITAAAFDNIFS

SEQ ID NO: 64001 - protein, 354 aa, Zea Mays
MPPRPSLHSLLLMAASAAAASGDSGPLLAARRRLAATAAAGGHRIRLLHSFSPGRVPRRPEVVCCVRSAPDSRRSAPAPPCSRNVLSAKNYSTASEERLGKIIQKLKNEGINPKQWRLGNFQRMLCPQCNGGSSEELSLSVYIRKDGINATWNCFRSKCGWRGFVQADGVTNISQGKSGIESETDQEVEAKKAANKVYRKISDEDLNLEPLCDELVEYFATRMISAETLRRNKVMQRNWNNKISIAFTYRRDGALVGCKYRAVDKTFSQEANTEKIFYGLDDIKRAHDVIIVEGEIDKLSMDEAGYRNCVSVPDGAPPKVSSKIPDQEQDKKYSYLWNCKDYLDSVKIFFRIQS

SEQ ID NO: 64002 - protein, 219 aa, Zea Mays
MEAGLRALGHRYFGGGGGGLGGFAAARATRLRRQRQRRMAAFCSLAVNGDGNGAAGGPVGSGVEVARARRMLHVVLVSPLIPGNTGSIARTCAASAVGLHLVGPLGYKVDDTKLKRAGLDYWPYVVVKIHDSWDHFCDYFMKQEGDKRLLAFTKRGTHIHSARGLASLRFRNKRVASASPRGLLQRRPRRRDPPDSHGGDLRPVPEPLRQRRSRAVRSR

SEQ ID NO: 64003 - protein, 170 aa, Zea Mays
MKMRGEASKASSGSGSGSSEDGERTGPVPSPARRAPPIRIDVAMGSFSACRRHEICPRVSFGSRCPTAVRPPTHRRRSGPLRPLSAAWRHPSSPPPPSPTSPGSSTHCSSPSSCARRSRTGDCGVLVEDARDELKLLALCTKGICRITWMGFCYTSLDLSYFLCSSVLNK

SEQ ID NO: 64004 - protein, 411 aa, Zea Mays
MLCLSSGCFFASTSFLPSSFSMYAVTLSSALFLLEKYAGAVSVAAAGVILGWPFSILVFLPVTVYSLIRGSFRRVFLSGFVTSLCFLVLSFVADYYCYGRLTFSVFNLLKYNVIGGGESHLYGTEGFSFYFRNGFNNFNFAFILALLFLGVVPFARKKYAPDLLIVVSPVYIWLAFMSLQAHKEERFLYPIYSLICVAAAAVIDSLPDFFHDKYSSDQSIFEKIAKGLRPLILGFILCASHSRTFSMLNGYGAPLQIYQHLEHHDDTGPGSILCVGSEWHRYPSSFFIPSYISEVRWIDDGFRGLLPFPFNETLGGTTAAPSYFNNKNKAAEGQYLKDIGACNLLVELDLRRPYPSRGSDLSTWEALAALPFLDRELSPALYRSFFIPYRWQQNNVFGLYKLLRRLHPDHA

SEQ ID NO: 64005 - protein, 399 aa, Zea Mays
MTVPATEASSAPQGQQAGAPASWEPNGVQVDGVTVDPPLPGRGAMVMLTEEEKASLCLLGLKQSSSTAELDTICGIEGPAAEQIKDEAGGDHVMHDALVGVTETEYQLDSDLRDVRGLLSTGLLEGFRVTYMKDEVEEVGRINGQGYSCGCSKCNYNSNIMNACEFEEHYGQSFDNQIDHIFLDTGISLFRVVEALKPCKLNMLGDFIEEKIGFPPNLDEYNKWKASFQKRKDYLDAVASDGCLTQSSQGLAAGEMIYSLRDYLKDSVSNSISNLNWSASKRRSGRRFRQGDTGTSTPTFSGSPGKGGFGHSTDTSEKKGTEETHSENTGDPLSIDGVKSDSPLPTAVTTNHSKHDSTNLGLSLSSPVKITQRPLRNCSIDSKSKESKTRRMALQIILC

SEQ ID NO: 64006 - protein, 89 aa, Zea Mays
MRRGRPRCPTLRCAAASDIVSSSPRATDNPPALRCWFIKTSYLWVTQGPVDVDIGANPSAEGGEDESVDDTAVKVVDIVDTFRLRATSF

SEQ ID NO: 64007 - protein, 378 aa, Zea Mays
MSEDEANAAAAPAEGKNWRRKGKHDKPKPWDEDPNIDRWKIDKFDPAWNEGGMLEVSSFSTLFPQYREKYLQEAWPVVKGALKEYGISCELNLVEGSMTVSTTRKTRDPFAIIKARELIKLLSRSVPAPQAIKILDDEMNCDIIKIGGLVRNKERFVKRRERLLGPNLSTLKGNTVAAMGNYRGRGLKQVRRIVEDCMKNVKHPVYHIKELLIKRELAKNPALANENWDRFLPKFKKKNVKQKKPQTKEKKPYTPFPPPQQPSKIDLELENGEYFMSDKKKSAKKWQEKLDKQSGRAEENKRKREAAFVPPKENTAGPSKSDKNASDNSEIADIAKSLKRKAKEFRKNEAQESVIAESYIASNDELRQKKKKKSTKSK

SEQ ID NO: 64008 - protein, 275 aa, Zea Mays
MMRDGGSGGREEGYGSDGERPHKKRGEAWTEEEHKKFLLGLNKLGKGDWRGISRKYVVSRTPTQVASHAQKYFNRQTNVHRRKRRSSLFDMVIDDPSDQLPLSRSSSQEMEQQHLDDPQPVAALPAPVVSPATVPMEQDSDTTSSIAGEAGTVMPGAMPPYLYPMMIPPPYYHTAFVPMPCYGYVPFYCEPQGAAQAPHEVVKPVAVHSTPPLNAKDLYNMSELSLKGDSNANGGVPASPLPPKPIGRPERQSAFHGKGPTPTGGSSGGLIPAVK

SEQ ID NO: 64009 - protein, 136 aa, Zea Mays
MNKAKEFWAVQKEVAELIKGRILVGHALHNDLKVLLLSHPKKDIRDTSEYEVFRRERKRRSLKDLAAEVLGAKIQQNEHCPIEDARAAMLIYNKHKKAWEKNMKEQFRFKKKLKKRGKKKTTESNGNDPNVPTVLL

SEQ ID NO: 64010 - protein, 240 aa, Zea Mays
MHAITAAGTRKNESTFGDLHTQIKNNKLTVDVKANSESDLLTTITVDEIGTPGLKSILTLVVPDQRSGKLELQYLHEYTGVNASIGLNSNPMVNLSGAFGSKALSVGVDVSFDTETSNFTKYNAALSLANPDLIASLHLNNHGDTLVASYYHLVKHHSGTAVGAELSHSISRNESTLIFGSQHSLDPHTTVKARFNNYGMASALVQHEWRPKSFITVSGEVDTRAIEKSTKVGLSLVLKH

SEQ ID NO: 64011 - protein, 554 aa, Zea Mays
MAQEGSEASVASSPPPPASSSSSSWWRDMHPAAAAYGGAWPPPPPTAARWPPMAASSSRHQQQQQQHGGGRTTSSGGGADDDLSASNATMTSSSFTNTSATNRSGLSMDDDSGGGGPAEAAAAAAAESHHLWNQVLIMGGGGGEVGRSMHDAHDDSENFLELLNSRTLVPELFADPPACDYLKKMEYGSSHGGGGWPDHHQFTTAAALEKHLSSGYGGGALAHQHQHAAAGGAPERLTANLSDLVSNWSIAPPNPCLGDAHHHHRTGVVAAACDNDNAKAGMFLGSGGGVCNHEIGGHGAMLEGAATGGGGGGGQEFLRPAAGAGYSSMLGLSRNNRTMYMEAPWGSNAAGATRSLSDLISFGGAPLGKAEEPAPPTSTKALAEYKKQGHDIPSPAKTSSGGGSKGSSEGKKKRSEQQGSSEGNTKKSKSEVSSPTSSLKVPKVKLGDKITALQQIVSPFGKTDTASVLYEAINYIKWLHEQVQLLSDPYMKTSSKDYNYNAWGRLEDKEGAEMVDLRSRGLCLVPVSCTPQAYRDSNDGPDYWTPPYRSCLYR

SEQ ID NO: 64012 - protein, 374 aa, Zea Mays
MLLLFSLQQASSGGEDACLLSRVENKKPFAPPREVHVQVTHSMPPHKIEIFKSLDDWARDNILTHLKPVEKCWQPQDFLPDPASEGFHDEVKELRERAKEIPDDYFVCLVGDMITEEALPTYQTMLNTLDGVRDETGASPTAWAVWTRAWTAEENRHGDLLNKYMYLTGRVDMRQIEKTIQYLIGSGMDPRTENNPYLGFIYTSFQERATFISHGNTARHAKDFGDLKLAQICGIIASDEKRHETAYTKIVEKLFEIDPDGTVVALADMMRKKISMPAHLMFDGQDDKLFEHFSMVAQRLGVYTARDYADILEFLVDRWKVVNLTGLSGEGNKAQDYLCTLASRIRRLEERAQSRAKKAGTLPFSWVYGRDVQL

SEQ ID NO: 64013 - protein, 177 aa, Zea Mays
MAGGHPAPLRPVVVAMKGHPGSGKSTAARAIATALCCPLLDKDDVRDCMLPLEGLAAAGMLNDLSYAVLWRMAERQCRPGDNEEWRRRLESRGSAVANGGGGDGWHKPKTWAELERLLEGYQGCTDYEIGDVPRIVVDTTDPTVDAQVAAEKVVVFIRSHLACSQPSCGRQDSPVCH

SEQ ID NO: 64014 - protein, 71 aa, Zea Mays
MCIYLTSYLRVCLVWLWLLLPKSQTKGWIQKAAFSKSRLSRSVKLKAHLDLRFVTFRWNCENIYGRIFSGF

SEQ ID NO: 64015 - protein, 1113 aa, Zea Mays
MSNFSCFTKAVDRWIEKLSDAFYVGQSVRSHILSVNAETARVKLALQQSMCSSMDSSFIQGYFLLDQKIAALKYSSNDWARHFGIGSLVEAEVGAIEEYGIILNFKDHLDTVGLIEHHQLGGSSVEVGSSVKGLVLDLSDGVVNLSVKPELIDSVRIVGKKKKRQRAVVADLELHEEVNAVVEIIKDSYMVLSIPEYNYAIGFSPLMDYNSQLLPHHHYDNGQRITVVVGNIPSSDSSGRLILLPKASAQYSSLSDSKRAKKKSGYKIGSLVEAEIIDIKPLELLLKFGGNLHGRIHITEILEEDSAEHPFSELRIGQKLTARIVSEAEPSGKSGKKFKWELSIRPCIVNGEFAQKEQNHTTNGIVRAYVVKVDKEWVWLTVSRNVMAHLFLLDSSSEPSELKEFQQRFSVGQAVKGRVISVNQEKRLLRLKALDNQCTQPNIDETQEPKSSVFGQTKQGDIIGGRVQKILPGVGGLVVQIGPHLHGRVHYTEIVDSWVSEPLSGFHEGQFVKCKVLSVSRSSEGSLRVDLSLRSSNLIRDSNNSRLDDLETCTSRIEKIKDLLPGTEIKGYVKNVNSKGCFIMLSRMVDARITLSNLSDEYVENPQKDFPVGMLVHGRILSTDPSSGRVEASLRKTTGSKLEKLDDISYSDLHVGDIVDGQVKRVESFGLFVTIRRSELVGLCHVSELSDEPVVDINSCYKAGDMVKAKILKIDETRHRVSLGMKKSYFDSDLTADTNDDESALMDISVAPQMVEYHNRNLVHRKAEPRASVLPLQVSLDESEGSDLEDNISNTCLEIANGTEANAKKSDKQLKKEARKQRELEISAMEERALQEDIPQTPDDFEKLVRSSPNSSFIWIKYMATLLDLADVEKARAVAERALKTIIPREEEEKLNVWVAYFNLENEYGSPREDAVKKVFQRALQYCDPKKLHLALLAMYERTEQYELADELLDRMTKRFKTSCKIWLCRIQFALKQGKDVEYIKAIVNRALLSLPHRKRIKFLSQTAILEFKCGVPEEGRSRFELILREYPKRTDLWSVYLDQEIRLGDVEVIRALFERVTCLTLPPKKMQFLFKKYLNFEKSLGKDNERIQLVQQKAIEYVQSSLPSQDNS

SEQ ID NO: 64016 - protein, 353 aa, Zea Mays
MVPPTATAMPVFLSAAPPPFSTRRRRSRLPAISASLSPSPSSSEEPLLVRAARGEDGLPRPPAWMMRQAGRYMAEYQALAKRHPSFRERSENTDLIVEITLQPWRAFAPDGVILFSDILTPLPAIGVPFDISDSKGPVIQSPVRSEGQVRELVPIDLDMLQFVGESLKILRNEIDGKAALLGFVGAPWTIATYIVEGGMTNTYTNIKNMCHTAPDVLRCLLSHLAEAISDYIIYQVNSGAQCIQIFDSWGGQLPPHVWEQWSKPYIKKIVNRIKKECPHVPLVLYINGNGGLLERMKDTRVDVIGLDWTVDMADGRKRLGNGISVQGNVDPAFLFSPLPVLTDEIRRTFVQGK

SEQ ID NO: 64017 - protein, 386 aa, Zea Mays
MLTFEALSETSEFAKKWVPFSKKFNIEPRAPEWYFQQKIDYLKDKVAASFVRERRAMKREYEEFKVRINALVAKAQKVPEEGWTMQDGSLWPGNNVRDHPGMIQVFLGQSGGRDVEGNELPRLVYVSREKRPGYNHHKKAGAMNALVRVSAVLSNAPYLLNLDCDHYINNSKAIKEAMCFMMDPLVGKKVCYVQFPQRFDGIDRHDRYANRNVVFFDINMKGLDGIQGPIYVGTGCVFRRQALYGYDAPKTKKPPSRTCNCWPKWCLSCCCSRNKNKKKTTKPKTEKKKRLFFKKAENPSPAYALGEIEEGAPGADIEKAGIVNQQKLEKKFGQSSVFVASTLLENGGTLKSASPASLLKEAIHVISCGYEDKTDWGKEVYIPYIT

SEQ ID NO: 64018 - protein, 131 aa, Zea Mays
MNWFMHETLLYNFKMLQLMWSMEYNPNLFSMLESDTGTSSASTKDESVLGQCGKFERKKLQAAKKDDQIPLSVFVVASVLEARNKKLLGEAKGLDDVVKILNEITGSLDAKKACREALQIHEKYLKTVKAS

SEQ ID NO: 64019 - protein, 1007 aa, Zea Mays
MVMAPAILLAVLVLAAVAAATASAFAVASNNATVVAGKLNVHLVPHSHDDVGWLKTVDQYYVGSNNSIQGACVMNTLDSVVDALARDPARKFVVVEQAFFQRWWAEKSPTIQDIVHKLVDSGQLEFINGGWCMHDEAAVHYIDMIDQTTLGHRMIKKQFNKTPRAGWQIDPFGHSAVQAYLLGAELGFDSVHFARIDYQDRATRKADKGLEVIWRGSRTFGSSSQIFTNAFPVHYSPPDGFGFEVLDENIIPVQDDLSLFDYNVQERVDDFVAAALAQANVTRTDHIMWTMGDDFNYQYAESWFRNMDKLIQHVNKDGRVHALYSTPSIYTDAKHASNESWPVKYDDYFPYADSTNAYWTGYFTSRPTFKRYVRVHSGYYLAARQIEFLVGGRSSLGLFTSSLEDAMGIAQHHDAVSGTAKQHTTDDYAKRLALGAAKVEKGVNTALACLTSSNGTCGSSVVKFSQCSLLNISYCPSTEEAISSTKRLVVVVYNPLGWERSDFIRVPVNDQNLVVKGSDGNIVESQLVEVDNVTRNLRKFYVKAYLGITTHKAPKYWLLFQASVPPMGWNSYFISKSTGAGYNSTEHVSDVVSPSNSTIEVGPGHLKMSFSKASGQLNRIFNSISGVDLPVQQSFLWYRSSEGDASDSQASGAYIFRPDGNTPTTVSSSVPLKVIRGPLVDEVHQQFSSWIYQITRLYKNKEHAEVEYTIGPIPVDDDVGKEVITRLTANMVTNSTFYTDSNGRDFLKRVRNYREDWNLQVTQPVAGNYYPVNLGVYVADEKYELSVLVDRAVGASSIQDGQLEIMLHRRLLKDDGRGVGEPLDEVVCVDQDCQGLTARGNYYVNVEKLGHGAHWRRTYGQQVYSPFLLAFTHEDETSSKSYSVAKAGMMNANYSLPDNVAIVTLQNLDDGTTLLRLAHLFQAAEDPRYSKVAKVDLKKVFGKRTIKELTETSLSANQKKSDMKKLSWRVIGNTETGPAAVKGGPVDSRALVVELGPMEIRTFLLKF

SEQ ID NO: 64020 - protein, 234 aa, Zea Mays
MAELQIFKNNKEEADEKMRYWQLPWVPPPKEEPPSEEELARKAALKEKAGQRLRDMAAAKRSQKIVELEKQLSYLEELMEQLDEAEEEEATAILGSSGYLSQQEIRSAILKASQSLRKAKGESNGNDEKTDASAVDKYPLVSVPDETLTPEQLKEKKKQILLKTTTEGKLRAKQKRAEEEALREKQEEKRRRTQSYTLKSFGPDIQNFLINLSRGSDRKLMVVRQMGTIVHLQV

SEQ ID NO: 64021 - protein, 519 aa, Zea Mays
MNCQTNGSENNAASNHVSTNVANGSKTGENNDEESDAQSFGNKRETEIKSAETLPDIRRDEMAGSSKKIELQNKSNDGVNTKVDASKDSDGAPSESEKNVRSKCLNGITSAKVAEQIMDNALRITDASSRRPTNLGKDLAMTEPAADRKCQSLVMENNAVKEKNPGEKSKSAVIGHADSYPSQFLETNLGKQQYRNGYKNQEFREKDIFNHSNSSAFSRYGNRRIESSGEIQFLPSRCIVGQEQHVHGKDPVFQPNGVLLPPNDHNTGESTRQARITLDSSMEGADIICSSSAREDAGASSSSHRKDSMSHPSYGFVPVPIPVGAMMPYHCGAILQPVYYPQGPLMHCNSSAINKATIHQTSGQSNYREDCGSGRPSQVDEHKQSEEKHQLHHSRQIHRESGQPVDMVRAHMDHANQSASCSRDICKGSGCTGSGEADTNANTTVALESGNESGIQNSDRSHREAALMKFRMKRKDRCFDKKVRYHSRKKLAEQRPRVKGQFVSQKLKAAMATEAETDS

SEQ ID NO: 64022 - protein, 117 aa, Zea Mays
MAPLHEVFLLHDALALQWSTPPPRAHLPHARGLICSTEGERGGGSTSTIRSGVDTRAWGIVSLARSPFASCHPASRRRRRGGEWRTDCCGTCRRTGGSDQISPSSASHASATNPTSR

SEQ ID NO: 64023 - protein, 91 aa, Zea Mays
MRSLFLVSPQNQIQHNTCTSTIQRSCPWIELILQSPGRRAVVVEISWSRCFRCPTHQKNILASLPGDCVMVHAYHLSLVQADSQAVHEMIH

SEQ ID NO: 64024 - protein, 196 aa, Zea Mays
MGRRPARCYRQIKNKPYPKSRYCRGVPDPKIRIYDVGMKRKGVDEFPYCVHLVSWEKENVSSEALEAARIACNKYMTKSAGKDAFHLRTGMRGAFGKPQGTCARVDIGQVLLSVRCKDNNAAHASEALRRAKFKFPGRQKIIESRKWGFTKFSRADYLKYKSEGRIVPDGVNAKLLGNHGRLEKRAPGKAFLDAVA

SEQ ID NO: 64025 - protein, 615 aa, Zea Mays
MQNETTAQEENSKKACSHFIELWKQKHETGQWIEVEPEAISTRSEFPPFNASGIVLMGDNMKQNLESGSINGEPNGEDGAKADQKSSQQMGSHAAYPPWAMHPASGAVLYPPYPMQGMPFYPGVNPYYPPYPPVDDPSSGGGNSHGHKSHRKGKRSGKKPSVVVIKNVNVTSKKCGSSESESQSSSEVESADSDNSHSKSRERKHKSSCSKEGRRTTFDPGDEYNKDETSNGHGVEQGNWSAFQNFLLRAEEKTRSSDADLFAGEKEPPSRRKQNVNTADPIILVERDGGNVCEQNKIGFDSANGRTRVIRVMSNDELVMSGEGRIYMDCEMKEIEAGGGRYRRGTGDDYMVYGQGCQIDRHCLLDPLAEAQYKNPVQQDNNRNGVTDESFMIPLRSSSQDNIGAESRTTMDIDVELPSSIHKASDKKAGHQLFYEPDELSTVKVEDAKPEDVLPVTDGVQKVEKEKLKNARDGSDKRTKDSLLRRLSAPRTPLNDAQKRAQNLRAYKADLQKLKKEQEEEQIKRLERLKLDRQKWIAARGNGKGPGNDAPRANGMNGLSKSVPTFTGMKRVENGTTESLSGRLKRLSEPKSIVGAEHSLNPKSAGAGRSRRSMA

SEQ ID NO: 64026 - protein, 286 aa, Zea Mays
MSSPHIRFRSDDAKEVVHYQTISPKNLAKSVLEEGGWSTFMCSREDTEKHVDVAIVFIGSKLQSSDISKDKQVDPALADTLKLSFTESEFSMAFPYVSTSDDEKLEESLLSGFTENCKSGFGRNRITYTDTCAVSGQDLKTYHNMDAINDLVVSGRTNPSGQTDVIVFCSGGFEKLGTTESEGELLSQLVDLLKLSGARHTILYASQPSGYLLENPSGSPVARHLAERTNGTKTGLLSKCDGECLVKSTLLEGTFVGIVLLIILISGLMCMMGIDTPSKFEAPQES

SEQ ID NO: 64027 - protein, 73 aa, Zea Mays
MGDTGRWELELKGAPVGLGIGRAARPGAPWLGEGALGWPDWKREEQGRHGWMRARGERELSWENDDGKNPSSR

SEQ ID NO: 64028 - protein, 169 aa, Zea Mays
MSLVAYDASSDEEDAGEPAAAAAPHPAPIGPQPRPPSPTAVSPAPRPTPTLTPPPPAASQSVAPISSSDVSLPTSSLDLPDVADLFAPPADNASRKRESNGSALHDSRNKFPRMQSQSQGIGSAAGNALIPPQLRGRLVSFFFLSISLRRLVKVRPAYYMYSLVYTPLS

SEQ ID NO: 64029 - protein, 1116 aa, Zea Mays
MIKGISGGQKKRLTTGELLVGSARVLFMDEISTGLDSATTYQIIKYLRNSTHALDGTTIISLLQPAPETYELFDDVILIAEGQIVYQGPREYAVDFFGAMGFRCPERKNVADFLQEVLSKKDQQQYWCHYDYPYQFVSVSKFAEAFKTFIIGKRLHQELTVPYNRHHNHPAALCTSSYGVKRLELLKSNYQWQRLLMKRNSFIYVFKFIQLLLVALITMTVFFRSTMHHDSVDDGIIYLGALYFAIVMILFNGFTEVSMLVTKLPVLYKHRDLHFYPPWAYTLPSWLLSIPTSLYESGMWVLVTYYVVGYDPQFTRFLGQFLLLFFLHQTSLALFRVMASLGRNMIVANTFGSFALLVVMILGGFIITKESIPVWWIWGYWVSPMMYAQNAISVNEFHGHSWNKQFANQNITMGEAILTGYGLFKEKYWFWIGVGALFGYAIILNILFTMFLTLLNPIGNLQAVVAKDQVRHRDSRRKNDRVALELRSYLHSNSLSGNLKEQKGMVLPFQPLSMCFRNINYYVDVPVELKKQGVAEDRLQLLVDVTGAFRPGILTALVGVSGAGKTTLMDVLAGRKTGGLIEGSITISGYPKNQETFTRISGYCEQNDVHSPCLTVIESLLYSACLRLPSHVDADTQRAFVEEVMELVELNPLSGALVGLPGVNGLSTEQRKRLTIAVELVANPSIVFMDEPTSGLDARSAAIVMRTVRNIVNTGRTIVCTIHQPSIDIFESFDELLFMKRGGQLIYAGPLGAKSRNLVDFFEAIPGVPKIRDGYNPAAWMLEVTSTQMEQILGVDFAEYYRQSKLFQQTREIVEALSRPSSESKELTFATKYAQPFCAQYMACLWKHNLSYWRNPQYTAVRFFYTVIISLMFGTICWKFGSRRGTQHDIFNAMGAMYAAVLFIGITNATSVQPVISIERFVSYRERAAGMYSALPFAFSLVTVEFPYILVQSLIYGSIFYSLGSFEWTAAKFLWYLFFMYFTLLYFTFYGMMTTAITPNHTIAPIIAAPFYTLWNLFCGFMIPRKRIPVWWRWYYWANPVSWTLYGLLTSQFGDLDQPLLMADGVTSTTVVAFLEEHFGFRHDFLGAVAAMVAGFCVLFAVVFALAIKYLNFQRR

SEQ ID NO: 64030 - protein, 126 aa, Zea Mays
MMIMNTTQKANLVEQDAKVFVKQAPQFKRWGRKHPFVRYGLPLISLTVFGAVGLAHLIQGSKEVTKEKEDMEWEVVETTKALSRTGPVEGAYKPKKLSLEDELKALQQKVDINSYDYKPIPRPSEK

SEQ ID NO: 64031 - protein, 933 aa, Zea Mays
MDPTTPVLALSKAFASSRTKPFLLLAPHRRRSLFAARASAPSSSSVPGDLLISLARLALRGPGPPAAPRRWFASVSSASPLASGGPPRGGGGRGNGDGDGGGGGDGWKRPRASQGAGVVEEAAAQGADVIVLDVGGMSCGGCAASVKRILESEPQVRSATVNLATEMAVVWAVPEDSVVQDWKEQLGEKLANQLTTCGYKSNLRDSSKVGSQTVFERKMQDKLEQLKQSGRELAVSWALCAVCLVGHISHLFGVNMPLMHVIHSTGFHLSLSIFTFVGPGRRLILDGLKSLLKGSPNMNTLVGLGALSSFAVSSIAAFIPKLGWKTFFEEPVMLIAFVLLGKNLEQRAKLKATSDMTGLLSILPSKARLMVDNDAEKSSLIEVPCDTLAVGDYVVVLPGDHIPADGIVKAGRSTVDESSLTGEPMPVTKITGAEVSAGSINLNGKLTVEVRRPGGETVMSDILHLVEEAQTRAAPVQRLADKVAGNFTYGVMALSAATYMFWSILGSQLVPAAIQHGGAMSLALQLSCSVLVIACPCALGLATPTAVLVSFCQVGTSLGATRGLLLRGGDVLEKFSDVDAVVFDKTGTLTIGRPVITKVIPSRGMGDANTKDLGANQWAEADILSFAAGVESNTNHPLGKAIMEAAGAANCVIMKANDGSFMEEPGSGAVATIGEKQVSVGTLDWIRRHGVIHNPFPEAEHFGQSVAYVAVNGALAGLICFEDKLRGDSRQVIETLSKQGISVYMLSGDKESAAMNVASVVGIQADKVLAEVKPHEKKKFISELQKEHKVVAMVGDGINDAAALASADVGIAMGGGVGAASDVSSVVLMGNRLSQLIDALELSKETMKTVKQNLWWAFLYNIVGLPIAAGALLPATGTILTPSIAGALMGFSSVGVMANSLLLRVRLSSRRKREPLKAISDEVEKNYSSKWST

SEQ ID NO: 64032 - protein, 295 aa, Zea Mays
MPILLPMWHQHRRNQLCRHMQAVKGGEYPRSYYKCTHTSCPVKKKVERSAEGHITQIIYRGQHNHQRPPKRRSKDGGGPLNEADVLHENEDISTRSEPGSQEHSGKHEGSNDGILGPSVSRRGGGDEQLSGSSDSDEEQDDEQRAGDEDPGYANANKRHVPTPAQRIIVQTNSEVDLLDDGYRWRKYGQKVVKGNPYPRSYYRCTYQGCDVKKHIERSSQDPKAVITTYEGKHSHDVPAVRNGSHAAANANGSSSTSLPVPHRVHSSASSSRRAAELQSASSASSMLLKEENEIT

SEQ ID NO: 64033 - protein, 153 aa, Zea Mays
MREERMFDVSDMYTTADAWGWTWEREIKNKMPRKWSQEWEVELAIKIMHKVIELGGTPTIGDCAIILRAAMRAPLPSAFIPILQTTHSLGYKFGSPLYDEVVLLCLDLEEIDAAIAVVAEMETCGVKVPDETLDKVLASKRSGNSALPPPTEE

SEQ ID NO: 64034 - protein, 182 aa, Zea Mays
MLILVIKMPMSPPPSLSCLPLCWLAGPTVCAVLKVLLTGLLVDSASRVSHHADTFSPSLDSVLSALTITASLLAGVRRTYAQPRHRTELHPPRRRPPSPSSLCTRHQLPGAHRHNALVARPPSHAQTLAPVRHLGTSPSPVLRWLSTSLAVFDLQPRHHRALHPFEEHLEKVMFEGVHFSAC

SEQ ID NO: 64035 - protein, 609 aa, Zea Mays
MEHVLSSRRFPTDPNEYKLYEEIGDGVSATVYRALCVPLDILVAIKVLDLEKCNNDLAGNILIDTNGAVKLGDFGVSACMFDTGNRQRARNTFVGTPCWMAPEVMQQLHGYDYKADIWSFGITALELAHGHAPFSKYPPMKVLLMTLQNAPPGLDYERDKRFSKSFKDLVATCLVKDPRKRPSSEKLLKHSFFKHARSAEYLARSILDGLPPLGERFRELKSKEAELLLNNKLGQESKEQLSQKEYIRGISGWNFNLEDLKNAAALIDSSNGTCYLDVRENRVKDDSQEAYNGPEHIYQERLNHVASRRPEEDEIQEVEALNDAVSSSFSSRSLEALKSCFDVCGVDDPSPTATDSRAQPSVGTLPFQQLQKFEHCKSGDCNGESLERSVSVPTNLVTSGYHKHSSGSLIPEQVLSPYLSSDLERDGFRQKNLSSRNCSGPLLFRQMKDSRTHQSVAPDESSEGKIIRRRGRFQVTSDSISEKVATSSCNSSRINLPIDAARSSPKLSAILPTLQFLMKQNTMQKEVLSRLISSIEETSDDSEATGSSSYQSSGGPAREKELHLYVLQLQRSVTELAEEVQRLKLQNNKLEHQINILSRKDERSSTQDN

SEQ ID NO: 64036 - protein, 110 aa, Zea Mays
MESSLLQPSDSLRHVIDPKRHFKRAGKSKALPKYFQVGTVVEPASEFYSSRLKNRERKATLVDELLSDQSLKSYRMRKVREIQEIRTPGGNQKWKNKGKKTLKRAKDRRK

SEQ ID NO: 64037 - protein, 243 aa, Zea Mays
MWSYSWLEFQQLNDIYRFKAEEYSHTSVNKFNVNPESIPGCGSGSKNRVNCARAGEGSLEAGLALEMVKAKARVRYEPGPAFEEVKEEAMLDISPTDSTEFWLIQWPKDQCYFLMFEILQFQANRILRQKIAGDQFLDLVSVETEVRSVYKELYSIYKTTLKSKSLINEPRIIIKPKSCNGVWPLCTAQQICYHVLGLVHGIWTPVPQAVEDYIATPKPNGYQSLHTTVIPFLMRVCFIWKFR

SEQ ID NO: 64038 - protein, 633 aa, Zea Mays
MGDGASGRGGGGGAGRRVGEYELLRPIGSGAYSQVWLGRHRARGTEVAVKEIAMERLSNKLRESLLSEVDILRRIRHDNVIALHESIKDHGSIYLILEYCRGGDLHAYLQRHKRVSEKVARHFIRQLASGLQMLRDNNVVHRDLKPQNILLVENNENSLLKIADFGFAKFLQPFALAETLCGSPLYMAPEVMQAQKYDAKADLWSVGVILYQLVTGRPPFNGGNQIQLLKNILRTCEIRFPSDCDLSHGCIDLCRKLLRLNSVERLTVEEFVHHPFLSEHAPEKTLRYVLGNNHAPSSQHHGHSGKVTKESKIHEVQGQKVVYPEDSPIIDSLEFVDQEYVFVSGPHLEGSSSSTNASQQLNVPAKYDNSSVSPPKLTFMSAPMPINGLPINRQQLAGTGSFDSHCSPASGTSQGSADISDAMDQPPSDYLTRIRLLEQYASAIAGLVRDEIKGGRHLEAFSIQLIVLATWKQAIHIGNTFVASPARESPSQDIPMKGHIAGASHLPANSKLADDACMQIEKQFLSEVEYAEELASIVGQIADGTEMPDAIEMIFQSALLIGRRGGVDEMFGKAADAMTGYMRAVSMLRFLLVEAPSLALNPPLTLTRSDRNRLRTYIDALNTRLCQMQSQRH

SEQ ID NO: 64039 - protein, 418 aa, Zea Mays
MDLDAAAEEEERRLEDYNEAQDARYFLGFGDTHGDPIEVDTVAGSQIGTGTESTSPSEAVPNPDQAANASGSNMKKRSKCWDDFDELTKIVNGKKVRSHVVPAASPDTSRCCLHPSSELTASPPPPNPRPPTITRKGRTAEEDAPQGRGGRSRMTLLLVAEHLRALSAAKEPSLSLMASQPLVISPPRPWALQPSIQSLLFDLRPIVGDDDPASLSTSLLPNSYRNSQEQYGTPMPHIGQTTVEVDLLNYGVIEGDESCKHFSELKVLHPWMIKDGMNLTKEQRLEKIESQKLEKYEAKGDKRHDLKDDQSVQEEYINAYYEALRKSWKRKKQKAECSMKARFLSLMLKGNAKLTINTSRMMMKKALNKYSSFLIWTVGTQGLLCNPLSTVALTLALWRFFSKQDDLNPYVVPMAMGI

SEQ ID NO: 64040 - protein, 592 aa, Zea Mays
MSELSGPSAGPKGSKKVAQQSPRAQVAIFVVLAMTLRRKPDVLVNVMPKIMGNNKYLGQEKLPIIVWFIAQASQGDLVTGMFCWAHFLFPTLCAKPSGNPLARDLVLQLLERILSVTKARSILLNGAVRKGERLVPPVSFDLFMRATFPVSGARVKATERFEVAYRTIKELALAGSPGSKTVKQASQQLLPLCAKAMQENNAELTREAVDVFIWCLTQNAESYKQWERIYPENTEASVAVLSKIVIDWKDVSPKLSSEALKATVKNLKAKNEAALESATDAGKQASIKKQTSTARLEQGSEQLLGGRPGPALGVLATVAECSVEPAAQTTKGPDSNGSSSPLPPVLPSVCFPPRPRAMAPCASPSALALSASTRVSSFPLTLRPRPRPEARVPRAPGGAQLRPATACSWPRPLLPELAPAFPRAGARSAGRPQPLFRPRAMMTTSQIASCAFTVGTVAVLPFYTLMVVAPNADITKRTVESSAPYVALGLLYAYLLYLSWTPDTLRAMFASKYWLPELPGIVRMFASEMTVASAWIHLLAVDLFAARQVYHDGLKNNIETRHSVSLCLLFCPVGILAHVVTKVLAGAAGRSH

SEQ ID NO: 64041 - protein, 463 aa, Zea Mays
MAAAVAAPAPSRKTETYTDTKRRDDVRGANIAAARAVADAVRTSLGPRGMDKMIASGDQAQEVIITNDGATILSRMALLQPAARMLAELSRSQDAAAGDGTTTVVVLAGSLLRRAQSLLSAGAHPTAAADALHRLATRAVEILHAMAIPIELSDRESLVKSASTALNSKLGGTVDDTELIPGLIFDKKASHAAGGPTRMENAKIAVIQFQISPPKTDIEQSVIVSDYAQMDRILREERNYILGMAKILVVKDVERDEMEFITKTLNCLPIANIEHFRTDKFGYADVVEEVSVGEGKVVKITGIKDMGRTATVLVRGSNQLVIDEAERSLHDALCVIRCLVSKRFLIAGGGAPEIEMSMQLAAWAKELRGMESYCIKEFAEALEVIPYTLAENAGLNPISIVTELRNRHARGEKNTGINVRKGQITNILEENVVQPLLVSTSAITLACECVRMILKIDDIVTVR

SEQ ID NO: 64042 - protein, 595 aa, Zea Mays
MSGAALCAALTELGFDGEDPLDADALEWPFQYEEARPLLAWICSCLRPSNVLSPSHLAQYEQLVEEGRLLEAVFGSEETILDIREAKLAYRAEVFELQKQLVRQQAQFDLLAGQASTLIQGRRSRVSAMSAVSGELISLDEILSSRNLEMNSVLGRITATTQELAHYHSGDEESIYLAYSDFHSYVVGDLACTKELNRWFSKQFEKGPFRLVAEEGKSKCSWVSLDDITNCLIRGDSEKSHHHQRVAELQRLRSIFATSERQWIEAQVENAKQQAILSILKAQVSSDEAHIHRDIHSLRRKGSELAGELSTLSQKVQALVSETIPCLCSELAQLQGTYILQGDYDLKVMRQEYYINRQKTFINHLVNQLARHQFLKIACQLERKNIASAYSLLRVIESELQSYLSAVNTRLGHYNSLIQAASEVREQGAIDDRDTFLHAVRDLLCIHSNVQATVPTYMSAHALVQQISALQSDLLSLQSELENTLPADRKRCINELCTLIQTVEQLLFASSTTAEPILTPWPLMRALDDMENANAQVEVSVEEVTKARTQKIKIFENRAHEVGRERQIFVDFFCNPERLKNQVRELTSRVKALQD

SEQ ID NO: 64043 - protein, 579 aa, Zea Mays
MMFCLVKYAVVIVSVVILIGLFSMQHFGTDKVSWLFAPIVFVWFILIGVLGAVNISKYDQSVLKAFNPIYVYRYFKRGKTSWASLGGIMLSITGTEALFADLSYFPVQAIQIAFTVVVFPCLLLQYTGQAAYIAQNKDHVSHAFYFSLPDSVLWPSFIVATAAAIVASQATISMTYSIIKQALALGCFPRVRIIHTSKKYLGQIYSPDINWILLVFCIAVTAGFKNQSQIANAYGTAVIMVMLVTTFLMIPIMLLVWRSHWTLVILFTVLSLFVEIPYFTAVVRKIDQGGWVPLVFAVAFLIIMYVWHYGTLKRYEFEMHSKVSMAWILGLGPSLGLVRVPGVGLVYTELASGVPHIFSHFITNLPAIHSTLVFVCVKYLPVYTVPLDERFLVKRIGPKNFHMFRCVARYGYKDIHKKDDDFEQMLFDSLMLFVRLESMMEEYTDSDEYSTRETNLSGSANPRINGISAGSNMDLSYTSHDSIIQVQSPNYTGNSQAVSPGQLYHTVGDEIAFLNACRDAGVVHILGNTVIRARRDSGFIKKIAINYLYAFLRKICRENSAIFNVPHESLLNVGQVFYV

SEQ ID NO: 64044 - protein, 202 aa, Zea Mays
MDVSRKKKWVAWAVAAAIFVVLMLVTPAIPQDEAYHDFADQRTLFLGIPNTLNVISNIPFFFVGVTGLILCHFNNYFRLSSQGELWSWTLFFAGVTAVGFGSSYYHLNPNDATLVWDRLPMTIAFTSVMAIFIIERVDDRAGAKSLAPLVIAGALSIMYWRHFDDLRPYAVVQFVPCIALPVMAIVIPPMYTHSSYWLWAAG

SEQ ID NO: 64045 - protein, 426 aa, Zea Mays
MILMSRKCLSHMPQYLMLNKVFRHSWNNIHLRSCQILYWPIVFQDASLSSTVNVEYAHKAAIRKHALWSSIIVDLLMGFVLGAAFLLNTETICIWTIALVHHMTEAILRSGCVWLMGVPAGFKLNTELAELLGMISLNAVQIYSTLWFFVGGYLRHIIQGIAVSGIILGLTAPVSFFIDIIQLATLHVTILHWLISSLYSRQIQTVASLWRLFRGRKWNPLRQRLDSYDYTVEQHVVGSLLFTPILLLIPTTSVFYVFFSILTTTVIWVCVMLEIVIALIQSTPYAELTLWVMRRHRFPAGLFFFHLPSNGHTFEDDDLSSHSVGCCNETRKEDLIDKLSESLVSELHCSYATFVQVIRSNYERVFNRTGYSFCKQLAYGILSGERVPSSLHLQTSPSFPWMNIGITEYWMHCYVCVLQCAPKRDT

SEQ ID NO: 64046 - protein, 77 aa, Zea Mays
MTMKTTRMFLCQRLACSLATRTSGTGNQSRPMPRLAKKVCKPRLLTDLSQVLYQFCDYYTDTGFDQRLDMVGKNTTV

SEQ ID NO: 64047 - protein, 726 aa, Zea Mays
MDESRKRAVSTANDEDFGNDFLSSWKLPKSGKDTIDFSVDSVPKSSKKFSFDNLDDFGLNGAFDKLPSFQMGMSDLDFSSPDKKKVKHTSSNADLFEKKKETDKDNFSFSFDFNELGKFSLDGKLGIEEKSTNRFNGKSDPVSSEVKKDTQRGLLAKGNAILEENNSKDKMHTLDTRTSRPSHLTNHENVKNASQPTSNIDVADSSDKMQEHTSVNPATMEQTKVDSVLNDNPGEHPKEIYAMKAAVNIPSQDFSCGAISSEDPTQGPADHVNSKDAPIVNCGKVHVSRESNDDEQSNGLQSRDTSIINSNVSRRPSGQFNSQNEVLEESVSLNEGSQDNQSFSGAPKKFLKKTSHGTTNTEEEISGPKILSCSVQREIRSVEPAPMKERGSFSLLSKSVHMKATRVELTSETALNQSSSASKVIKKMTTHPTDLKREHMQANAVPHKSKTALSKTYSKLASNGLLATSMNAKVDTNAKLGLEPPISGKSSLLNARSSTPHSAGHKVVASHVLLKASNTSDSLQGVPSKDNKSSTISQLTGARITKLGIRSLKSDMALEKESVQVSGTKCSPVTTSRILDSIPEGKPALPSPSIMQKVPEESALNPKAPKVLKHIMRSPAVRKSPRTVPELGNEMILGSGTPKAHVDNAISSRMPPGMGAISDLELPVLENDGNIEKAEACRKELEDICILLKRKHAEAKELAVRAIVNNNTMLMLNHPMIEEKIS

SEQ ID NO: 64048 - protein, 590 aa, Zea Mays
MDCRRKCIPAKCTDHDREVTPTWISVIDFLWYRKYVDGAYTDSYGFDNIDEWGRPFPDLQRFPSSRVDRGFSQIASKVHGMGLKFGIHLMKGISVQAVNADTPILDIKTGKPYLEDGRQWTARDIGLSHRTCAWMTHGFMSVNTNIGAGRAFLRSLYRQYADWGVDFVKVDCIFGTDYSPEEIITISELLQEIDRPIILSISPGTAVTPALAENISDHVNMYRITGDDWDNWKDVSSHFGVSSSFATAKKIGATGLRGRSWPDLDMLPFGWLTDPSVNQGPHRKCNLTLDEQKAQMALWSMTKSPLMYGGDLRNLDDSTLNIITNSGLLKINHYSRNNMEFHYVHSERTSNGEHSGHFRSPYPVRVTKNDGIFVSLTACSDDAAKGWYMFPQDGKPDHICRNYEILNDKNVSFCLGKTKRFLASDVLTMDTKEHQSKFHISVTNTDDTCLDASAGRRQTASEIRLPMFSACRWHAKQMWELNANGNLVSSYSRLCATVESRDEGGTSGGRAWIATGSEGEIYLAFFNLDSMSRKMTVQISDLGKVLGRNLLEKNPCSYTEVWSGKNFGPVKEEISAVVHSHGSMVFEIIC

SEQ ID NO: 64049 - protein, 172 aa, Zea Mays
MLNLKDLCLITGKASWLAYLDIYCLNADGSLFDAALISAVAAFTHLEIPLVSVGDDGKLFTVGGNDGKNKFELVNREKRKLTLGDIPLSLTCALHKGSILTDPTSEEESIIETYVTVVVDSSDRLVSLQKVGGTVTSMATIKECISLAKERRLRLREILIDSVKAMEVDHTE

SEQ ID NO: 64050 - protein, 487 aa, Zea Mays
MCCLLLTYDEEHLGGTNYIRQDNRSLSENWSGIGLDHDHDGLEDEVAFSDFDNRNTFSSSNSELRFSSSNEHLRNRKACRNHPSLLPPALSADSLLRSVSRMTDSTEFKAVTTCNTCKPATISRDDTEAADARSLKNLNSTAPLSNSRTRRNGPHILSWLLPKSKRKPKPDVSPNTVECENMSQLLKDWGVFSLDSLRKEVVEANEHRDAALQEVSEMKLSLGELTAKLVSLEAYCSELKKALKQATSAKNMQSHSKRSARPVSGSRDSFLPVSHEVMVEGFLQIVSEARLSIKQFCKITLSDKHPKLVLYHLEALMNQAMYQDFENCTFQKNGSPRCLDPKQEQQESFASFVALRNLSWNEVLKKGTKHHCEDLGRFCDQKMSCVVSILNWSWPWAEQLLQCFFVASKCVWLLHLLAFSFVPPLTILRVEEDRAFDQTYMEDVLLDKQRSRNGPPPSSSQVKLMVTPGFYVQDRLLKCRVLCRYSG

SEQ ID NO: 64051 - protein, 61 aa, Zea Mays
MTDTPTIQVVVVVVGVLHTYTVTGRWRSIPSIHTSHDTCTHMLSCKTATVINNTTTVGETD

SEQ ID NO: 64052 - protein, 256 aa, Zea Mays
MDAADLYGYQATHVAAQYGQTAFIYRIVAKWNADPDIPDNDGRSPLHWAAYKGFADSIRLLLFLDAYRGRQDKEGCTPLHWAAIRGNLEACTVLVQVGKKDDLMVKDKTGLTPAQLAADKNHRQIAFFLDNARRVHDRGCGANTRFGKLSKLGLAPFLWCTIIGMLITYVHSVILGQYVMTMTAPFGMFAWSGVFLATAGLVMFYKCSRKDPGYISINTRGSQNQRDDEPLLKMELENPALLFGNWSQLCITCKDL

SEQ ID NO: 64053 - protein, 520 aa, Zea Mays
MESPQQQAPPPSQGASSGSCDAPLQLAARYGATVPRTSSPPASVTRPEVNNRMELKSSNSETLCDSLTLNTVSVMLTVSFFREDGDGGTDVFLGFSCVLGFIIRKYLWVLRSESARFTGLDIYTNTVVLVVTAYAMLLANSLQYIILAPFPISVAAFIAYLYKERLEHHGSSGADQQDNKDGCKPGDGNGKKAGELEMVVAPYSMLLISAIVMPYEDSPVLLSHFLLFSCCALGTLALLYSRLAEASPALRPALECIQMAYMVTLFITVHTVAAEWLGDVMALVTMPELIAGLVWFCNLLHGDTACNTAAVAHILRSDEGSSSSSDATHHQVPTNSETRQGFVFDGSMFTPLGAVLAGLVTSTFAHDEELLASWNTKATVACSIAGCLPYLSIWMVSRWPGRIPSSDKATRLLKFAANVCLTGAFLMLFALLDEKALAYRLFGLDEIIDPSQLKYLPAVHFSTAVALYFFRKHLAGALANLGEELGNLLSLLIAASPTEKQGRKRRRKKKTKSIDVRRRR

SEQ ID NO: 64054 - protein, 314 aa, Zea Mays
MAHERGAAASAHPAAPTSEEDALFIDLLHEAPLSGHREPRSIVGGTLYCILLVGFAAVAISAPWIFLFAPDMISPLLCSSNAILLVLTGIFQQYWVHQVRKVRLQGYYDFSQKLKRIARLPFATIACGTALMLLIMVWQPLLQILSVSLLLRIAIVVEVTCAGCFMGLYLWHIHKYNSLNGQPDILRSLYSALQPSNTLEDRRYHDARLSDQQMALLQYQRENIHYLSEEVLRLQECLSKYQRTAGTTPQVDLAHLLATRDQELRALTAEMNQVHSELQHARGLIDEKDSELQRIRLSNNQYVEENDRLRAILA

SEQ ID NO: 64055 - protein, 520 aa, Zea Mays
MTTAERELDANTNYDWNRIQESGKDAELLFGPGYTGLANLGNSCYMASIMQVMFSIHPFISRYFEKQSLKAAFATAPADPTVDLNMQLTKLAHGLLSGKYSAPAKEGQEGIRSRMFKSVITANHPEFSSMRQQDVLEFFLHLIDRVEKANPGDRELNPFSGFKFVVEERVQCPSGKVSYNKRSDNVLSLSIPLHEATNKEQLEAFNEKKAAMNLDGKEVSNEDIVRPRVPLEACLSSFSGPEEIPDFYSTALNSKTTVTKTAGFTTFPDYLVLHMRKFVMETGWVPKKLDVYIDVPDTIDITHMRSKGLQPGEELLPEGGSGDDSAEPANPVASEDIVTQLASMGFNYLHCQKAAINTSNTGVEEAMNWLLSHMDDPDINDPISKDSRAYEPSVDEASVQTLISFGFQEDIAIKALKASGGNIEKATDWIFSHPEASTSASADSSTSNVNADDTYIPDGSGRYKLMAFVSHMGTSTHCGHYVAHVLKDGRWTIFNDSKVAVSVDLPKEMGYLYFFQRISN

SEQ ID NO: 64056 - protein, 94 aa, Zea Mays
MPLSYSLSLLISRRPSWLLLAPSVDRPCSSPSMAVLGLHLKPCPRIVFQHPLHTLASSSPAPSVRPAMATSPRPQPRRHPPLAIEVVPRIPPIR

SEQ ID NO: 64057 - protein, 181 aa, Zea Mays
MALLSAPSAAREFFFPGALLEAPSAQLGSPSLVRAAPRSLASRRRPLHPLGHGSCARPCSSARAQSWSPASVGAPLLPWLLAQRISLWCSSMRARSVLPARAAVSSSARPPSCSLRSFGHAPPRCRHSSPPSPQARRAWLTPCATHRFTSSPLRMRPPAPAPSLLIAARLLPMRAAAPSQP

SEQ ID NO: 64058 - protein, 175 aa, Zea Mays
MERKRKEMEKGKSELRLAMEELRLCGSRDGAEEEEEVQVQQVKVQEQHKSSTMDLLYVSKQLIHVLDEIGPTLLVLRQDIQQNVQRLQDLHEKDCSKYACLTAIVTEEMEQGTAKKTKSCTRAIIWLSRSIKFSKYLLERLLETPESSLEEIVEEAYANTLKPWHGWISSAAYKH

SEQ ID NO: 64059 - protein, 618 aa, Zea Mays
MEPFSLKSCLLPHSIKDQNTGSWTRFVNDCGTELIRLQIREHKAKNSMAVVRELVGVLKSTKKQIQLAEFKENKWTLKDSNLPISHGTDGSLLDLKGDNHLIKLYRGRKLEYERKCCSAHSEDVSAVTAVKFCAEHPYGKAVALLDTEAQLIMVNEDWLLLPWISISVLFMDGDGGTKLGGGAMVQKGTVFGSDTSMVLETQTVGAGSVASNLAQCGTCSAVFGGDDKEMANCKVEHASSGASRTVVASGENGHTETAGCGGGCGSNCGPMMAEDPKAGNAKSGGCGSGCGGGCGGAGGCGTMANEGQSRSGGVGTLLSSNAMGGEGQQAHSAGCGSGCGGGCGSGMVIEGSKVNNVNAMSGGCGSGCGGGCGSGMVIEGSKANNAMSGGCGSGCGGGCGSGMLIEGSKANKAMSGGCGSGCGGGCGSGMVIEGSKANNAMSGGCGSGCGGGCGSGMVNEGSKAANTMSGGCGSGCGGGCGALFNASTAAGEGLHNKSAGCGGGGCGSGCGGGGGCGSGMAIEGFKANHAKSGGCGSGCGGGGCGTLFSSSAAASQGQSRSGGCGSGCGGGGCGTGSMVAEGSNGGNAKSGGCGGGCGGGGGCGGGGCGGGCGAVFNA

SEQ ID NO: 64060 - protein, 99 aa, Zea Mays
MAHERHSRSLRSTNHVTETVDEEDKGQGKESQPPQSRVPPAATTTTAMISILAQERLLGFALGSVSMGGFVLHQRRAIYRSIAEADGSSYFYQVKSYIT

SEQ ID NO: 64061 - protein, 330 aa, Zea Mays
MCVLHPTVSCACLLTEVHEKTRALEASGYFFCLEDRALLCRDCDVAIHTVNSFVSVHQRFLLTGVQVGLDPADPVPPIAEKHVNAAGGSVNQPVRHQPKRSPTVQFSVEGSASVPTKNVTNGDCSRQNFVPTARGEVVDWTMNNSTIRSVESPPKYISEESPTLLQSSQTTTVFSNQINGNSDGAYHLSFSGGNVTDSLPDWPVDEFFSNSEYGPNFGFSENGSSKGDNAKLGGAGGSPQCRLAEGSVAEELLGQVPGLITDEYMSRVPENSWTVPEVPSPPTASGLNWHGNLCFPAYDSTMFVPEITSLQNSESHFTVPSSFKRRRREY

SEQ ID NO: 64062 - protein, 122 aa, Zea Mays
MKDPFEAAVEEQDSPPDSPAPPEEEPGAAGLADDAEDYDGGPPPRQPSAPASHAASAAAKAKGRVQREQQEDDDDDEDQMEVDLDKLPSSTGDPDKLAKMNYWQASLEVKRFLSLHQLWYQE

SEQ ID NO: 64063 - protein, 136 aa, Zea Mays
MWYDAGQTLSPSNVRWLRKNWSHRLSQPKGSSLPSKVGNDSLWKRVTPCVWDGASRNGPMLVEQYGPGIGEGECGKAIWWMGTEGACVVAEAGNGSVVRIFVAVVMGTEVVLMHSMLGGSEGGAAIEFVMREGMSS

SEQ ID NO: 64064 - protein, 863 aa, Zea Mays
MAQPLVVKKDDDLDEEEYYSPFLGIEKGAVLQEARVFHDPQLDARRCCQVITKLLYLLNQGDTFTKVEATEVFFATTKLFQSKDVGLRRMVYLMIKELSPSADEVIIVTSSLMKDMNSKTDMYRANAIRVLCRIIDSTLLTQIERYLKQAIVDKNPVVASAALVSGIYLLQTSPEVVKRWSNEVQEAVQSRAALVQFHALALLHQIRQNDRLAVSKLVTSLTRGSVRSPLAQCLLIRYTSQVIRESGVNQGGDRPFFDFLESCLRNKAEMVILEAARAITELNGVTSRELTPAITVLQLFLSSSKPVLRFAAVRTLNKVASTHPLAVTNCNIDMESLISDQNRSIATLAITTLLKTGNESSVDRLMKQMTNFMSDIADEFKIVVVEAIRSLCLKFPLKYRSLMNFLSNILREEGGFEYKKAIVDSIIILIRDIPDAKESGLFHLCEFIEDCEFTYLSTQILHFLGNEGPKTSDPSKYIRYIYNRVILENATVRASAVSTLAKFGALVDSLKPRIFVLLRRCLFDGDDEVRDRATLYLKLLGGEATVGETEKDVNEFLFGSLDVPLVNMETSLRNYSTGKKSAGPASAVSDPVSTVDASYEKLLSSIPEFADFGKLFKSSAPVELTEAETEYSVNVVKHIFDGHVVLQYNCTNTIPEQLLEQVIVFVDASEADEFLEVASKPLESLPYDSPGQTFVAFEKPEGVIATGKFSNILKFIVKEVDPSTGETEDDGVEDEYQLEDLEIVSADYMLKVGVSNFRNAWENMDPETERVDEYGLGVRESLAEAVSAVISILGMQPCEGTDVVPSNSRSHTCLLSGVFIGNVKVLVRLSFGISAPKEVAMKLAVRSDDPEISDKIHEIVANG

SEQ ID NO: 64065 - protein, 322 aa, Zea Mays
MASNSSAAAVAAMFGIRDADHQDQMKPLLAQQHQHQHQHQMPPAPLLNAASSSAGPGQAAGATPPAVKKKRNLPDPDAEVIALSPKTLLATNRFVCEVCNKGFQREQNLQLHRRGHNLPWKLKQKDPSQAQRRRVYLCPEPTCAHHDPSRALGDLTGIKKHFCRKHGEKKWKCDKCSKRYAVQSDWKAHSKVCGTREYRCDCGTLFSRRDSFITHRGFLRRPRAGERPGCRPQASPPATSTAPPTRPTWGSASRRRRQRVPRVLAGQAVPQSHASAGSPRQRRRGCLGVVGYGSLQPWLHRKQCKQLRYFQPWPCKPGTPDK

SEQ ID NO: 64066 - protein, 295 aa, Zea Mays
MLSHPRLDRRFSVCDPVSLGGRPSDFDGNFPFMGSPDDHCIEEDTSNGAHFSPFPYGYGVSAPMEENGYHPNTPSRYCLVASKQMVGIFLTIWVRSEIRNDVRNLKVSCVGRGLMGYLGNKGSISISMSLHHTTFCFICCHLTSGEKEGDELRRNSDVMEILRKTRFPQVRGAADVKSPETILEHDRIIWLGDLNYRIALSYCSAKALVEMHSWKQLLEKDQLSYVRGESRFSDHRPVYSIFMAEVESIRHRRRNAGYFSSRIEVEELLPNPYSHPAFTASSQMVENNHTAQKLT

SEQ ID NO: 64067 - protein, 192 aa, Zea Mays
MIYAYFHPNVERWMEKLEESETKVRLSIKGTIVTLSLTVGFLWYEYIYKLDKVTYNKYHPYTSWIPITVYICLRNCTQQLRNASLALFAWLGKITLETYISQIHIWLRSSMPNGQPKWLLCFIPDYPMLNFMLTTAIYLLLSYRVFEITNVLKSAFIPSRDNSRLYQNLIAGIAISVCLYLCSLILLKIPGV

SEQ ID NO: 64068 - protein, 162 aa, Zea Mays
MLPRLLNGPHRLLLGGPHASGAAPLHRRRVLAGRRAMSASASPASGPRRPLRGVVFDMDGTLTVPVIDFPAMYREVLGGDAAYAAARGSGGGSVDILHCIEDWAPDKQRHAYEVIARFEREGLDRLQIMPGASELCGFLDAKQIRSVLAASTSWKMELLSSL

SEQ ID NO: 64069 - protein, 577 aa, Zea Mays
MLTARGLRRLAAAVCFARRSASAVAALPGAGAARFHDYDAAITECVGRRALREGRQVHARMVTAGYRPALYLATRLVIMYARCGALEDAHNVLDGMPERNVVSWTAMISGYSQNERPAEAWDLFIMMLRAGCEPNEFTLASVLTSCTGSQGIHQHQIKQVHAFAIKKNFELHMFVGSSLLDMYARSENIQEARRVFDMLPARDVVSYTTILSGYTRLGLDEEALNLFRQLYNEGMQCNQVTFSVLLNALSGLSSMDYGKQVHGLILRRELPFFMALQNSLIDMYSKCGKLLYSRRVFDNMPERSVVSWNAMLMGYGRHGMAYEVVQLFRFMCDKVKPDSVTLLAVLLGYSHGGLVDEGLDMFDHIVKEQSTLLNTQHYGCVIDLLGRSGQLEKALLLIQKMPFQPTRAIWGSLLGACRVHANVHVDVFRLRKLMLKKTVIKEPGRSWMILDKVIHTFHSSERFHPRKEDINVKINEIYAAIKAAGFVPDLSCVLHDVDDEQKERMLLGHSEKLAITFGLMSTPSDLTIQVMKNLRICVDCHNFAKFVSKVYGREISLRDKNRFHLITEGACTCGDYW

SEQ ID NO: 64070 - protein, 154 aa, Zea Mays
MQDHTTSDHSKNCLDKAFAVIDIMNSSLLLVVQDNETDHINILKMCDMLFPQLCLRIPSTNAMHVRGLQSLGQLFGCTSKNIDNHLDALASHQSVGNKNLCQSETLQDMGMDQSGQPTLFCEASMATLLRGLAIAPIQLSPCTNFFIFLAIDTA

SEQ ID NO: 64071 - protein, 856 aa, Zea Mays
MASPGSSAAIASASTSYSMGLGKTLQAISLLSYLKIHRIAPGPFLVLCPLSVTDGWLSEFSKFCPSFRVMQYVGGKLHRRDLRRTIYEDVQKASTSSRSFELPFDVLMTTYDIALMDQDFLSQIPWHYAVIDEAQRLKNPSSVLYNVLEQRFIMPRRLLLTGTPIQNNLSELWALMHFCLPSIFGKLDEFLSTFKEAGESLTGDEANKAKGQFKIIKHVLKAFMLRRTKFLLIESGILALPPLTELTVMVPLTQLQKKLYMSVLRKELPTLISFARGSSRHQSLQNIVIQLRKVCSHPYLFSGIEPEPYVEGEHLIQASGKLIVLDLILKKLHECGHRVLLFAQMTQTLDILQDFLELRNYTYERLDGSVRAEERFAAIRNFSSQSTKGLIRDDNRSEAFVFMISTRAGGVGLNLIGADTVIFYEQDWNPQADKQALQRAHRIGQLNHVLSINLVSQRTIEEVIMRRADRKLKLSHNIIGEEDGTDGKGGDPGIEASDMRSIIFGLHLFDPADTATETIDEDITAETFSVEKLAKLKTMSEKVVMMRSHESSEKDERAFEINPNMTDDSGTVIRRASDSIRIDPGLNEAAYLSWVKKFKEASISSEDATVGFGRQRAAPEEKLLKHDVNKQKIEEKRLAKWESLGYQTLAVKEPDITASQNISDAGSIQFVYGDCTNPSKVCPAKPAIIFSCIDNSGTWGHGGMFDALTSLSTCIPDAYHRASEFDDLHMGDLHLIQLDEGNCTRSLDAPLWVALAIVQSYNPRRKVPRSEISMSDLELCISKAAFSAAQHSAAIHMPRIGYQGGSQRSEWYTIERLLRKHSSLHGIDIFVYYFQRRQTDCQIVTQVGHADDSTQA

SEQ ID NO: 64072 - protein, 151 aa, Zea Mays
MQVIMLTSSLLGTRVTLLPTKLWQLRQQRRLLMRWASHSWRRVPKTPSTWSRPSWLWLHPSRIGTANVPSGKCDIAIVKFYWALTKSYLLLFSGWPANQPRPTLGQRPCRSAGNPSTRRRLAARPKIASFLWFLVTISTVCARTQMYLHYS

SEQ ID NO: 64073 - protein, 62 aa, Zea Mays
MSNCCVVLVLFFLALLKRVLACIVSCNVVVYHIWIDHYIKMLKRDLLSYTGRQGIQEEPFGQ

SEQ ID NO: 64074 - protein, 666 aa, Zea Mays
MHKGSTDAEHHNAWSELGSVDEHEYAAELICKLGYAVRVPTIAKQPQQSMNQLLPLSQSQTNLVQAQVLIQNQMQQQKQPTSMAQNQQPAASQSLILPQQQQQQQQHQQQKLVHQQQQILLQQQQLQQQQQLQQQQQNQQQLNKMAAQMPNLASHQPQLSDQQLQLQLLQKLQQQQQSLLSQPAVTLAQLPLIQEQQKLIIDMQQQLSNSQPLSQQQTMPQQSIQVPSRATPPPTTTVQQESQQKLPQKHVGFTDTSHTTIPPTTSVNTISVVGSPLMATGATHSVVTDEIPSCSTSPSTANGNHIVQPVLGRNQLCSMINYEKVPQSTPMSIPSSLEAVTATPRSIKELPKLNSNVKQSVMASKLPNAGHVAQNLTNNAPPTDYPETASSATSVWLSQADGLLHHSFPMSNFNQQQQMFKAAAPETDIQGADPSNNTLFGINGDGQLGFPMGADDFLSNGIDASKYQGHISTDIDGNYRISKDGQQEISSSMVSQSFGASDMAFNSIDSGMNDGGFVNRTSWPPAPPLKRMRTFTKVYKRGAVGRSIDISQFSGYDELKHALARMFSMEGQLEERQRIGWKLVYKDHEDDILLLGDDPWEEFVNCVKCIRILSPQEVQQISLDGDLGNNILPNQACSSSDGGNAWRARCDQNSGNPSTGSYDQFE

SEQ ID NO: 64075 - protein, 57 aa, Zea Mays
MQQTQLEDVFSTELPIILLLVQYPGLYDGRSFIFDGTVRQLYNMRGTIANQCDTVSP

SEQ ID NO: 64076 - protein, 581 aa, Zea Mays
MLSSCLVMRGPIRRLIAWYGNGLGGIGGRGGDSRYTNRAPDSGRGGWNEGSGNSRREGLMSYKQFIQELEDDVSPVEAQSRYEEYKSEYITTQKKAYFALHKDEDWLRNKYHPTNLENVIERRNELARTTADDFFLQLQSGSLDTGPGLTGSAVSKSGNNSSKNLDAVEGDGKKGKLGKGSDDSYYAAPKAHPVSSEVRRIRIDIEQAQGLICKLDSEKGIENNILSSSNHEKPDMDKSHGSMGPIVIVQGSSTVKGLEGTELLDTLVTYLWRIHGVDYYGMSETNEPKGLRHVKADARTYNGASSSATEWENKLDSFWQDRIQGQDPLEILKAKEKIDGAATEVLDPYVRKIRDEKYGWKYGCGAKGCTKLFHAAEFVQKHIKLKHTDLVVDLTSKAREDIYFENYMNDPKAPGGTPIMQQPAPRGKGRQRPPIESRLRDERGNHRLDSDGSGENPDDPVYDSFGDPTMHGAFPPDIPAPPVLMPVPGAGPLGPFIPAPPEVAMHMLRDQGAPPPFEPSGGPHPRKAGRGSGGGGPPMRGPSPVFSAPPPHHMHDPRRIRSYQDLDAPEDEVTVMDYRSL

SEQ ID NO: 64077 - protein, 785 aa, Zea Mays
MKFLREGSVQSSPNGFLSSDAAPRTRQGTFDLQLPADHYIDDDDTSDNKPIDFLGLASDAKPQNDAELTLVSAERLGKFSDNSSSSGLRTTNNLGSRQVTNLNESNTGFFMGRANGSVSRGLPHTLENSWHQPILRSSTTTFNFSKEYSKEKHTNEGTSSNFFDTSAKLTHDDKPTINKGKQVSSITFLAPRYNDADPPKYFKAADGRPASYNQFLYQDNPSIVSPMGSCTADPRSSIVNNPALIPRFNGSSTVNSYASLSAVTQSIGTSIPKLKNVDNLDKRYPGFPLDSFSVSHSRHQVAISSNLEQKNSQKFEDSDQQSHGKGMKNFNLNETLSDCQEDGLVEQDGRCAASFQHGKDGGSVFGISWLKNKAVSADPTALEKAGKIFGHSFGTTMELKNAKDQNEPAVTIRNLSDSASTSLGCGIKKDGPSEDIATGTLLVCNKAQEDATCLPLSCQKHVPKDGQDADGVIKISGASIRNFIDLNDAVPNDDNSEESVVSHECQAEPSRNNHPKRAFVIDLEVPACEEDAAWDFDQECAQPKPDAHQEVDGRSDTSALAAAENIVALSRIIPTALEASDDMLQWFADLAVLNIKDLAEQAELQACTNDSSNDESDSFESLTLKLEETKIDEYWSRPLEPEITTDEQLISTAHLLTKPRRGQQRRRRQKRDFQKDILPGLSSLSRPEIIEDVQLLEGLVQASGGSWESSLTRRGRYGGRTRGRKPRKTVVTVIVEEEVEVSPPPKPVGTGDLEADGRGMVGWGRTTRRCRRARCPSGNNLAAAS

SEQ ID NO: 64078 - protein, 238 aa, Zea Mays
MESGRGLGGGGHRGHWFGLVADCGCAASLAESPCRSGSSTVERDSDIPAEATQREWDGDEVESDDGEVQSPYKGSSFDTMDVLQEALPFRKGVPKFYNGESGSTAKLQDLPEPETPSPRKRKGLLPFSFKWDKEVYPDGDAIKSPTNCRRMTTSPAATSSSTSNSGSDDEHNRSQKLSSRRPLRMPINALGVFASPPGPRPPQPFSAHMRSQSMLDVQDVTETDSAAMVTPRDKRMKK

SEQ ID NO: 64079 - protein, 465 aa, Zea Mays
MLRLHHHSAPVSPHAAICPPSRLACSCICNKPNSRITASQGWSSIRRRITTVASGQSVPGYTPDDGDQCLETGNKLSFATVKEAFISLNSVGVRSELILLALPAVLGQAIDPIAQLMETAYIGRLGALELASAGIGISIFNIVSKIFNIPLLSIATSFVAEDISRSATKHPSSGKLELTSVSSALILAAGIGIMEALALFLGSGLFLKLMGVSPVSPMHRPAKLFLSLRALGAPANVIMLAVQGIFRGFKDTKTPVFYIGGMLLGRTLSILLTMTIGTSMAARQGPTAMAAHQICLQVWLAVSLLADALAVSAQALIASSYAILDYKKVQKTAMFALQIGVFSGLALAIGLYASFGNIARLFTSDPEVLTVVKSCALFVCASQPINALAFIFDGLHYGVSDFEYVAQATIVVGVTSSLVLLWAPSVFGLAGVWAGLTTLMGLRMAAGILRLLQKAGPWSFLHEEP

SEQ ID NO: 64080 - protein, 365 aa, Zea Mays
MIRDLNVAERTEDIGFYAGFVGASFMFGRCLTSTAWGIAADRIGRKPVVVFGISSVVVFNTLFGLSVNYWMAIATRFLLGALNGLLGPIKAYAIEVCRPEHEALALSLVSTAWGIGLIIGPALGGYLALPAENFPAIFSPDSVFGRFPYFLPCLCTSVFAAAVLVSCIWMPETLHRHKVHESTSQDVEKVQESGIRKKKSLFRNWPLMSSIIVYCIFSFHDMAYTEVFSLWAESDKKYGGLSLSSEDVGQVLAVTGASLLVYQLFLYPRINKVLGPIKSSRIAAILCIPILFAYPYMTYISEPGLSIILNIASAIKNNLAVTIITGTFILQNNAVPQDQRGAANGLSMTGMSFFKALAPAGAGIV

SEQ ID NO: 64081 - protein, 186 aa, Zea Mays
MALGKRSTWTSRKPEELVPTDYEKIRAMNMMKNNQLFQRLGLGQLKSLVTATAANNKEDCPQQSESLYDGENTDNSNEEESQCTNGGCANISNDGDQISTKVTRGNKIIVAPTEERTIRVTRQRIAKVNQENSHNLSIHKQLSSCPATNHDSIETLVVPTQPSSNATINNNTTHNVDNAIEPNSLI

SEQ ID NO: 64082 - protein, 463 aa, Zea Mays
MSKHITKLFPNKVTIESPEDETELSQWKQLLGRDIEILKAKANFLKIQSFLTRHGMECTDLESVVCVKDRNLTSECVDKIVGYALSYQLKDHPIQTPGKDARVVLSGVSLKYGIDLLESIQSGPKKKSTKKSLKDVVTENEFEKRLLPDVIPPDEIGVTFEDIGALENVKETLQELVMLPLQRPELFSKGQLMKPCKGILLFGPPGTGKTMLAKAVATEAGANFINISMSSIASKWFGEGEKYVKAVFSLASKISPSVIFVDEVDGMLGRRENPGEHEAMRKMKNEFMVNWDGLRTKDKERVLVLAATNRPFDLDEAVVRRLPRRLMVNLPDAPNRKKILSVILAKEDLADDVDLEALANLTDGYSGSDLKNLCITAAHRPIREILEREKKERTLAEAENRPAPPQCCSGDVRSLKFSDFKHAHEQVCASISSDSKNMNELVQWNDLYGEGGSRHKTPLSYFM

SEQ ID NO: 64083 - protein, 1175 aa, Zea Mays
MGDRRVLLVASPEVAVFGYDGVVSLASVQDAVDTVPLNNQTRTVIRIGPGVHQQQVRIPRTKNFITLCGSSIKDTVICWDNRTTTCIKHTQPSGAIGTGTLSSATVIVEGDDFIAENVIFKNSAPQSGQAAAVRVTADRCAFYDCRFLGWQETLHLHGGKQLLKNCYVEGSYDFIFGDSAALLEHCHIHCKSAGYITAHGRKSSSEPTGFVFFKCVITGNGEAAYMYLGRPWEPFGRVVFAETFMDRCIEPAGWHNWDKPDNEQTACFYEYRCSGPGSSSSGRERWCKELFGDEAMPFLAQTFIDPDIENPWLVHSKAVAVVGDLGDAQLVAHPDELLPEPPGSLLVQGEPTRQCKVNSRFPAGVQSKSQTEKTAAAAYHRAAGRVAADGLLQRAAVEEDLLVVVVGENGVELPAGAEHREPGLRRRAVELQQPARVGGTAVSLHPAGCRPFILKFEDPGGASERSYYLLLQPTVPDLGALRASAASRRRLDHGREVEAGPGAYQRGRRVTDRERGARRVAAPSPVGQIVEQTPRGQWAAALLAYCLCLASVYPTTSRGPTVERGSRSTEYSEIWPVSTAFSSLTSTSCRSALTPRPAFMAVTFPSPTPRSPRRPDAIVAPDPSSADMSPSLDFGDPTSFTALRVLTDGGAATRLLHECVAYQRALDARLDALLARRADLDRAAASLLRSAPPLLSLAASDAAALKESSSSTAALADALSSRVRHLDAAHSRADAALARAEAALDRSRALEATRRALAADDLAAAATAAHEFLAIDARFPTDDDLRRDLIDIKRRLEGLARRRLAAVVDAQDHPAVLRLVRLFPLLGLADEGLQVYVAYLKKVVALRARADFEHLAELTSATQPTSDRPDFVGCLTRLFKDIVLAVEENDGVLRELRGDDVAYAIIELQEECDSRGTQILRRYADYRKLARLASDINSYTKNLLSVMGSMASAAGGNEGPDPREIELYLEEILALTQLGEDYTEFMVNKIRVLRDVKPELGPRAMKAFRNGNFNKMEQDLTGFYVIFEEFFMVENVRKAIRIDEPISDGLTTSMVDDVFFVLQSCCRRATSTASINSVIAVLGGATSLLSNEYQEALQWRMREPNLGAKLFLGGVGVQKTGEEIATALNNIDISSEYVLKLRHEIEELCVEQYIASNTKLGKQDNTGSSGLRQAR

SEQ ID NO: 64084 - protein, 598 aa, Zea Mays
MDHGGEDRVVAASLAAARRTLRAGLDKSRALGHALARAGPRLKEIQAALPVLEAAVRPIRAPRAELAAAGPHIDRAVGPAAAVLKVFDAVHGLEPPLLAPGAAGSGAAGDLPGYLAVLAQLEEAHRFLADNCGLAAQWLADIVEYLGDRFLVDPRFLADIEVTLDELKAPPTGDLDGGLLAAALGILEAEFRRLLADHSAPLAMPQPGAAAGSTAPSRVPAAAVHKLTLILDRLVANGRQDRCVAVYIDARGGVVSASLRALGLDYLREPSQDAQALGPALELWGRHLEFVVRRLLESERQLCAKVFGLHKDVASACFAEVAAQAGVLEFLRLFGGKACAEIQSQTRDLVKLLIDGAVEIFEELIVQVELQRHMPPPVDGGVPRLVTFVVEYCNRLLGEQYRPMLGQVLTIHRSWRKEVFNDRMLVDVVLNIVKALEANFDVWSKAYDNATLSYLFMMNTHWHFFRHLKATKLGEILGDVWLREHEQYKDYYLSMFIRESWGALSPLLNREGLILFSKGQATARDLVKQRLKTFNSSFDEMHCRQSSWVIPDKDLRERTCNLVVQTIVPAYRSYLQNYGPLVEQDGNTSKYVRMDGRN

SEQ ID NO: 64085 - protein, 610 aa, Zea Mays
MMNGMVMDQLILFHKPNKKATREEANSQPLTSLRRNKSSEFSRMIKEAKHLGLALGIPCLDGMEEAEAQCALLNFSSLCDGCFTSDSDSFLFGAKTVYRDVFIGEGGYVICYEMEDIQNKLGFGRNSLISLAVLLGSDYSNGVHGFGPEAACRLVKSLGDDTVLGQILSDGVKPARKCKGKGSGANAGTVGGTCPKASTCEVGINQDSGSQFRDIINAYLEPKCHSPDSEAVQRACSQRPFLRSQLHQICEQYFAWSPVKTDEYILPKIAERELRRFSNLRSTSSDLGMKPSLNEIPVPCPVLAIVKQRKVQGSEYYEVSWRNIDGLQVSVVPGELVRSACPEKITEFLESKDAQKKQKRRARPKKSGQAAVKDVDAQLQELLLGIESESGSFPCTANGPQTAAIQMVAPLQEFVDLSSPSPPIRSCKIARSRKLSDSDTVTMDGIHLQHQSLQIGSMESNSALGLEPIDLSSPSPCAAHKPQAAPEAPPLCMEAERRALWDISNLVEKEPSCCKHEPGTNVQVEESPLFRHGTGMAGEADSSRRGDAQSREVVEAAMIDLSSPSPVKVDNSRRNGKKDCEAGSSSQSPEHERKARELRLFLDSIRDELY

SEQ ID NO: 64086 - protein, 72 aa, Zea Mays
MQSEINMLLPKKQGLLHNPCFHDLNLVLDYELCSKKRFLASCQNLLLLIGIYWLGRTSKSCIVLIQMVHKIF

SEQ ID NO: 64087 - protein, 71 aa, Zea Mays
MNICELTLAVSHPPTGQEQVPQDEARGGYCDEFVRGLGRRLPINFEFLDRCLLIMYLFIYFVYNYCYLVKM

SEQ ID NO: 64088 - protein, 372 aa, Zea Mays
MMRAELRPERRRPILFRAQPITAHQTTSFLWSTRNAHVAYQTRPHLPHPDATTACALLAAAMLPYSGDHQRSPPPQPPPRAAFSSSLSPSAAPFPAADPVGPGPGPGRDLPTAPSVYTAGGDWGALSWMEPPASYMAPAATPPGYKAVEKEESTHKRGEDPSQCYPGVEGNMLNMSSESSSSNQAIFLKLMHNLSVVLLSTCKGGSSLQEDEEELLQSVIQNLTAASSKRSKVEQKNDDGLSNSSQMKFKDINYVRKHFWRSMHEDSEQENADSEFKATVSQVLTNHQEDKVLDNTEVPQASIYRNLWIEAEASACKLKYELQHALLKLETAKGLNDTIKVTNHRTMGKEPFHALRPFRATEEILVTSNLLL

SEQ ID NO: 64089 - protein, 441 aa, Zea Mays
MIVKSHTLRLPVGNPDGTIIIRTDQYNRDDLRVDYMYAKFFVIKSIGEADVHKSIKYGVWSSSSNGNIKLDSAFRDADRISRRHSTKCPVFLFFSVNGSGHFCGMAEMVGPVDFHKDMDFWCQDKWTGCFPVRWHIVKDIPNGFLQHITLQNNENKPVTHSRDTQEIPYLPGISVIKIFKDIKVRDCLFDDFMRYEAEEAQMKPHRRCKLSYDAPDFVPVSQRTEQTKSSSVLVDRTSEIQNVSEKPHDAKVINPQEPRASDKQASEAEKENELQESHCSGSQNQEDAAKTATNHPPGPSLKAAGADGKQQYWKKVENPKQHADSGAAQGSLKAPEKRLNGVSGSASTVPVPEGGEQQRVTAKLGSLKISSKAVEADRKTSTAGMEKQLNGVSGSGSAVPEGGEEQKVKISSKVVEADRKTSKAGVVTIGSMPVRVDSYAV

SEQ ID NO: 64090 - protein, 344 aa, Zea Mays
MVARFGDAGAGVEAAVRHHLEPPHRLVRARRRRPRAGRQRERHAGGAARRGGRPHLPRGVVAHQAVPAQGGPERDARRPRADGAVGARRGARVHGPARRPGAGVLGPRVHGELLPRVHGRDPAAVPDGAAVRRRGAAADRARADAAVRERGGDRARRGEARVRGGGVGGDARGGALRGAGQQLRRHHGRARRRADQHGVRADGRGGHPGGAAGRAGVRGGLLPGSVQGHGAALPRVPDHAGGEHPDQPVPARPPHLHGPQRDQEQGLGVPQGCLPRQAGRVVGHEEVPAHAQEGHRAHQEGQGQGQRRRRRQQLGIAVHVLIHPPLTLLLFFLPSFSDYGSTCM

SEQ ID NO: 64091 - protein, 975 aa, Zea Mays
MPDSADPLPTQPSPDPDMPPRKPLAGGKLKKPLTDKQRAAAEQRLSHLRAHLILRSLDSPAGGARALPPPQEAALDALGLLNFFRLDLQSDTPRPDLIAPLVAYYDPVCKRSFVRGVRVSVSRHHITRALCLPSKPASAAPAPADVDPAAVVPAVMQLLQDYVLLPFQGGDMCILPQEVAAAEQMVREGAAHRVDWGGLIWGLVEKEMLELPKREDGVCYYGPHLQRLIYSEKPHLLELVEEGPVPEASADVEMEDEDGDVDLKSKNLVELEPGDGDGEAGNDVRSESLKDSELGNAGARNDGLDKLELGDAVTRNKVMEELGLRDVDARNNSIEELEVVEEDARSKSLNECEAVDVDLDAMDININDRETINGDTRSKSLNESEAVDLDPDAMENNIDEMETVNEDARTKSLDEFEAVDAINNNIVELDAVNEDARCKSLNDESELVEEEFKSPSFDDMNTVDEHVNGTDTDGLCLGFVEVEAVPAVHEAMPDNNEETTEEAPAGGADVAGSDNVAVPTDVDCEEHYVEAVVVTQEVVAVAEELGDEEAKRDEEKDVMGLSLGFNSTNGYGAMDVEKETNVESLDEDESDSGNEEAEESEDGAFDVNDGEDMNWRIGDVNGGEGMTHSLQRCNTFGGMEFENLNKGEDEMRDELRFDDFPARASLERMTSSNLLQAMNSIPSSYNVSENVHDLPSGDFLAMGADAHKSGVDLGPGSSYLFGNNGKRNIDDIDGYNGNMQVQEGFPRSNQQKRMRHSNSSNISPGSGFFNASFSVPIQNLMVEASRLYEQNEQKLQSLQFEKQHWSDMLQQKEAIIQSLNSARFEQHNKYQAELRRFEHDLNVMAQLVTTYKKALKQTRASFDEYRKKFPCNVPLYGDVACGGGLVLSVRELEKRRCEEQQQNIAMVNGMIERFQYKWLSKFEEWGLSVNSLWSRMEGLYKEIELLKENRRARFATPATEESTLATEGSTPATEE

SEQ ID NO: 64092 - protein, 99 aa, Zea Mays
MVLWVFGYGSLIWNLGFDFDDKILGFIKGYNRTFNLACIDHRGTTEHPARTCTLETDGEATTRPYASAWYKPTRRKFIQKTRYVWFMLILTSFPCCRLR

SEQ ID NO: 64093 - protein, 667 aa, Zea Mays
MKVEVDQHLNKLSEDIRDLKSCNLAHKYDTDGSCCTACHVGKLAEIDDRFNSLKFLLAVVFRQIREILTVVNSSIHDLQWEHELQSEVTGIIIGDCIRGLQDELERKLYEQSSMVNSLRKNCQETVAQFASIREELIAISNILLPSEEEPQISLCRHESLGNWSDRWKFSFFRKRAHQDHSLSSTQNQNSATQKSISPSEVISERSDFRHLKGMTRHEMLNYFRSEISKLRRLHELDLQEKTEELFKFKREKWSLALKYDVEFEPLRRKFPEVISRFDQIMSNGMAAAVPTICSNSDAFDETSRLSSIIDSLYRENQHLHCLLAEKMKNIQELSSQISDSTRKMSLQYSLEKQILRQLNSTQVEYEDLFVESTIRDEIYQTVVRTLVDSHRNVLEDTTQTFRAKVSSLEAALSEKDKALCLSDEENQMLKEKLSTLEKEHFIQNNQQDLELIKQESEEMVLRDIEMEPQRSCEISDRDIQYEGLIKLNQVLEIASTTAKEIETKRLNLSDIQGKREQEKQLDCILVSIMDLSKEFMETEHRVPKDIKGNEKKTDNLHDQCNYMIQQAIVLTKKGLWYKQMLDTKRSELRKAESEVDIMGDKVNALLSLVQKIYVTLEHYSPVFQHHPVVSEADKKRTCKIQSKLEQQEQAAATVEDRSESRRGCYLR

SEQ ID NO: 64094 - protein, 487 aa, Zea Mays
MENAGAALIREVASKTNDSAGDGTTTASVLAREIIKLGLLSVTSGANPVSLKKGIDKTVQGLIQELENKSRPVKGGGDIKAVASISAGNDEFIGSMIAEAIDKVGPDGVLSIESSSSFETTVEVEEGMEIDRGYISPQFVTNLEKSIVEFENAKVLITDQKITSIKEILPILEKTTQLRAPLFIIAEDITGEALATLVVNKLRGILNVAAIKAPSFGERRKAVLQDIAIVTGAEFLAKDLGLLVENATEEQLGTARKVTIHQTTTTLIADAASKDEIQARIAQLKKELAETDSVYDTEKLAERIAKLAGGVAVIKVGAATETELEDRQLRIEDAKNATFAAIEEGIVPGGGAAYVHLSTVVPKIKEAIEDPDERLALILFKIRWYELYLPEALVAPASLIAHNAGVEGEVVVEKIKESDWEVGYNAMTDKYENLMEAGVIDPAKVTRCALQNAASVAGMVLTTQAIVVEKPKPKPQVAEPPEGALTV

SEQ ID NO: 64095 - protein, 886 aa, Zea Mays
MPEHSMAAKMAGAVQVLKDDTVKRTPMARPSNGREGKPIRLLSNHFSVKLRGVDAVFYQYSVCIKSEDDKVVDSKGIGRKVIDKLLQTYCSELDGKDFAYDGEKCLFTVGPLPQNNFEFTVILEETSSRAAGGSPVHESPTQANKKRVKRSHLAKKFSVDISYAAKIPLQSVALALRGSESEHGQDVLRVLDVVLRQQQAKRGCLLVRQSFFSDDSRNLVDLTGGVSGCRGLHSSFRTTIGGLSLNMDVSTTMVVTPGPVIDFLVTNQNVRDIRDIDWPRAKKMLKNLRVKAKHNNMEFKIIGLSDQPCSRQMFPMKVRNGNIEIKSVDITVQDYFKSKQVELTMPYLPCLDVGKPKRPNYLPIELCHMVSLQRYTKALSSQQRAMLVEKSRQKPQERMRVVTDAVKSNMYDDDPILSSCGIEIEKQLTRVDARVLSAPALVVGNSEDCIPNRGRWNYNNKRLFDPVKIERWAIVNFSARCDMSRISRELINCGRSKGIFIECPHSLVDEDSQSRRCSPVERVEKMFEKVKASLPGPPEFLLCLLPERKNCDIYGPWKKKNLHEMGIVTQCIAPSNKMNDQYFTNVLLKINAKLGGMNSKLALEHRQMIPVVTQIPTLILGMDVSHGSPGRADIPSIAAVVGSRCWPLISRYRASVRTQSPKVEMIDSLFKPLDDGKDDGIMRELLLDFYQTSQQRKPKQIIIFRDGVSESQFSQVLNVELNQIIKAYQSMGQGDLPKFTVIIAQKNHHTKLFQADSPENVPPGTVVDSGIVHPRQYDFYMCAHAGPIGTSRPTHYHVLLDEIGFSADNLQKLVLSLSYVYQRSTTAISVVAPICYAHLAAAQMGQFMKFEEFADTSSGSVNSSSPPSIPELPRLHADVCSSMFFC

SEQ ID NO: 64096 - protein, 725 aa, Zea Mays
MVSAIGNDGPLYGTLNNPADQSDVIGVGGIDYNNHIASFSSRGMTTWELPHGYGRVKPDVVAYSRDIIGSKISTGCKTLSGTSVASPVVAGVVCLLVSVIPEDKRKLILNPAAMKQALVEGASKLSGPNMYEQGAGRLDLWQSYEILKNYQPRASIFPTMLDFTDCPYFWPFCRQPMYAGAMPVIFNATILNGMGVIGYVKDQPLWQPSEDIGNLLSVHFTYSDVIWPWTGYLALHLQVKDEGSQFSGIISGNVTLTIYTPAAHGESSPRSSTCILHMKVKVVPTPVRSKRILWDQYHNIKYPSGYVPRDSLNVHNDILDWHGDHLHTNFHILFNMLRDAEYYIETLGSPLTCFDASNYGTLLMVDLEDEYFDEEIQKLRDDVIHKGLGIAVFAEWYHVDTMVKMTFFDENTRSWWTPITGGANIPAINELLAPFGIALGDKILTGDFSINGEQTHYASGTDIVQFPAGGFLHSFQLQENSKTVQDHIGTLDTESTQGKGKLSSILGVIEAGEGRIAVYGDSNCLDSSHMVTNCYWLLRKILEFTGNRVKDNVLFSEAAQLKFPVFENIHHPSRRTDVNFSTYSTVVGKELICHQDSRFEVWGTKGYGVQPIGTSRKLPEYQMHESSSSPNVTIQIAGSRQDKVERLQRNLSIPNAAKFDDKRDYFGFIGHEEVDIGMLMASQWMIPCFAATACLMLYLSCRVQQKRRRRRKGSVASANRLTSMV

SEQ ID NO: 64097 - protein, 259 aa, Zea Mays
MAEATAYEEQRRRQVEANKRKLEELQLHYLSAAVREAAAAAKPSPVKKRKARVPLDAADSVMEPLRRSGRLANLPDKSVHREEVPTFWRKIRRTYGSVRKDLENRVYATDEARSYAICKAEEVEQELDSSFPVFIKPMTQSHVTGGFWLGLPNHFCRKYLPKRDETITLLDEDDNESYTLYLALKRGLSAGWRGFAIQHKLVDGDCLVFQLTERTKFKFMEVGCIGQACIWKLLGVLNLLGYRVISCTKCLHSPVATNC

SEQ ID NO: 64098 - protein, 623 aa, Zea Mays
MGSAGKHQLLSFMDELIPTIRTALCDSTQEVRESAGLAFSTLYKSAGLQAIDEIVPTLLRALEDDDTSATALDGLKQILSVRTAAVLPHILPKLVQPPLSSFNAHALGALAEVAGPGLNSHIGTVLPALILAMDDEDADVQNSARKAAETVLLVIDEEGVETLIPELLRGINDSQASMRRGSAYLIGFLFKNTKLYLADEASDMMSTLIILLSDTDKATVSAALEAFSRVVASVPKEQLPTHIKLVRDAVSTARDKERRRRKGVPILVPGLCLPKALQPFLPIYQQGLISGSAETKEQAAEGLGELIDVTSEKTLKEVVVPITGSVRARAAAALGKLSALSTRVDPLVSDLLSMLQSGDESVKESVLSALKGVIKHAGKSVSSAIRSRGCALLEDLLQAEADDVRSCAAKVIGTLSQYMEETEISDLVQILLNMSTSSDWCTRHGALLSFSYISMHSPSKLCHLASFPSLVDLLKGSLKDDKFPVREVATRTLGKILCFELQPEAGTLQLVQLLILALRDDSSEVRRRSLSCIKAAAKTNHSALATHHSILGPAIAEALKDSSMPVRLAAERCALHVFQLTKGPDNVTAAQKYLGMTGLEVKKIAKLDVDSDGSESSDDDKRT

SEQ ID NO: 64099 - protein, 1806 aa, Zea Mays
MGDGGVACAVRAVEGFHAGALVRRGGAGEAMPDKGEKAHGHHHQQQHWKNQQSASATDLEEGELLSGEAETNGLPERSMPPKKWRKVLAASAAAVEVEPGEIVSTKQAVPLKKARRNGEVDKVELLPERQRKVKSSGKSTRKSIKDDMEPGEIAPPEKRRDAKSQRADDNSRRPSSSAQKSSLRDSDEEPGEIKPESSTSGSLRKNQPTEPHSINHKHHTDTSDQSGSKSHRKGPKGEGKRSAARHLSGRNREISSPTRDRRDRHERSPGILGRFPHERSRHDRYDRSPSRLERSPHRERARHYESRDHSPYVSPRHRARQPHFRDNTPSRVDNFPRGRVQREDVRDRSPFLHDRSPSERFRPTDTHEASKKSRSGNNSEKSQHKSKSAKQSSKTKSGSNEKNEKISNEKPTESSKYTELPPPPPLPLPPPPPPPPPPPPLPPAVPPPLPPPPEPEPTGVLAEDMIEDMDICDTPPHTSAAPEPTDPIYDIGRWFYLDHFGIEQGPSKLAVLKKLVEDGYLLSDHLIKHADSNRWVTVENAASPLVPSDFPSFYSDTSTQMVNPPEAPGNLLDEALEEASNLASGSEDKQMVEASAEDSEEFYINDRVEALMDGSILVHGQELEIIGELLGADFQPADWQRLSHPEDFTRFHVHIEGDDEIIGGTEFLENRTTDAYGLVSVDNFHHYVESSEWFSGRWSCKGGDWRRNDELGQDTPFRKKLVLNEGYPLCQIPKGSYEDPRRPCKDELYYPVRGKKHDLPLWAFSSTEEDIDGVNDTTKNTVVPGRPGQTRQPPSEVKVMLQVVSINYHVIKDQSSVEPRTKPRGTDRPPSRSSRSHSIGAERSSIHDGSSHFRKHHDHDSQSFHKSKSVPNIPKDHVCTVDELSVNRGDWYYLDGTGHDQGPFSYSELQELVKKDTIIEQSSVFRKIDNTWFPVLKDLKPGSSVPSAAPSSNLIAAFTHPDQYNFGVNQGSSSFHELHPQFAGYTRGKLHELVMKYFKSRELTLAINEVLDPWISAKQPKKEFEAYFSHNSASRNFLPEDGGSAKRARLLPDQSDENIHLSEDIIASRKEDICFEELCDGASSVDNDSVNPRAGNASWGLLNDHLLARIFHFMRADLKSLISSAATCKSWNAAAKYYRNMCRFIDLSSVGPLCTDSVFCDIMAGFEKQNIRTLILAGCSNLSSHALGRVLEHLPQISYVHIQGCSHLGDLKNKFQHVKWIRSSLNPEGSYRKMKTLKQIGDGNNYASKVARNFDQLDDSDELDGYFADISKIEGASLFSFGQGFYKRSKLLDARKSSAVLSRDAEMRRLMQRQAENSYRKMEEFVINRLREIMRCNRFDFFIPKVSKIEGRLKNGYYARHGFRTIKHDIRTMCQDALRYKDGNDLDDVKQIVVSFIQLAKRLGNPRYISERNGAAAQDSLDISQYSFDTKLKKKQNKTRANLVAAGADNSSRAFDLEIKRSLSKLKKKDVCSGSETSDDDGYSEGDETESETTVSDTESDFDVNSGAWDLKGNCLKLTEHGESVIDDRILGARMTKASLVPPVTRKYEVIEEYLIVADVEEVQRKMRVSLPDDYSEKLLSQKNGTENLELPEVKDYQPRKVAGDEILEQEVYGIDPYTHNLLSDIMPSDLELSPTDKHIFIEELLLNALNKQVRHFTGLGNTPMTYNIRPVIEEIQRSAEDSGDRRTLKMCLGMLKSMRNRSDQNFVAYRKGLGVVCNKKGGFGVDDFVVEFFGEVYPSWRWYEKQDGIKHIQNNSEDQAPEFYNIMLERPKTDMDMTWFLLMRCTRPTTRVESATPATLTAKQK

SEQ ID NO: 64100 - protein, 496 aa, Zea Mays
MLKTFPNATKYLKTLVSFGKVDPGHKEKVEQNGLSIYSWEEFLQLGGKEKFELPPKEKDDICTIMYTSGTTGDPKGVLISNKSIVTIVSAVDEFLNNSNEQLNMDDVYISYLPLAHIFDRVIEEVFIRHGASIGFWRGDVKLLVEDIGELKPTVFCAVPRVLDRIYGGLQDKITAGGFLKKTLFNVAYKYKQGNMLKGNKHEEAAAMFDRLVFTKVKRGLGGRVRLILSGAAPLSRHVEEYLRVVTCSHVLQGYGLTETCAGSFVSLPNNMSMLGTVGPPVPYVEVRLESVPEMGYDALSSETPRGEICIRGDTLFSGYYKREDLTKEVLVDGWFHTGDIGEWQSDGSMKIIDRKKNIFKLSQGEYVAVENLENIFGQTPAVDSIWVYGNSFESSLVAVVNPNTQALERWAESNGVTGEFATICEDPRAREFILGELTKMGKEKKLKGFELIRAVHLDPAPFDMERDLITPTYKKKRPQLLKHYQTIIDGMYNSMK

SEQ ID NO: 64101 - protein, 159 aa, Zea Mays
MSDIDVLDDGYRWRKYGQKVVKGNPNPRSYYKCTGAGCLVRKHVERACHDTCAVVTTYEGKHNHDVPPARGSASLYRAALAAQMPPQQAASYQGAPMPAAERGSFALSGFGDPVGTAYSYYTNHHQEQEQQQQQPNQAMRYAKDEPQDCMSFFEQQLLF

SEQ ID NO: 64102 - protein, 753 aa, Zea Mays
MIHLMGLDANSKLPPNRSASNLMTRTMSGPATSETSLPVDRPMRLSEIHVAAEHALKQTISDPDFMTSLSSLEEFEKRYMELTKGAADNYHRSWWKRHGVVLDGEIAALFFKHGNYDLAVKSYEKVCALYSAEGWEELLADVLPDLAECQKILNDEAGYLASCVKLLSLDSGLFSSKERQGFQSEVVRLAHSEMKHLVPLDVSSLITFAGNAGPPLELCDGDPGTLSVAVWNGFPDDITLESLSLRLSASSSADEGIKAIKSSDSHVLVPGRNIISFDIPRQKPGSYVLGALTGQIGKLSFRSHGFSQDGPVETDEFMSFEKPTRPVLKVRKPRALVDITPAVSSALLMNELQWIGLIVKPIDYSLKGGILHIDAGAELKIEESQMIEIEIYVSDMECANSANSSIKAGKVEKVPIENGKIELPDWASDVTTLVWFPVRAIDDTIARGESLVSQKQSVVDGMRMIALKLEFGVFRNQVFERTIAVHFTNPFHVSTRVVDKCNDGALLLQVILSSGVKATLHVKDVRLDLQSGFDHLGKGDGRPALSLFPLVIAPSSKAGILFMLRLSGTKDVDDAENADSTLNITYGISGDRKTGAHSPIPVKSGDSEELVFKIALRLKRPVLDPCVAVGFLPFSTDCLRVGQLVNMRWRVERLKTPEDASISIDEILYQVEANPQNWMVAGRKCGHVSLSNEQGSRMEITVTCVPLVSGYVHPPQLDLPEVGEANISCNPAGPHLVCVLPPAISTSYCIPAI

SEQ ID NO: 64103 - protein, 324 aa, Zea Mays
MACAVLELMAEGLGIAGGAGDAVLARLVARADSDCMLRVNHYPPRPALNPSLTGFGEHTDPQIISVLRANGTSGLEIALRDGAWASVPPDGDAFFVNVGDTLQVLTNGRFRSVRHRVVVNSEKSRVSMVFFGGPAARREAGPAAAAPGRRRPEPVPGLHLERVQDQRVQDQARGRPPVPLREEVARGYVICMTGGRIDYHVCFSVYVSCIATALATGARTCILVAMLVLYVHVYARIYMVAPHRVSCIQCYLLSMEYQPCMHGPVISFYNYNYPPVLPDSPGVVRVRVSVNQSAVQQRRHDDVLRTATNDAGTGRDPSRTIYQD

SEQ ID NO: 64104 - protein, 66 aa, Zea Mays
MITPYIADRKTAKLENFRNRPFELVYNSDLIERCFEWTKVNSYLLILVMCIQTSLQLIISYISNIH

SEQ ID NO: 64105 - protein, 159 aa, Zea Mays
MSFRDVPPTVAETKLNFLKSYKRPIPSIYSAVLQELLVQQHLMRYKKTYQYDAVFALGFVTVYDQLMEGYPSNEDRDSIFKAYITALNEDPDQYRADALKMEEWARSQNGSSLVDFSSRDGEIEAILKDISERAKGKGNFSYSRFFAVGLFRLLDFALH

SEQ ID NO: 64106 - protein, 163 aa, Zea Mays
MAINPEMEVIKDQMNSMDPKSVQEGQAKMKALFKKHGVSPLTPMKGLLIQGPIFMSFFFAISNMVEKVPSFKGGGTLWFTDLTTPDSLYILPMLTGLTFLATVELNLQEGMEGNPMAGKMKYFSRGVAVLTVPFTMNFATFSVTGPHQTYSPCYMVLLSGDQL

SEQ ID NO: 64107 - protein, 136 aa, Zea Mays
MKSPARQQQNSRIDAVASPDRECPGRGNNNNNGGPQTCPDDKKGSSSGSEGSIWPKFAVTLSNREKEEDFLVFRGSKLPQRPKKRAKVIQRTVNFVCPGTWLCDLTLERYEVREKKVSKKRPRGLKAMHDLDSDSE

SEQ ID NO: 64108 - protein, 169 aa, Zea Mays
MLLAFCCSITFSSVFGLFNVPAKWYAWILLVLFQFLASNVSLLGHLCGILSGFAYTYGLFNYLLPGPSFYSKIEGLSALSVCVRRPGFIMCTGGTTYGQLPTYSNTSAAPSALINGNFLRNISSWMPSRHTSTAQEGEDPRFPGRARTLGSVGTEPTAREAYSCEHSQS

SEQ ID NO: 64109 - protein, 82 aa, Zea Mays
MAAARSLLLRHLRLAAAPSAASVRPTASLHEALWGQRWMSSEDAKGSFLDKSEVTERIIKVVKSFPKIDDPSKMPISRMILA

SEQ ID NO: 64110 - protein, 199 aa, Zea Mays
MDTLGALALATEPPTDQLMRRPPVGRREPLVTNIMWRNLFIQAVFQVAVLLTLNFRGRDLLHLTHDTLGHSSKVKNTLIFNTFVLCQVFNEVNSRKPEELNIFSGVSRNHLFLAVVSITVVMQVIIIEFLGKFTSTVRLNWKLWLVSVVIAFLSWPLAFVGKFIPVPRTELKDLIVRCWPKRGESAAQQTQDDRMEVPV

SEQ ID NO: 64111 - protein, 224 aa, Zea Mays
MNHSIYHTQLARTRALDQFYIYICVCMTSCMYMCAHIRSYYRCTHRADQGCRATRQVQASDANPSSEFIISYFGQHTCRDPSTIPLVIPDDTAPPPPDCANLISFGGSTVVGGGASPSANTTTTVPTTMLSRFGYSSSLPTQTQAQAQLAAAVVGPPGTTMTASWATVGSAPAEYWPGGTTSDMACGPAGTASFPSSPSSLGFMTGSPFGNAGDDDLFLFGFDP

SEQ ID NO: 64112 - protein, 76 aa, Zea Mays
MLLVRASDEVLRRIYLVEVTSMIKHYCKKAVCSCRHSMIRTTNSNKFCKSLHNHVQIRMMETERSTSSRILHIWMQ

SEQ ID NO: 64113 - protein, 657 aa, Zea Mays
MSSLAIVEKKPPPFPGGGCTGGVLFHLLDWHRRLACKRRLFSPRRLLPSSLRSSSPRRLPCPPPAASPPPPTLPHPADGAAPGVVARLMGLESWPATATAAPPRPQKQRKVEASRADGADSAVVLVLPTTRSRRPPASAPVPTARSHHGADLPARSPRRTRLVHAAAAKLLHPGARAGSRASARLALAYACSSPQHRKDDHAGTLFQGSGMTDDFLSRSESLPLERSALLQVQPPGLPAETDCDTAVVSRRHDHCSTNNVDAAISASTVVLPRMGFGDGNRSKRSSDVDAKHKGSGIRNDVTRTCARARSSGAAVQTGDERLLRKRATPTRPEVSGMPESGDLAGSTRLAGGARDLVSATRKFAHGGSGPRREFAGSISGQGSTTHRDLNSQNGLASTSRISSNGSGHKRGSGRKVGHDRAISNRDDRNAIAFTSRSSTKPVARASSQSNLLKSGSPNRLAPDTTRTRVLAPEKRYIEASPSFMSTSEKGEFSRLLKAKINELGMSDRIECTPDDSPSGKLTVPVLQELISALTNDMSTPISQCSNYSAASAPLSCNGNVDCINEPHCIFSNDQSPDFQKCFKGEQDVDSSAASLNNEPNQPSPTSVLEASFSNDTSLGSPVEKNGRDAYLLSARLSIGLQFGISCKKKVLVSGCSD

SEQ ID NO: 64114 - protein, 127 aa, Zea Mays
MILLGLKFLYYYLCFIQGLNIFRFANRIPLLFEQGADVITRTAAKRISWSSYKINQQQDKIGVFVSIVSTKIPFKGTGKEYIGDDITEISSAVKSALKQCCLQLKSKIVKKLQARERQDRKRNLNRG

SEQ ID NO: 64115 - protein, 586 aa, Zea Mays
MKRARSSEVFIGVGRLRARRGLAPLLAAAAFAYLLFVSVKLTYLGSAGPAPAVGRLATTGAGEPAARARSSGGGAVSGYGRITGEILRRHEAFEERRKRWGQLGNFTELERVAAEAWALGAAAWEEASAFDGDVDYIASRDVAGEGTAKCPGSLALGAGETTAFLPCGLAAGSAVTVVGTARTARPEYVEALERSGTGNGTVLVAQFAVELRGLRATDGEEPPRILHLNPRLRGDWSSRPVLEMNTCFRMQWGRAQRCDSTPSGDDDLVDGLRKCEKWDWQDVVESKETKTSSWFNRFIGRAKKPEMRWPFPFSEGKMFVLTIQAGVEGYHINVGGRHVASFPHRMGFALEDATGLAVTGGIDVHSVYATALPKAHPSFSLQQVLEMSERWKARPVPEEPIHLFIGILSATNHFAERMAIRKTWMQFPAIQSGNAVARFFVALSHRKEINAALKKEAEYFGDIVILPFIDRYELVVLKTVAICQYGVHNVTADYIMKCDDDTFVRLDIVLHQISTYNKTSPLYLGNLNLLHRPLRRGKWAVTYEEWPEAVYPPYANGPGYVISAGIARDVASRHTNHSLRVKMLFA

SEQ ID NO: 64116 - protein, 368 aa, Zea Mays
MGGKYRAARTKRWWRGLAAAGWVLTAVVCSAVMHWTLRRDSMDRAEERLVSMCEERARMLQEQFGVTVNHVHAIAILISTFNFEKSPPAIDQDTFAKYTARTSFERPLLNGVAFAQRVFHHEREMFESQQGWVMNTMQREPAPPQVEYAPVIFSQDTVSYLARIDMMSGEEDRENIFRARTTGKAVLTNPFRLLGSNHLGVVLTFAVYRPDLPADASVEQRVEATIGYLGGAFDVESLVENLLSKLAGNQDIVVNVYDVTNASDAMVLYGPSSLDEQVPFLHVSMLDFGDPFRKHEMRCRYRQKLPMPWSAITNPLGTFVIWMLLGYSIAAAYSRYDKVTEDCRKMEELKTQAEAADVAKSQVEEDHW

SEQ ID NO: 64117 - protein, 95 aa, Zea Mays
MSLCRSNRINMSDLGTSSRGTRQRSRVQEATKGDNKDSSGGRDMFMQKLKMAAENKIGATKAEFFCKTFEEVHEKLVHRELNLDAAKKFLSAYES

SEQ ID NO: 64118 - protein, 388 aa, Zea Mays
MLDTDLWQWSEMTGFGDLPSPREFAAASAIGNRKIVMYGGWDGKKWLSDVYIMDTMSLEWTELAVTGSVPPPRCGHSATMIEKRLLIFGGRGGAGPIMGDLWALKGITEEDNEAPGWTQLKLPGQSPSPRCGHSVTSGGPYLLLFGGHGTGGWLSRYDVYYNECIILDRVSVQWKRLPTSNEPPPPRAYHSITSIGSRFLLFGGFDGKNTFGDLWWLVPEDDPIAKRDLVPSIDSNSKPSTVTDDNQLLNLKESQALENPITELAKRLGIALSEEVSASFVDEANDKELVELSSRLAGQSLPASDQVASIQVLRDHWKSSPASSLQLQELGPLLRDYQRLILRHYTGNSLPAFREMEALRFFHLKSASQLRMDDIPVLLSEYGRLLST

SEQ ID NO: 64119 - protein, 144 aa, Zea Mays
MLSSGVHRYRFIVDGERRFIPDLPCETDNVGQILNLVDVHDFVPDSVESVSELMAPPSPDSSYGFHVPGEKEFSKEPPQLPAQLYLGVLNSRSTEEGCARPRHVVLDHLYIEKGWGAHPLVALSYTHRFRSKYVTCVLYKAIER

SEQ ID NO: 64120 - protein, 520 aa, Zea Mays
MQARLLLDMLGKGIESALTNPSTLLPEPWQASSDMLSSIDADKMTVEPALLPNIQGYVDAVLDLASHFITRLRRYASFCRTLASHVGPSSTTGTSRNMVTSPTNSSPSPSNNQGNQGGSTSATGNSQMQEWVQGAIAKISNNSDGAATATQNPMSTRTSFMPISINTGTFPGTPAVRLIGDCHFLHRLCQLLLFCLLFRRRQSPRLLASSQKNQDSAMQKIQHMMNAKTEDNSSTVRSGLGAAKVEEGHSARGGQFVLGGAKGPEENPIGKSVRIGSGNAGQGYTSDEVKVLFLILVDLCRRTSTLPHPLPASQVGSSSIIIRLHYIDGNYTVLPEVVEASLGPHMQNMPRPRGADAAGLLLRELELQPPAEEWHRRNMFGGPWSEPDDFGPLDNMPRLKISGSINSHLSDMEVDAVSSIGIDLWPRKRRLSERDAAFGLKTSVGLGGYLGVMGSRRDVVTAVWRTGLDGDWYKCIRCLRQTCAFAHPGAPNQTNEREAWWISRWSHACPMCGGSWVKVV

SEQ ID NO: 64121 - protein, 770 aa, Zea Mays
MAGAEQKGEERWERMLTAVERLTGKMEAMEVGQRKAEEDRALMARQLQETEQTVSRLRLELLAKDLEGNESNSEREHRVHRGDERGGGFGREGGRERREQWGEGREFRPSSLPKWSFPKFHGNDPGIWFDRCVEYFTVYQVPEWIWASTASTHMEGNASKWLQVYKLKHGLGDWEQFTHAVREKFGVEEYPHAMRALVNVKQQHGVEEYSQAFNDIRYAATLHNPELDETLFVTHYVRGLKPEIQSQVMARTPKTVDKAMRLAQLYQEIAEKNRMRSQKGVMGIKTQAIGSRSGILNPELNKERQLRDYRRANGLCYICGDKFEPGHQAKCPKRVVTQIHQLTVEDMSTVLTDEVLLKLEQEEEHIVEGLHQLSWNAIKGTECDGCMRVLSLIQDQVLVMLIDSGSSTTFISQRMVTKLGLSTEDCPPVKVKVANGEIMVCEKNVREVKWKAGGHVYRTAMRVLALEAYDVILGYDWLKQHSPMHCDWINKVLTFCDQGVEVKLQGEADLKREVQQVSVLQLEKWVKGDEVWVFVMLEEVKGEEDEAGNETLTGILEEFADVFAVPTQLPPTRPYDHHIPLLPGSIPVNSRPYRYSPHHKTEIEKQVSELLAAGLIVPSVSPFASPVLLVQKKDGSWRFCVDYRKLNDMTIKNRFPMPLVEEILDELAGTKFFTSLDMTSGYHQIRMGAEDEFKTAFKTHHGHYQFRVMPFGLTNAPASFQCAMNSILQSFLRKFVMVFLDDILIYSSSLEAHLQHIRLVLDKLREHQFI

SEQ ID NO: 64122 - protein, 432 aa, Zea Mays
MLACSSSKPHRPVKALGAQFSPALPSAASLQPQQHVHFTCPFLPPFPLPPRHLRSPPPAAPAMAMTEGLVPITRTYLARYYDKYPLPPLPDATTDLAARLRALSADLAAVAPIAPDEELLEQEAAGIPAHKIDENLWKNREQMEEILFLINTSHRPVALQQKSTPEDAEIVCTLDDIEAKLKDMLKNLEQFQLKNADNVFNTVMTYMPQDFRGTLIRQQRERSERNKQAEVDALVSAGGSIHDRYALLWKQQMERRVQLAQLGSATGVYKTLVRYLVGVPQVLLDFIRQINDDNGPMEEQRERYGPALYTLTKLVLAIRLYLHVSLARYGQRKIEKDDAAVLQQAVVIYTKEFLKFTEFIGEVFVNAPFFISAEDAGAVDARKSDEYKETIIPAGKTHEVILSVEAVNSYIAWDFSLQQGALNMVLLLKCIS

SEQ ID NO: 64123 - protein, 161 aa, Zea Mays
MAAAACSSASPLLLPSGPRHASASRAWFLGGRSRALRSEAPCCCKAAAARGSAPQCGTVGGGSSSTRRGLLGVALGASALGLAAFDAVAAGLPPEEKPKLCDAACEGELENVPMVTTESGLQYKDIKVGEGPSPPVGFQVAANYVAMVPTGQIFDRWDSDS

SEQ ID NO: 64124 - protein, 101 aa, Zea Mays
MKSMATQPIKSVMAAVKTQTVAGGGRAPVSIRHWSVFALFWSASDHLTYMGVEIAADDWSTCRIVLGRGVEQLKGSLPNNIVTSGRSVDVVIADDDTLQID

SEQ ID NO: 64125 - protein, 92 aa, Zea Mays
MLSRLGLQHLAPTSDATGFQEWWSEAERFVSKHKKKSFNSIVILVAWQIWKHRNACVFDNASPNIHAILLSIHDEALLWGLGGAAALRQVWL

SEQ ID NO: 64126 - protein, 1066 aa, Zea Mays
MLKLSITVTITRSRHRLTPGTVKFAAFYVLSLEGSRGLTILEVAEKIQKSGLRDLTTSKTPEASVSAALSRDTKLFERTAPSTYCVKTPYRKDPDDSEAVLSAAREKIRVFQNTLSECEEVEKDVDEAERDEDSECDDATDDADGDDVNIEGKDAKSPLVGAQYDTQITVVGDVKKESNSVMNISVPPSIQIKSSASVPLHTLDSKASSSTDPQVGDDDKDTEIDESNQGESWVQGLAEGDYCDLSVDERLNAFVALIGVATEGNSIRAILETLQERLEAASALKKQMWAEAQLDKRRSRDDFTSKVQYDSCVGIKVDTDQKNNAAESTLVPVDNPIRNNNGNSSLTNNDLLVDKQNQLITGDVFQQWNGVSQELSTNPESLSVQQYASSEKTRSQLKSFIGHKAEQLYVYRSLPLGQDRRRNRYWQFSASSSSYDPGSGRVFFESRDGYWRVIDSSEAFEALVSSLDTRGIRESHLHSMLQSIEPTFREAVERKKCVSLEHTTGWTDNGSNESPNCNNEFGSPCSTLSGVASDNLMAYSDTFKIEIGHNEAEKSSISKRASVFLKWMWRECYCHQSTYTMKYGKKRCPELIQSCDHCYQIYLAEEQHCSSCHKSFKPIHNFLEHLSQCEDNQRTNPSWKTQIVGLSVPVGLRLLRLLLATIEASVPAEALLPFWTDLYRKSWGVKLYSASSAEEVLQMLSVLESAIKRDYLSSNFETTTELLNSNTQDATQNSVGGSGSATILPWVPDTTAAVALRLLDLDTSISYKLHSKLVSNKEQEAGDFMKLPLRYPSINKNKQEIEQFIPIGFDQQDGTLLTNSNGRRGRGRGGRGGRGSRGGSRGGSSRGGGGRVPRGIGSSSRIQFRDDNSVPYGRAPRKNVRGGRTRGRGRGRGLRTVRPRQPSEFSATSIPKLNLLGSFSMLSKANHTGNMHSPESLGAEEWVLERREYVKDDDDNLVSRYDESEEENGEPMNEEYDEQISGYPRDNSEFSPIQMMGDVSHDEDAEGDEGEEDGEDYETEDPAGDEDDDVEMDWDDDIRDNDDGNGAANADEDEGGTSSYSSEYSE

SEQ ID NO: 64127 - protein, 507 aa, Zea Mays
MEFFSGHTSLHAEDQEKNCSTTSGVSNDVDLALSIADVEAAIRQAEDEADYMALKKLEEEEAVDNQEFSEEAAGRQEEDELVNEENGKPDEHINEEQKYNSSDVEKEKHITLSTNRLNKEKALTLAVGDEDTDMLADVKQMAAAAAAAGQASSSFENQLRPIDRYAMRFMELWDPVIDKAALNHQVNVEEEEWELDRIEKFKEDLEAEIDEDQEPLSYESWDVDFATTAYRQHVEALTQKQLLEEQERQAQEATKELEEKNDNMSHHRKSKKNKKKTGKLKPLKRVRLSPESEVILEETSVDNAPSPELTSDESPHHYCNKRKKITVATEENSNSRSLKKLKKTTKSSFISEALSPRLKEDLNDSDSKSVGRTKSDGRFFIPCMPVKRVIVIKPERLKRKGIWSRDCASDSWSSEEDAVLCGTVHEYGPLWELASDFLHFLPGGSLYRGRYHHPVHCCERYRELFCKHGMSATDNSNSEKVPSGTGKAILRVSEAVHVLLVGVYIDD

SEQ ID NO: 64128 - protein, 2208 aa, Zea Mays
MLNLVEPIYQKGVDQQSMDEARVLLGRILDAFVGKFRTLKRTIPQLLEEGEEGKEQPNLRMKLEVPLQTVLNLQQPLEYTKEINDYKSLIKTLAVGMKTIIWSITHAHWPRPQQQNQQSSNLSLQHFRGLREDEVRKTSGVLKSGVHCLALFKEKDDDREILQSFSQMLAIMEARDIMDMFSFCMSDLFDSMITNNQLLHIFSTLLQAPKVLRPFTDVLINFLVSSKLEALKQPDSPAAKLVLQLFRFLFIAAAKAPESCERTLQPHVPVIMEVCMRSATEVEKPLGYMHLLRNMFRALNSAKFDSLMRDLIPSLQPCLNMLLSMLDEVILALWSHLRPPPYTWGTKSLELLGKLGGRNRRFLREPLALESKENPEHGLRLVLTFEPATPFLVPLDRCIHQAVGAVMQGNGLEAFYRKKALQFIRVCLDSLLNLRENVPGEGVSPGVLGTLLISNLDPSRRRNDASDMKGDLGVKTKTQLLAEKSVFKTLLVAIIAANADTSLHDEKDDYVVDICRHFAMLFHVDSPSSSQSGFMHPIGSSLPSIIMGSRSRCNTSSNLRELDPLIFLDALVEVLSSENRQHAKAALSALNIFAETLIFLARMKHTGMLRGGPSTPMLVSSPSLNPVYSPPPSVRVAVFEELLPRLLHCCYSSTWQAQMGGVMGLGALVGKVSVDTLCIFQVRVVRGLLFVLKRLPVHANKEQEETNHVLTQVLRVVNNADEANSEPRRQSFQGVVEFLAQELFNPNASMVVRKNVQACLSLLASRTGSEVSELLEPLYLPLLQPLISRPLRSKNIEQQVGTVTALNFCLALRPPLLKLSPELVNFLQEALQIAEADETIWVTRMMNAKVVLTWNKLRTACIELLCTAMAWGDLKAQNHTELRAKIISMFFKSLTCRTTEIVNVAKEGLRQVVQQQRMPKDLLQSSLRPILVNLANTKSLSMPLLQGLARLLELLSNWFNVTLGAKLLDHLKKWLEPEKLVQTQKSWKAGDEPKIAAAMIELFHLLPPAASKFLDDLVTLVIDLERALPEDQFYSEINSPYRAPLAKFLNRYVLEAVDYFLARLSHPKYFRRFMYIICSDTGDLRDALARSPQKILASAFSQFYSQSEASAAQLSSVKDEALTGAVSESITVQSSSNMVTTSESYFNGLELVSALVKLMPEWLRNNRVVFDTLLLAWKSPARLARLQNEQDLSLPQVMESKRLIKCFLNYLRHDRTEVGALFDMLSVFLYRSRIDYSFLKEFYVIEVAEGYSPNLKKTILNHFLNIFQSKQYGQDHLVVTMQILILPMLAHSFQNGQSWEVVDPTIIKTIVEKLLDPPEEVSAEYDEPLRIELLQLATLLLKYLQTDLVHHRKELIKFGWNHLKREDNSSKQWAFVNVCHFLEAYQAPEKIILQLKLIVRHADLFYSCRAHFVPQMVNSLSRLGLPYNTTAENRRLAIELAGLVVAWERQRQSEMKVAQESESQNQLGDMLNPSVIGGDPKRSSDVPSFADDLSLPDEEYKPNAAMEEMIITFLIRVSLVIEPKDKESSSMYKQALDLLTQALEVWPNANVKFNYLEKLLGNLSPTPQSKDPASALAQGLDVMNKVLEKQPRLFIRNNINHISQILEPCFGNKMLDAGKSLCSLLKMVFSAFPLEAATTPQDIKLLHQRVQELIHKNLAAVTTQQIALELNNAHSIISFSLFVLNALAEVQKNFIDPFIGLLFRVLQRLARDMGSSAGSHIRQGQRPELDSSVNSRSTIDSTVISNMKTVLKLISERVMSSSDHRKSMGQILQALLSEKGTDSSILLCMLDMIKTWIEEDCRLASSTGSVSSLNPKEIITYLHKLSLVDRKSFPPAAQEEWDAKYLQLLYSLCADSTKYPLSFRQEFFHKIERQYMLGLRAKDPEMRKRFFKLYHDTVGKTLFSRLQFIIQLQDWEAVSDVFWLKQGLDLVLAILVENEPITLAANSARVPTLMIAGPVPDRITMPQQVPDAQESMDGTTLSFDSLAARHAQFLNDANKLVVADIMAPLKELAFADPNVAYHLWVLVFPIVWVTLHKEEQVALAKPIIALLSKDYHKRQQGCRPNVAQALLEGLHLSHPQPRMPSELIKYIGKTCNVWYIAIALLESHIVHMNEAKCSESLAELYRLLNEDDMRCGLWKRKSITAETRAGLSLAQHGYWQQAQNLFYQAMIKATQGTYNNTVPKAEMCLWEEQWLSCASHLGQWEVLA

SEQ ID NO: 64129 - protein, 427 aa, Zea Mays
MGSVDGRGVEGIHEANRRAQLIGWMNALLPEFSLPPDSSSEELRELLSDGVVLCRLVNTLIPGVLEGSWEGYAPSDQRLGNVKKFLSVVSDMGLPGFSLKDLDEGLMSSVVECLLVLRGSVDPRLGDDIPPDVTRTPLRKQWGVQEMDKPQVPAAALGKRSPAEDMRNGVADSKTHQKTSVFSGQKVREVFQLKRGSYSDLTAAKISEMMHSNSLDNAPTQSLISVVNGILDESIERKKGEIPHRVVYLLRKVVQEIEHRLCIQAEHIRSQNVTIKTREQKYCSKIKALEMLVNGTNEENQMAINRLQIVKNEKSQIEEKKELCEKDVQRLMKEKEYSKSIIMNLTKDMEAMNRLHEQQLEQIGRKAKEMEEQLTTRVKEVEYLLLQSNKKVEELEIASRLKSQLWDQKENIFQSYMDNQQLVIKVI

SEQ ID NO: 64130 - protein, 790 aa, Zea Mays
MEPSRGGVGGGGRRWGEAEGDAAEEGRRGEDGGEVSLREWLDRPGRAVEAAECVHVFRQVAEAVAVAHAQGVAVGSARPSCFVVSPPFARVAFIESASGSDASGSCSGSDASEDADGDPDPDPDPDASPPLRRRDSAVPGEERAGRSFPLKSVLAMELSWYTSPEDADDSAATFASDVYRLGVLLFELFYTFETMEDKMRAMANLRHRVLPPQLLFKWPKEASFCQLLMHPVPETRPKMSEVLQSEFLNQSRNSLEEHEAALRLREEIEEQELLLDFLQQLQKRKQDIADSLQGTIAFLSSDINEVPHQQSTIGHCENFLSDGDKEVCSGTVEEQSDCGSRKRFRPELQGVDMEENNRSVEECSRTVPSSELIQESVLSKSSRLMKNFKKLETAYFLTRSKLMKQVGSQISSCDRVVKNTTGSAVGTEGSSLDDFSLERQYGTRQRGWVNSFLEGLCKYLSFSKLKVRAELKHCDLLNSSNLVCSVGFDRDREFFATAGVNKKIKVFEYNMIVNEHRDIHYPVVEMSNRSKLSCICWNSYMKSHIASSDFEGIVQVWDVTRSQVFVGMREHERRVWSVDFSIVDPTKLVSGSDDGSVKLWDMNQAGSIGTIRTRANVCSVQFQPDTARSIAIGSADHKIYCYDLRNIRAPYCTLVGHTKTVSYVKYLDASTILSASTDNSLKLWDLSMNPGRIIDSPVQTFTGHTNTKNFVGLSISDGYIATGSETNEVFVYHKEFPMPVLAYKFSVTDPISGQEIDDQSQFISCVCWRGQSSTLLSANSSGNIKILEMD

SEQ ID NO: 64131 - protein, 1293 aa, Zea Mays
MAVKGKGKQVAAESPGPGAGAGGASGSGGKRRMASSDAGAGPSSSSAAKRRRRAGVLQFVDDVAGVDDDYEEDELESEDDTDDGFFTGGEHAQNLSHKRTERSHPLPFLVKEEELSGDELEEFIKNRYSNRVKYAADRSYSREDDDIFSMDCALKEPTIWRVKCMVGRERQMAFCFMQKFVDLRKIGTKVPIITAFALDHIRGFVFVEAEKACDVTEACKGFCSVYTSRITSVPAAEVPSLLSSRTKPFEISRGTWIRMKNGNYKGDLAQVVSVDDGRKKVMIKIVPRVDLHAISKKFGGAVSLKGAAVPAPRLISSQELEFFRPHIEIKRDRQTGEVFEVLDGLMFKDGFLYKKVALSSLIYWGIQPTETELLKFSSSPSNRASADDLDWLSGMYGSKKRNLPEKRDMESSSSKIRSSKASDLKASTSTENYDENDEFNLHDLVLYGRKDFGVIVAVEKDGFRILKGGPEGSAVKVRKQDIKKGCVDKMFTAVDHQKKTISINDTVNVVEGPFQGKQGVVKHLYLGILFIYNESESENCGFFCAQSGSCEKIRKGLGSSTTESSDFTTPMFPEPAYEQNGHRDTERPYRSTREQLFSIGQMLRIRKGPLKGYLCRVVRIFRNDVTVKLDSLLKIVTVQADLLSVPANRGDNLSGAPASKFGSQDTSFFGSEAGKTSWDNGLPSFGSDSWQPFSSSTLSVQNAGGESEADPWSKKTSAKDDSDPWGKKTDGDSDRWGKKTDGDSDPWGKEAVSAADGDSNPWGKETVPSAAGDSDPWGKKVVSSADGDSDSWGKKATSSAVDTEKEGSGGTAWDKQAGVGGSDAAGSSWDRAVVNESEKSDNWGEACRVMDMGTGAEADTDPWGSKVKAVDMEGPNNWEKATVPPNNKLEDVSQGWGQPKGNSTEDQAIDNVSKDVDNNRACDSSLPVTEDGTWGKSKDNSCGGAGGAGGWDVSVGNWNKSSVVADAQDEGWGKGNWSSAESEETNNQSGNWNKTGASDQAGYNNWDKPKSFGGNGWNKGDDQNSSWNRPENFGGGRGFGRGQGRGRGQQSGYFNGRNDQGSWKKSWGSDNAERPSWRSDNQVDNEAGESGGYRGRGRGRFGRGDRNQGNNFGSGDGGSWGSGRGNGGRGGYRNWNDNNERSFGEGGGWSQSQSSDWNANKGNGEGNQAFSKSKPSWEAQNTSGRDGQAGKGDANNSWSKNRSSPSSAWGAPSGGAGGRGSWGKSNEDGWNSAGGSAKEKPAWGGGSEASTKKEDKGGEGNGSQGGGGVSSWDKGADDAWNGNTGSDIGSGGW

SEQ ID NO: 64132 - protein, 419 aa, Zea Mays
MLGNRLESRPISASPSFSSSLVAYKGTAKTFNLVEMERATLGFDESRIIGEGGFGRVYEGILEDGERVAIKVLKRDDQQGTREFLAEVEMLSRLHHRNLVKLIGICTEGHSRCLVYELVPNGSVESHLHGSDKGAARFDWDARLKIALGAARGLAYLHEDSSPRVIHRDFKSSNILLEHDFTPKVSDFGLARTALGEGNEHISTRVMGTFGYVAPEYAMTGHLLVKSDVYSYGVVLLELLTGMKPVDMLRPPGQENLVAWAGSLLTSRDGLESIVDPSLGSSIPFDSIARVAAIASMCVQPEVDQRPFMGEVVQALKLVCDEGSEFNGSTSFSQDLRIQDVEAMSRASGDVDFVDPTLSAELFTSSARYDAMDASGSFRRYSSSGPLRVGRAGLDKERGLSTGSSSEHVGLQRFRIDSE

SEQ ID NO: 64133 - protein, 332 aa, Zea Mays
MSCIGSSCTATNKGKETVVEVHGAVAEEKQQVRNGEETAAEDDSGGSDPDSDSESDLDSESDWDSYSEEEEERQQQRKKKEKPKNKKKKKKQRRRQQQQQPAWLITLLRTRFWEPCKEHVSKNRAEQCMFCLKCCKVTCPRCTHDLPGHRLLKIRRYVYRSVVHASDMQALGVDVSRIQAYVVNAKKVLHLRPMSRSKHFRPQAGTPRCVTCRTWLRSAPNLFCSLACQRKTTSRGPKLRSATGASKCRWLNHQGLQPMSCLALKLRTRCLRRFRRRRRRPQIRTRRSAGGRASRRRRRGRRSSEDVPARCWMREVRMPPIKDVEPACVEPS

SEQ ID NO: 64134 - protein, 1167 aa, Zea Mays
MVMGFPHCANAYYLLMQLDKDFRPVFHLLETQCDANGNTNASGDVKEAIRYNKINIGQMQILKNEMNENPFDVKLQALQSLVDSADMMESDLPVQNAIEPLPLLPACSPSFSSIVDEVFEYERGSTAAQNRCLPVDIQGINARVVSPMHDGCLSYTQANNNMNVHPNVSLNSYFPSNFRHLQGANKSLQLVPSSNDNSNQIPAQSSHSGNLGNATPGHLIGSSTTTGGLGKLITAGSDGASRKHYLSDFLSSIPSLRGLQPSEPRKRRKKTESVQSLLPLQAHSSNLQSRGSLTYGDVLAERNNCVPATIYASVLLHVIRHCSLCIKHAQLTAQMDSLAIPYVEEVGLRRPSSNLWLRLPFAQDDSWNHICLRLGKAGSMSWDVRINDPHFRELWELNGGSTKTQWGVGIRIANSSEMDSHISFDSSGVVLTYNTVEADSVQKLVSDLRRLSNARSFALGMRRLIGVKFQDKLDDNQLTMEVKSQSVNKGNSDAADKLSEQMRKTFRIEAVGLMSLWFSYGTMPMVHIVVEWEIAKAGCTMHVSPDQLWPHTKFLEDFVNGGEVASFLDCIRLTAGPLLALGGAIRPARMPVAVSSGYSSMPKQPNIPTQGPLVNGSSSTIHHAPGPSNAASAHLGSHNLHAAAMLSAVGRGGPGLVPSSLLPFDVSVVLRGPYWIRIIYRKKFSVDMRCFAGDQVWLQPATPPKGGPSVGGSLPCPQFRPFIMEHVAQGLNALEPNFMNATQASGHLNNNAGVPQTAPSANRLNATPGVSMVRPTSGVANHVAASLSRAGNAMLASSALASGISGTSVRLTAGAGLPVHMKGELNTAFIGLGDDGGYGGGWVPLAALKKVLRGILKYLGVLWLFAQLPELLKEILGSILKDNEGALLNLDQEQPALRFYVGGYVFAVSVHRVQLLLQVLSVKRFHHQQQQQQAQSNAQEELAAVEINEICDYFSRRVASEPYDASRVASFITLLTLPILVLREFLKLITWKKGLSPVHGDIATAQRARIELCLENHSGSASSDNTENSSLAKSNIHHDRAHSSVEFALTFVLDHALIPHMNVAGGAAWLPYCVSVKLRYSFGDNNHIAFLAMNGSHGGRACWLQFEEWERCKQKVSRAVETVNGSGVAGEVGQGRLRMVAEMIQKQLQLCLQQLRDDPLSAGSTAS

SEQ ID NO: 64135 - protein, 217 aa, Zea Mays
MQLDVLLFCCCVPLYNFSSIYTYLMASPKSFVDSFVDKTEKRYNQNMSPAIPKDKWRKGSQMVVTKSLFRRRPNARQLGFTFRRKQILKGVAQQEHDCIPDEHYVQTLFSIKGLEDELERRTLTYTSWNQSSNPKDKMTWHPMKFEYDTSSPEHINAIKRIDHVNYQMEHRTEWCQCNGTSAPCFLFARKFSYSAAMHLLEQGAIGTPKSAQLMINF

SEQ ID NO: 64136 - protein, 430 aa, Zea Mays
MAAPSAAPRHAVPARHGLLPGPHALSRRAPPDRPSLSPPRRARARARGQLRGVLRGRGAGARGVGVRRGVRGRGRRGHAQHRGVPARRRGAGREGRRWGRGQARRAPREVAHGQLQPHQPLHPLPAPRRGHPRLPGSNGTIDGQGHMWWELWRNRTLNHTRGHLIELVNSTNVLISSVTLSNSPFWTVHPVYCSNVVMKDLTILAPLDAPNTDGIDPDSSSEVCIEDCYIESGDDLVAVKSGWDQYGISFGKPSTNIVIQRVSGTTPTCSGVGFGSEMSGGISNVLVRDLHVWNSAQAVRLKTDVGRGGYITNITIASVAMEKVKVPIRFSRGADDHPDDRYDPAALPRISNVLVSDVVGVHLQRAPMLEAVPGAVYEGICFRNFSFRGIRRQQDSRWHCESVYGEAHDVFPAPCEEFRRDGSSSWCGLL

SEQ ID NO: 64137 - protein, 165 aa, Zea Mays
MSPAAPQHKLREAIAMVDEVGPPEKPAMEPAPAAKQIMVPEKPEEMLRAQHMLTTLVDEVRPPEKPEETPENTSAGQPALLRYRPVSLCPPSTDRRRSGCPTPSYPRPRMLMSSAPPVPLPRRQRAPPSSSLAPRPDRRRRRAAGSTVLSVVGGHGQQPERPSIV

SEQ ID NO: 64138 - protein, 233 aa, Zea Mays
MSESCDQVKAIINCFFLYLFIINNFVEWWVLAGCFLGAMYEQSCNFDTTKPSGIREGEPVLHARGDGTCSYCDIANHKYSPAIDMWSIGCIFAEILTGKPLFPGKNVVHQLDLMTDLLGTPSTDTISQIRNEKARRYLSSMRRKQPIPVSDRCGCNCCNVHINWLILDATLQDKIGWLFAPLVLLQFILTGSVELVNMHKYNSYVLKGYNPVYTFRYLRRGNSEIWTSPRVVS

SEQ ID NO: 64139 - protein, 208 aa, Zea Mays
MSENNIQEVRIMSAGFDKQILAQKLSKLNSSQQTIETLSHWCVFHHRCCQQVVETWDSEFHAAPVERRVSLLYLANDIMQNSRKEGNGYIAEFMRVIPAALNGVLTVRDDFGRNVPKRLIDIWEDRKIFDTQAQSLKDDFFRRLKDIRNQLKNTGSEQLEKVVSSYKHVLNAPMDEDTLMRKCQAALINFDELNKTYGNNSILAAGFP

SEQ ID NO: 64140 - protein, 74 aa, Zea Mays
MVKGENLMNGECTKIKVWLNDLAGSEWSAKTYAQGERLKQAQNVNSSLSTLGDVICTLVTKTSHIPFRVRSIEL

SEQ ID NO: 64141 - protein, 166 aa, Zea Mays
MDRVVSQLLVEIDGLSDNSQDLFIIGATNRPDLLDSALLRPGRFDKLLYVGVNTEASYRERILKAQTRKYKLHKNVSLLSVAQRCPPNFTGADIYALCADAWFHAAKRSVETFETDPSRSNDASAEEVIVEIDDFITVLGDIAPSLSLDELQNYEQLRQKIEGPSR

SEQ ID NO: 64142 - protein, 168 aa, Zea Mays
MMDTKPGPDGQDTDGVYRPPKFMPTSMDDEEKRRKNDSRRDKAIARVAIENPYIKEIIDDAADRPEEWKETVGDESREFGRYMRQREEQEKQEEELFTRAPVTKRDKQIEKRIRRQLHGLGGLTDGFDLGMNMLLGGDKEDDGGSSKSHGKSGNRKKHLKSSKKRKRH

SEQ ID NO: 64143 - protein, 579 aa, Zea Mays
MEAAFDAYFCAADLDRDGRISGQEAVAFFKGSGLPQPVLAQIWTYADKNRTGFLGREDFCNSLKLVTVAQSGRELTPDIVRSALFGPAAAKIPAPRINVSTAGPQTNSVASPPNATRALGSGQQNPAVRGPQVLPGASSNPQVRPPQPPNANTVPPVQGVASRPPVGGGPSGLNHTSSTTTNLATDWFSGKRSASSLGATSQAPTRGISPQGNLTTAGISAQNSTPLPVYNSHMPGATTPANANSTNVNMMPSQPSVSDSKTLVPLGNGLPSNSTFGVDPFSVTLQAKQESALTPNVPNNLPSSTAPASAAGPHHPPKPMQAGPLQGISSLPSHTSQLPHSQPAPRQQQFNAIPSTPGPVGANIPGGQIPSNPYQSQAPWPKITQVDVRKYMIVFIKVDRDRDGKITGEEARNLFLSWRLPRDILRKVWDLSDQDKDGMLSFKEFCVAVYLMERHREHRPLPDVLPDGIWAEGTSLPSTGQFAGNPSGPPSHASTGFASRGMQGPHHGMLPSSMKPTSRRPLPLDADDTVKAEQQKPKIPVLEEHLVGQLSKEEQGTLDAKFKEASDADKKMFQSYFLW

SEQ ID NO: 64144 - protein, 484 aa, Zea Mays
MAFWWPLLVLAAAYALCRLLLFLIPPTVPSIDVDASDVLAKEDSFIYIPRRGKSTQTDKVQCYEPATMKYLGYFPVVTPDEVKEHVAQSRKAQRIWAKSSFKQRRQFLRILLKYILEHQDLICEVSSRDTGKTMVDASLGEIMTTCEKITWLLDEGEKWLKPEYRSTGRSMLHKRAKVEFYPLGVIGAIVSWNYPFHNVFNPVLAAVFSGNAAVIKVSEHATWSGCFYFRIIQAALSAVGAPENLVHIITGFAETGQALVSSVDKIIFVGSPGVGKMIMKRASETLIPVTLELGGKDSFIVCEDVDLPSVVQVATRAALQSSGQNCAGAERFYVHDDIYSAFVSQIVKTVKSISVGPPLSGRYDMGAICMIEHSEKLQNLVNDALDKGAEIAVRGSFGNLGEDAVDQFFPPTVLVNVDHTMKIMQEETFGPIIPIMKFSSDEEAIKLANDSKYGLGCAVFSGNQKRAIRIASQLHLKHRIEAWR

SEQ ID NO: 64145 - protein, 344 aa, Zea Mays
MNPYDLRFADPSSYHDRRSDLTVAPTFAPPAPVAAANLNPYAAAYPLPVPVPVPAAPAGGDYQRYGQGGRGRGGGGRGGGGGYGGGGRGGGRGRDGLDSLALPKPDFRSLIPFEKNFYVECPSVQAMSEADVAQYRRLRDITIEGRDVPKPVRYFQEANFPDYCMQAIAKSGFVEPTPIQSQGWPMALKGRDLIGIAQTGSGKTLSYLLPGLVHVGAQPRLEQGDGPIVLILAPTRELAVQIQEESTKFGSYSRTRSTCVYGGAPKGPQIRDLRRGVEIVIATPGRLIDMLEAGHTNLRRVTYLVLDEADRMLDMGFEPQIRKIVAQTGKPCTGVPHGLEKLKP

SEQ ID NO: 64146 - protein, 514 aa, Zea Mays
MAAAAAARILRLAPRRIQVPKTSPLAALSFPLPRTAPIAAASGRRQRFCAVAQAPAPAAAATGAAGEAVGEFRKRLRVADVKGGEDEGAAWVGKELAVRGWVRTCRAQRTITFVEVNDGSCLSNMQCVLTPETEGYDQIGKSDPTSFPIQKKRASREFLRTVAHLRPRTNTFGAVARVRNTLAYATHKFFQDNGFVWVSSPIITASDCEGAGEQFYVTTLLSNSADGGSLLKDIPATKDGRVDWSQDFFCKPAFLTVSGQLNGETYASALSDIYTFGPTFRAENSNTSRHLAEFWMIEPELAFADLNDDMACATAYLQYVVKYILENCKEDMDFFNTWIEKGIIDRLNDVVEKNFVHLSYTDAVELLLGSKKEFEFPVKWGLDLQSEHERYITEVAFGGRPVIIRDYPKEIKAFYMRENDDGKTVAAMDLLVPRVGELIGGSQREERLDYLEARLDEQNLNKESYWWYLDLRRYGSVPHAGFGLGFERLVQFATGMDNIRDTIPFPRVPGSAEF

SEQ ID NO: 64147 - protein, 402 aa, Zea Mays
MGQSYVTAGKHEETPEAFPLPRGVAIVRADAGWAHCVAITDEGDVYTWGWKECVPTGRVIGDQSSVGTKEKDERQMAMATDQGVSPRSQVSRTSSGAASGPSESRGTDDSTKRRRLSSAKHGPESSTSSDESLSAPPCVVTFNTGVKIVSVAAGGRHTLALSDLGQVWGWGYGGEGQLGLGSRIRTVSSPHPVPCIESALYSKDRPSAMKGNKAAEGHVSKVLGNCVRAIACGGRHSAAVTDSGALLTFGWGLYGQCGQGNTDDVLSPTCVSSILGSKMQDVAAGLWHTVCTSVDGDVYSFGGNQFGQLGTGSDQAETVPKLVDATSLENKNARSVSCGARHSAIITDEGEVFCWGWNKYGQLGLGDSMDRNVPCSVPVDAYHPLNVSCGWWHTLVLADSPT

SEQ ID NO: 64148 - protein, 81 aa, Zea Mays
MVTGRLVHHGPSQSSGTVAVSTCLAPPKSPPRPRHSARPPMAARLVPRRLARPCLLVPRSQLPSQVAAACGALASGAQLRT

SEQ ID NO: 64149 - protein, 302 aa, Zea Mays
MPGYGMHGHGGEAVKLFNLMRQQGPPPNDVTFVAVLSACAHAGLVSEGRDAFASMKSVYGLVPRVEHYCSMVDMYGRAGLLDDAMRFIHDSIPGEPGPEVWTAMLGACKMHKDFNLGVEVAERLIALEPESPSHRVLLSNLYALSGKMNHVEKVRDTMIKRRLKKPIGYSLIEIAGVAHLFRMGEKSHPKTSEIYQYLEKLIEKITDVGYVPKTDSVLHELEEEEREFALRYHGEKLAVAFGLMMTSGCTTPIRIIKNLRICEDCHLAIKYMSAVENREIIVRDMHRFHHFKAGKCSCQEYW

SEQ ID NO: 64150 - protein, 81 aa, Zea Mays
MQNPWVLHRWQPGLRQILGKERVLIWALVSPNLCMELFSFSNYIFNQRSSKTIHVESIAIICISIVTKLCSLQKAKYDAVF

SEQ ID NO: 64151 - protein, 1057 aa, Zea Mays
MRHGGGGRGGGGKRGRGRGAGSGRRDARPGNDSYRGDRGRRHDYRSRRTASPDHRPRRPRGEDNDRDPPRGGRIGYGDRSPPRGGRTGYGDRSPPGGGRTGYGDRSPPGGGRTGPPRRERAGYGHLDASPRRGHAPYKDAFGSPGGDRHASPRGRREYGDSRVSPPGGRDYERAPCREERDRYGRPGRGADLGHNSPPAHMLPDHPSDLGRSASLRADDHSLLKDDYPRGGPHRSIRKENELFANGDLTLRISATEMGRTSAMYSQDRRLSPPPPIYPYVPRETGFLTGGSAMKASDGYGAGTGSAQRLHDDDDFKYHKDAPHIERSRDIDRHYSGSRDLVVEKGGVAERYASADDLPSGRIRETESLYSSRGMLESDLVPCRQLKVLGDPSSALPAKDHHPYRMYTEPGYETSNRYIMEGLGRSSHDSLGHGSDHPHRFSGGSLEHVSGHGDETLLDIARQAHSKHTPRAASLEYDVHDTHSEPENLRGNVSMTSRHTSVSTSLRGLRDERINDNLRLSRRIEEDEGSIESMHQDTEHLIRHCYNGDASVQYQTARGGDDHYSHSPGTEPIGIARRLAHQHEFDSFGYSSDQEASLMVSRKRCRSPEYHDHEIDMYQADHGFAGHEHYDDDVVDEYDIPPPRMSRFDDEYDEIHDVLANRDVFSRISLPHETNQEWTDMDQGNHPHSNILGYGCSKHVPMHQRLSKPNYHSQFGETPMHGRGRGRGGLTKSAKKGLRTAPHQLHDGYPSGRNEFVRPNKFSKSSKDELNGSEVKHEDAPEYEDVPLQKDPPEGSEEFSKQVDEAFLKYTKILNESPAMQKKYREAPKGSLPCCVCGSVARKFLDLDALLSHAYDTCKAGLKTKHLGFHKALCVLMGWNWHVAPDTSKSHHSIPSEEVNAMRGDLMLWPPVVVIHNSSTGHEAKDTDAKIVSIEEIEGVLADIGVAHEKARVSHGRSANQSVFLVKFQPTISGFQEAMRVHTHFSTRNHGKEEFQLMKGSKGKKAASTDSLEELLYAHIGVVEDLGLLDEGTKKRCKVMRKKEIEANAEATLNLEVY

SEQ ID NO: 64152 - protein, 195 aa, Zea Mays
MPFVFDTVWDLVKLGDYLGEREDVDPCRVGITGESLGGMHAWFAAFVDTRYSVVVPIIGVQGFRWAIDNNMWLARVNSIRPLFEEARIDLGKSELDTEVVERVWEKIAPGLDSQFDAPYSLPLLAPRPLLLLNGAEDPRCPISGLGEAISKTAKAYEESGCAEKFMFIAEPGVGHKITIDMVKAASEWFDRFLHA

SEQ ID NO: 64153 - protein, 273 aa, Zea Mays
MASYQINVSEEFNSGFGSHTPMLLGQAKVIRYYPYYQRVLETAKTIMLDLKYVNNAEDRAIFLTDIDKLKKIEIASSCSDLYHVVGETYWVATRCDSMAFRGRRLEGTRITTQNIGKTGFDFAIRTPCTPSRWEEYDEEMTAAWEAICEAYCNDTNPTRDPGVLDAVKDAILRMTYYWYNFMPLSRGSAVVGYVVLLGLFLAANMDITASIPPGVQVDWEAILSPDPGTFVDAVKPWLYPSTKISRCLKDYTDVSCAFSTTGSVVAALTSVDP

SEQ ID NO: 64154 - protein, 296 aa, Zea Mays
MARLSATATYCAHPLSEKSARNPYSLSPRLQPHSALVSATRRGAMAPAALLPLAPLPHHPNPPRRPLCRCGASRRGFTVHTVIAIASVSDSASDPTAAAEATSPSPPPSLPTQTPSSKPGPPALGGIANTRSWSQYYGSGFSIRVPPSFDDILEPDDYNAGMTYYGDKAKPRAYAARFASPDRDELISVVIKPSNQLKITFLEAKDITDLGTLKEASKIFVPAGAKIFSARTIKVKEEEDIRTYYFYEFSLDKQHVALMATVNSGKTYIAGATAPEMKWGDDGVKLRSAAVSLSVS

SEQ ID NO: 64155 - protein, 130 aa, Zea Mays
MSTEINVVMDLSKKMRLKLGATSEPVKPLEKPSVGLVKDELVKPSEKPSSGPVTGEPVKPPEKPSAGPVKDEPMKPSEKPSAEPVKNEPSEPALAGENNRAPRVSQTTSSPNNAGIDAPVVKHDNSEARK

SEQ ID NO: 64156 - protein, 239 aa, Zea Mays
MGANGHPPASTVAQNGSHSGGGGGGGGGVNPSNGGTGAALRHDPGLAREWSTEEQTILDELLVKYASDLPVVRYAKVAMKLPEKTVRDVALRCRWMNKKESAKRKKEDHNSSKKSKDKKEKVSDSSSKPPVHMVGRPNVPPYPLPVLPMDDDEISSKAIGGPTGEILETNAHVLGQISSNLSNMQDNISLLCQTRDNILRVLKEINDAPDIMKQMPPLPVKINEELVNSLLPRPTVPMQ

SEQ ID NO: 64157 - protein, 715 aa, Zea Mays
MDTAAASLLPRAAAVKTRRVFSPLHVSRSGLLPRQSSFLAARCAHSRAPPPPPPLPRADCDDAAAKAHPRLRLRLLAEEFRALPSDADRARRLLSLAAALPRLPEPDRAQGNRVMGCVARVWLVARCNAATGWRMWFAADSDSDLSRGYCACLVAALDGAEPEDVLAVDPADPDLAPLGAGTTAARSRASTWHNVLVGMQKRARTAIAAREGRHPGKPFPSLVIARDGAIRAQGSYAEAQALFLSPDESKVSGLVNTLKEKKIGVVAHFYMDPEVQGILTAAKKQWPHIQISDSLIMADSAVKMAEAGCDYITVLGVDFMSENVRAVLDQAGFNKVVVYRMSSEQIGCSLADAASSCEYTHFLREASRCYPSLHVIYINTSLETKAHAHELVPTITCTSSNVVPTILQAFAQIPNLNVWYGPDSYMGANIADLFQRMATMSDEEIAKIHPDHNRKSLSSLLPRLHYYQGGNCMVHDMFGHEVVGKIKEQYCDAFLTAHFEVPGEMFSLAMEAKRRAMGVVGSTQNILDFIKDHVMGALDRNVDEHLQFVLGTESGMITSIVAAVQELLHLYSSQERANIEVEIVFPVSSDAISKTSNGSHHVGSSMATDLNSLTIVPGVSSGEGCSIHGGCASCPYMKMNTLGSLLKVCHQLPDKNNKLSVYQANRINVRTPLGKSVAEVGCEPILHMRHFQKTRRLPDKLVHQVVNGNGDKPLQ

SEQ ID NO: 64158 - protein, 605 aa, Zea Mays
MGRGADEVVKVVDSEDGEGEEEEAEAAAAEGSSKETPMLPRMPVRVLLAEGDDSTRHVISALLRKCGYRVAAASDGVKAWDILKEKSFNIDLVLTEVELPLMSGFLLLSTIMEHDASKNIPVIMMSSHDSVSMVFKCMLKGASDFLVKPLRKNELRNLWQHVWRKQLANGGPDVQHIQEENLAERMEQKTGVTKDDNLNSDGPCKNRECSEQESDAQSSCTRSELEAESKQTNNILEYMQSTERHLSIRSHKDLELNGETKTRTAKGNNLIPTREDDLLPKKRTCLNDNNSERTSRDMELVHIMDNQQKHDTQRDVDTMRTTSRRNDEKNSIPAHQLELSLRRTDYGKLENHEKNDRRTLNHSTSSAFYLYNCRTASSLGNAGDGQLCSTSETLVDVENRNGDLAALSEDTTETNRPPIRVVPFPVPVQCFTFDGQPFWNGTPVASPFYPQSAPPIWNSKTPTWQESTPQATSLPQKSQQKEPVEMDAKPVENAEEQFVVGPPSASGKQLHVEIPKDDLRHISPVTGESGISTVLDSTRNTLSSSGCDSTSNQITAPTEPSSNVYRGVPETARAEGLRHLSQREAALNKFRLKRKDRCFEKKVID

SEQ ID NO: 64159 - protein, 949 aa, Zea Mays
MVLGRTFDAGSIIKFLSEVSLGAVALGLAFGIMSILWLGFIFNDTIIEIALTLAVSYIAFFTAQDSLEVSGVLTVMTLGMFYAAFAKTAFKGESQQSLHHFWEMVAYIANTLIFILSGVVIADGVLQNNGHFERHGSSWGFLLLLYVFVQISRVIVVGVLYPMLRHFGYGLDLKEAMILVWSGLRGAVALSLSLSVKRTSDSVQPYLKPEVGTMFVFFTGGIVFLTLIFNGSTTQFLLHILGMDKLLPTKLRILKYTRYEMLKKALEAFGELRDDEELGPADWVTVKKYITCLNDLDYEPEHPHDVGDEDDCMHIMNLTDIRVRLLNGVQAAYWGMLEEGRITQVTANILMRSVDEAMDLVSGQTLCDWKGLKSNVQFPNYYRFLQRSRLPRKLVTYFTVERLESGCYICAAFLRAHRIARRQLHDFLGDSEVARTVIDESNAEGEEARKFLEDVRVTFPQVLRVLKTRQVTYSVLTHLSEYIQNLQKTGLLEEKEMVHLDDALQTDLKKLQRNPPIVKMPRVSDLLNTHPLVGALPAAVRDTLLSNTKETLRGQGTTLYREGSRPTGIWLVSIGVVKWTSQRLSRRHSLDPILSHGSTLGLYEVLIGKPYICDMTTDSMVQCFFIETEKIEELLHSDPSIEIFLWQESALVLARLLVPHRFEKMGMHEMRVLVAERSTMNIYIKGEDLEVEQNCIGILLEGFLKIENLTLITPPALLLPWNADLSLFGLESSDYCHTARRYQVEARARIIFFDEAEAAHLHVQTSASLPQGEPARSMSKEHSGLLSWPESFRRSRGSLGLAAEMLPGGLSSRALQLSMYGGSVVSLSSGQQGHRRQRPRHRVQAATTMTNQKKHSSSYPRMPSISKERHLLSVQSEGSNMKRVAALPEVAATAPAPAGAAQGQRRAMNLQEEYNSSEDSAGEEVIVRVDSPSMLSFRESTAVPPPQEQ

SEQ ID NO: 64160 - protein, 728 aa, Zea Mays
MMHWIETRSWSSNATKKGLLFLNGHPMLSTTCRFSLLVRALYTSLGVAGWGVGGIEAVVAMLGQPMGMVLPGVVGFKLSGKLRDGVTTTDIVLTMTQMLRKHGAIGKFVEFYGVGVGELSLPARATIANMSPEYGATMGFFPVDQVALDYLKLTGRSDETVSMIEAYLRANKMFVDKHEPETERVFSSHLELDLSEVEPCVSGPKRPHDRVPLKEMKSDWHACLDNEVGFKGYAVPKEQQGKVVKFDFHGRPAEIKHGSVVLAAICSSTNTSNPSVMIGAGLVAKKACELGLEVKPWVKTSLTPGSVVATEYLKHSGLQDYLNQQGFHVAAHGCATCVGNSGDLDGSVSAAITENDMVAAAVLSANRNFEGRVNPLTRANYLASPPLVVAYALAGTVDIDFEKEPIGVGKGGKEVFLRDIWPSNQEIDEVVESSVQTHLFKKVYDSIMERNPRWNQLPVPKEALYPWEDRSTYIRKPTYLEGMSMTPPAAPPTVTEAYCLLNLGDSITTDHISYSGKIPEGTPAAKYLLEYGVEPKNFSSYGGRRGNNEVVMRGAFANMRIVNKLLDGKAGPWTIHVPTGEKLYVYDAAMKYKSEGHDMVIIAGSEYGSGSSRDSAAKGPMLLGVKSVIAKSFERIHRSNLVGMGIIPLCFKAGEDADSLGLTGRERYTIHLPTSTAELSPGQDVTVTTHDGRSFTCTLRLDTQLEVTYFNHGGILPYMVRNLAAQMK

SEQ ID NO: 64161 - protein, 527 aa, Zea Mays
MLCIWPNSGKTYTMQPLPLRAAHDMVCLLHQPMYRNQHFKLWLSYFEIYGGKLFDLLSERRQLLMREDGKKQVCIVGLQEFEVSDVQIVKEYIEKGNAARSTGTTGANEESSRSHAILQLSVKKHIPVTETRRQRDRDAIEAKNTKHVGKMSFIDLAGSERGADTTDNDKQTRIEGAEINKSLLALKECIRALDNDQIHIPFRGSKLTEVLRDSFVGNSRTVMISCVSPSSGSCEHTLNTLRYADRVKSLSKGGNTKKEQFAVQSVSSGKESTYTSYPLSCEAEETMEQTQEIRPVDSSRKGVDSFTSNSSIEPEKNSYCMIPSYPHKGKEETSTRSGLNDRERGDLKYNQAGFNSKTHSLQESINSQEEVKVTKVSPPRRKANRDEKSERQVNYMKKESGPEISRTGVKQQQQLKQLQRPSSTSSSQVLSKQSEKEDMEINTILEEEALIAAHRKEIESTMEIVREEMNLLAEVDQPGSLIDNYVAQLSFLLSRKASGLVSLQARLARFQQRLKEQEILSRQKPLR

SEQ ID NO: 64162 - protein, 148 aa, Zea Mays
MQRRRRVRKVSSGSHSLLSLLRKDLRNGSLQSFLGGSSYVSNPPAAAPDPFVSSLICTLPVAEPSKDLHSDSSDNNFLLNKFPDEKPVERYVTSSLSFLLPHSSPSLPRYHWIWAEPSLSEKDQKERVQRSKFVRGLVLSTIFDDDNL

SEQ ID NO: 64163 - protein, 111 aa, Zea Mays
MSSSSPENCSGCGKLGHRKNSSKCPLNGTKKRKRAPRNNTTKGWFPKEVPTSSQAAPNITPPSDDVPASSEIMLTIPPPGEDVLASSQIVQPMSPPREVVPTELISPPKDA

SEQ ID NO: 64164 - protein, 850 aa, Zea Mays
MKNSAAQSASGQVVPKLFPCPNNLLFFGKSDELLSSRKFEQPPSLMLDSRNDDIAIVNKSSHLFMVSGIEAGQSSNILRQKEIENGPRQIKWEQPTLNIGDMGRPLLTRSQSALESPQCTRRDDNKDPTTDSTTSESFPEACLSMNLGIANNGNRMEATSTAERPMLSPTTAIAEGRELTTALSPFQHAQRARHFLTRPPRVGEGAAFDPTRDMFPHLRVARPPAEGRGRNQLLPRYWPRITDQELQQISGDSNSTIVPLFEKVLSASDAGRIGRLVLPKACAEAYFPPISQPEGRPLTIQDARGKEWHFQFRFWPNNNSRMYVLEGVTPCIQSLQLQAGDTVTFSRIDPGGKLVMGFRKATNTDSQISAIANGSLLSETLFSTANESIGVVSGYPGFLHSIKGAADFHPSSLYDHHINSADGDVSWNKADKFGSRPDEGSLQFLQKRSRNIGSKSRRFLIDAEDAMELKLTWEEAQELLRPAPTAKPTVVMIEDYEFEEYDEPPVFAKRSIFTIRATGEQDQWIQCDECSKWRRLPLNVIVASKWTCTDNSWDPKCCSCSAPEELTPKELQSVMQQYEEMRRRKGSYGLKLNVAEMDASSFDALATGAVFGEVGNQGTASVATTTRHPRHRPGCTCIVCIQPPSGKGPKHNPACTCNVCMTVRRRFKTLMMRKKQRQSEREEAEASKKIAWVNRDEPEGSSLSRSPQTLDTTRDSSDVTMFDKVAADVNKGHIDLNFHPAAPAVRGAGDQGQNGAQQPRAVSMMGLLEVASRPLDNYMKQNGLTSLAGEQGGGSSSTATVPPAPVESEDRTSDEGRVASAEREADAMAIDEAGENQQDKPADSAAAAAT

SEQ ID NO: 64165 - protein, 101 aa, Zea Mays
MLNIYIQIASVPAYRHLEDRPLSPSPTPTAPLWASPPSSDHDLSTLRARCRSSLPAAIDLSGGVDACMDDALNVFGEMGTRASVGMVTIIHGGWTSRLYRG

SEQ ID NO: 64166 - protein, 1889 aa, Zea Mays
MAQNSSRLHRLLTLLDTGSTQATRFAAARQIGEIAKSHPQELNSLLKKVSQYIRSKNWDTRVAAAHAIGAIAENVKHTSLKDLYASVQAEKHASGFSDGSDDAGSALPRTDSAATSDLAFGSFDIGRVLEFGSPLLASGGQEYDIADSGKNPAERLARQKKNLRRRLGLDLCEQFMDVNDVIKDEDLLAQKNYWGSHVQNNGFHSFNSGHNIQQLVSTMVPRYPKHSNFRSRRLSARELNMLKRKAKSNAKDHTKAVSEDDEVTLKGSVPSNGASSEQGVFDTAVEEDNLEYNENGRWPFQQFVDQLIHDMFDPIWEVRHGTIMALREILTHHGACAGVYFPDLSLPSSDLDGKTNFDSLKREHGIDLNEDVHLEHLEPALKKHKKEPKCAESMMDCDKELVDSDYLKTEGDLSNVPDVLTAEPNSTHVKVEPEFCVDDSADPSKGVSTCKSQKKLNSISHLSSHILAPESSKFMKLMKLAKYSYMKNWEFLQDCAIRFLCVLSLDRFGDYVSDQVVAPVRETCAQALGAVLKYMHPSLVCHTFKILLQMQHRQEWEVRHGSLLGIKYLVAVRQEMLKDLLDYIIHACKAGLEDPDDDVRAVAAEALIPAADSLVRLNDQILHPIVVLLWDILLDLDDLSPSTSSVMNLLAEIYSQPEMVPKMLGTAASGEKGEFDLNEATQIAEQEDELTSIENPYGLATLTPRLWPFMRHSITSVRRSAIRTLEKLLEVGNTRSSAGTTPSKLWPTSILGDALQVVFQNLLLESNDDILQSSERAWKLLLQVASMIIVSWFKDLRGRDPVSVGTLLAFLSSLKEWLVDLLTCSDPALPTKGSVLPYSELSRTYTKMRNEANNLLHLIDSCAAFKDYSSSLNLNTDVLTVDDAINFASKLLLPSESDIPSETENIFLNNIESAKQGLLSTSGYLKCVQNNLHVTVCSLVASAVVWMSCLPSKLNPVILPLMAAIKREQEEVLQDKAADALAELIFSCIGRKPGPNDKLTKNLCTLTCTDASETPQAAIINSMQVIEDQNLLSIGKRFSSHRSRGHTTSGGDERSKMEGFISRRGSELAFKHLCVKFGPSLFENLPKLWDCLTEFLRPVKTEDGIPEDDASIAQLGRSYEDKDPQSLINNIQVVRSISPHLAEPLRPQLLNLLPSILGCVRHPHVAVRLAAARCITSMAKSLTDDVMVLVIENVIPMLSDLSSVCARQGAGILLSLLVQGLAVELVPYAPFLVVPLLKCMSDPDGSVRQTVTHSFAALVPLLPLSRGASLPCGLSERLSSSAEDVQFLEQLLDNTQIDDFKLNIDLNVELRRYQQEGINWLAFLRRFKLHGILCDDMGLGKTLQASAIVASDIAEARARNDEKILTSLIICPSTLVAHWEYEIEKYIDSSILKPLQYVGSSQDRVTLRSQFDKVNVIITSYDIIRKDIDFLGNITWNYCVLDEGHIIKNSRSKITFAVKQLKAQHRLILSGTPIQNNVLELWSLFDFLMPGFLGTEKQFQAAYGKPLLAAKDSKCSAKDAEAGILAMEALHKQVMPFLLRRTKDEVLSDLPEKIIQDRYCDLSLLQLKLYDKFSSSNAKDEISTIVKANELEESAPQPKATRHVFQALQYLLKLCSHPLLVTGENPPNHLVDLLNEIGLGSGSELHELHHSPKLVALQEILQECGIGSEISSPDASTAVGQHRVLIFAQHKAFLDIIEKDLFQSHMRSVTYLRLDGSVDPEKRFEIVKAFNSDPTIDVLLLTTHVGGLGLNLTSADTLVFVEHDWNPMKDLQAMDRAHRLGQRKVVNVHRLIMRGTLEEKVMSLQRFKVSVANAVINAENSSLKTMNTDQLLDLFTSTPASRKASDEQSKRKSGGKGLKSILNGLDELWDQSQYADEYDLNQFLAKLNG

SEQ ID NO: 64167 - protein, 229 aa, Zea Mays
MKETGVTVVLRGKDSENLGSCHSEASQQPLHLYLTSMHLKNLEAAKVLAENLLDTVAAEFGASRISSSKVYGAVPPPQQLLAGVDTSGTKSDVHYIVGPNVLSGATHSFASTGVIAPVVAPAVTVQSGAPTYSGVPLPSNMAYPIPPANGGAFYSGYGDIYPQATPLQQLAFTLKHASSSATQAVPVTSTPTSMATKGNSILDAEMDKRSRRKFQELPVSKGPATESQV

SEQ ID NO: 64168 - protein, 886 aa, Zea Mays
MDFSEQDVDVFGEDYDVHDGGAEAEAEADGGGDSSGSSSPSSSSSSSAAASSSSSSGGSSLSSSGGAAGEGEDGADAGDGEEYDSSNLIATRSAGAAGYLDDERREYENQEVEEERDLFGSDNEEYVRTPARSHYLVPVLPPIRNTNNHSRGGFGGRGGRGPPLLPRPGGHPGRHNFGYGRFGNGRHVEGLVSDMKLNKSEETLSRKAVTFQEPCEIACLSRVEGGEVYFDDRSLRLFKREICEYRGADLNKGFESYIEKRDLGSEGFGDLLACIRNSNILLQNTIHFVTYRNNLNKILATAYLREPWKMGVHKRRGVVYLDVHKLPERPKSEVERKRCYWGYSFENLATENSFSDDGRGIDANVEFCSVIKTKLGAHRIVMGAEMDCCDATDDGRRFYVELKTSRELEYHTVEAYEKEKLLRFWIQSFLAGVPYVVVGFRNDAGILVRTERLRTKDITQKVKAKNYWQGGVCLAFADEVLCWLYGTVKENEDYVLQFVHPFNRLELLRAQSPCPEAITLHVQQLSDGFMLTRHRGLQCEPAVIRALKVTFCHCLCRRCGIVHDESRSRCLSQEHLASRTGTAGQRSTRLDALSGLQSCSPAAQPPASTLSLYLREPAGKEGSNTQGRMGVGECKSNDYGAAAYWDARYSSGSPASAAAGCGFFDWYQTYPALRPLLRARVPTSSRVLMLGCGNSLLSEDMVKDGYEDIVNIDISSVVIEQMREKHKEITQLTYMQMDIRDMGFFGDESFDCVLDKGTLDAMMCADDAPHGAFKMLAEVARLLMPHGIYLLITYGAPKERVPLLDQSGCSWSIALYIMPTAGYQLRMSKGAQHLIMEEVTLTEGGQLPPDYVLKDPDSHFIYVCEKLEEKGTNCRDTDPKESTNAN

SEQ ID NO: 64169 - protein, 158 aa, Zea Mays
MDYHLLTLLCHCLILTLAILFLWSNATTFINKSPPNIPEVKIPDDLAVNVARSLRYEINRGFATLREIGQGHDLKKFLIVIAGLWILSVLGSCCNFLTLSYIVFMVLYTVPVLYEKHEDKVDAFGEKAMVELKRYYAIFDEKCLSKIPKGPLKDKKQH

SEQ ID NO: 64170 - protein, 102 aa, Zea Mays
MPLAHFLTQNSTVLIFFSLPLLKFFIPGLEDIQLYTNLPFPLAKKDIGLKPSPNRWDRSTPSEAGCVGLGILNPMNRIRTRIDRIGRFFGFDPHIVLIRLSS

SEQ ID NO: 64171 - protein, 247 aa, Zea Mays
MNFGSSTTWQKMKLEGFSTSSISVNIMLLGPSSSLMKRLKRNLGQANEYQSSKLCEARFSECEDKMERLQVLKLPSMAKFDAGFLLCNRSFETDCVGPAKESYRHRMSKMLARSRALFIKEYNNKLFNWLAIFSLAMVVVGRFLVKFFLLEVAAWVMFAFLETYTRLFWSSESLYYNPAWHAIVSSWETVVYSPVLDLDRWAFPICAVLLFLAFYWRCLGGRRGIARSLLPLYNGAYYRSSSRTRTD

SEQ ID NO: 64172 - protein, 663 aa, Zea Mays
MAPPSLPPAADPSRANPPPSSSLKLPPSWPPKPPPQPSPSFLDMLQSLVFQDKMDLAPQGLITQQQKANERRPVGSSQIWTRYGVLLPSQQTRKLKEWILTDEQQQLVNASGLGHLALTTGFTIDRSLLTSFCERWNNETNTAHFMGFEIAPSLRDVSYILGIPVTGHVVTAEPIGDEAVKRMCLHYLGESPGNGEQLCGLIRLTWLYRNFHQLPEHPTINKIAYSTRAYLLYLVGSTLFPDTMRGFVSPRYLPLLADFGKIREYAWGAAALAHLYRGLSVAVTPNATTQFLGSATLLMAWIYEYLPITQPQQKNQSTLLPRACRWNFGGATRGQRKKVMDWRKVFEQLQFSEVNWNPYKDMNPAIVPEYCIAADNICYSRTWLISFNIKEAYVPDRFARQFGREQGRLHGVPMWTRRTWSKWKDWRTEYAREIEEFHQLVGCHFTPPAETNINSFPLHESSAGQNDAGCSLNISHNFSAMVEDLKNDLPVIGRYLEGNLLPSDVASFLERVSTMIKSYTPPQGSRRKDRVSHGPADPVRSKNPRKRGRHSLFQDSFPHRYLGTPVNIVFDGTIPLLNGGEALKEQVAMDPWRVSQSHLTMTTSSSSLDSSSPESMKRRREGGDEIPITRDTDCLQSGRLCVQLKMFKHRDGVNAEAANPIFR

SEQ ID NO: 64173 - protein, 225 aa, Zea Mays
MQSGDEWSQIAYVTFKDAQGAETALLLSGATIVDLSVIIGPAPEYQPPPIASAPPMSGTRVPVGGDNNVVHKAEDVVSTMLAKGFVLGKDAVGKAKAFDEKHGFTSTAGAKVASIDKKIGLSNKITTGTSLVSGKVKEMDQKFQVSDKTKSAFAAAEQKVSSAGSAIMKNRYVFTGASWVTGAFNKVAKAATDVGTMTKEKMAAEEQQKGFSGPSSRSHSYTPIR

SEQ ID NO: 64174 - protein, 243 aa, Zea Mays
MKEKESIRKELDRTKSKLRETEDKLKNSIQEKTKLQSEKAEAHKEIKKLQSQRTLLERDLRKRDSATVDKRHELNSMPQESSGAFGHMQENYQNLEMHAFDMDAEIYSLQEALVTSIDEKDEALSKVGLITSELEDLANKLNLAESERNSFSNEITLLTEKLIASESSLKSLETSLNSVSREKEDLGMQLTDALLDMESERSIWTAKEKEYVEANHRLNICLDENHKLSEDLMKCINGLPTFS

SEQ ID NO: 64175 - protein, 75 aa, Zea Mays
MVKCRLVFYHLHSNIVVSFCVPAFNYLTKSSLPKHFLDNKPKYNNNKVQFNIMKQANMAQLKPSKKRITFCSTSY

SEQ ID NO: 64176 - protein, 114 aa, Zea Mays
MHEYPFNIVEHRHFVEFIKSLKPTFPMKSCVTIRKEIMELYLHEKDVLYDDWEIQKRIINFLHVPSRHSGSKAKSVAIPNMVCEMEELEALARNLSLEDEDLDDDHDDGPKASL

SEQ ID NO: 64177 - protein, 502 aa, Zea Mays
MEVVASAPGKVLIAGGYLVLERPNAGLVLSTTARFYAVVRPLRDSLPADAWAWAWTDVKVTSPQLSREATYKLSLTKSTLQLTSARESTNPFVEQAIQFSVAAAKATIIDKERKDVVDKLLLQGLNITILGCNDFYSYRKQIEARGLPLTPEALLSLPPFSSITFNSEVANGTMTGEKCKPEVAKTGLGSSAAMTTSVVAALLHYLGVVSLSCPGQSSGDNTTTRELDLVHSIAQSAHCIAQGKIGSGFDVSAAVYGSQRYVRFSPEILSSQATGGTFLPDVVSDIVTQRWDHENKQFSLPPLMTLLLGEPGTGGSSTPSMVGSVKRWQKSDSEKCKDTWSKLAFANSALENQLRILKGLSENHREAYESVVLSCSHLTYEKWTEVATNQHQELIIKSLLAARDACLEIRLHMREMGIAAGVPIEPDSQTRLLDATMNMEGVLLAGVPGAGGFDAVFSVTLGDASNAVANAWSSAGVLPLLVREDCRGVSLEDADPRTREAK

SEQ ID NO: 64178 - protein, 473 aa, Zea Mays
MLNGESDDFNEMVRQNNTASDILHRMASVFERMHASIASNSAIGTTLLQGEENIGQFLYLEGIEYYMWNTYDVHFYASFSLIMLFPKLQLSVQRDFAAAVMMHDPEKLRILHDGKWAARKVLGAVPHDLGLYDPWFKVNAYTLYNTDRWKDLNPKFVLQVYRDVVATGDKSFARAVWPSVYIAMAYMEQFDKDKDGMIENEDFPDQTYDVWSMAGISAYCGGLWVAALQAASALAREVGDKASEKLFWDKYEKAKFVYSKLWNGSYFSYDDGDNKMSTSIQADQLAGQWYAKACGLFPIVDKDKAQSALEKVYSFNVMKFKGGTRGAMNGMWPDGTVDMSAMQSREIWPGVTYALAASMIQEGMVEQGFKTAEGVYHAAWSPGGLGYSFQTPEAWNNDDEYRSLCYMRPLAIWAMQWALSKPKLHNTPQADIPQDSFPKNQFAYARITKLLQLPEDESSKSFVRVVYEIIRNR

SEQ ID NO: 64179 - protein, 74 aa, Zea Mays
MTLGGAVVDQISLRGRMQAAGCQNSELRRNRRQRQKDEISPSGGALGDPIMCSGAWWVLAVAPRSASAPVLLEL

SEQ ID NO: 64180 - protein, 272 aa, Zea Mays
MDQYEKVEKIGEGTYGVVYKGKDRHTNETIALKKIRLEQEDEGVPSTAIREISLLKEMQHRNIVRLQDVVHNDKCIYLVFEYLDLDLKKHMDSSTDFKNHRIVKSFLYQILRGIAYCHSHRVLHRDLKPQNLLIDRRNNLLKLADFGLARAFGIPVRTFTHEVVTLWYRAPEILLGARHYSTPVDVWSVGCIFAEMVNQKALFPGDSEIDELFKIFRILGTPTKETWPGVASLPDYKSTFPKWPPVDLATVVPTLEPSGIDLLSMARLGVVM

SEQ ID NO: 64181 - protein, 105 aa, Zea Mays
MRPHQASKTECCRCRSETTKGLSCERKIGRRRGTPPRLPFGPRIWAWELHPAVRDSAVASLWVELLELLTMDTSSPRIHLLPRPCFSAAPLLEQQDLRSSNKRWP

SEQ ID NO: 64182 - protein, 834 aa, Zea Mays
MDSTALQYENQKLVQQLEVQKSEMHALERKFKELSDDQCSYDKTLISLNKLWNQLIDDLVLLGVRAGGDLDNLQALDHEELSEESLESCPSEEIFLLRLLKTNNIRDNSDTSLLKFVEEALAFRSSATVTLMKSLQETISSQQARSESLSLALNGQKSNEDVIVALRNHNDCLKEVAENASQAISIINEKHKRYLDEIEAFKSNHSRELQEIKRISGELEESIAELEESQRKLVVLQLQRHGSVMDASGANAVNGGISTHKSSDKSMSWQDLKDAVDAAKTLAGNRLLELHQTQEDNLILSKELGDLEGQLKDEKYVLVSKPYMILNDKLQHLNAEIERYRGLVEVLQNDKDQLMQREKEISAKAESLDSVKQTIITYEKKIEELETQIQILFSEKNDLETKVEETLQDSGKKDFKNEIHVMAAALSNELGMMENQLSRSKDAASEALALREQAESLRSLVAKKIEEHKKISDKYNSQVIEIKSLKALVEELEQEKQELEFIADMTIADIEESETRARNQAEYLRSNLEEHSLELRVKAANEAEAACQQRLSFAEVELEELRTKVDASERDVVELKEAIRIKEAEGDAYISDIETVGQAYEDMQTQNQHLLQQLTDRDDFNIKLVSDSVKMKQACSSLLSDKLMLEKQLQQVNTSLESSKLKIARGEEQMKTCVAQAIKTSAENRHLTISLERIALELSNTDKELKWLRSSVGSSEKEYEQTQQKISELRALLEHERSERRRLEEQYEEVKNEVMELTSETEETTVRKLEDEIKECKGILKCGVCFDRPKEVVITKCFHLFCSLCIQRNLEIRHRKCPGCGTPFGQNDVREVKI

SEQ ID NO: 64183 - protein, 382 aa, Zea Mays
MSSIHRKEACPPGSIFGSDRPPSGLSSINEVSKEYFLKTVSNIVGDKLLKQAASQYQMQAQRSPQTNPSNYSLSGQVSGQQTAPSGSVTGDEQKGYPWAHTIPMRQAIASTRPPQFRPSSSGQMRSNTGNPPSQTNLHKANKMGNMSDGKGVHMLQTHPPNNSIPVQTMQHHVQRPQTSSPVFGANSIHARPFLRPVGGPAAPFRPQMADSNPRAHLIQGAVTTISRSVPKRSIVSGNAPVNQALGSSKVSAGMESQSQQLSAPKPLAATSLSQTQSHGIQEEPKIQGKKQLLFESLPATDLKYWSLERKLCQPLLITEKMFAYRETVLEEAHQGMELHEHCRHIVDNDDQHCRFHSLCVHQGYCDRDGHLGAQTISWAEEH

SEQ ID NO: 64184 - protein, 444 aa, Zea Mays
MHAALVSESWTRNCRTPRHILLRDGLLSPQESHVRRATGLRHRRHQSSRFTVLQGATEEVWQFERTDRVGEEHHHVERSASCGGRSNEPRRSGEASLCLQLRDGHELGSGGWLGVRVHDRGRPDGAAHPRRRLEVGAPEPGPTGVPRRRAHRRARQPHPVQEMGDGPAGDRPQPPQPVPPLRVQAPPFPAVPRLPCHRRVARQGALRALLRAARTLLPHRQPLLPAKGIGARLRRSAGAVPGLQRVQPGRVRGLPALGARLVEQPADAADHVVLRMAARVPHRGPQDGGPLGDGVRGDTQGAAAAAGLARRRRRRRRPGAVHLRLVAGVRPAGGARDAERRRRRRRSVEGGHRWRRRPGRRGVRVLRLASALLLAVREGPRRRQGKLRHPLERQDQGCPARGRVRAPVHTQVTCPAPASTHHCYCCGRFSCQRPVIMQTTACSA

SEQ ID NO: 64185 - protein, 702 aa, Zea Mays
MRSTGASILLLHRALLRAKLPSFCAPSVQQLTDPSSFARAMHGRVTVLLVVAAAVLLLASSAVAQPWPSCNGASGNYLAGSAYANNTLQLILGLQTNASDSPAYFASGSVGAGAAAVHGLMICRGDVSSNDCFDCGTRAWQDVQAVQPLCNRTRDAALADNQCYVRVAATDFLASPNNTGLVSVVGGASIPSGVDVAAYDAALRRLLNATARYAVDSSVPSSPPRLYFATGQFVGLDPRVPNIWSLAQCAGDLAPAQCRRCLDDLMTLWWNGSGFKPDGESAMFAGSRCNLKSDLGDKFYTSSPMVKLQMNSEVVVPAQAPSMAGKNNSSGKLLGIILPIMFVVVVTAIVLFVCKKRRYRGIKLPHGTHMAEDFESIKSTLLSLSSLQVATSNFDENNKLGEGGFGVVYKGDLSGQQVAVKRLSKGSGQGLEELKNELVLVAKLHHKNLVRLEGFCLEEGERLLVYEYMPNKSLDTILFDPEEKIRLDWRKRFNIIGGVARGLQYLHEESQKKIIHRDMKASNVLLDEDMNPKIGDFGLARLFGQDQTRDVTKHIVGTFGYMSPEYVMRGQFSTKSDVFSFGILVIEIITGRRNIGHYFFDEQNEDIISLVWRHWTEGTIVEMIDDSLGRNYSESEVLKCVNIGLLCLQHSPMDRPTMSDVMVMLNGDDTSSIPSAARPTFFLDRSTPYSYNSCTITHMSPR

SEQ ID NO: 64186 - protein, 312 aa, Zea Mays
MLVGVYIFSLSLKQNGMLFGLMQTNLIEKEREKPCHDPGIPDTEIPYLHYPMPNTYDRKECACTGVRFFAILSMQRSGSGWVETLLNSHPNISSNGEIFSVKERRSNFTAIKKTLDKLYNLDWYSSAAKNECTAAVGLKWMLNQGLMKHHQEIVEYFNRRGVSAIFLLRRNLLRRYVSILANAHDSAMKQLNGTHKAHVHSKHEAEILAQYKPTIDKKTLIAELKRSDKFAADALVNFKNTRHVVLYYEDVVRSRTMLMDVLDFLRLPKRKLLSRHVKIHTKRLRDHIDNWADVNNFLKGTPFESFLNGSRR

SEQ ID NO: 64187 - protein, 317 aa, Zea Mays
MHSIMFLGDTKFRLPYVGSNSWAASPTTVGKEMANFAARLSDIGKSFSEVKILGKFAGAVGNYNADVVAYPEVDWPKVAEEFVRSLGLQLNPYVTQIEPHDYISKLFNLFTQFNNVLTDFDRDMWSYISLGYFKQIPKAGEVGSSTMPHKINPIDFENSDGNLCLANSVLSGISMKLPISRMQRDLTDSTVLRNLGMGLGHSLLAYKATIRGISKVQVNEARLAEDLEQTWEVLAEPIQTVMRRYGIPEPYEKLKELTRGQAVTKDSMQQFIDGLDIPGEVRAKLSKLTPHSYTGLAEDLARYIEKWVDLESGFQIK

SEQ ID NO: 64188 - protein, 154 aa, Zea Mays
MFGVQVDSRPADRAARDQETVAVVEAPTPVLGEPMDLMTALQLVMKKSGAHDGLVKGLREAAKAIEKHAAQLCVLAEDCDQPDYVKLVKALCAEHNVHLVTVPSAKTLGEWAGLCKIDSEGKARKVVGCSCVVVKDYGEESEGLNIVQEYVKSH

SEQ ID NO: 64189 - protein, 375 aa, Zea Mays
MPFSIFCYQELVAKSIESSDLNFSRYGDTFFEVVFVGGRTQPGTVKPEEGDRHPYSMLDCVAQRETILPFVLYIQKTLRRRPFLIKNLENVMRKFLQSLEFFEENERKKLAIFTALAFSQKLSGLPPETVFQPLLKDNLVAKGIVLSFITEFFKEYLKENTLDDLIALLKKGKMEDNLLDFFPSAKRSSEALSEHFIKEGLTSLVEYNEKKMFEVKLKEIKSTLTTMINDEAAIPEVIETVKQQVKDAKFPDLEVIRMLWDVLMEAVQWSGKNQQQNSNAALRQVKAWAELLNAFCTSGRLELELIYKVQTQCYEDAKLMKLFPEIIRTLYDQDVLAEDTVLLWFRKGSNQKGRQSFVKALEPFVKWLEEAEEEE

SEQ ID NO: 64190 - protein, 220 aa, Zea Mays
MAIDHATPLGLKRRGAMGGGGECDDGSDTRRWPPWLRPLLSASFFVQCRVHADAHKSECNMYCLDCMGGALCALCLAARHRDHHSIQVSGEPSAVRRLVQFGSSGGCVLVPQCLCLQHISFPSVAFSIHTEVVVPRRDPGVGDTEGAGHRRRADVHHQQRARGVPQRAAAAPPGQGRHQHLRGLRAQPPRLLPLLLPWVQDSGHGPWLPSWEEEARRRRR

SEQ ID NO: 64191 - protein, 210 aa, Zea Mays
MEFWGEEVKPGATVSCKVGDGLVIHLSQAALGEPKKASENAIVSVKIDDKKLVLGTLSVPVKVGIQNADEDETSSGDDDDFTDSDSEMSEEDESSDEDEVSSDTDTSDDSGSEEQTPTPKKTEVVVGKKRAIEAETPSGKKAKSEQSAQKTGDKVSTSHPAKQSSKTPADKSTKTPTADKKSPKSGSHACKSCSNASALESHQKAKKHEA

SEQ ID NO: 64192 - protein, 190 aa, Zea Mays
MPVLPGNKRRPRQHVQPLPGAPLVPRILPPPPTTNHLSSTYPAARRAVLILIAPIIPSPLRHDLYSRDAHTTPMIRSRPAARALPRSISSYPQHPSSFLEQCRLSYKPYMGSWVRTITTPFRKACTIFGPHKDGGGKKQTQQRPNSAVVQHVDAERAKLHGEVMACAYDDVQVMWSMLDQARIRDLSASS

SEQ ID NO: 64193 - protein, 700 aa, Zea Mays
MVAIVGFGDRWRLRLSHEIIFQAVWNLLSILRTGDREAYRQFFLDAMVAVEDVLYVASLHDRSLSGVSPGRCLVKCLCGSLDILDTPGPFSELPASCRPKNGPGVLVDLTGDARWRPFATSLIKLVNKCLTDGTLYVDGLVTMPFVSAACSILCYGDGSLHKVCFDFARIVATVMTPEILPLESIIRSITCILSQEISELSDIRDADYDFSMGACLCALHSSCPDYIVESTAADIVNVLKRAVKTSKSAELQVALYTAYKRIIELCSVQVWKPEILLKLLSLPKPCSKLIQCIRAVIGKFGQTFFTLDDGNSQSSPQARSEKNELQKAGHKRIPQNEESNSAKRQKITESGFSAATGFEKEDYGYAFLQSLNSLINCLSPDNHESYPLDPDVAIEVISLLCISLCVYPKTSLFTRVSKQVLSWISWIHKQTVQRNLYSFDASLYFEALHTVMLLQFNLPGHTKLLEDDYQLIGDGTHFVNPIYADLISMLKLIWDVGHDVTETSSNYKIEYLLMQVFAKLGNRLNSGCDLEFFDLAICNGTAEIKNEAIISLPIIVLYSGPRILGAMFKKLESVDALGLENVGKHIAFSLGFLSCLNGTTYYTDNVGKGNHCKLFLDKHYEQPVSTLDLLLRGFCCPQCDIRNRTIHNEEQISIVNIAPLQVENADFNINISKAHTLLFKFLYAGTSEEFIVSLVEASST

SEQ ID NO: 64194 - protein, 356 aa, Zea Mays
MSFTGSAPVVRIISLEFRRGRARRMVSKMRFRNALGSRPFQCCSRENHTYVRKLLDRVSERSKLLKKVSVLVGYSNPQDLVEKQRAPGESSAELISALKEIDFPEITAKFPCIKVGDASPVELYEDSTNMKFKEAALSEKLTNFIQGSARNLESAYEFHNDCHPLNQTPTTAGDLSISEEIPLIEPIVDTKSPESLSDAITSDNSILDKSIRCLPGTTSRQYRQLEDGGFHTVRKLLQHFPRTYADLQNPQGPIEYGQYIMLSGTVISSRGIKVKSTLGLLEVVVGCSIIESELSSSVESSHSGAEQKRIHLHLNRFFSGARFSSQHFLNLMSAKHKEGDLVYVSGKGLEDIEPRC

SEQ ID NO: 64195 - protein, 81 aa, Zea Mays
MLSARSTSTLLQNQICIDSPSSRQVPRPSRTVLRDRLRFSFYLIEWYVYLLVCTNYDPCPTNLLSLSWCCTRGGSARSRDS

SEQ ID NO: 64196 - protein, 177 aa, Zea Mays
MFPFLIQKPLTEATLLLIRISIRWTSLSIRQELLVSLSTRLSSSTPAAFWFCTSVLWFYTGSPSYHPSLISSSGTHLSLSALSLASCPQQAAPQPVAIGLFFAACSPCSSSPTSWCIFLLASHLRARLLGHAQQLLERVPLRASCPFVGCHLSQLPSAALAELALPAQQQAAPFPSP

SEQ ID NO: 64197 - protein, 181 aa, Zea Mays
MCVCLSTQAHTHTSSTTIHQKAKHQPLMPSQSTHTSSSLSSSTTPILPCSSAAALFRSVMAAVATETPFHVLAVDDSLPDRKLIERLLKTSSFQVTTVDSGSKALQFLGLHDQDSTVPPVHTHQLDVAANQDVAVNLIITDYCMPGMTGYDLLKKIKESSSLRDIPVVIMSSENIPSRINR

SEQ ID NO: 64198 - protein, 271 aa, Zea Mays
MSLSRTASSTSPSSDIVISPVAAWPGSSAPTIPSPATAAFHRFEQVPSPRTPPSDHHHRGGHNLELQLMPPSGSGVVGRGAPGVAEYGVAPRTPAAPPQSHPATMQLQLSIGVCGGGGFGDEAMLAAAREKEEVEAREQLRQAVAEKAAANEARAQARRHAELAEQELASAKRMRRQAQVELSRAHALREHAVRQVNATLLQITCLGCRHKFRARPQLLDAALGAPEVTCSYMSSVVTEGGDAEADDEPPLDGRDGMLQRRRHAMAMDVIL

SEQ ID NO: 64199 - protein, 233 aa, Zea Mays
MSPMPTAPYTSATSLLLGSRRLPRFQFQSLRTPTKPPFRRPASSSSTPLPRCRASATPRPLAPVCASALALPVSVAAAPPPQVDGGWVGGTAAAVRRVAVAVACGALAAAWCRRAMAVGAAAAAGAGAGAPGTVEAAAGIGWMALRGGWPRVLQILQLLREHGLILAALLSLSAFFSMAETSITTLWPWKVRELAEKEPENGVFKMLRSDVTRFLTTILIGTTGQHWCNSNCY

SEQ ID NO: 64200 - protein, 90 aa, Zea Mays
MEATVVVAAAVEAEEEEAAAAAASTPQRSGRKRPRAIGSGRYRSVSSRQAVGQGRMDGDDGWKPQPLASHTADRARKRKKRCLHGLGLPT

SEQ ID NO: 64201 - protein, 392 aa, Zea Mays
MDKLSGSARLMIVSDLDHTMVNVVQLISWSALSYLFGALWESVYCEDSLLVFSTGRSPTLYKELRKEKPMLTPDITIMSVGTEITYGEAMVPDDGWEEYLNNKWDRNIVVAETVSFSELKLQPETEQRPHKVSFFVDKKNAQEVIKSVAERLDKCGLDAKIIYSGGQDLDILPQGAGKGQALAYLLKKLSSCGKPPNNTLVCGDSGNDAELFSIPGVHGVMVSNAQEELLQWYTENAKDNPKIIHSNERCAAGIIQAIGHFKLGPNISPRDLQFPYAKEASFKPTDAVVKFYVLYEKWRRAEVPKSDSVIKYFKNITHANGVTIHPAGLELSLHASIDALGSCYGDKQGRKYRAWVDRLFITQTGSDSWVGRFDLWESEEGRATEHGKPVSR

SEQ ID NO: 64202 - protein, 343 aa, Zea Mays
MAAAAVASSSTPRPLRLAQRGAVSAHASHHVSAPPHRSRRPRLSVSASAGVEGTSGSERFYFNFTGFPFPLGPFLNRRTIRTEAVKGSIWLFEQEQALGFSSVSTNIRMTVIKLKSGGLWVHAPIAPTKECIQMLKELDAPVEHIVLPTFAYEHKIFVGPFSRKFPKAQIWVAPRQWSWPINLPLEFFGIFRAKPLKDEDDATPWVAEIEQKVLSSPEVGIGPYVEVAFYHKPSRTLLVTDAVIFVPQQPPECISKESLLASAKNGLAVKLLSKGKEVPDEPVVDNKLNRQKGWERMVLQILFLGPSNLLEPNASFAQMSQKLIVSPIVKTLVFSKVPEKLLL

SEQ ID NO: 64203 - protein, 155 aa, Zea Mays
MSAKRRLEKTGHERPPISIMRMKSPRRLKRLVRQWSVDAVRDLQPDGRNPAVHRRQGLAGLPGADALPDGDRERAVGVLPPRPQNRRRVGVHGRRRLPRQGRRRLRARLRNGLEHPLGRLQEQGLLRDRQRRLLPVAVGQALHQSQQGRVHHQRQ

SEQ ID NO: 64204 - protein, 848 aa, Zea Mays
MDAAAAAAVQEEAEAEAEAEAEGRTVLVGVRADAESRALLTWVLVNVAAPLDRVVAVHVAPPSAAEAVDFDAMLAVYEGFCNLKQINLNLKICKDSSVRKALVREASLFGAAKVVLGVAKKRRAISSSHSVAKYCAKKLPAKCAVLAVSNGKIEFRRESSVHPDDGEGDATRDFGTKGSELENLSTDQVEIDADPSSTNAEESTVKQGDEISELPGKGASVLYCVLPERSSGSVASTSSRQDQDSVDLPSEGAGELYCLLPPRNGHSVRSIGDSKRSNASQKDDKPANPSLEGDGDLYCRLPRTGRPGRNSGGSNRSAGIRGAVRRSSSFSSDIHLSSETSPIKKDGSVSMTATERSSSAVSTEAEDSPKYTARTAETPSSSPMSLRRMVEGRSDRCHLHRRIFRHQRSSSFEWAKISMVQWAMRLPSRYTSVHPDGKPLKPGASPRLNCDSETESTAAVEPESMFSFAFYDVAWPPSELESLREKYSSVCRMFSYEELKLATSNYSPDMLIGKGGTSQVFKAQLDGGTFAAIKILKPSVDAIHEFVTEVETVTSLQHENIVALRGFSFENYNLVLAYDYMPRGSLDKALHGKNDGTEFLVWERRIKIAIDIARALEFLHLGGVTQSVIHGDVKSSNILLSEDFGARLCDFGLAKRVSASTPHLTCTDITGTFGYMAPEYFSHGEVNEKIDVYAFGVVLLEIVSGRRPITPGSAKGQESLVGWAKPLLSSGGIKHLVDPFLGNDYDCDEMERMTLAASLCTRTSWHSRPEMSLVLKLLQGDDETMGWARSASFDGSDEEAIAAGPDLNMQSHLSLALLGVDADDTLSRCSSTERTSADGYWSRSSSFD

SEQ ID NO: 64205 - protein, 1732 aa, Zea Mays
MSLALKEIQIRGEIHSNVDYTVDLLNASDFRENKIHTGWLDTRIAMRVQAERPPWYISVVGGALYKTVTTNAATVSEYVSYLTKGQIPPKHISLVNSTVNLNIEGSKYTIETVRTGHGRYKLRMNDSTVEANVQSLCDGGLLMQLDGNSHVIYAEEEAGGTRLQINGKTCLLQNDHDPSKLLAETPCKLLRFLVADGAHVGADVPYAEVEVMKMCMPLLSPASGVIHCMMSEGQALQAGDLIARLDLDDPSAVKRAEPFDGMFPLMDLPVAASSQVHKRYAASLNAARMVLAGYEHNINEVVQDLVCCLDNPELPFLQWDELMSVLATRLPRNLKSELEDKYKEYKLNFYHGKNKDFPSKLLRDIVEENLAYGSEKEKATNERLVEPLMNLLKSYEGGRESHAHFVVKSLFEEYLTVEELFSDGIQSDVIETLRHQHSKDLQKVVDIVLSHQGVRNKAKLVTALMEKLVYPNPGAYRDLLVRFSSLNHKRYYKLALKASELLEQTKLSELCSSIARSLSDLGMHKGEMTIKDSMEDLVSAPLPVEDALISLFDYSDPTVQQKVIVTYISRLYQPHLVKDSIQMKFKESGAIVFWEFSEGHVDTRNGQGAILGGKRWGAMVVLRSLESASTAIMAALKDSVQYNNSEVNTMHIVLLNAETESNISGTSDDQAQHRMEKLTKILKDSSVASDLQAAGLKVISCIVQRDAGRMPMRHTFLWFDEKNCYEEEHILRHVEPPLSALLELGKLKVKGYNEMKYTPSRDRQWHIYTLRNTENPKMLHRVFFRTIVRQPNAGNKFTSAQVSDTGLGCPEESLSFTSNSILRSLMTAIEELELHAIRTGHSHMFLCILKEQKLLDLVPFSGSTIVDVGQDEATACSLLRSMALKIHELVGARMHHLSVCQWEVKLKLDCDGPASGTWRVVTTNVTSHTCTIDIYREVEDTESQKLLYHSATSSAGPMHGVALNNPYQPLSVIDLKRCSARNNRTTYCYDFPLAFETALQKSWQSNCSSVPEGSENSKSYVKSTELVFAEKHGSWGTPIIPMERPAGLNDIGMVAWILEMSTPEFPNGRQIIVVANDITFRAGSFGPREDAFFEAVTNLACERKLPLIYLAANSGARIGIADEVKSCFRVGWSDERSPERGFQYIYLTEEDYARISSSVIAHKLQLDNGEIRWIIDSVVGKEDGLGVENIHGSAAIASAYSRAYEETFTLTFVTGRTVGIGAYLARLGIRCIQRLDQPIILTGFSALNKLLGREVYSSHMQLGGPKIMATNGVVHLTVSDDLEGVSNILRWLSYVPANIGGPLPITKPLDPPDRPVAYIPENTCDPRAAIRGVDDSQGKWLGGMFDKDSFVETFEGWAKTVVTGRAKLGGIPVGVIAVETQTMMQLIPADPGQLDSHERSVPRAGQVWFPDSATKTAQALLDFNREGLPLFILANWRGFSGGQRDLFEGILQAGSAIVENLRTYNQPAFVYIPMAGELRGGAWVVIDSKINPDRIECYAERTAKGNVLEPQGLIEIKFRSEELQDCMGRLDPELINLKAKLQDAKHGNGSLPDIESLQKSIEARTKQLLPLYTQIAVRFAELHDTSLRMAAKGVIKKVVDWEESRSFFYKRLRRRISEDLLAKEIRRIIGDNFTHQSAMELINEWYLASQATTGSTAGWDDDDAFVAWKDSPENYKGYIQELRAQKVSQSLSDLADSSSDLQAFSQGLSTLLDKMDPSQRVKFVQEVKKVLG

SEQ ID NO: 64206 - protein, 480 aa, Zea Mays
MLSDSAPAVPTPPPPSSGSMRRRLAPVLLLAAALLLAARPWPAVIAADCPLDLSWPNYGLIASVCSDQNGHSKCCRYINAVLAVSSAMYANTTGTLGVPAQFSDSCIANISDTLVSKGILPTAASFCGLGIKIQVSYQCDGMTTILEMLQSPNFIDITRSCATTLSDDITCKRCLNSGLSYLRHLVGEQDNVTLNTCRDAAFVALVSQGNISTVDTAGCFFSVQGLSALQVNISGPAPTGLVAPDISPSPLTVQVPVVPPKHHRSYKLVLFPAIGVLVTGVAILLMIVLIFLIRRKNKELKKMEGNNPLDAWSFSCVKKGQEGNSTIFGRFSYKEMKNATRNFSTVLGGGENGTVFRGQLNDGSVVAIRRVESSPKQSHNEFCKEMEFLGRLHHRHLVGLKGFCSTRFERFQVYEYMENGSLQDHLHSPSKHLLPWKNRVQIAIDVANALEYLHFYCDPPLYHGDVKPSNVFLDKNYLAK

SEQ ID NO: 64207 - protein, 82 aa, Zea Mays
MDTTTCSPSWWPSPSSCSRPLFFHLCAYQLVQPPWQMFFPSLQQHLGGCRAARRACAASVTTLFTPLTIGVIPHVSCVRRNA

SEQ ID NO: 64208 - protein, 236 aa, Zea Mays
MGTTDLKIPSNNSNGAARTNLPARACCVVVEYLAGGTLKQYLIKNSRRKLAYKVVVQLALDLARGLSYLHSRKIVHRDVKSENMLLTPQRNLKIADFGVARVEAQNPKDMTGATGTLGYMAPEVLDGKPYNRKCDVYSFGICLWEIYCCDMPYPDLSFADVSSAVVHQNLRPDIPRCCPSAFANVMRKCWDANPDKRPDMDEVVQLLEALDTSKGGGMIPDGQSSGCLCFTKARGP

SEQ ID NO: 64209 - protein, 199 aa, Zea Mays
MAYSGQRHAGVGSSSRPANGFKGAANSVEFLGREMLGMRLRDAKPDTDDEREMWSSSDVTDSSSNEAGHVIATTVHGRNGLPKQSVTYIAEHVVGTGSFGVVYQAKCRETGEIVAIKKVLQDKRYKNRELQIMHMLDHPNIIGLKHYFFSTTERDELYLNLVLEFVPETVNRIARQYNRMNQRMPLIYVKLYTYQVCLD

SEQ ID NO: 64210 - protein, 1037 aa, Zea Mays
MVDKVKVVGAPGKRKNAFCGDSFGRMTAGGGAGAWLPRVSGQPADLEAASVMATESAVRLIGGTGARDWSKGFGAFDSSVGALSGEDLGFVDNDAGVYGGWSKSVPNRSGSAPPSMEGSLAALGHLIGQQSGSFEASLATLDNITDSSKSEEQVLADPAYFEYYGSKVNLNPRLPPPLISRESRRLMNRVGKAKEWRVVSQDNSNKDSIYIPRSTLSTHKEEPEDDKSPRLDLSSVEDAQIISSASNFQSQDFMLESFRQSAASLPNSSSSNPSNINTGDSMPVYSDINLSVDAVKQSDLNSWTPKRPLKSTVSNDVSSLPLSSSSSYSGRKPGMQTSQQEKAAVDTKHGNVVLGSGAAVSELDNVDSSMNNLMISLDGHASSPVKQKWQDNVLWQYGSFLPAQGDPTQGIHLPHVPSIDNLSHAQLKLPAGDMHQFLPQPSMTTPFYTPNSFGNPYYPNLHPGNAFPTSIGTGGYAVSGSILPPFVAGFAPQGPLATPLDSPMTPSFSGRPSGFSPAGNLTGGTEFMQSYKVYGQPGAGMQPSIPDSNFIHFFQHPSLFQYTGGNQYNTMGPRFTVVNPTESFDPQKMIHQAAYPSDQRLPLPRTGFPNSPTSRRGGTVPNYQGISSYVGGPMTYPTSPVFQGQTLPGVLPPDRRNDPVGFQSPSRNITDSPGIQRQRDRQKFDESKTCSFLEELKSNRARRVELSDITGRIIEYSADQHGSRFIQQKLENCTAEEKAYVFAEVLPHASSLMTDVFGNYVIQKFFEHGTREQRRDLATKLVGHVLPLSLQMYGCRVIQKALEVMELDQKIDLVHELDGHVMRCVRDQNGNHVIQKCIECVPTEHIGFVVSAFQGQVASLSMHPYGCRVIQRVLEHCGGTSQSQCIVDEILQSACVLAQDQYGNYVTQHVLERGNAHERSQIIIKLAGQVVTMSQNKFASNVIEKCFQHGDMAERDLLIRQIVEQTEGNDNLLAMMKDQYANYVVQKILETCNENQRELLVSRVKGHMQALRKYTYGKHIVSRVEQLCGDGTAEPDS

SEQ ID NO: 64211 - protein, 549 aa, Zea Mays
MVAVADAGSPARLNPLPNTDAEEEEVLTITPTKCSTIYLNRGIYSVRNPILHRQHLLRDCDGNHVDILPTSEFDEGPIFDEEPCFHRNLLDSDPDSPYDWVVPVIAVHSSGYTEMSHSEADKVPATAALPNLREKICCRFVDRTKLSSHVRLIHFSLPSPDQALGIPIGTHVFDCTSVDGKPCMRSYTPTSKEDEVLATTPIRCLTNCFSIIQCRFLHSCNCRRDAVQHRQSWPPPVQYGILGDGVQVWLPPWPPPVWEFWLSLKITGPQMMHSVGYFGLPVMPATCITISEIVSGSSEQIFPEIFLQSLHECRVCLSENTGRSLLQLPCHHLFCLMCMKSNCRIHVIEADLTQVWLREDAVAYFKNMFDGGLRPTSNAFNKVIDGWVKVDMLNEAHGFFDMMPEKDIDDVTVVIFYFGGQHVGWEMKTEWLSNGWLCLVCGASDTQELPLHFIKLAKDTYTSDCMFKKIGYGTVSEALVYMLSLLFVRRDYCNEEPFFRNVLEHYQCGVEMIRRDLFIGHWKHYLQSAIPLQPCFDGLINVGKIWVNY

SEQ ID NO: 64212 - protein, 704 aa, Zea Mays
MMNSMNVPSKRSTLEKKLDKLILALFATLFTMCVIGAIGSGIFINEKYFYLGLRGHVEDQFNPKNRFVVTILTMFTLITLYSTIIPISLYVSIEMIKFIQCTQFINNDLHMYHAESNTPALARTSNLNEELGQVEYIFSDKTGTLTRNLMEFFKCSIGGEMYGTGITEIEKGGAERAGIRIDDDEGKRSANAVHEKGFNFDDARIMRGAWRNEPNPEACKEFFRCLAICHTVLPEGEETPEKISYQAASPDEAALVSAAKNFGFFFYRRTPTTVMVRESHVERMGSIQDVPYEILNVLEFNSTRKRQSVVCRFTNGRLVLYCKGADNVVYERLADGNHDMKKISREHLEQFGSAGLRTLCLAYRDLSREQYESWNEKFVQAKSSLRDRDKKLDEVAELIEKDLILVGCTAIEDKLQEGVPTCIETLSAAGIKIWVLTGDKMETAINIAYACSLVNNDTKQFIISSETGAIREAEDRGDPVEIARVIKDSVKQNLKRFHEEARHSLISTPERKLALIIDGRCLMYALDPTLRVDLLGLSLSCHSVICCRVSPLQKAQVTSLVRKGAEKITLSIGDGANDVSMIQAAHVGIGISGQEGMQAVMASDFAIAQFRFLTDLLLVHGRWSYLRLCKVITYFFYKNLTFTLTQFWFTFQTGFSGQRFYDDWFQSLYNVIFTALPVIIVGLFDKVGLFLLVYGVVSCNCTKL

SEQ ID NO: 64213 - protein, 342 aa, Zea Mays
MNYFFIYIHQEQVCDHVIVRLFHGSLKRIAKPSLASFRGSQLLNVSSSQVQISRSGRTTRAACLLACPSLPNAIQGFVKVKQASSAATIRETLMVGGMEGPPHRSRERETRLWSIHMTGEPDPDANGKQQWRHPDPGAPTAPARPAPSFGGSGTPRDTGPCPCGMGWDGMEHFWAASGRQKLKPNAQLLARLLGEAIGYGSLLPMPSAPSSPRIAAFPSPFSSVRMVAAVTPTPLLRPQGSASSQPSRLHLRKIVVSLRVQGVRFQDHLGFEDFGCNLQLSKGTVPLNLLMNYLSPYMLCICSNNVDPWLVLVHSLSVHLNNESTVRIRQHRHCLWGDVIFQ

SEQ ID NO: 64214 - protein, 478 aa, Zea Mays
MTKLTSELLRPVVPAAALDEAALLRYLVANVPGFPGPAPALSLTQFGHGQSNPTYCIHASAPGGGQPRRYVLRKKPPGAILQSAHAVEREYQVLKALGDHTDVPVPKVYCLCTDASVIGTPFYIMEYLEGIIYPDSALPGVTPSKRRAIYLSTAKTLAAIHKVDINAIGLQKYGRRDNYCKRQVERWERQYLASTGEGKPARYQRMLDLARWLKEHVPEEDSSPGPGTGLVHGDYRPDNLVFHPTEDRVIGVIDWELSTLGNQMCDVAYSCLPYIIDAAPSARTSYGGFQDTGIPDGIPQLEEYLSIYCSFAARPWPAANWKFYIAFSLFRGASIYAGVYHRWTMGNASGGERAKFAGRVANAMIDCAWDFINRVNVLQELPSKGSQVLGASWQEFHREEESSTSEKNQGKFVPSEKVMQLRKKLIKFIEDHIYPMEAEFYKHAQSTSRWTIHPEEENLKALAKKEGLWNLFIPCSES

SEQ ID NO: 64215 - protein, 790 aa, Zea Mays
MALQLRRFLPHGYGQRHRAVTHVLSPPPPLAMLQFEVFQRYSSAPWPLSPFRPCEMCGVAFRSNSTRKMCSRNIFGVASQPKSSTFFTTGLSGNRSSVCFRARDSRGIALKTNNIVNSRPFSTIYSKKLRFLIKNKTSCNNLNVRREDGSVAHSLFCRSEKRQSTVATCSTIADEASTSTSNSSKSVTDSKTDTAKMRRSRGSKKEVDGVMKDKEVHTKKKRISSRTCIAATKTTESSSAKQENKKTDNCKLKKGTDSPKEKKVNNRSKSKAKVSASSVSSEAEICMKSSIDGSGIEKKPLVPLYPPRAKSVVVVESATKAKVIQNYLGDMYEVLPSYGHVRDLAGRSKSVRPNDDFSMVWEVPAAAWTHLKSIKVALKGAENLILASDPDREGEAIAWHIKEMLEQQGALGCDVTVARVVFHEITENAIKKALMSPRYIDMDLVNAYLARRSLDYVIGFGISPLLWRKLPGCQSAGRVQSAALALVCDRESEIEQFKPQEYWTVRADFKMQFADLSNGTCIPFHIKHLNSKKLGQLSIPSQEEAQAIEKRIHSSKFEVLGVKRSKIHKNPPMPYITSSLQQDAANKLHFTAGYTMKIAQKLYEGINLSSEETTGLITYIRTDGFHISDGAAEDIRSLVKERYGQKYVLEDTRKYLKKVKNAQEAHEAIRPTSIRRLPSSLVGILDDDSLKLYTLIWKRTMACQMEASRTQMIQVDVGTPEGEMIFHSAASKLDFKGYQSVYEDTEGDSVHEDNFEALSKLMVAVKDLVSPVNVHLGQHFTKPPSRYSEG

SEQ ID NO: 64216 - protein, 1027 aa, Zea Mays
MRSEEAERLSKSRKSIVLDPANPSVKSQAKSMAAAAVEGNPRRMHWKQKNEFFKKNKAAVITPTKSVSKVKLSNNIPKGNISSSPAPSPEQPGASNPSFPVGSDANNEVTTPFDLNKGENSKHEKSTASKMSNKGINRRASSHAANVDNNTKEVRSYLISVLSKNPKGMGLKALEKVAADAFPNASKKIESIVKNIANYQGPERYVLKPGLEVESSKRHASEGVRSISENIEESAPSLKIDDPDICERIDIVGSPLAVTDGKLSNDSEGKAGTSSDSGSDSDSDSDSSDSGSDSESQSRSAAETGSGSSSDSDSDASSSSKEGSDAIVDITSDDDKANTAHTKVVDDLNLSSSPRDLTRLNVDDEQIDIGTNLDYRSASPHIDLNNFNTGNDDAAAEGFSSGNLNKPSEMPGSKNMTNTRMDSIGVDNKHNEMSFVDNLFDDSMRAASENSPKGEAGQLTVQHGNKRKSTSKDESKLVPVNIAKPKLKRSSGSENSTAKPESAKKAKPDVTSPIGSLSEHKRSLPPEKHTNDRLNKETGNVSRDASRDSSPAMKGRPSAPGNLQRIDQSPNLPIPTMHSEGTKGNAVKSSSKKKSDKMQKPWHGIDGDFGSCYSHGVDHHANFDGSDDSSTRKRSRHENPLIDDKMLKHSKDTNANINSMNLTKSSREIVVPDEVTAFPESNESNGEPSNSQRDNVEKSPYGKKKLQRELSDLELGELRETSLENDDGRIRKQFERNSSSKSLDAKLTGVNNFYPSINDRKTPVTVFHDKRKPSPQEYGNRGHVNQEGFQRKAAVYAFDDNRPQQRENFPESLHLPKIDNSDSENIMYPDRSGEKTSKRETRMAHSGMLEYADMQKKKATSRLPQNGTNNVIVSRMQKSISTSDNEERSRNNSLIETKTGRKRRDSSSDDDNLFFSKYDKDAPELKGPIKDFSQFEDYVQEYNEKYGVYSYLSSQIDKTKSDFLRVQDDLNVAKERDKEQYYNTVERLRDMYHESGARHKLMKKVFLLLHEELQIIKQRIKDFSEAY

SEQ ID NO: 64217 - protein, 89 aa, Zea Mays
MVHLSKPCEVSFKDSSAIRYAPRVKATLSRGKLSGVEGMKTKVVVWVKVASVSIDSYKSDKICFLAGVKKLRQKDAYEVPREAVSVDEF

SEQ ID NO: 64218 - protein, 372 aa, Zea Mays
MCDACLMIILLPTHLNSDFSASNKNVWNSVSYVWIWYTSDLYMYTFSDKKCSFLFALQAVLSALSWRWLLALSSLPCFLLLLFFRITPESPRYLCAQNRMTDARFVLERMAIANQAALPMGVLTYHQETKTECITHVSEDEHLIPVREKEHTDRNAISSKSGAVAVLHKLLSHNLLKSTLLLWFVYYASSFAYYGITLLTSQLSDVNRSCKSDLVFEVHQNNGNLYKDTFITSLAEIPGLILSALLVDRFGRKATMSCLMFACCAFLGPLVLHQNELLTTTLLFGARACGTGATTTLCLYAPEVYPTYVRSTGVGIATAIGKIGGVICPLVAVGMLRSCHQMEAVLVFELVLFLAGVSCILFPVETKGREMD

SEQ ID NO: 64219 - protein, 311 aa, Zea Mays
MWCNLKPLPGANRLIKHLKTNGVPTALASNSPRCNIEAKIFFQQGWKESFSAIVGGDEVEKGKPSPNIFLEAAKRMNCAPSNCLVIEDSLPGVTGGKAAEMHVIAVPSIPKKTAEFSSADEVINSLLDVRPEKWGLPPFNDWIEGTLPIEPWFIGGPVIKGFGRGSKVLGIPTANLPAENFSDVVSEHTSGVYFGWAGLSTRGIYKMVMSIGWNPYFDNTEKTVEPWLLHNFGEDFYGEEVRLAIVGYIRPEANFPSLESLIERIHEDGRVAEKALDLPMYAKYKDSPYLRNPSKHGSSTTGGTQSEMDSK

SEQ ID NO: 64220 - protein, 280 aa, Zea Mays
MGKKFSYIYEGRPKTNSGLFMQSLFLHCIGHLTSQSSLHQRLAGLYCLYCLYECQPYKPQFKIYLSLEECRQLKDIVVMAKQNGLQLVPALVKRMLDKDMFLFGYMNLINDNGDKQVEELTALQNKQVKFACDKLFANSQAERYMHMDLGAEFELDTIKKLSKEYAEAKELALAEASQTVEVEDAKHLLQSERLLGDKIDEVVKEWDVQKEGFYERTGLSSSPGDQLMAVDNDESGAQCHKDGSCGDQLMAVDNDESGVQDHEDLDDDDDGFAELELLLE

SEQ ID NO: 64221 - protein, 56 aa, Zea Mays
MLLNGQPNFVWQPTPSFREEQTTPHQEMADCFIVLVTRHKIFDGIGFAWLTYLQKK

SEQ ID NO: 64222 - protein, 113 aa, Zea Mays
MVGDVNIYMNDSDDVQIAEIEIMIAEHKSRGKGIGQEAILLMMAIAVEKYGIHTFRAKISESNMASLKLFRKLVSTLFCRLLVWSLVCLIRIIFLWFGYRASRMLHTVWCSRR

SEQ ID NO: 64223 - protein, 337 aa, Zea Mays
MNLAVAAALPSVTPRTGVVLPRSSRRHCPRGVVPRAASSSVSSFTSPSAAAAPIYTPTPQDRSLRTPHSGYHFDGTARPFFEGWYFKVSIPECRQSFCFMYSVENPLFRDGMSDLDKLLYRPRFTGVGAQILGADDKYICQFSEKSNNFWGSRHELMLGNTFISNKESTPPQGEVPPQDFSRRVLEGFQVTPIWHQGFIRDDGRSNYVPNVQTARWEYSTRPVYGWGDVKSKQLSTAGWLAAFPFFEPHWQICMASGLSTGWIEWDGERFEFENAPSYSEKNWGGGFPRKWYWIQCNVFPGASGEVSLTAAGGLRKIGLGDTYESPSLETLHKGEAD

SEQ ID NO: 64224 - protein, 571 aa, Zea Mays
MAPLLQRTSTEPAAGRVSREEGETSAPPRLPPRAIPFRRSYKSTPPRAHKSSRALPASQTNQTKAAVVASPPRTRVRARKTNHQPAQAPGQHARRRYLARKAACLMVQDEGSSSSVTSSPLHNFSTMPLHASPGGAPAPTPPWLVRELRSDERGLCLIHLLLNRAPPLPRPLPVPPPRGRRRQPVRAGGHGVGEDGARRRPRRRRRRAVGRAAAPAGRAARGPAAPPPHRRARAPGRADADGRGADQGGGAAGRAVPVQPRGVPAGGAGRGVPPREDRRGAGRHLQPAAALPPGIRRRLRQAPPGQRGPQEAAEPGVRGVPVHVARGRVPGRAVGPVAQGGGGDGAGGVAQRGAADGAVRGGAQLLRGAVRLPGVGGAPRVGGARARRALAPRGGGEEHRGLRRRGPAGAARAPGPLGGADGGRRLRPRPAQLLRAAAGPAGGAGAGLRRVQGAGGEGRLLPLLAGARHLLRLRLARPSLRLMEERVDAFPYLCGGGDGPPVVALRVRWPSRTLGLLLVVLCVQFTPYLVRFQSGLFIVYPCRSPIWMDGISCLFGSVSPFRSVNVTTRAA

SEQ ID NO: 64225 - protein, 259 aa, Zea Mays
MNSTWYDLVKDAKDRECFFKARDDDFFARTMDQFRLMQNSQVTDNVSRWNIECQCAPDAQLTCDNHATIPDKAPDAQLTDEEAAALEEEDHPQIDLLDGLRRGGRLRGSGAARLAEVRRRRRSGVLTSMASLSSKHHVLIQVLLARGPLSERDFHAFIDGAFGKNTALGTKRLASEDLANDWDNKRLNPGNDNYPLSTGAANNLFLGIEQGAGSSNGQSAFPKFDNGSSVALPSGQGMSGLMGKGCKTQKESAVHPGVL

SEQ ID NO: 64226 - protein, 77 aa, Zea Mays
MYHWRVDLLESSVQNQKPQVLEKNAHWQEKNGFQQVLCDESGQFCCCFQLMRCWFLFPLEMAEGITNLGKAFFLLAR

SEQ ID NO: 64227 - protein, 593 aa, Zea Mays
MADGAEMDEEAMRAFFPLSFGKAAPRPSSATSSAHSNTLRKPQNPSNPKPSASTAADDDGAAMIGPPRPPPAPAGEEDDEDGGGIMIGPPRPPPPSARGEGDDGDGMIGPPRPPPADDEDVDDDEDDDEEEMEDDGEGGFNRIPLSNEIVLRGHNKGMNSKLQSFRQLEPFEGHQVRSLSWSPTSDRFLCVTGSAQAKIYDRDGLTLGEFVKGDMYIRDLKNTKGHISGLTGGEWNPKSKETILTSSEDGSMRLWDVSDFTSQKQVIKPKLVRPMRIPVTSCAWDHEGKRIVGGIGDGSIQVWTIKAGWGSRPDIHVEKTHTEDITGVKFSTDGQSLLSRSMDSTLKIWDLRRMKTPLKVFEDLPNHYAETNAAFSSDEQLIFTGTSIEKDGDNGGLLCFFDRKKLELVSRVGISAHYSVIRCLWHPRINQVFATVGDKKEGGTHILYDPSISQRGALVCVGRAPRKKSVDDFEVQPVIHNPHALPLFRDQPSRKRQREKILKDPLKSHKPEAPVNGPGFGGRVGTTKGSLLTQYLLKEGGLIKETWMDEDPREAILKYADAAEKDPKFIAPAYSQTQPKPVFAESDSDNEEK

SEQ ID NO: 64228 - protein, 158 aa, Zea Mays
MHKLGRGSRDKVQQFMAITGASEKAALQALKASDWHLEGAFDVFYSQPQIAVANTRHLEELYNRYKEPDADMIMVEGISQICNDLQVDPQDIVMLVISWHMKASTMCEFTRQEFIGGLQSIGVDSIEKLQAKLPSLRAELKDDPCSAKGCTSNGWFHL

SEQ ID NO: 64229 - protein, 381 aa, Zea Mays
MLTTRADLQDGLFLVRFLRAIDRRSFFFRSRALWVIAGLRGIHTLTGFLPMQPKQNLPKFRAPRRELKRRIASYHPTRKRQDSLLGGGGFGRVYKGFITKDLREGLEIEEPTRVAVKVHDGDNSFQGHREWLAEVIFLGQLSHPNLVKLIGYCCEDDHRVLVYEFMPLGSVESHLFSRVMVPLTWSIRMKIALGAAKGLAFLHEAEKPVIYRDFKTSNILLDEEYNAKLSDFGLAKDGPVGDKSHVSTRIMGTYGYAAPEYIMTGHLTAMSDVYSYGVVLLELLTGRKSLDKSRPVREQMLADWALPLLAQKKKVLGIVDPRLAEDYPVKAVQKTAMLAYHCLSRNPKARPLMRDIVATLEPLQQLEETPGDSVAVTLEGT

SEQ ID NO: 64230 - protein, 116 aa, Zea Mays
MSPTLPPSSRCLGLSSPSPSYRIVLRMRCSVRVPSLSIRRDPQQREGGVPDRPHLQVRQGHRALPLQEEDQSPDVHGVVGEVPEDPEGGTAGVPAVPRAGDQVPGRTELQVDHSFA

SEQ ID NO: 64231 - protein, 631 aa, Zea Mays
MGSDLKEMKYRRRIGVEERPQCSDPRGGADWAALQQDPVELLRKLDELRDQITRSCNVVVGQPREHRRVSRRAVSMLPEHLEPPPLPGYHRSRYGGRYGHGLPPPSPYAPPRPEHGERYARQSSGHYRQYPPRHCENGGMGPGTYHHHGCACPHCLHGQRTFPQEENIPMARYFAGQHESYRLERSPSVSSDYDRGSVASSLYSHRSVSKMRAEYFRKKAEHICRPVDGAAPFSVCSSCYKLLLMPMEKCVGRKQNRFQCGSCCQIISLKHQEENGIPFALAPSSSLHAPEMEQSTSDQMRQDSVHQRHEDFNFMFNNSNDHCDMQNNMDFTDDNSLPSTASNDRIEIDKECGSTRSIQSKAEGLSFSPSRSVDIGSPKDILCERDKDSNVEPSSDGPLSPRSPTLEDKLVDPLCAQEKGNDEDDQGTAYRSNLTCKGEYDANDEYDGDVSTRSKPESNVNDKDTTEGETSCRNYKEDNCCNIEDSSKTYEQNSGEDDTSSLVDGNEKYESMNTKDDDSSPGGEDTCNRYEPKVEDDENCVLGAESISNNCDENNKDAIKTGSISERHEELIIEEENEKLQQAFIEDANSQAGSGSSINERTNSGFSRGSSEAGLDEDQSSTEGREESWSC

SEQ ID NO: 64232 - protein, 52 aa, Zea Mays
MSIESQEISRTVHAQFRSTIRSKTTRFTFSLWSMREEGQAGENDPLFCLCLR

SEQ ID NO: 64233 - protein, 1054 aa, Zea Mays
MATLASAVSDVGVEEPSPAKAADPKEPAAAVEEPAAAAAELAGASIPSPVAAADAGDASSGPALATTPPASPATSAAPPPVSPAPLVSPAPPAEPGPPRSQFAGSLSYIAPGTPSPSAAFSYNVLPRAPPAPQVGGAAASLQPCSSPALMVAPIPASALQPPAPGQYFGNRPSFSYNVVSHANARLPTGQQFQPVTGANLAGPISRFVPPGSLQPPTPGHITRPSTAFPGSMAPNPPGSIQLPFSVPRPSNIPFGAIAQQGSSDINNLKSDSPRAPEVTPQAMQLSTGMPSKSPSTIASASGSPSIPIQTLTNSSVPPRPEVFGATRPSVPAQPSATVSNPTGFLGRPIVPPAAPLPQTPPPIATQGGTPQNSQRPFYPSYPSGPGIVPPQPLWPHPHPPQPTGFQQPPFQYYPAGPVGSLGRPITGASAATMAFANVQPPGVSTGGDRKVQASTNAGSEQSTHAAAEPDSTGHGGQVTEQLEDNRNTGVQDSDAWSAHKTETGVVYYYNALTGESTYQKPTGYKGELEKVATEPVPVSWDKLAGTNWSIVTTSDGKKYYYDNKQKVSSWQLPPEVCEILKNAESGSLKEGSTSLQDAATIENKGVISIDASTPAIQTGGRDSLPLRQTVAPASPSPLDLIKKKLQDAGASSAPSALATSSATSELNGSKPADAALKGQLVANNGEKLKDNNGDVNISDSSSDSDDEEHGPSKEDCIRQFKVMLKERGVAPFSKWEKELPKIVFDPRFKAIPSHSTRRAIFDHYVRTRAEEERKEKRAALKAAVEAYKELLEEASEDINQKTDYQEFKRKWGADTRFEALDRKEREILFSEKVKAVQEKVQSMRKAVIANFKSMLRESKDITSTSRWAKVKENFRSDPRYKAMKHEERETIFNEYIVELKSAEQEAEQAAKAKVDEQASWTESKPKLEKDPQGRARNPDLGQGDAEKLFRDHVKDLYERCVRDFRALLSEVITPEVAARTTAEGKTAINSWSEAKGHLRSDLRYNKLPSKDKESIWRRYADDLTRKLRQSDTKEKDKSDTDGKQPRSSDPPRRR

SEQ ID NO: 64234 - protein, 1489 aa, Zea Mays
MVFLQRSRPVNPRKRPAPPPELEPEPEPPRPGPDASSAVDAAAALLADAGCTLLVPPHQPPSLPSPHSFAARLSRKLSAGGDASSPSAPARRLLEGLAAFAASSPARLRQLLLPTAPHEPSLARALLSVPALQPGLLALLLEKLPEHFGGDGALDGSPLQDDVGRLIVSQFRWLDFLADADAFVDKLVEVLSVAPHRLKKEIIGSLPEIVGDKSHAAVVAALEKLLQEDSEIVVAVLDVLSDLNLNEELQEQAVTVAISCIRTIAPDQTPHLLRFLLLSATPVNAGRIISQIREQLKFVGVVDPRAARSKKLKGKASANSTDGAILDTLRSGLRFKNMLCEAFLKELKSVDHPRDHKVIDVWLIMLIYANGGALEKAAKKILKSKILHECIRETLFDQCIHGNTELVKEHFMSYLSVSDYLLACKEEKAREFAAYLFTALFEEFTDTYSRQELVGSLVTHIGSGVSYEVSSALDIMISLTSNNSEELIPISSHITGILDYLESFGEDNLRKVYDIFCRLALAAGFNTGSGGSSVANEVLMVVRKQVSNPDMKYRRMGIIGVLRIVSTIASTDVNAAVNCSSSQQPNCEEALELLKMSVNSCKFVTLLLIFLYDELAALLDSKVIHSSIHDWVGEHVAELFETPFLADLENGELPEKYLCDGIEGELWMKLDGNISPVCVNIMRLAPTSPQKSQSCLQILMSQFSLLTTIERLGNEGSLGGIDALLGCPLHLPSTKHLDGANWGNLSGLQKKTVCYSLYYAINWIRELLNAFGTQVESRVDNVSQKARNETAVKLLKRLRNLILLEGLLNAFLKDYPLSLPELRYLGDCSGSASTSKFNIPKNMGEESINGASSKRQKGCKGKVSEKVNPDDKLKQPTILDAFKRAGVTVSQATNKASSQPSSSGMMSKDIEQDATDPGELGLIDLMAAPVKLDMQRYKFRTIRATCLSLLNYSECQGSSSYLQTELPTYLYLLRDLHNKLDNLNPSIKPFLSTSKAKYTPTHCHKSTQDFLDKIQPLFLVLRKHLDGAVSMIKDESCSDDWSSHSSSAGNPDIPYVVVSKSSIVTAVCKEILGCYRKLLGIPDLLNQPNMSILKQLLQTLQPTENFDDVLSEFQPSLAPCNVDYLYCGACKILEDIMDSVSSFSYLLSSNVLITIQSIVNSVVVLLDKSGEPNGKNIHMGCSKAIIPFLRKRLGYSAHKLLSADFPSEDAGKGWQSKGDLIQKILQIYLRNSDSTSDLLAEIGRELPKEPSLKTKDNQDVSYGFPTLCSSTITSWYRVLHEENTGSLNKTIKQALKARGSVDTILQEIQKSVDAFVSLIGMCKSHEKVSMHAMAVKHGGKFIDTFLKAFNFLERHFEQHNDTIVKMLKQLQKGTRIIQSICSDAKGNKRTMITSKVPPAKRSMERFLFQVKALLHSCSAEKEFQMGNLKHKDLQGHVVSSQAYGNVDEEDEEQTEVDSDLPADEHDNGNAMEEDAVEGSNETPMEEEEE

SEQ ID NO: 64235 - protein, 65 aa, Zea Mays
MAPLRTSLSMATNPCALLCAAPLLCFFQRALCSRLLAARARRLCSSLPHKTASTQELLLHGRPEF

SEQ ID NO: 64236 - protein, 71 aa, Zea Mays
MGPARQFFLSQSRTWSKHRVVVTARKSRLSNTLELGLCGHKPHPRMPPPPVYIWSRTRAPSIVPIDDRTPT

SEQ ID NO: 64237 - protein, 106 aa, Zea Mays
MRSSRRCAACRGFLQGGEHGGGARSSRGTDQEHWRGEEIEEALCFLGVPRQQLGAACIDHRGTPEHPARTCTLETDDEAMLGNCILCQGWSRKRAKSNAVLGEKRV

SEQ ID NO: 64238 - protein, 128 aa, Zea Mays
MAFEKIKVSNPIIEMDADTLCHCPIIGDEMTRVFWQSIKDKLIFPFLDLDIKYYDLGILHGEATDDKVTVEAAEATLKYNVAIKCATITPGETRRTYEARLVAIYRHVREDGVEGQPISVSTEQFAPC

SEQ ID NO: 64239 - protein, 210 aa, Zea Mays
MSSLNSLFNRSTFGTKCKTCLNLVISRIKLLRNRRELQLINMRKEMVQYLQTGQESIARIRVEHIIREQNILAAYEIVELFCEFVLARVPIVEVQKECPLELREAIASIIFASGRCSDLPELMHLRNLFTTKYGKEFVAGAMELRPDSSVNRTIIEKLSVKAPSGDSKLKVLKAIAQEYNIEWDSSNTEAEFNKKYEDLLVAFANSLLIP

SEQ ID NO: 64240 - protein, 152 aa, Zea Mays
MKGGKTMGRDGILIEDVARSVTTRDVQEARRQDIKNEILNSEKLKSHFEENPTDLDLLKHDKLLCNKEIPAYLRDVPDYLIDPKTKEASNAVKLSRAAMHIDKPQRRKRQGFKGGSGKSRDPLKTFSAEGKRGRRRKEREGEPDRRKKSKKA

SEQ ID NO: 64241 - protein, 374 aa, Zea Mays
MAAAAILPELGTQVLIPVAAAVGIAFSVLQWVLVSKVRLAPERRADGGGAVKSGPSDYLIEEEEGLNDHNVVVKCAEIQNAISEGATSFLFTEYKYVGLFMGIFAILIFLFLGSVEGFSTKSQPCHYSKDKTCKPALANAIFSTIAFVLGAVTSLVSGFLGMKIATYANARTTLEARKGVGKAFITAFRSGAVMGFLLAASGLLVLYIAINLFGIYYGDDWEGLFEAITGYGLGGSSMALFGRVGGGIYTKAADVGADLVGKVERNIPEDDPRNPAVIADNVGDNVGDIAGMGSDLFGSYAESSCAALVVASISSFGINHQFTPMVYPLLVSSVGIIACLITTLFATDFFEIKAAIVLVCGGWSLGWLSHWFYY

SEQ ID NO: 64242 - protein, 212 aa, Zea Mays
MKVEARVGDIYRSLFGAAPNTKSIMLELWRDQHIEYLTPGLRHMGPAFHVLDANRPWLCYWMVHPLALLDEALDDDLENDIIDFLARCQDKDGGYSGGPGQLPHLATTYAAVNTLVTIGSERALSSINRGNLYNFMLQMKDVSGAFRMHDGGEIDVRASYTAISVASLVNILDFKLAKGVGDYIARCQTYEGGIAGEPYAEAHGIHSVDWLL

SEQ ID NO: 64243 - protein, 59 aa, Zea Mays
MIMEILYFDSSTVYHCTLCPCMVLIVLQLKTFGQRCGYWARLPRPVHGTSWAEFSYEVG

SEQ ID NO: 64244 - protein, 82 aa, Zea Mays
MFVSPRRSSTGDNQLSAPLAVPPFSWLAGVLTLKLGRLESTWRAECGGPGCARLGSLSGGQFLNPPLVPPSRAKNDTHPDTK

SEQ ID NO: 64245 - protein, 264 aa, Zea Mays
MGYDSLKAIGGDEDSYLAKQVLDVRLRMDGLFELEEHAVQFVEEFIALYTNGPAGGGGISTGHRKEIILQKMLVDRENIFWRSHAKKASIPCLHNQATYSETGQARISQAQRNPTCRTMAIQHFEASTETPASPAPALPGKRVALYHVAHSRAGDKGNDMNFSVIPHSPADIGRLRSVITPDWVKNAVSPLLGSSSFPDERDVQHRNKLLELVTVEIYYVPGISSLNVVVRNILDGGVNCSRRIDRHGKTLSDVILCQQVILPP

SEQ ID NO: 64246 - protein, 678 aa, Zea Mays
MSRMVASQPTKDAESSSVVNNIGLRAESREQPQVGRIAHTCSRDRPDQMPSSSSASGVGLGRRRPPIAAGGPRRSDSRWWWARLMEKNYSDAESYRARRPEERLINDYLLLESAARKVATGLAYLLLTWSTVVLLGGFVSALKLIDFWCLAAISTSFAVKGPLENLMEALEVGDGETRERAARIVAALAGDLRRIDQLPRALHHMASLLQASDYRFPRPRTTTATDARTTTTSMQEQRQRQAAESKRGRFGLLFWAILSCLNFWEVLAKEKKEDTFPSGGGPKQLVSQGLLIVERLARHPANRAQICNNSVLLSKLTAPLFSHAFLDTAEHGRGWVVGMLATSLRIITRLLIRAPGEASRGLRDGITSNAQAVSNLSRVLEEEDDAKFGPELKAAAVDILAELALPSSDRSSTSRLGKADIVRGLWCIFLVQVDDGVDGSNTQGEEQRQQDSTLRKKASEALAQMLSAELRHVAGRLTDMLAKSKGSTSRVRTARTLECLCSHISTEHGQPPRLDAIEMLTKVLQLILRIPCESNKLETADEEQQEEEEFLVALLSLAVVICDGMVDEHGFSCAAPPQDMVPLVRKLKDIIQANNTTTVECLRTVKLTCKLVVSMAQLKPMCIKDFTEHNFMDVLLESLKTLSDLDNCLVLFEVDNHYQVTKTDKPLVSLVKKAHQLF

SEQ ID NO: 64247 - protein, 51 aa, Zea Mays
MNRARVSAVVDLPPGFFKLIQPPAHHRCRCRYQLMRRSNSGRPRLQRKAAL

SEQ ID NO: 64248 - protein, 193 aa, Zea Mays
MHGPQRLGPLLHADEPNDLGFPALHAAHINPETKPSPPFVPRRRRSQSPRGSSASQRSYPMAPTSKLSMGIKRASRSHAYHRRGLWAIKAKNGGVFPKAEKPAAAAEPKFYPADDVKPRVPSTRKPNPTKLRSSITPGTVLILLAGRFMGKRVVFLKQLNSGLLLVSGEHAWSTYSFGVLPWSVASLPLTTAN

SEQ ID NO: 64249 - protein, 2145 aa, Zea Mays
MHCIQQGWLCILIGQNSAGKTSLIRLLAQLSGNTLNELNLSSATDVSELLGCFEQYNFFRHYKTVLSEVEHYVDVYFSLSIDTNQKNFVAERRGLFTKWFEFVAAKGHSSIKTSKLMSGNASLPSLSLLAEIVEQMKCDLEMFDFSIPLTKDDLSETLKSINNLQQNGAAHQPVRFKWVAGDLIRAIERGEWIVLDNANFCNPTVLDRINSLVEQERSIMVNECGLVDGNPVVIKAHPKFRMFLTVNSNYGEVSRAMRNRGVEIFLMDQSWNLKGFSNVPGDSERKDVIRFLISCGIPRMELVSSMCEAHMYAKGEGSRVGVNITLLEITRWVQLFQQLIVKGNQFLWSLHLSWEHTYLPCLGEINGSGIVEEGKNKFLTNFDRSEILARNFSFLTVFDGCSTSLHSGLSLSLPGGWPIEQKLRDLIWYSKETCVMRNCMFLQSLGAQYAAYQISSLNDNSLLLGQISLIHPSILPAASLRELQFPTVNGQPVKICVTGAFNSYLADQMLFFAANWVMEQCTKNDLELYGKWFNWYNSLVQPYCNFFESYWYILEQESEHPIWHNILEYYREIVAYHNIDIVTQHIPLLSKKLLDMAGCDSLKACQNRLHRSFKALGLLRLTLQQWQIETKCPDLSVLECTLLPALKSLRCLEGEVLKTIAKSWKRLKIYSLLLDYHRSIWKMMIASQLEGLPIVWNLLRKEILKLQQKFPVEVDVFLMECVNLNNINDTNFQYGKPTLWDYGGHPHLPSSSEIFDKMQELLSFTTDVWPRKNLLNIELDDRKQLTDAMLSANKDLRHLAMEGVSMACIATMKTEEDVLAVVPQLDEVHKRLVGKVNSVRDNLGLLSKTSVPEFKFCCSVSSEILCNIYGFNGWLASLPLLNLKSLNLDTLLLQQLCKCTQKDSSETHEILVNSEYLLKYAMDYSLGSSSRSPLDYIQHQIIWWICHDWAKVDNAHLKVASCILEMWYNYHSSLWTYCSGSPKCLFSVTHDDSCDLAHLTKMDAINTIIQQDLHVVDYLKSGVMLKVASRNLWEGVSCLGNFVSSLHSAADSLFKQIIFVHKKHFEEENYNQLESLLFQQSRRLIEKEDLDTVCALLSSSSCRVLASLSESDKLVESLLMDLYSSYSRDSLLHTGAAWVRIGELRFRLLLSSYSPDPTFKSRYKHSHILEKITLVKLEEKVRHDCEELAGSNSPEDSHDNELLQLLEIKEKDTRAKVVFRPRQSKHKSLIAACLEFEDRLSECKDLLASLTCEGLGQLEVDRVCNWQIISMNFIKRLTEDYREYVDLIQPIQVAVYEMKLGLAIALSGSLQREYLKKIKEDDINRVLGAIYAFMQFPSGSFTERVVTDVTDDLTNYTITGQLGTLNSCSGDVDMLKKLAAMSSQLNVCKVAGKVKSLSEMLASVHHIFLVRTADCVSCSLVMDKSSYASLKDTFDHFTSMWINMKYRLKAKESDDSQYFKFKSRMISIDDIFKDVPLLSDMESEDSILDNEEKLEHEFFKITESIDDDNGVVEDNWDLIPESALKCIVTIHDQLFGSPDLFEKRRKCQVSDAQKVQSFIESYELGTRILKDLPELTCSMFDEKLMPEHLFRVCLEYQRSCAKTHQDCSGYNAYKDPNPPVLFKMVESLTTLQERVNSYLDEWPDHPGLLKILDLIASLLAMPLSTPISKVLLGLQLLAGKAQTLQENDSKFFVKDHLASIFLLVYSWQRLELDCWPILLEEVQTKYELNAAKLWFPLRALLTQTSGIPVDDDLSIIRSVEEFVQTSSLGEYKRRLHILFAFHGEISAGASLGSYSSNAVKKIQNILYSVFGYYMQFLSLVHGKIEEGKKNIEKELKDHVKLYSWEQAPYSSASIENFKRTRQKIFKLLQRFNDILKSPVIFLLNEEATSRKIPCWLDPQRPESHLPVDSEKFNKRFLWYHKWASETSLSLQTLQQSNGSTVGVPTAKEYADMVYDVKHWQNEIELNDRLQFFWISLERICGAANFGSTVKHGKKNQKKTALSNLFKTLEECGLSKHRPMSHEWGDELAAPSPLFLEQSYDSAHLLQQINSQKMLEDVSINHSTLLNTDNWKHANQQYFKCLAMMQQLRQVSLKFNKDLGLEEVNKAMSFMSHLLTVLSEQRHLAYNLFDQRNQFKHAIFLLGSGE

SEQ ID NO: 64250 - protein, 83 aa, Zea Mays
MVMETPSQEMDPEQHGDNMAGKGGAGQVYWSNAMSSFVLKYLSDLVASGTKTTSGFKQAHLNSCGRALYEKLGVQCWGLVLKC

SEQ ID NO: 64251 - protein, 489 aa, Zea Mays
MAKEPSRLCVEEVHRVLLDIVNAAANATPGLGRYPPFKREVIAIASNALDAFKSDAKKMVVALVDMERAFVPPQHFIRLVQRRMERQRREDELKNNRSSKKGQDAELSKMNRASSPQTGSDEAGGNLKSMKDKSNKQDNDTKEGPNLQVAGPGGEITAGYLLKKSAKNNEWSKRWFVLNEKSGKLGYTKKQEERHFRGVIVLEECNLEEIEEEEISKSSKDSKKANGQEKGPSLVFKITNRVSYKTVLKAHSAVILKAESMADKIEWIKKIKGVIQSRGGSVKGPTEDGPMRQSRSDGSLDTMARRPADPEEELRWMSQEVRGYVEAVLNSLAANVPKAIVLCQVEKSKEDMLNKLYNSISAQSNAKIEELLQEDHNAKRRREKYQKQSSLLSKLTRQLSIHDNRAASYGNDSSGAEGSPRSPGHSGEDWKSAFDSATNGSVDRSSSQHETRSKSADSRGRRHENGDANSGSRRTPNRLPPAPPNGGRY

SEQ ID NO: 64252 - protein, 752 aa, Zea Mays
MDPLRSYLGRILLEEITPVVMVLSTPLAEAACRKNGLSFVDMLSPFSLFKKIDVPVRTASEVPYRLQMFKIRMVYASDVRKEDCEVADEKIKPVVSEANEKALPDLLSDPPQAEDVLGKPEAELCPLWIKKFNRELMRTLSFSEHETFDHPVACLLVVSSMDKEPVNKFVDLFNTNQLPSLLNEGIMDPQILKHYLVLHDQQEGPQDIAVNVLAEMRSTLGLNDCKLLCINSSTEAGGSNADNSWLPYKALVLNNHDGSCILSVDDLNEIKDFMQDFVSNHIIPYMEQKIRVLNQQVATTRKGFRNQIKNLWWRKRDDVPEAPNGPMYTFTSIESQIRVLGDFAFMLRDYELALSNYRLLATDYKLDKAWKRFAGVQEMSGLCYFILDQSRKDAEYCMENAFSTYLRIGSSGQRNATRCGLWWAEMLKTRGQYREASNVYFRVSNEEPSLHSAVLLEQAACCYLLCNPPMLRKYGFHLILAGNSYFVSDQKQHAVRVYRNALFVYKQNPWSYINNHVHFNIGRWYGVLGILDVAIKHLLEVIACSHQSLTTQNMFLNDFFHYVQSMGKKFDVYKLQLPVFNMSSLKVLHEDHRTYASHADVGVSESTWQELEEELIPSSSIVKTNWLDTQPMRKYKDSCICVAGEAVKLSVELKNPLQIPVAVSGISIICQLSSTLDALSSDVSGLDLDGGEDKVNTEPSISMLETDGDKFTLSKLDIVLGGGESKRVQLDVTPKVEEKNQEREKRPTPFLE

SEQ ID NO: 64253 - protein, 673 aa, Zea Mays
MNSLTLLFLGNNSLTGGLPSSIGPSIKYLDFSYNYLSGNLPSWASHNLQLNLVANYFVINKSKDSVLPAGLECLQRNTSCFLGSPQSSSFTVDCGSSRSVFASDNSMYQPDDANLGVASYYISSPPRWGVSNVGRFMDTSNGSYIVNSSRRFQNTLDSKLFQTARMSASTLRYYGFGLENGDYTVTLQFGEFDFEDLQTWKSVGRRVFDIYLQGERKEQNFNIKKAAKEAGEASTSYTAVKKQYTVPVTKNILEIHLFWAGKGTCCIPNQGDYGPTISALSATLNTKKKGNKIGVIIGVVIGATVLGLAILATLCVWRHKRRKVSLEQQELYNIVRIPNVFCYTYGELRTATENFSSANLLGEGGYGSVYKGKLVDGSVVAIKQLSETSRQGKKEFVAEIETISRVQHRNLVKLFGFCLEGNKPLLVYEYMESGSLDKALFGNGRLNLNWSTRYKICLGIARGLAYLHEESSIRIVHRDIKASNVLLDATLNPKISDFGLAKLYDDKKTHVSTKVAGTFGYLSPEYAMRGHMTEKVDIFAFGVVMLEIIAGRPNYDGKLDQDMAYLLEWVWQLYEEDHPLDIADPKLTEFDSVELLRAIRIALLCIQSSPRQRPSMSRVVSMLTGDSEAPEAVSKPSYVAEWQSNTEGTSSSVSTAEAVSVAPFLNPVVDDGR

SEQ ID NO: 64254 - protein, 75 aa, Zea Mays
MSSAMICSLWRHSIFPGLLNPSTHHRMSFHRSGLDADCRHANVRLGGIVRSCSGRGSLHSCELSLRYWDLWPFFK

SEQ ID NO: 64255 - protein, 217 aa, Zea Mays
MRPHPYLIAALNSQGHLTDRQRPRQAASAHVNVHLPRRAKGKTLIGATKPAAMPTATATATAAPRHAALFLPLLLLLLGLHATSAAAARAGVAVDAELTSTKPSPVPKKPSVKPPGPGAASPTFPGFGIPGMGGFGIPGMGAGGWGGGYGGPAGGYARGGVVAPTVTCSEKGPCYRKKVTCPKKCFSSYSGAGKGYGGGGGGGSCTVDCKVKCTAYC

SEQ ID NO: 64256 - protein, 221 aa, Zea Mays
MGVHNRVVHVLPLCSRPRPNLPRIPQPPTLTFHPPRSHSSRSRDPRGAHLPSRSAHLHPPPSILRTATHPAAAIPAALTFHPAARTFILRDRSRISHRRRCSAIKGIRGQQTAWRSPRRAGEEACADTRQDAPAEAEPPPRRPPVFYSSVFAQIEEIGWKQLVSATGEGVSCTPVSPSVSCKDSCCCQSALTSFYMFILYECLEKKTTAVQVVEQRWRITY

SEQ ID NO: 64257 - protein, 144 aa, Zea Mays
MSSIHRKEACPPGSIFGSDRPPSGLSSINEVSKEYFLKTVSNIVGDKLLKQAASQYQMQAQRSPQTNPSNYSLSGQVSGQQTAPSGSVTGDEQKGYPWAHTIPMRQAIASTRPPQFRPSSSGQMRSNTASRAATTNIFTSVWGK

SEQ ID NO: 64258 - protein, 1009 aa, Zea Mays
MATQPPSTATAAVDLYETASQPDAPAAGDAYTFLEFNTQGDDFDYPDFPELSQPPPRSTPLTSSIPGAGTSSSSWPAPPPPPSDAASPEPDLTSQDVHTPPASSSSPSPRSASKARPSAAADGLASGVVALNFEDPVGTGAVEDGYDYSKGDFVEHACRYCGIHNPACVARCNVPSCRKWFCNSRGNTSGSHIVNHLVRAKHKEVCLHKDSPLGETILECYNCGCRNVFLLGFISAKAENVVVLLCREPCLSVNALKDMNWDLSQWCPLIDDRCFLSWLVKVPSEQEQLRARQISAQQINKVEELWKTNPDASLEDLEKPGVDDEPQPVVLKYEDAYQYQNVFAPLIKLEADYDKMMKESQSKDNVTVRWDIGLNKKRVAYFVFPKEDNELRLVPGDELRLRYPGDSSHPTWQSVGHVIKLTAQEEVALELRASQGVPTELNVGFSVDFVWKSTSFDRMQGAMKTFAVDETSVSGYIYHHLLGHEVEHQIIRNTLPRRFGAPGLPELNASQVLAVKSVLQKPVSLIQGPPGTGKTVTSAAIVYHMAKQGQGQVLVCAPSNVAVDQLAEKISSTGLKVVRLCAKSREAVSSPVEHLTLHYQVRHLDTSEKSELHKLQQLKDEQGELSSSDEKKYKALKRATEREILQSADVICCTCVGAGDPRLSNFRFRQVLIDESTQATEPECLIPLVLGVKQVVLVGDHCQLGPVIMCKKAARAGLAQSLFERLVILGVKPFRLQVQYRMHPCLSEFPSNCFYEGTLQNGVTVNERQSSGIDFPWPVPNRPMFFYVQMGQEEISASGTSYLNRTEAANVEKIVTTFLRSGVVPSQIGVITPYEGQRAYIVNYMARNGSLRQQLYKEIEVASVDSFQGREKDYIILSCVRSNEHQGIGFLNDPRRLNVALTRARYGIVILGNPKVLSKQPLWNSLLTHYKEHECLVEGPLNNLKQSMVQFQKPKKIYNDRRLFLGGGQGVMHGTNFGAGASSQAADKRSGRGKGTYTLHVHVVLVLHI

SEQ ID NO: 64259 - protein, 696 aa, Zea Mays
MRKRMESDDDLIEEAKLRTVWYKGDADRAPSSSSKSWAQQAEEAYNLQLALALRLCSEASAAADPNFLDSSIAAADHLQPIASPQSLSHRFWVNGCLSYSDKVSDGFYFIQGMDPFIWTLCNDLHDGGRVPTIESLKAVNPTDSAIEVVIVDKVADYDLRQLISMAIDVSLNRTDSKEIATRLAAVVSTKMGGSVAATEEHELGPRWRDSVGFLKISSGSVVLPIGKLSVGFCCHRALLFKTLADSINLPCRIVKGCKYCKAGAATSCLVRFGHDRECLIDLIGNPGFLSEPDSLLNGLSSISVSSPLRPPKHDSADNSDNFKLFAKKYFLDCQSLNLMFSDPAAGTVIDLDEVMGSNLGLNSSHATNSDCQATFTHLKAGTRRSSQDGSFIMQRSSQEDTQSGLSDPFSDMSLEIEDLIIPWSELVLKEKIGAGSFGTVHRADWNGSDVAVKILMEQDFHPERLKEFLREVAIMRSLRHPNIVLLMGAVTQPPNLSIVTEYLSRGSLYRLLHRHAARENLEERRRLSMAFDVAKGMNYLHKRNPPIVHRDLKSPNLLVDKKYTVKVCDFGLSRLKANTFLSSKTAAGTPEWMAPEVLRDEPSNEKSDVYSFGVILWELMTLQQPWSNLNPAQVVAAVGFKGQRLEIPSSVDPKVAAVIESCWVREPWRRPSFASIMESLKLLIKTLPPNQLLEEN

SEQ ID NO: 64260 - protein, 353 aa, Zea Mays
MMAASGAYAAQLPAVPEWLNKGDNAWQLTAATLVGIQSMPGLVVLYGSIVKKKWAVNSAFMALYAYASSLLVWVLAGFRMAFGERLLPFWGKAGVALSQGYLVRRASLSATAHGATPRTEPLYPEATLVLFQFEFAAITLVLLAGSVLGRMNIKAWMAFTPLWLLFSYTVGAFSIWGGGFLYHWGVIDYSGGYVIHLSSGIAGFTAAYWVGPRLKSDRERFSPNNILLMIAGGGLLWMGWAGFNGGAPYAANIAASVAVLNTNVSAATSLLTWTCLDVIFFGKPSVIGAVQGMMTGLVCITPGAGKKEPPVSPSRTAFNFPSPYRTSQKLNIFISRVASSAPCVMTDETTFCC

SEQ ID NO: 64261 - protein, 68 aa, Zea Mays
MKLEMVVLLIQALEKVEDVSTIGNILAEVVQGVGHVLHLATVVVDIELALLEDLELGVEVENTSLVCC

SEQ ID NO: 64262 - protein, 475 aa, Zea Mays
MATRISTVFASMREFPRVHYRIAKTIDASTMTTLRDLVPTKLAASVWNCLAKYKTTIPEFPQTETCELLIVDRSIDQIAPIIHEWTYDAMCHDLLCMDGNKYVHEVPTKNGSATEKKEVLLEDHDPVWLELRHAHIADASERLHDKMTNFISKNKAAQLHQARTDGELSTRDLQKMVQALPQYSDQIDKLSLHVEIAGKLNNIIREQCLRDVGQLEQDLVFGDAGTKELINFLRTQLVVSRENKLRLLMIYAALNPEKFESDKGAKLMQLAGLSADDMIAVNNMRCLCGPDTKKSSVGGFTLKFDVHKKKHTNRKERTGEESTWALSRFYPILEQLIENLSKGELPKDEYNCMNDPSPTVHGLPTSSSARTSPAHSMRSRRTGGTWARPRGSDDGYSSDSVLKHASSDFRKLGQRIFVFVIGGATRSELRAAHKLSSKLKRDIILGSSSLDDPPQFITKLKLMSVEELTLDDLQL

SEQ ID NO: 64263 - protein, 329 aa, Zea Mays
MSAAAADWLPSASVTASGRPVLSAGEVERNLVPLVDLEPEENPHLAPLRACLLALTSHRLIFLHEPSRSARGLPLATVVHAYPPHRRHNHNPLRSLFSSSSSSSSQHHRIRLQISMPSVRSEVIAIVVTCKADVDVFFGRLLEAIRARAWEVAPAAAPSSSTPVADVPAENVGIRMPVVGVSGILRMEQESWESAGQNLQDAFQDLNALMGKAKEMMQLAEKMRLKLLMNSSTESNSNDEEMGSKQDMQDLLLSVGIVSPVTKETAGALYHQQLSLQLADFVRIPLEKAGGMMALVDVYCLFNRARGTELISPEDLLQACSLWEKVDVC

SEQ ID NO: 64264 - protein, 158 aa, Zea Mays
MYFNEHTCDTAAWEPAAAAAASSGVPLDDLSRSRLQAVLGQGQQGARALLLDERGVQEEHERRLLVSSLACVLGGQQQQSPAGSGTTTAVDPAVNVGQEQEPPPPRARTPAAVDAAGEMPRIIGVDVAGLDVMDYDVTDALCLAHSYDDLPDDGFPFC

SEQ ID NO: 64265 - protein, 315 aa, Zea Mays
MELVLTCCDSQELDFLNEAKNSERCLNNFRKLSPQIAGSIYAPKVYWNLSTSRILTMEFMDAKEVTDVSGIKSIGVHPVDVSNLVSKAFAEMIFKHGFVHCDPHAANMMVRPMPQDSRKLFGWKRPQLVLLDHGLYKELDYNTRISYASLWKALVFADAKAIKENSAKLGAGEDLHALFAGVLTMRPWKRVIDPSPDHLVLGKNTDYSELQNYASLYFTEISELLRRLPRVILLMLKTNDCLRAVSHALVGGSSLESFMIIGRVSSEAVLDAKRMNRRSFLDGLKIWLEEALLEARFFTLKLMLCVMQLRKLLPG

SEQ ID NO: 64266 - protein, 561 aa, Zea Mays
MASIPPPSSSVAALTRQPAQFLKWCSVSKETKASVCSFLATNSNSTRVKSVGLRVALSFKNDGGYPADGFSGNGNTLLPKSTSVRGEDHPVADPVLPMDSMMTPEILSANLALVMDKFSDDDTDTELDLDSPTEGFASIPDAIEDVRQGKLVIVVDDESRENEGDLIMAASLVTPEAMAFIVRHGTGIVCVSMKEDDLERLSLPLMVTTKENEEKLCTAFTVTVDAKEGTTTGVSAKDRAKTVMTLASPDSRPEDFNRPGHIFPLKYREGGVLKRAGHTEASVDLAMLAGLPPVAVLCEIVDDADGSMARLPKLRVFAERENLKIISIADLIRYRRKRDRLVERASVARLPSQWGNGHGYCYRSAIDGIEHLAMVKGDIGDGQDILVRVHSECLTGDIFRSARCDCGDQLAMAIEMIEKAGRGVIVYLRGHEGRGIGLGHKLRAYNLQDDGRDTVEANEELGLPVDSREYGIGAQILRDLGVRSMKLMTNSPAKYSGLKGYGLSIAGRVPLVTPITSENPQILCPIREHGRATEDGEELVKQGYIPDLGILVFSCGRCTSC

SEQ ID NO: 64267 - protein, 307 aa, Zea Mays
MHQLHFVTLNKKQDNLLFGTLTRMLHLVLAKLEASSLDKWLLINLQSTAEFSSHMLNRDTWGNDAVAQLIRSNFIFWQVYYDTSEGRKVCTYYHLVSMPAILLIDPVTGQKMHAWNGMVHPDRLLEDLLPYLDKGPKEHHAAQPQKRPRKVDPEASTGKQGKIAVEDEDEELARAVAASLEESKEVIEASDASDDMVEAEPEEENEPTLNTKPDYPPLPEEPTGSRDLLCRVAIRLPNNRRIQRNFLHTDPIKLLWSFCAPQVEDGERRAFHFVQAIPGASQKLELGSDLTFKEAGLANSMINLLLD

SEQ ID NO: 64268 - protein, 57 aa, Zea Mays
MILHTLIEEPRGDRSMENCDATMFTGSEPSVSITVKKLGHGEEKNRTAWSPLLSILR

SEQ ID NO: 64269 - protein, 213 aa, Zea Mays
MAAAAAETQMGDGAPPPGALYSFGTPWPELNQGLTYTDTFRCADADAATTLIEFYSTNHKSSAPLPGWIKRIRNGQITVDGEVVTDPDMTLVDGSKLVYHRFPWQEPFAPYLLEVLYEDDDMVALNKPSGLQVLPKGLFQQRTVLAQLQLKDWKMASSCRFKRKDVQSHPVPVHRLGRGTSGLLLCAKTKVAKVRLASYFAEGAINAAKKRVQ

SEQ ID NO: 64270 - protein, 126 aa, Zea Mays
MRPLRSVQSQLPALLARAASGSLARCAPISLSCGSLASSSAFPSQVCSSAAVLAPARPCALAFAMATAPWSSARSALLAPCARVQPKFPASARRSELLARIPPARQPCAQLHLVDGAVEFCAPFLC

SEQ ID NO: 64271 - protein, 691 aa, Zea Mays
MPPLAFLRRYLPARLLARACDGGVRGSPGVARDEEAGGSGGLSGRSAGAPSGECYACTQPGVPAFHSTACDQVHSPDWDADAGSSLVPVQAQQQAQPAAAAAQHAARWLFGPVLDPRSKRVQRWNRWILLGRAAALALDPLFFYALSIGRAGRPCLYLDAGLAAAVTALRTCADVAHLAHVLLQFRLAYVSRESLVVGCGKLVWDARAIAAHYARSVKGLCFDLFVILPIPQVYHSIHIMRKMQKVTGYIFGSIWWGFGLNLFAYFIASHIAGGCWYVLAIQRIASCLQEECKKNNSCDLISLACSKEICFHPPWSSNVNGFACDTNMTSFSQRNVSTCLSGKGSFAYGIYLGALPVISSNSLAVKILYPIFWGLMTLSTFGNDLAPTSNGIEVIFSIINVLSGLMLFTLLIGNIQVFLHAVLARKRKMQLRFRDMEWWMRRRQLPSRLRQRVRKYERERWAAVTGDEEMEMIKDLPEGLRRDIKRYLCLELVKQVPLFHGMDDLILDNICDRLRPLVFSSGEKVIREGDPVQRMVFILQGKLRSTQPLTKGVVATCMLGAGNFLGDELLSWCLRRPFVDRLPASSATFECVEAAQAFCLDAPDLRFITEHFRYKFANEKLRRTARYYSSNWRTWAAVNIQLAWRRYRARASTDLAAMAAPPLAGGPDDGDRRLRHYAAMFMSLRPHDHLE

SEQ ID NO: 64272 - protein, 3527 aa, Zea Mays
MAAAAAAMAAHRASFPLRLQQILAGSRAVSPAIKIESEPPANIKAFIDRVVNIPLHDIAIPLSGFCWEFNKGNFHHWRPLFIHFDTYFKTYISSRKDLLLSDDMTEADPMPKNAILKILRVMQIILENCQNRSSFTGLAHLKLLLASSDPEIVVAALETLVALVKINPSKLHMNGKLISCGPINTHLLSLAQGWGSKEEGLGIYSCVVANEGNHQGGLSLFPVDLENKYGGTQHRLGSTLHFEYNLGPAQYPGQTSDKGKSSNLCVIHIPDMHLQKEDDLSILKQCVDKFNVPPEHRFALLTRIRYARAFNSARTCRIYSRISLLSFIVLVQSSDAHDELTYFFTNEPEYINELIRLVRSEDSVPGSIRALAMLALGAQLAAYASSHERARILSGSSIISAGGNRMVLLSVLQKAISSLNSLNDTSSPLIVDALLQFFLLHVLSSSSSGTTVRGSGMVPPLLPLLRDNDPSHMHLVCLAVKTLQKLMEYSSPAVSLFKDLGGVELLSQRLHVEVQRVIGTADGHNSMVTDAVKSDDNHMYSQKRLIKALLKALGSATYSPGNPARSQSSQDNSLPVSLSLIFQNVDKFGGDIYFSAVTVMSEIIHKDPTCFITLKELGVPDAFISSVTAGVIPSCKALICVPNGLGAICLNNQGLEAVRETSALRFLVDTFTSRKYLIPMNEGVVLLANAVEELLRHVQSLRSIGVDIIIEIINKLSSSQEYKNNETATLQEKTDMETDVEGRDLVSAMDSSVDGSNDEQFSHLSIFHVMVLVHRTMENSETCRLFVEKGGLHALLTLLLRPSITQSSGGMPIALHSTMVFKGFTQHHSTPLARAFCSSLKEHLKSALKELDKVSNSFDMTKIEKGAIPSLFVVEFLLFLAASKDNRWMNALLSEFGDASREVLEDVGQVHREVLWKISLFEKNKIVAETSSSSSTSEAQQPDMSASDIGDSRYTSFRQYLDPILRRRGSGWNIESQVSDLINMYRDIGRAASDSQRVGSDRYSSLGLPSSSQDQFSSSSDANASTRSEEDKKKSEHSSCFDMMRSLSYHINHLFLELGKAMLFASRRENSPVNLSPAVISVANNIASIVLEHLNFEGHSVSFERDMTVTTKCRYLGKVVEFVDGMLLDRPESCNSIMVNSFYCRGVIQAILTTFQATSELLFTMSRPPSSPMETDSKTGKDGKEMDSSWIYGPLTSYGAIMDHLVTSSFILSSSTRQLLEQPIFNGSVRFPQDAETFMKLLQSKVLKTVLPIWAHPQFPECNIELISSVMSIMRHVCSGVEVKDTVGNGGARLAGPPPDESAISLIVEMGFSRARAEEALRQVGTNSVEIATDWLFAHPEEPQEEDDELARALAMSLGNSVTPAQEGDSRSNDLELEEATVQPPPIDEMLRSCLQLLQRKEALAFSVRDMLVTISSQNDGQNRVKVLTYLIDNLKQCVVASEPSNDTALSALLHVLALILHGDTAAREVASKAGLVKVALDLLCSWEVQIRESSMIEVPNWVISCFLSVDQMLQLEPKLPDVTELHVLKRDNSNIKTSLVIDDSKRKDSESLPNVGLLDMEDQFQLLKICCKCIGKQLPSASMHAILQLSATLTKVHAAAICFLESGGLNALLSLPTSSLFSGFNNMASTIIRHILEDPHTLQQAMELEIRHSLVTAANRHANPRVTPRNFIQNLAFVVYRDPVIFMKAAQSVCQIEMVGDRPYVVLLKDREKERIKEKDKDKSVDKDKATVAVTKVVSGDTAAGSPANSHGKQSDLNSRNVKSHRKPPQSFVTVIEHLLDLLMSFVPPPRPEDQVDVSGTALSSDMDIDCSSAKGKGKAVSVPPEESKHAIQESTASLAKTAFFLKLLTDVLLTYASSIHVVLRHDAELSNMHGPNRTSARLTSGGIFNHILQHFLPHATRQKKERKNDGDWMYKLATRANQFLVASSIRSAEARKRIFSEICSIFLDFTDSSAGYNAPVPRMNVYVDLLNDILSARSPTGSSLSAESAVIFVEAGLVHSLSTMLQVLDLDHPDSAKIVTAVVKALELVSKEHIHSADNAKGVNSSKIASDSNNVNSSSNRFQALDMTSQPTEMVTDHRETFNAVRTSQISDSVADEMDHDRDMDGGFARDGEDDFMHEMAEDGTGDGSTMEIRIEIPRNREDDMAPAADDTDEDISAEDGEDDEDEDEENNNLEEDDAHRMSHPDTDQEDREMDEEEFDEDLLEEDDEDEDEEGVILRLEEGINGINVLDHVEVFGGSNNLSGDTLRVMPLDIFGTRRQGRSTSIYNLLGRASDHGVLDHPLLEEPSSTTNFSDQGHPENLVEMAFSDRNHESSSSRLDAIFRSLRSGRNGHRFNMWLDDGPQRNGSAAPAVPEGIEELLISHLRRPTPQPDGQRTPVGGAQENDQPNHGSDAEAREVAPAQQNENSESTLNPLDLSECAGPAPPDSDALQRDVSNASELATEMQYERSDAITRDVEAVSQASSGSGATLGESLRSLEVEIGSVEGHDDGDRHGTSGTSERLPLGDIQAAARSRRPSGNAVPVSSRDMSLESVSEVPQNPDQEPDQNASEGNQEPTRAAGADSIDPTFLEALPEDLRAEVLSSRQNQVTQTSNDQPQDDGDIDPEFLAALPPDIREEVLAQQRTQRMQQQSQELEGQPVEMDAVSIIATFPSEIREEVLLTSPDTLLATLTPALVAEANMLRERFAHRYHSSSLFGMNSRNRRGESSRRDIMAAGLDRNTGDPSRSTSKPIETEGAPLVDEDGLKALIRLLRVVQPLYKGQLQKLLVNLCTHRGSRQALVQILVDMLMLDLQGFSKKSIDAPEPPFRLYGCHANIAYSRPQSSDGLPPLVSRRVLETLTNLARSHPNVAKLLLFLEFPCPSRCFPEAHDHRHGKAVLLDDGEEQKTFALVLLLNLLDQPLYMRSVAHLEQLLNLLDVVMHNAENEIKQAKLEASSEKPSAPDNAVQDGKNNSDISVSYGSELNPEDGSKAPAVDNRSNLQAVLRSLPQPELRLLCSLLAHDGLSDSAYLLVGEVLKKIVALAPFFCCHFINELARSMQNLTLRAMKELHLYENSEKALLSSSSANGTAVLRVVQALSSLVNTLQERKDPEQPAEKDHSDAVSQISEINTALDSLWLELSNCISKIESSSEYASNLSPASASAAMLTTGVAPPLPAGTQNLLPYIESFFVTCEKLRPGQPDAVQDASTSDMEDASTSSGGQRSSACQASLDEKQNAFVKFSEKHRRLLNAFIRQNSGLLEKSFSLMLKIPRLIDFDNKRAYFRSKIKHQYDHHHHSPVRISVRRPYILEDSYNQLRMRSPQDLKGRLTVQFQGEEGIDAGGLTREWYQSISRVIVDKSALLFTTVGNDLTFQPNPNSVYQTEHLSYFKFVGRVVGKALFDGQLLDAHFTRSFYKHILGVKVTYHDIEAIDPSYYKNLKWMLENDISDVLDLTFSMDADEEKLILYEKAEVTDCELIPGGRNIRVTEENKHEYVDRVAEHRLTTAIRPQINAFLEGFNELIPRELISIFNDKELELLISGLPDIDS

SEQ ID NO: 64273 - protein, 654 aa, Zea Mays
MLCLSSPPSRARQHGGSRGIVPAGGSGATPRVTIFSAPRPPPEGSPARQELAARSWLALPWNVSVVLLGAGPESVALAARLGHRVTADAAIDFAFTGTPFFHSMVARAQAAADTDVCVLVDAEIVLLPEIVNALDRFSKVDGDWFLVSLSRNVTDPRYQLADSGSHWVQADGKEVSFTEEIPAEWSSSEGSDRGLIMAWNNPSSALHAGVLPSFLYGRGAQNWWLAHEVLSSEMRLFFDASSLVLGLYPESISAMQHVMASSKNGRLPSVSWEYGVNHHLAAVYGSYCCRSPARRFPMLHRVVKQSEDYMLSKVDTLVSSDFFISKQGNAHGVDSLRKKQNVSLSGYLHGCSSETSAPDLPYSLSMLLDLVADENGSVVLGVAGKSYRDMLMSWACRLRRLRVTNFLVCALDHETYEFSILQGLPVFRDPLSPTNVSFDDCHFGTKCFQQVTKVKSRIVLEILRLGYNVLLSDVDVYWFGNPMPLLYSLGLATFGAQSDEYNETGPINLPRRLNSGFYFARSDNATIIAMEMIVKHAASSGLSEQPSFYDVLCGENGTNRIGEDRCLEPNTNLTVVFLDRDLFPNGAYKGLWEKRDVRATCKELGCFIIHNNWINKRRKKVHRQMVSGLWDYDPTSRQCLQEWSAQNDGAIPFV

SEQ ID NO: 64274 - protein, 542 aa, Zea Mays
MTKLTSELLRPVVPAAALDEAALLRYLVANVPGFPGPAPALSLTQFGHGQSNPTYCIHASAPGGGQPRRYVLRKKPPGAILQSAHAVEREYQVLKALGDHTDVPVPKVYCLCTDASVIGTPFYIMEYLEGIIYPDSALPGVTPSKRRAIYLSTAKTLAAIHKVDINAIGLQKYGRRDNYCKRQVERWERQYLASTGEGKPARYQRMLDLARWLKEHVPEEDSSPGPGTGLVHGDYRPDNLVFHPTEDRVIGVIDWELSTLGNQMCDVAYSCLPYIIDAAPSARTSYGGFQDTGIPDGIPQLEEYLSIYCSFAARPWPAANWKFYIAFSLFRGASIYAGVYHRWTMGNASGGERAKFAGRVANAMIDCAWDFINRVNVLQELPSKGSQVLGASWQEFHREEESSTSEKNQGKFVPSEKVMQLRKKLIKFIEDHIYPMEAEFYKHAQSTSRWTIHPEEENLKALAKKEGLWNLFIPLDSAARARKLLFEDHSQISLGSSNNLLLGAGLTNLEYGYLCEIMGRSVWAPQIFNCGAPDTGPVEVWH

SEQ ID NO: 64275 - protein, 204 aa, Zea Mays
MLRAVLKDNLRLWEECLPHIEFAYNRSIHSTTKLSSFMVVYGFNPRAPIDLLPLPTSEIVNLDATQRSEFILKLHETTKLQIEKMNEKYRIAANKGRKEMKLEPGDLVWVHLRKDRFSDLRKSKLMPRAAGPYKVLAKINDNAYTLELPPDFGVSPTFNISDLKPYMGDEDEIESRTNPIQEREDDEDITSIHTMNGPITRSRA

SEQ ID NO: 64276 - protein, 205 aa, Zea Mays
MSSLVRSFGSLYSQKLRSTTRLGSATAAPPRFQALVRSGFSGSSHGGDVRRPPARPSQHQSQDKERTPFFILARLAVGSILAAAAPMLHSRWASFLLIQSRAKSPVPRAAKLCTDAKFNSAPMPSGEVDMVKDTAEVVAEAVEDAATVAEKVSSEVAEQLPENGRLRTAVVLLEHASKEVAEEAHLAQNIIHKVIFLWEVTHENG

SEQ ID NO: 64277 - protein, 231 aa, Zea Mays
MASFFRDARLPQQRVVEGVPFPAVLVPSARAGSCAGGVDKFLAAVRCERASRLEPLVRDAGALLLRGFPATTAADFDRAVDAFGYEELPIVGSVAPRTNVVGRVFTANDSPPDQKIPFHHEMAQVPTFPSKLFFFCEVEPKSGGETPVVPSHYVYKRMKEKFPGFVEKLEKDMIVYTRVLGEGDNPSSSIGRGWQSTFLTKDKAVAEERMLLPDQSKGVLEWRRKDLFAQV

SEQ ID NO: 64278 - protein, 400 aa, Zea Mays
MDFSAGSYFSSWPINSASESYSLADGSAESYGEGSMPPSTYFMTARSDHNLNFSVHEQDSTMLPNEQLTYAGAGQIDLLPAETLSRDKLPENLLELQGLQNISNLQSNLVAPGVFQHNLTPGVFHPQLNTPGLSELPHALSSSIDSNGSEVSAFLADLNAVSSAPTLCSTFQNASSFMEPVNLEAFSIQGAQSDCVLNRTSHPNGNISVCDSAALASLHDSKEFISGSLPSFASVQETNLAASGFKTQKQEQNAVCNIPTFTARNQMSVAAMQGALVPQKIPSRINDNKSEGPVSHPSDVQTQPNSAVNGVGVKPRVRARRGQATDPHSIAERLRREKISDRMKNLQDLVPNSNKVLFLEGGGGLTCLVHTAGIKFGHGTNYQSFATYIRNKNMYFLVVA

SEQ ID NO: 64279 - protein, 138 aa, Zea Mays
MLQKRIEEREIDRRTMYQARALERVESRERCRDLPVWWRYARAGARRRTKLARGRTGRSRLARGWVRCRGGRPPGEPSRYPISAMAIRPDQCSILHLTIVGKPPAPLPPSKAARAPPPSPPTPTLLPRPPRTATAPSI

SEQ ID NO: 64280 - protein, 760 aa, Zea Mays
MRWMSARKTSSSMPPTAVTLHPSATSTRSPSTGMSGGLPGATRARSSASTKSARSGRPQNRRGDPARMMIIWRSTPSTHSPPRRCKGSSSTIEEEVKEELSAEELFEKKKAQLAELGMSMLEDPESNIRSLNDMLSISNDRDQKVVKLGVMSLLAVFKDVIPSYRIRQLTEKELAVEVSKEVKKTRYYEYTLIRCYKAYLQKLISLEKQPYFYTVAVRCMCALLDTAPHFNFRESLLASVVKNLSSSDDVVRKMCCEAIRSLFINEGKHRGEATIEAVRLIADHVKLNDCQLHPDSIEVFLSLRFDEDIGKDEIQEEKVKPKRNKRWQKNQEVPKQLPVNDKKKTRQELISKARKEVDADLRAVSFTLDPKERKGIQKETLSALFETYFRILKHSMAASNSRTKVNNVSPGGSHPLLTPCLEGLGKFSHLIDLDFMGELISCLKKLSGYSDRQDEIPNDNALSVSERLQCCIVVFKVWRSNLEALNVDLQDFFVQLYNLILEYRPDRDHGEVLADALKTLLWEGRQHDMLRAAAFIKRLATFALSFGSAEAIAALVTLKHLLQKNSKCRNMLENDSGGGSLSCLVAKYNPEATDPYLSGALASVLWELSLLEKHYDISVSSMASNILSMANLNPTQNPVPILNVNPLEAYRDLSLERELSKPASKALPLNLKRKRRAKEFVALSPDVLQKADCSVDKDELEEKLQSHFSVLRGISENERLRAELNHTLSSINMYKEYKKQKRKNMKVKTGRKKNSKALAV

SEQ ID NO: 64281 - protein, 172 aa, Zea Mays
MRGILFGPRRQPPPLPLFPAAKRSSAPANLLFARLYRFLPASPILRLLLLLALLSLIPPAFFHLRLRRFHQMRERKCGWIARPPMVCAHGGDSTNAFPNSMDAFRMALDARVDCVEVDVSRSYDGVLFALHDRDLQKMSGNSTAKVGHWTTDEFFVDKSTKDEVSVVKKSPK

SEQ ID NO: 64282 - protein, 635 aa, Zea Mays
MIDDEANFGNILDASEEVQVTAKFRPKERPKPRKTALSSRSAAPNPTEETGDRKVGTFNQVNSSKELTCQERTSLMCPSTESVDIIAGSQGILDTPLEDALAVPQGSLPGASAAGRTSQYGEHNDDPSKLATHQENLVVSDINVPPNSSCGKAIDDIVEFEDMCDVQIEEERVTKFQPKAQTKLLKEIAKSRKTNQKVETSTVDVVTQNGKGNNIQTRLHGNQVQDPKSHESVQIPDSEELLATDNSKGCNLAKLNNVLEESVQEETIAKFRSDLQPKPRKASSHVAAIKINVAAVAPIVGVCDSNNDMYREPKDQETITGPVVWSPQAVHADVDLDNHNEPINPPIDGTQSMIGEVPSTAFTGREKGKSKSVSFALSDASGVATPIDTNSEMGNIGDSCSDKLTDENLSNSSRHIAEKHSITKDQYSNGQDHEREPLDHAVQQQPKSDVGERASSMKRRCRKKVQKVGTPNHTVDDYFGEDCVEPSLAEEDNNTGDDYTTGNNHKARKKSRGGVEESQQQKVQKNKSKVSSRGRKRTLKDETAEKPEKKLTHRIRQRITKEVKALLETPREQIKPMKLSASHLRLLQEARERVNPKGIPSGPSSNTRYTSFFLLFLYACYYLTKLDLGLLVGHK

SEQ ID NO: 64283 - protein, 348 aa, Zea Mays
MYEKKQGKDSFWYPYIKELDRHRGRGQLAVESPLLWTESELDYLSGSPLKDEVVARDEAIRREYNELDTLWFMAGSLFQQYPFDIPTEAFPFEIFKQAFVAVQSCVVHLQKVSLARRFALVPLGPPLLTYKSNCKAMLTVDGESVRLVVDRPYKAGEPIIIWCGPQTNSRLVLNYGFVDENNPFDRISIEASLNTEDPQYQEKRMVAQRNGKHAIQNFNVYVGKEKQTVAEMLPYLRLGYISDPDEMQSILSSEGDTCPVSPCTERAVLDQLGGYLESRLAGYPTTLNEDEAMLADGSLEPKQEVATRLVRLEKKMLHACLQATNEFITDLPDHTVSPCPAQYAPEMK

SEQ ID NO: 64284 - protein, 117 aa, Zea Mays
MARPAPRHAASPSIQAPPNAAACRLPPAAETLALVDRRGNASRQRPPRRRSSHDTGPRACAAAPARSRSTSRAPAAATRGPEAIFREDVGHAAAETYLVTGLAFTRLGYLGAGYRWI

SEQ ID NO: 64285 - protein, 262 aa, Zea Mays
MEMRARESVSMSKDLTGEITPFATALHDVFLHSHCSSCFTKLLPQTPCVMSCMTCCSLRYCCSECLRADSVVHVSSGECCFFVDHLKRASPSYVTEGTSDLRAALRLLCVLEIHGLVSPDSINHYSRIGGLSASGIEEALKEGEVIAERILEGSLLMSSARKSRAQTCVIFSDRLKLEKMALWAVIINSVEVQLSEGLALGVAVYGPSFSWFNHSCFPSASYRFVLAPRNEDCASQKSKSSVVPASKGVAADVVKENNDHFV

SEQ ID NO: 64286 - protein, 195 aa, Zea Mays
MTSRIICGLFLYVKSPTLIPPCLTSSLGSPHSLVAPSGASSVTTGASSITMRPVTSSSLVASISACLAPTRLPRTAGLIRTTNDVVRSLLFQASLPARYWAEALATATYLLNRLPTKAVAHPTPYFALFGIHPSYDHLRVFGCAYYPNLASTAPHKLAPRSTRCVFLGYSPDHKGYRCLDLASHRVLISRHFCSG

SEQ ID NO: 64287 - protein, 222 aa, Zea Mays
MLTGSLPFDDQNMVVLYQKILKGNAHIPKWLSQGAQDLLRKILDPNPITRVDVDGIRAHDWFKQGYAPSAPFNDDEEDINVDEEDSLNMTENGIQDKIAINQINAFQLIGMSSCLDLSGFFEKEDASERKIRFASNYPPAYLFEKIESIVRKMGFQVHKSNGKVFEINESLYVVELKKSSGDCSLYRKLCETLSEDLGTCKSQQFLKQDSIRQEIGRHNSSF

SEQ ID NO: 64288 - protein, 1945 aa, Zea Mays
MLPMQKVERPQDYINYIIDLREYDVPYHVRFAIDNDVRSGQWYNVNVSGSDVLLQRREDLLQRAEVHVCAFDIETTKLPLKFPDAEYDNVMMISYMIDGQGYLIINRECVGEDIDDLEYTPKPEFEGYFRVKNVQTELDLLKAWFSHMQEVKPGIYVTYNGDFFDWPFLEKRAAHHGIKMNEEIGFQCDNNQGECRAKFSCHLDCFAWVKRDSYLPQGSQGLKAVTKAKLGYDPLEVNPEDMVRFAMEQPQTMASYSVSDAVATYYLYMTYVHPFIFSLATIIPMSPDEVLRKGSGTLCEMLLMVQAFKASVICPNKHQADLEKFYNNRLLESETYIGGHVECLETGVFRSDLPTKFQLEPLAYEQLIGNLDRDLHYVIAVEGKLDIDSVTNYDEVKDAIEQKLVALRDHPIREERPLIYHLDVAAMYPNIILTNRLQPPSIVTDVDCTACDFNRPGKNCLRKLEWVWRGETYMAKKNDYYHIKRQIESELIQSGGIASSKPFLDLSKPEHLLKLKDRLKKYCQKAHKRVVDKPITEVREAGICMRENSFYVDTVRSFRDRRYEYKGLNKTWKGKLAEAKASGNSMKIQEAQDMVVLYDSLQLAHKAGKKLTISYPCVMLNADVARNNTNDQYQTLKDPVNKTYTTHSECSIEFEVDGPYKAMILPASKEEGILIKKRYAVFNEDGTLAELKGFEIKRRGELKLIKVFQAEVFDKFLHGSTLEECYSAVASVANRWLDLLDNQGIDIADSELLDFISESSTMSKSLVDYGEQKSCAVTTAKRLAEFLGDSMVKDKGLHCQYIVAREPQGTPVSERAVPVAIFETDPEIAKHYLRKWFRFSSDANIRSIVDWSYYKQRLSSAIQKIITIPAAMQKISNPVPRVLHPDWLHKKVREKDDRFRQRKLRDIFSPLAKEEGLHNLNRTGDMEDLLISNKDLRKNPSHGLDIDKENNPNGASVGSGLNISKKQQNCMTGLNVPCTSQIQNAASYETVDKGTDYQGWLDAKKRKWKYVREQKKRRRLGAAATFDDPNALLSARHANQLPVNSRNRSTFFQKQELALFRSHWQIIQLASSTVPGHFFAWVVAEGIMFKIPINVPRTFYLNSKAPVTEEFPGRRVKKILPHGRPCFNLIEVVTTEEQFRAEGKKLAAHLAEPDVEGIYETKIPPELNAVLQIGCVCKVDKSAKRRSIQDGWDLAELQMKTTAECSYLEQTFSFFYLYHSLSEGRAVYVFYFPTSFRIHAVIVNPFRNKEISPSFLEKQFGDACQALGSVPENLSFHVDYQTSIDAGSKYAQRMLLEYRQQHSGPVVGIIECPKLQAIKVAIRALDDLPCVTIPSNARDNNYQALGWQATAGRTSMQRCAASTQWFNERISLAKYAHVPLGNFELDWLLFTADVFFSRALRDQQQVLWISDDGIPDLGGTYEGETCFADEVIQPALTYPGAYRRVSVELKIHHLAVNALLKSSQVDEMEGGSIGSFGNDVPPGSNATETDFDDASLCIPAFQVLKQLIQRCISDAVSSGNVFADAILQHLYRWLCSPRSKLHDPALHRLLHNVMKKVFALLLAELRKLGANVIFANFSKIIIDTGKVDLSSAHAYCDSLLRTLQTRDLFEWIELEPLHFWHSLLFMDQYNYGGIQAKTQNVDSSDGDNDIDIVSSWNMAEDLPKDTQDHFVLIVSEFLYIPWKFMKEQVAAQATIRDDTSCTPSVTIMAAENLEGQVIEHLRDKISNYFADKLLRTVSDILHHFKGKSKHESDEPAKSDPHTHKGDAALEFIKHICAVLALDQNVQHDILRMRKNLLKLVRVKEFAPEAQFQDPCASFTLPNVICSYCNDCRDLDLCRDSALQGQEWRCAVPQCGQPYHREQMENALLQVVRQRERLYHLQDLVCVRCRQVKAAHLSEQCSCGGSFRCKEEPSYFLSKMRVFLKVAVSQKFPLLQDCVQWILEAR

SEQ ID NO: 64289 - protein, 1619 aa, Zea Mays
MHGWRGAEGCDVRRQRLVRLMWPAARVEAEAPPPPAQGPATSPSGSSVPPSRTTSLPPESAAQQECIDPPRPVSPGSFVKDGREIRVGDCALFRAVDVPPFIGLIRWIEKKEDGHPKLRVSWLYRPTDVKLNKGIQLSAAPNEIFYSFHQDEASAVSLLHPCKVAFLRKGVELPAGISSFVCWRVYDIDNKCLWWLTDKDYINERQEEVNRLLHRTRLEMRAALQSGGRSPKRLNGPSASQQLKTASVGTQNGGLSKGKKRDRSEQGVDPAKRDRDRLLKVDDSEPGIFNLDDIKSEIAKITEKDGLPNAEAVEKLVHLMQLDRTEQKIDLSGRVILADVIAATENPDCLGRFVQSRGLPVLDSWLQEAHKGKSGDGSSPKEADKPIDELLLALLRALAKLPINLSALQSCSIGKSVNHLRSHKNLEIQKKAKCLVENWKKRVDAEMKSNDVKPLVSGQSVSWSGKAGFQEISNAGTKRGGSSENSPKNPVPTLSSSKFLTDKPGGTDAEAKLNPGVSALSNSQHVQPTNVTTNLKDQPCKSTGGTGPELPTVKEEKTSSSSQSPNNSQSISSEPSKDARSSTAASGGASKTSESSSRSHRKANNGLVSGNLKEASVGRSVSLDRSLLQDKSSQTGTASEKGPDMPLDHGNNHRLIVRFPNPGRSPARSASAGSFDDPSVTGGRASSPMVVDRHDQTERKVKGKTENTRPHLASDANTESWHSNDGATGSEEGDKSPCAILDDDNSRTPDDSVKDTHASRVACSSHTNEKGVGETKVGTPFSPMNALIEIKYSEASHSQQAGDDTAMNLLASVAGEISKSELVSPASSPRSSSVKKLARDSDNIGKVKVESDTGPSHPGQADAKKGAMGKEVKIDACLVAKEEQRQTMPSPELPDSKAVVSSAKIEIYEVEAKIANKCNSQHASIDSKGESQDACTAHGKVVDGSIDKDGAMESALGSQCRLVVPSRNSRLVHAGESSLSAADKQAQGLLKSTNHKQLLSVSDNPGAFDRRDSMAGKMDLLAAEVRKTDAVGNSNIVQNEAEKKEHACSSLPDVPKLVVAAASPVGVANVNKEMKESKDSSSESNSHVKSEGVNSQQSEQSAMQSSKKSCDGVSGKEDEKEDHVLSDEGSSLAAHTKSNATAKLDFDLNEGIPGDDGHQSEPTISPVVCSSAINLTGILPFTSPITTGLQPASITVAAPAKGPFVPPENLLRAKPEIGWKGSAATSAFRPAEPRKILEIPAAARDIPVSHAAGKQSRPTLGFDLNVADDQALEEDIPQSSAQTTCSESGNTRSRDGSSRSAGIELDLNRADEVADNGQFAPSASHRVEVPLLSTRSLHGVFSNAGMNSARDFDLNSGPGLDDLGTEPAPKSLPSKSTSSIQFLPQVPVRMNSAAMSNISPWLASASPCPVAIQSFLSTREQPYPIEAAPGAQRIIAPTADAGQFGGDPCRPPVVSTSPAMVFHQPAYQYPGFPFPPSVHLQTPAFSIGSATFNNSASAGVPYFPTVSPSFVGPAGALTPQHLRQYAINLAEGSSSSGRDSNRKWESQGLDLNSGPGSIDLEGKDERVPLPVRQNLIPPPHGFVEDQGRIYQMPVVGTKRKEPDGSWDSERSTYKQLSWQ

SEQ ID NO: 64290 - protein, 1791 aa, Zea Mays
MGAPRELELSDEVEGEEDGTTDFVFRLAGDPIPLLPTDSNPLPLFDLLSPPARPLAVSDRHATVFLAHPSGFIAVRTKELIEASKEAREKGKSSTRCAQDCCVADVPLPGVSLIALSHDESVLAACTHTEIQFFSLASLLTHKDVVPSSSCSLERAVTVKDFKWLNHASAAYIVLSNGGLLCHGNLGEGLKDVMENVDAVDCCKEGNHIAVARGNKLTILSPDFTETCSMSLLFQLWSDGSDSKGTTIKVDSIGWVHGDSIVIGCVRLNEDDNEEGYLVQVIRTEESTFCESPGKTDVYTYNDFFHGIMDDVLPPGAGPNLLLGYLHRWGLMVASNKKSVDEHIALLKWPSAHDDEKTVTYLEMLEDKYSPRIDLQENGDDNVILGFGVENVSLFQKITVPVGPEQKEVAPQHILLCLTGEGKVAVYYLARISDPSDLPHATVSTNEDYGEKHISPATVSEKELTPSVAGSVYKSTLTEHGAEPSSAQTGSNQQESINVKNSSSASKEQETTDNSLFISSNKKPLDTKQVNVTGPPAALRSLALTGNTKPTIFSSFSTEGMNPTGGNAPNELASSLQPSSRSFGNNQTGKEGLDSVQSVGIFGGSQNSNKDGNVYGFKSSLFTSSGSVPAKIGERNEVGFGVPSLQTSYTADRKVFGAPVALSSVPSSSISPAKPSPIGYSSSGFRTANSEAPQSLRGSPPSQQSMGKSHNSRTQAPAEYSRNSKKGTGFDSEQDLSKKFYSINEMTKELDALLAYIEKDGGFRDACITIQQRPLSMFEDGLQNFLQLLQVFKGKVEEQCSKIEDLRNNMFQVSARQTYMKGIVSQSSDNQYWDIWNRQKLSPEFEVKRQNILRANQDLTNQLVELERHFNNLEMNRSSETGRVASNRRAVYSNKTSSSQTQLSSVYSALNSQLAAAEQLSECLSKQISVLNIGSPSRKQGMVTKKLFESIGLAHTTDATKFSGSTPKPVKRFPSVNEHSKGILGSSKGGEPETARRRRESLDMSLASLEPQKTTVKRITQQQRLKISSDLPFRSNKKIFDSQMAAISQEKSSDSSNSSIVESYVSRLRSLSEDVNDKLSGPQQNPLFKWVKESTGSSQTSEQKHFELPGQMKSTAQSSKLTPSSPPSFSYTRMGAQDSINPSSVPSFGTKHTVSKPNTLTFKTTISPKSNANTEPNILPSITAPKTSLSPLSVKTAGESGDLPTLTMKNRQDGQSMPSLGNIKGPGASLQNKGGIFRDLDKSSFNSEHSKPAALHEKTDQLSGVGDAVQNTVKDTSKMAPQPSAFLPAPVTQTNSYSLRPTVSSSATSGAKTSDVLSSSMQKVSPIVPGGTVSSSVPTPAKDSSTGLSQNASKPETLISKVTSTIVSASSTSVISVTESKPSVPPTTGASLPSTHVSAPQTAPTTSESVFTSTGKNVGPNTDTISTDEDDMEEEAPSASAELNLGALGGFGLGSQPSSSPQKSNPFGASFGTSGNKSSGTPFTLTTSPGQLFRPASLSIPSAQPAQPSQSTSSSSFSNSFSSGLTGFGQPAQIGSGQQSAFGKPAQIGAGQHAGFGQTAQIQSGFGQPAQIQSGFGQSAQIGTGQQSGFGKPAQIGAVQSGFGQPAQFAAQQTLGSVLGSFGQPPQLGGIGSGGFGGFSSASTSAGFSSLSSGNAGFAGAASGGGFSAPTASAGGGFAAAATGGGFAALASKSGGFVGAASSGGGFGGASQGGGFGSGGGGFGSFGGNQGAGFSAFGASGAGRPAADFLTQMRKCQQQHRRLVLDSLLVSLQGDQLAKAFMALSSGSMAA

SEQ ID NO: 64291 - protein, 391 aa, Zea Mays
MGTTQISCAGNSGYSISHLSTTHAISFLDIGERQKLSMPLLFLSVTTTVSELSSKRDDEPDNNTEHSETNELASTSGTSDAADGTKEIVQENWLVLLFRELEKQGITLPERFTEDELRRFYVAANGDFSSLLSSVKKTIRWRETFHILTLQELDKWSHLVFWHGFDTMLRPCLVIRLGLACSSIPPCDRPRFGQAVVSQIDHGVVNLTNKEDSRITVLLDCHGISPFRFPMQMMRSFVTVAQENYPNRLGVLFVVRLPPVVRVIAQTFLQVLKPSTKQKLRFEGDSYKKTLAEFLQAVPAFLGGKCSCPRCEKPRNSSVVQAGEGSKNQARLVSVDGGSPVVDFDFDEEEIPSPYSCENAIRAAIICLLMVCIFIAFLAGMNDPASVPPSA

SEQ ID NO: 64292 - protein, 242 aa, Zea Mays
MYANNCPARDTNKCVARFLGRFSFQPLRQNPLFGPSSATLTKMGALVWEKVVHRHQGWRLLSSMWLHAGVIHLVANMLCLLFIGMRLEQQFGYGREDRRDLRALRRGRRRAVVAGRPEPRHRGGLRGALGPAGRHALGAAHQLDHLHQQGGGRGHAPVRGRRQPGARRPAPRRQPGAPRRLPRGLPTRLRRAHAPPLGLDGALRTPRRRALHRQEVPRVPVDPPRRRHHHPPSRVSRTGHPD

SEQ ID NO: 64293 - protein, 125 aa, Zea Mays
MIMNTTQKANLVEQDAKVFVKQAPQFKRWGRKHPFVRYGLPLISLTVFGAVGLAHLIQGSKEVTKEKEDMEWEVVETTKALSRTGPVEGAYKPKKLSLEDELKALQQKVDINSYDYKPIPRPSEK

SEQ ID NO: 64294 - protein, 330 aa, Zea Mays
MSRVNGVTDALSIGPSAGYILFLVIVHILLFFTAYDRSYTLLAIQKVTLLCSACKAPRTDGGDDSQGSSARARQQQHAAVLRSESGEKTLFSGHSSRSPDEMDGNARSAATNQKKPVVADDDLVELLWHNGSVVAQPQAHQRPAPTYDPDRPGTSGLTGEETAAWFPDTLDDALEKDLYTQLWYSTIADAAPQHEGTLPGPTSQPSPSPPVGSSGVESSWAGDICSTFCGSNQVLRTPARIRGKDAALQSELPSNTGAHDGTSSSGGSGSNYGGFGLPSDSVHVQKRKGRCRDDSDSPSEVFLGLLCSSFLEIGMLEWNIIDEEIAGCRV

SEQ ID NO: 64295 - protein, 139 aa, Zea Mays
MFGIFQSFSRTKDMTWRPDLFSDSMAASGIETGTKLYISNLDYGVSNEDIKELFSEVGHLKRFAVHYDGYGRPNGTAEVVFTRRSDAIAALKRYNNVLLDGKAMKIEVIGNDLGLPMTPRINVVGASNGRATRTVVMTL

SEQ ID NO: 64296 - protein, 115 aa, Zea Mays
MSILSVHHPLKSQDKSPQQAITLSCSRESSLKITGKNSLLLDDNADLALVKHVIEGPSLPLLVPVVHLPHASRDQTQGQSNEDLLHHTRALEGGMRNPAACHLLSCLLRSDAKYS

SEQ ID NO: 64297 - protein, 1191 aa, Zea Mays
MEAAFDAYFCAADLDRDGRISGQEAVAFFKGSGLPQPVLAQIWTYADKNRTGFLGREDFCNSLKLVTVAQSGRELTPDIVRSALFGPAAAKIPAPRINVSTAGPQTNSVASPPNATRALGSGQQNPAVRGPQVLPGASSNPQVRPPQPPNANTVPPVQGVASRPPVGGGPSGLNHTSSTTTNLATDWFSGKRSASSLGATSQAPTRGISPQGNLTTAGISAQNSTPLPVYNSHMPGATTPANANSTNVNMMPSQPSVSDSKTLVPLGNGLPSNSTFGVDPFSVTLQAKQESALTPNVPNNLPSSTAPASAAGPHHPPKPMQAGPLQGISSLPSHTSQLPHSQPAPRQQQFNAIPSTPGPVGANIPGGQIPSNPYQSQAPWPKITQVDVRKYMIVFIKVDRDRDGKITGEEARNLFLSWRLPRDILRKVWDLSDQDKDGMLSFKEFCVAVYLMERHREHRPLPDVLPDGIWAEGTSLPSTGQFAGNPSGPPSHASTGFASRGMQGPHHGMLPSSMKPTSRRPLPLDADDTVKAEQQKPKIPVLEEHLVGQLSKEEQGTLDAKFKEASDADKKVQELEKEIQDSREKTEFYRTKMQELILYKSRCENRLNEVSESMSADKRELSVLYQVQSLAAKYDERCKKEKKLEIYNAIVKLQKGDESDEKLQERANKIQSDLEELVKSLNEQCKRYGLRAKPTTLVELPFGWQTGIQETAATWDEEWDRFGDEGFSIIKELTVEVEPPVVPKSQPTVEDVKVSTNGASTEKEDNKFAKSTAAAAVEQAVEPEAIPSNSKLESTKSPPVSPVKNRDDGSTDELDTKQSGPNDVLPRATESVSNRGMDSSAHGDKTYDGHSWAPSFDHGTDNDSLWNFGHKDGENGDSDLFFGPQGLPPIRTGGSSSNSLFVKEQKPSFDSVPGTPMEKPFFDSIPGTPVQKSVFDYSVPSTPMQNSVFDYSIPSTPMQKPLFDSVPGTPVQKSVFDSVPSTPMQKSVFDSAPSTPTQKPFFDSFPSTPMQRSMFDSGPSRAESPTAGSVYGKEQKGFFDSSVPSTPMYNSNLTPRYSEAGDDSFDTMSQYSSFGMHDNNSFGQIDSFSRFDSFRSNADNGGNDAFARFDSFRSTSDQGGGNSFMRYDSMNSSSDHDRTDTFARFDSMKNSDFNNQGYSFDDDDPFGTGPFKSTETSNSPTRHGTDAWSAF

SEQ ID NO: 64298 - protein, 223 aa, Zea Mays
MPLPSAAQSALVVAAVAIATATVLLPFPRTPPRDRFADMVLANGTIYTADPARPFADAMSVRGGRVLRVGTYESVKELKGPRTRELNLSGNVVLPGFIDSHVHFIDGGLQLARVPLRGVRSKDDLVARVKEAVRDKQPGQWILGGGWNDDFGGDGLPAAVWLDDISPDNPVWLSRMDGHMGVANSLAMKIAGIDKNTNDPIGGTIIRTTEGEERLFLEQVDMP

SEQ ID NO: 64299 - protein, 254 aa, Zea Mays
MASATATAPAFALASSLSRRGFLPLSRRAGRPVPQSLRFVASAVRRRRSAVVVAADAAAAAGSAEFGDEENPYELLGIRPLDSFDHMKMAYKKKRKDAEETGDDEFLAKLDRAHDTVMMQQLRYRKKGVTYGSVQVSKDIKYADNQPIVLWGPRFSRSTVKDMRINMAISAAFVVWIAIMGNADWKPLQFLCFAFFCRILQKLRATEPLITPIYNEYGEVEGRGIRMAKRVVRALGLIFGCVFTASLFDCPPNI

SEQ ID NO: 64300 - protein, 159 aa, Zea Mays
MARPFSSPHIPSSSWVTRRPPPWTSSPSVSTTRTSASSITACRPRRRAVAPAASLHLGPGEIAELARNKVLIAATVASAIGQLSKPFTSVKNGGVGAGLDLRTVFRSGGMPSTHSAVKTSDYLPHSLTKTFSFPVFALLAIFGDTSSTCLHCCAKLWCG

SEQ ID NO: 64301 - protein, 737 aa, Zea Mays
MPDSPELVVRALGKRLAQPRLGKDALIKLLKQAESALSEFSQSSSLQDPLHALSKSLVQTTLLNHKDKDVKLLVSVCLIEVMRVLAPDPPFSDEILKEIFKLFISIFADLAETSSPFLTRRMKILENVAALRCSMIMLNIGCEDLILDMVKIFFSTVKHGLQKSVHQAMLSMMTQILNEKVTQSLVDVILRNLVKDDKGASHKLAFNIIENCADKLEPIIHSFLSSCIFNKDMPVTELRRLYHKIILEIFQCAPQILFAVIPSLTHELLSDQVDIRLEAVHLIGRLLALSNLQFGQENKMVFIEFLRRFSDKSAEVRIAAIDAAKACYMDVSRDEAQHILSSLEGRLLDFDEKVRIRAVHTVCDLAKSNLSSSAKLILHAAERLRDKKLFLYNASPKHAFQASVRKNVMHKLLELYRDYCEKCSKGTATVNTHYEQIPAKLIVLCFDNDIESFRPQNMELIFAEELFPFSLSPKERATHWIAFFSYFKPEHIKALNIIFSQKRRLQLEMQTYLSLRARKEESSEEMQKRIRAAFRKMATSFPDISKAEECFENLHQMKDNNIFKDLDELINEGTSFAKGRVTRDMFLKRIGQKHPIYTFSRVLSIKCLHSIFNQEMICAILESLLSRGNELIDYVESACDLLLVIAMVFPSLFRGSEEYLLKLFLEEPILINVKTLQMLAHLAKSTHCLSTNFSNVVYPLLEQKCIEGTRAESKYAITAIAALHSDDKKFAKLFKVG

SEQ ID NO: 64302 - protein, 342 aa, Zea Mays
MARAPSMPAATAVGIVVVMLLAAGFRGAEGKSCTNAFPGLTSHTERAAAQLRPGPPATVLQPIIHHHRHGREQHLTPTDESTWMSLMPRRALRREEAFDWLMLYRELRGGGGSARPGVAAGAFLSEASLHDVRLEPGSMYWRAQQTNLEYLLLLDVDRLVWSFRKQAGLTAPGTPYGGWEGPGIQLRGHFVGHYLSATAKMWASTHNDTLNAKMSSVVDALYDCQKKMGTGYLSAFPSDFFDCLEAIKSVWAPYYTIHKIMQGLLDQYTVAGNSMALDMVIKMANYFSDRVKNVIQNYSIERHWESLNEETGGMNDVLYQLYTITHDMKHLTLAHLFDKPCF

SEQ ID NO: 64303 - protein, 342 aa, Zea Mays
MTEDMHEERLHAAEAFGNAIGLSGQLERDILCSDMSAFKAANPDAVFEDFIRWHSPGEWLSEDKTDGNAGWPPKGKLSHRMSQHGNVWRKIWNDALPLPVSEQKSLLDPVREGEKVLHYLETLRPQQLLEQMVCTAFKSSADILNKTMYGGFKEMKTKMDRLYVTMASTLKSFLGNSDVNDLVGGLKRLCQVFEHIEKLLILAASINRKLIDAPRLAQAIFYDYYNFYLPKMGTSLESICYEKEFTTKEKVGMYERDAVSNLFPPPTANQSWRKVLSMGNLLNGHEPMQREIIFSVQERISNGHYSSPTPLCTNNEKIQTHRMYISGTSNDLWVALSVTSWD

SEQ ID NO: 64304 - protein, 271 aa, Zea Mays
MVFSSNKIIIWMDGWMVFKRLACPVLPFVPSSPRASACSHFPLLRFDFEPGIIFTCCFVPLLCASVLPQIPLGRFASARRWERAEYGLAGLFSLRCILPAILVFVLIRYRPRLLSVWVAGLGPIGVVRVRHDGVWRGDTGSRPDFRSRRKGPALVTEILVEGLRFSYGSFIVFRLMSSYWCEDRNRTYYKLVCTSLEMLLAGSAGATEFWKLIEVLTGPVYQEKIVGIYIPKLLLYWFVFSFCALQFFVSYIGAGGFLQQDYMDGWGWRRV

SEQ ID NO: 64305 - protein, 514 aa, Zea Mays
MRAPMLFSSDYKSFYCQFSDPSYVKKLKLEMLTAIANESNTYEIVTELCEYAGNVDVPIARESIRAVGKIALQQYDVNAIVDRLLQFLEMDKDYVTAETLVLVKDLLRKYPQWSHDCIAVVGNISSKNIQEPKGKAALIWMLGEYSQDMHDAPYILENLVENWDEEHSPEVRLHLLTAVMKCFFKRPPETQKALGATLSAGLSDTQQDVHDRALFYYRLLQYNPNVAERVVNPPKQAVSVFADTQSSETKDRIFDEFNSLSVVYQKPSYMFTDREHREPFEYSEDLTSLTVGAEDPENVISAQRYQENDNDLLLSTSDKEDNGTRASNGSSTSAYNAPSDLISPSLISSQTPAETSLVNTGGPTHSSQSNFSLDDLLGIGVTEAPAPTPPALTLNSKPVLDPGTFQRKWGQLALALSQECSLSPQGAASLMNPQSLIRHMQSNYIQCIASGGQPPNYKFFFYAQKDGATAFFLVECIVNTASAKAQLKIKADDGTAAEAFSTLFQSALSKFGLS

SEQ ID NO: 64306 - protein, 302 aa, Zea Mays
MMPQQQQPGMAPPPPQAAPGAPPHWGGIPPPMAPQHQYAPPPTHQAPPPPQMWGQAPPPPPPPQAAYGQAPPPPQAAYGQALPPPQAAYGQAPPPPQAAYYGAVPAPAAVAAAPVGPSEVRTLWIGDLQYWMDDNYIYGCFASTGEVQNVKLIRDKHTGQLQGYGFIEFISRAAAERVLQTYNGTMMPNVELPFRLNWASAGEKRDDTPDYTIFVGDLAADVTDYVLQETFRAHYPSVKGAKVVTDKLTMRTKGYGFVKFGDPNEQARAMTEMNGMLCSSRPMRIGPAANKKATVVQEKGGF

SEQ ID NO: 64307 - protein, 802 aa, Zea Mays
MGISGCDCSLLDKKENPLALLGQYSDDEEENEETTDQPTDEAKRSPGDASAKLSSPCVDTAGNNGVARTEPSVSVGDQQEAPQAGDIKNYTQSVTENTIAPEPILQDENVKSTESVPDSSGMQIVGEVGGNWRAIMHEQSNQCYYWNTVTGETSWDIPNGLASGAATASVPSDVGYSIEAQAHVLPHSTLEAYPSDMSVGNGTSTFANFGMACGSAQVTQDAYAYAAPIASHEPMDIDPLYLAKYGDDLLQRLNLLERLCGLNEGLELIRREIGIRISDCNALSSYGSSLLPLWMHAEVHLKQLDSSISRMEMSYHADTEHRNSKTEVVEHNAPDGADLTTPSNGEALKSEVSPGITIDENVEIDKPTSILSAQDSQGRDIAAVPPKVESDNDQDMDVEMEVDEDNVEEQAHCSSVPKKEHPPSEQLSSTNLPSFEDPTPEDNSVPPPPPEEEWIPPPPPENEPAPPDPPKEPAASYVQVDAIPQPYIAQENVGYTISGMEYYGIVGTEGTNANYYMQVSEPHVLQAQQHSYYAPVSGSGVSVSVDGTSIAPESYYTHPSVTMAASAVAAEHSVYYASSISAISSSAADIKTSSASLVSANSNSDLKGPDKLISNDASIVPLTQAVVATSGAGTPSVLGSSTQPSSSTKNLTKVTRNKKRAVGITSSLRSNKKVSSLVDKWKAAKEELRNEEEEEPESALEALERKRQKEIEEWRKQQIASGEAQENANFIPVRGDWRDRVKRKRAQAKNESKDDIVAASLGSSEQHKGPPDLAELSKDLPTGWQVSILDCSISDANILSCA

SEQ ID NO: 64308 - protein, 604 aa, Zea Mays
MMGGRGGGEEEGVADGGRHGRRTNVGGGGGEDSRDEGWRRWSVLVATVWIQALTGTNFDFSAYSSALKSSLGVSQEALNCLATASDLGKALGWSSGLALLHMPLHAVLMVSAAMGLAAYAVQYYCLAFAGGPAAGAGASSSVAVPYPLVFLVCLIAGCSICWFNTVCFVLCIRSFSASNRSLALSLSISFNGLSAAFYTLFANALSPFSPAVYLLLNAILPLGVSVLALPAILLCHQNDGHVQSAPRHDGRVFLGLYILAFITGIYLVVFGSFTATSSTAWVILTGAMVLLALPFIIPACSSCSYVDTDGPDPASPLNHDDPHKPLLISNNHQMESNAMMQNPKENQMQGNCCGTVMGKGRLATLGEEHSAKKLIRCVDFWLYYTAYFCGATVGLVYSNNLGQIAQSLNQQSQLTMLLAVYSSCSFFGRLLSALPDLHRKMSLARTGWLAAALVPMPMAFFLMWKQQDGSTLVAGTALIGLSSGFIFAAAVSVTSELFGPNSVGVNHNILITNIPLGSLLYGQIAAMVYDANGQKMTVVDNRTGIVDTMTVCMGVKCYSTTFFVWACITFLGLASSIVLFIRTKSAYDTAASRSSCKHLHQVSS

SEQ ID NO: 64309 - protein, 846 aa, Zea Mays
MGGGNEFLVGMTGSAPDSARQKRCHDTANGEVRDGDTVVKNGKTSDAASVEKREKKEHLFKCSAYHGKDTDMWSGDQRINKSRVPAALCEQGREMDDDLNKTNSKERMMGVELDKEKTITSDDCSKVEGKKKFNTASPEEERKKKPHNASTGKNMQRDDDKEVVRIMSNSDTKVKIKKVSTPLPKKEKNKEKLNKTYREKKMQAADSKMRSCYSGVKKGKVIPRIVAPRLEYLTNQLVYLKDSKGKCLKVLVSKVVDSLAFDQGWDVFVSNHLIKWGEFLLFEYIAERTFSVRVFGTDSCERLDFNPESTNKGETKKQAWSNMPPDDLVVTDGISENSGYYVSGECPRTKVPQTCHVTCNTKKDPKRVERVVGSGPVAQDISGNLIGPQCKTKGTPLCSKGKTVIMIIDSEDSEPSAHEKEDTMKLATSGPDSDISLVAVNTNEDPIRAQSGIGNGPSAVLADEKGNFPEIECGTKCISATCSEVKTVSQIISATALLDLHDSDENLGRKQRTNAIPLDSRTTAEDYHNYSKMIIIQNFNRKYEAPGGFRCLEKWRKDVVNNQTALDCTAPIKHENPQKTDGMLVDGYGLIELNPVDEYICSEGNHECVQPVFTMPIKEPSSADRVIDCGRDGTEINYSINEKDGGSIEKTSSPDEISKCKNSMMETAHNVNGKGTTAQFETKMDQAEPARSGVRSKICNSVVPANESEHRSTKQEGRMSSNREVPESLLPTKDEIPEPDHHSPPEINFQLCIPDTTQKWLDLSKSLSNAVRRQRRHDYDVIMLKDPKKRLWPVVYHDSLLFVGFTAGWKHFVASNDLRAGDVCELVKEPDDGEPVYSVRMSDHKI

SEQ ID NO: 64310 - protein, 181 aa, Zea Mays
MCLFRKTVLLWKCLHSTSSPQRMIWIQERSAMESATVDCRRGKPPDYITRLHSLNQYVLVLADLAREKLSKGLYLEALSIELVLLTIWKEALDACSLLMDTSDGEKFSKSCQEHFLAKSGHSPMNVVQGLDFTRTASIFSWLESGFMKAYDRAEKISHVLRKSDDNTEMPDAVDVTFQTAL

SEQ ID NO: 64311 - protein, 121 aa, Zea Mays
MERTEERQIHRSSTPEFIEEEGEALGNGDTVTDDVPRTEHPGSTAADGQHLDVDGSWVPLCLVEAVRGVDGRRSTGRRSEAASARDPRGEPRGDRARASGGDETRGRLAVGSCETVSVRLG

SEQ ID NO: 64312 - protein, 422 aa, Zea Mays
MVTVLPEYPEVYNIVNKLRVESVVAVEGVIRPRPVDAINADMRTGTIEVVAHHVLVLNSVTRSLPFPVTTSDTVKEKFPEEIRLRFRVLDLRRPQMQSNLRLRHNVVKLIRRYLEDEHEFVEIETPVLSKSTPEGARDYLVPSRVQPGTFYALPQSPQLFKQMLMVSGFEKYYQIARCFRDEDLRADRQPEFTQLDMEVAFTSMEDMLKLNEDLMRHVFQAVGDIKLPNPFPRLTYAEAMDRYGTDRPDLRFDWELKDVSDVFLGSSFKVFADTLESGGVIKALCVPGGATVFSNTDLKKGTVYTEASKAGAKGLPFLKVMENGELEGIGPLLSSLKPEKKDQLMELLDTKTGDLILFALGEQSSANQILGRLRLFIAHKLEVIDTSAHSVLWVTDFPMFQWNSDEQRYEVQENTIRRAIKR

SEQ ID NO: 64313 - protein, 570 aa, Zea Mays
MPLKFQNITKIPINVGSSRKSYQLQDASVSKVSLSRNLQKFVILCFGKLVDTDNLSDSCENSGLHCLYLDTSIFFNRKNELHQVSQQASSIQDMVEVVRASVSLISKQWSNAMSLFHEKFSALPNLISTHGVESSSEDEFLSLLFGTRTSPALHHFLASSLGEAGLKRIAKAVDSAGRDIRGIITEHLQPAVEIISFRLAELRGLSRWRSRFQTIGLDGNLIDGVTESIGMLVVQVERFSRVAATVVYLFQNFFAWVLKSVRILLNEPTDQVPAANSELVVIFLKFLLDKDPIKQLLEADERIECDMDTARHVEQLVVFGGFTDTQFLEKSLVNQFNELEDSLKEAFLMPFTAISSQIQCQGLLPLYPVTSSATLSSSCSPTSISFYKDEDSSHEESSYSLTDYVCLKIPDGSLNKVNCIGVIKGSGNCCTTLSMMSLSGFLLHIPDGYECVDLSLYKDNQVVLLLSETSCSDSPGKSWMVMLQIENFSFMPLSGTFPANIYSLQKLVALDLQLDTDYGKVRSIPHTVSTPFAVSASRGVACVFSSRRHALVYILDEDEEAEGDETSDME

SEQ ID NO: 64314 - protein, 50 aa, Zea Mays
MPPAGDGAPPRVRLGRRSQPDHARVGPRAHSASAATAARLAAPRGTRPRR

SEQ ID NO: 64315 - protein, 301 aa, Zea Mays
MTFMSCSAAISDGIPLRFPIEGSRTLCGGLGGVCARGVLALGSHRSNRSRRARHRHATVFARRRRRRRPSKWQRPWWKTFFSDWNEDDESLDGWREEDELLQEIGSDKGLSEDEKFKTWTRKAEAIVDLREAQQDAVNAEERSWENWIGGGGGTSGTGGGGEASLLDQITDDPAEIVRDKSVFEVFRGSIDEDYEDMLFEDRVFMYASTNSAKFLALLIVVPWVIDFIVHDYVMMPFLERYVQKVPLAAELLDVRRTQKLQMVKALKIEKARYRLEVEIGKSPPLSDEEVWYELREKAVEG

SEQ ID NO: 64316 - protein, 632 aa, Zea Mays
MDAWEATKVVFDRVRALDPENASKMMGLLLIQDNSDKELIRLAFGPEHLLHSFVATARAELAAKPASPPSPVLGPLQSGAPWGLPSPGSGAGGGGGGDHHHHSPFAAADQLGYDGGADAFYADEYDCWSPAGAAGAHRRSFSLSDAEAAASWRPCMYYARGYCKNGSSCRFLHGVPEDDAAEREMAVMRAKALAAAPPTQQQQLMASAYPFSPSPKGGVSLSFLLQQQQQSETQRAAAGMLLGGEDMHRFPVRSPRMDRGDLIGSPAARQIYLTFPADSTFSEEDVSNYFSMFGPVQDVRIPYQQKRMFGFVTFVYAETVKAILSKGNPHFVCDARVLVKPYKEKGKVPDRFRKLQHTHHGGAEFVGCASPTGLLDSRDPYDLQQPQIGSRMMYGNIANQHEAFLRRKLEEEQAAELQQAIELEGRRFMGLQLLDLKSRGHHHLGSGAPMPLRQATDGKGSGINGNGNASHLEDAICIQDKRMMSSLAMSAPAAADAEGEHEEQQEEGGGGCDGSSSSSPKQAVNPGEEEVVESGPVTATPNAACGFQESYGVVEVELVLPDSPFASPTKEEASYADAVTTAAARNGSISSSPRHVALFAPASSTTLELPPYSSSSFFQVPRFSRGHEAIGL

SEQ ID NO: 64317 - protein, 258 aa, Zea Mays
MGACVSRPSACVGKPHSPRSGDASGRSGGGGGTRRRRSRRVGKGRRTAPSRAASMETIQEAEVPGSPSAAAAAADHRTYSNPAFQVSGSIEEDWYDSLAMSESDAEDDFHSVQDDAFSLNGFENEAALSMKDGNGGSFNGAAQSGEQHHKKPKSSELSKGSSENGVRTSISHEDAVSVSGADTTHGGGRILDNCGLLPNNCLPCIASAVGVNEKKRTPSSPTHSMKMPSLKLSFKKKSGEAHPSSTLRPIISGFIISE

SEQ ID NO: 64318 - protein, 125 aa, Zea Mays
MNGSMDELARCPGIGERKVRRLYDTFHEPFKRVPARPRPNLVVPDTPDREKAKGQPSSTDGSSLQDAVEKPDASKKTKKGSDVRSALTVAFAKYSEKIRSQGRDAPNEAGESTGGSTVEAERAGD

SEQ ID NO: 64319 - protein, 760 aa, Zea Mays
MLLHAGPSFLLAPPPRFAAAPSSASPRRSRTPQSSPPTSHFARPADPVAQRVRPVAPRPPMATAEEGASSDVGVAVAESAQGFLLDARAYWVTKSLIAWNISDQKTSLFLYASRNATMCMSSQDMKGYDSKVELQPENDGLPSSVTQKFPFISSYRAFRIPSSVDVATLVKCQLAVASFDAHGNRQDVTGLQLPGVLDDMFAYTGPLGTIFSEEAVSMYLWAPTAQDVSVSFYDGPAGPLLETVQLNELNGVWSVTGPRNWENRYYLYEVTVYHQTTGNIEKCLAADPYARGLSANSTRTWLVDINNETLKPLAWDGLAAEKPRLDSFSDISIYELHIRDFSAHDSTVDCPFRGGFCAFTFQDSVGIEHLKKLSDAGLTHVHLLPSFQFGGVDDIKSNWKCVDEIELSKLPPGSDLQQAAIVAIQEEDPYNWGYNPVVWGVPKGSYASNPDGPSRIIEYRLMVQALNRLGLRVVMDVVYNHLYSSGPFAITSVLDKIVPGYYLRRDSNGQTENSAAVNNTASEHFMVDRLIVDDLLNWAVNYKVDGFRFDLMGHIMKKTMIRAKSALQSLTIDEHGVDGSKIYLYGEGWNFGEVAENQRGINGSQLNMSGTGIGSFNDRIRDAINGGSPFGNPLQQGFSTGLFLEPNGFYQGNETETRLTLATYADHIQIGLAGNLKDYVVISHTGEARKGSEIRTFDGSPVGYASSPIETINYASAHDNETLFDIISLKTPMDLSIDERCRINHLSTSMIALSQIASSG

SEQ ID NO: 64320 - protein, 424 aa, Zea Mays
MDEEYDVIVLGTGLKECILSGLLSVDGLKVLHMDRNDYYGGDSTSLNLNQLWKRFRGEDKPPAHLGASRDYNVDMVPKFMMANGTLVRTLIHTDVTKYLSFKAVDGSYVFSKGKIYKVPATDMEALKSPLMGLFEKRRARNFFIYVQDYNEADPRTHQGLDLTRVTTRELIAKYGLSDDTVDFVGHALALHRDDRYLDEPALDTVKRMKLYADSLARFQGGSPYIYPLYGLGELPQVEFDMEGKVCGVTSEGETAKCKKVVCDPSYLQNKVRKIGRVVRAIAIMSHPIPNTNESHSVQIILPQKQLGRRSDMYVFCCSYTHNVAPRGKFIAFVSAEAETDNPQSELKPGIDLLGSVDEIFYDIYDRYEPVNEPSLDNCFVSTSYDATTHFETTVTDVLNMYTMITGKTVDLSVDLSAASAAEEY

SEQ ID NO: 64321 - protein, 330 aa, Zea Mays
MAAAEARAAWQRAANRCLVQEDRKRAPKLACCPSSAEQHGTNNGNCRNSVDRPICSLMPLSCNPMHSNLPPDVRWWVQSQPNFGIQKDIVSKRLCSLGRDIHEKQVEDSVPQPKHEETLLCQAVDTSTEKIGDALEPPWMVSPAFTKYSLETGLEEMKTVGSYSQVSKCIETLSNCLYKDNEFPDFECIDPAPLKNPDKANFDIDAPWKGEKTRPWWQIADEDQLASLVAERATQHIENCDLPRPTQTVRINRTEPYTQKHIGDFGGPSSPAGRVSHPVPGHCDHIECTYSTGSTDELVLLYGNGVWEQHGSSDTYRCAFFSLAALPSRH

SEQ ID NO: 64322 - protein, 304 aa, Zea Mays
MGYGYVEPFLPPQQQQQQGGYGQLQAQLAPRPPACPYSSSASAPPVSASYHSSPPPTSPPPLSSPPPASPLPEPSPPSSPPPALLPPPPDAPPPSLPPSPLPHPTPSPPQAPPPPLPTDQPRVQPRVYPSPPPPSLPPPPPPPPTVSPPSPGPSNSPSPSPSPAPATQAPAPAPARVAAYSPPPPKIAPPPPPHYRGKSHYTPHSPVKSHSNSTHAASGSGNNIEISREAATTIVALAGLAMLSFIGATIWFVKKKRRRIEPPATLPTQQPAPPPPPNYIPSSAGSSLASDGFYLRSPGYPFMR

SEQ ID NO: 64323 - protein, 422 aa, Zea Mays
MDPSVARRQEAERFMNIAEKLLMARDLEGCKQFVAQALSFDPRTPGADDLLAAADALLAAQRRRLPSGPLDPYAVLGLDSAVPASRDPDVVHSHYRRLSLLLNRSHPDRPCSLAFAEAARLVADAWAFLSDPLRKASLDSDLDAAAAATNAAAAAAAAAAARVPIDPHPEKQNQLQSQPPPPPPLAPQPMQTVSGTPPPKRGRPPRAAKTPATPPAPQTVSGTSPTKRGRPPRAAKQSPEVERNQEGEAQQAPVFWTACPSCCHLHQYDHSYESQTLLCPSCRRPFVATAMSTQPPIVPGTDMYYCSWGFFPMGFPGGPAFAEPLNSPQQQAPAALGFYPMGPYLPLPSLSGIVEGEGNKAVDAGTGIPVIPTVAAPASASSPAPTAATPVEFLHVKVGAKKRGRPKGSKNKKAVVEMTWAL

SEQ ID NO: 64324 - protein, 192 aa, Zea Mays
MQIFVRSPSGKMICLRVQPDDTLHTHQSTLDLQEKMQIYVKETLKGLTITLDVDSLDTIDIIKDKIEYNEGFPKGRQCLIFGDEQLEGKYTLADYNICNESTLLLVIHPCTSTSDAMQIFVKMQNGKTTTVRVDSSDTVNSITVKIYEMEGIPPLEQRIIFRGRRLEGRRTLADYGIQKEETLHLMLCLCGW

SEQ ID NO: 64325 - protein, 400 aa, Zea Mays
MNIRHHNIVLFVGYCAETQEVVVRQEGKHIFAEKRERLLCFEYLHNGSLHKHLTAEPCGLPWHICYQIIKGICLGLHYLHDKNIIHLDLKPDNILLDDDMVPKITDFGLSRLLGNGKSHTITQTRIGTWGYMAPEYLDDGVITMKTDIYSLGVIIRHMVKGRNSADTTDEEVLANWLIRLEKDPSQMMRQQTTRLLFETEYKEQIKACMDISWRCTLRKPMDRPTTQHILLTLEETEAKIKSVVGPTPPNAGQIAKFGPWGGDGGKTRDIRMTPCHLHSVTISSGTIIDSIGFSFTDHYGQHHTTGPWGGKEGTNKIELGPSEFLTGVSGTSGPFKNLTNVVTSLTFVTNTRSYGPFGKGRGTPFHIQTQNNGRIVGFFGRSGQYLYAIGVYTNQDVLQI

SEQ ID NO: 64326 - protein, 53 aa, Zea Mays
MLQSRQSNRWRYCFQKADATKKDMEVEMVVKEWGEKSLTELEAEERLSYSCEK

SEQ ID NO: 64327 - protein, 198 aa, Zea Mays
MTFINERINGRGVTTPLKCLERRGNGRGCSASAVLAVVARSGWGARCVVQGLGRRLRVVDAGRGWPWALVARRVELGCSTAGQGAEQPVRRAAGRAVHGPGAGRRTVAGARLQGGSEWRGLARGLLGEQLGASAAGAPGVQRLGDVGRAWKKQGRGERIERRARVTCRGRRPGDGRWWGPLGRTGRKSLPWRRRLGDR

SEQ ID NO: 64328 - protein, 606 aa, Zea Mays
MEVSTISFSSPPPRATPADLEAVGLRRLSDNLQRLLDPAFLNCSDAEIALAAARGGGAVGVHRCILAARSAFFLDHLASLPAPAAAGERPRLELADLVPGGRHIGRDALVPVLGYLYTGRLKPPAQDATVCMDDACGHGTCRPAIDFVVESMYAASGFQISELASLFQRRLSDFVCEALDEDVVPIIHVASTCDLQDLLNLCIQRVAVSALDSRYLDKELPADIYNKIKEIRRQPENAIILDPEHDKRVRNILKALDSDDVDLVGLLLKESTVTLDDAFAIHYAAAYCEPKVFAELLKLDSANVNLKNSGGYTPLHIACMRREPDIILSLVERGACVLERTLDGRDALTICKRLTREKDCNRKLDKYEEKSKAYLCIDILEQELKRKSFVLDPISISIEESIATPLLVDNFHMRLINLENRVAFARIFFPSEAKLVMRIAQADSTQEFAGITNFSRLKEVDLNETPTMQNRRLRERLDALTKTVELGRRYFPHCSDVLDKFLNEESTDPIFLETGTPEDQQVKRMRFSELREDVRKAFTKDKAAVAAIASSASSSSSPSSYKMSKLSWRLASTRRTVSTTTGSAPSSLCSCASTLEPKTSPTNLYT

SEQ ID NO: 64329 - protein, 245 aa, Zea Mays
MALARVSPSSLANLIPPLLQSFFRPFSSDFPIRNSRRRSSPVAAAFSLTSQSAHAAREGLVMEAPRPSSRFVRPTAMSEQRTTEYIEGKYGKFGVDRVWHDTATPFKQVLQEFEDWLGNHNLWKKEQGGSLNRGAFVTCGNWDLKTKVPEQCKVSKINLPTYFMEWINLKDIYLNFYNRRATGMMTMMRELQLPIVGNHHLGIDDSKNIARVVQRMLADGAVIQITAKRQSATGDVRFLFKDRIR

SEQ ID NO: 64330 - protein, 398 aa, Zea Mays
MAGLRPRAAVASNCLRPAIRRGARHASGAAFGYYTCWQLQFLVNIKTQGNILNWRSISATKKLWSTVASAKPDDSKFESVDAPLEPQTCEGSFLCGLLKNLPHIFLAAAAKQLQELSYQREESLKRWEHSIGSKEDCLHRRIAELKEHECQRAIEDVMYMLIVYKFFKIEVPMVPNLSKLISNRRLQLWPPRETDLESIHGPEVLELIREHLTSIIRWVHRNGPKINRSTLRIKRLQFVRIYSASIMYGYFLKSVSIRHRLELTLTRSEGVPPIQFLNAQLTNKQEQEGAIGGSSEASSSLRPSSVVNPHDLRGYIMGFDPKTLQLCAKLRSSEASNLIERHSWALFGGDMELSQENDEAVILDPSSLKRLLLEAIAFGSFLWDVEDYVDEIFKLSDS

SEQ ID NO: 64331 - protein, 409 aa, Zea Mays
MSKGKGSSFDEESIVNEIFGGQLKSHLSCCECGHSSETFEPFLDLSLEIDQVDHLVDALQSFTKVEQIGDSENKLTCESCNAQVSKNKQLTLHRAPDVIAFHLKRFTTLDNSVEKIDKHVVYPLEVDLKPFHSNPDTVGGLKYDLYGVVEHSGLPNYGHYTCTIRSSPSTWYFMNDSKVDSCTDSSALNQEAYILFYVRQGKFPWFSSLLEGGSGSSSGDKLEKNEASQLEETEKDEMGRYKPSFLPEEPSTRSSLGASNSNNTIDENNPPRASLQNDVATCLRCVETTNLDKPSTPPRSKRLAFDNEFSVFEFEDFGEEDETLFPNLKLTPKAKKAKAASASKAEKGPCIDQNAVRLMRGMTSTRRKGLMDCIAQQTAKHESSRYPASDPLDKKKRKPVLQYYVNVKN

SEQ ID NO: 64332 - protein, 162 aa, Zea Mays
MSTHERKASIKEFYAVIFPSLLQLQRGITDVEDKKQKAICMEKYRKKDEDGRDTLSDIDVEREEECGICMEMNSKVVLPNCTHAMCIRCYQDWSSRSQSCPFCRDNLKKTCPGDLWIYVEDQDVVDMETVSSENLRRLFMYISKLPLIVPDVIFSVYDSHIK

SEQ ID NO: 64333 - protein, 152 aa, Zea Mays
MDNGDRSGAGAGAVGSAGSLGLRVGQAVFSSASLLFMSVGVEFFSYTAFCFLVTIMGLVIPWSCTLAMIDVYSVFVGCPLRVPGVMVIVVVGDCALSIVSFAAACSSAAVIDLLLQLHGSHSSPTFCGRYQLSAMMAFLSWLLMAASATFNL

SEQ ID NO: 64334 - protein, 349 aa, Zea Mays
MGSARAVNRRYISDCVPARIRMQASAGFVSASALGMACGPALAGLLQWKFKIYMVTFNQSTLPGWVMAVAWLLYLIWLWVSFKEPNRATEVNEAPQNPASGQTVDIGQVENGLAQPLLMDSVDKQNEDEDEEVDESEEAADDSRKPATSIGSAYRLLTPSVKVQLLIYFMLKYAMEILLSESSVITNHYFSWNTSAVAIFLAILGLTVLPVNAVVGTYISNMFEDRQLLMVSQITLLVGIIFSFKVTSTYSVVQYVVSALVTFVSAEVLEGVNLSLLSSVMSSRLSRGTYNGGLLSTEAGTLARVVADCTITAAGYLGVGKLLNVTLLPSLVICVASIACTFLTYNSLF

SEQ ID NO: 64335 - protein, 60 aa, Zea Mays
MNAVGEVRRCKGRTRSSAASVGRRRIGRRGLGGFAVGVGCPASVLGFWSGSACGTRLGRR

SEQ ID NO: 64336 - protein, 135 aa, Zea Mays
MLGIEKRLPMVVANPDYVTVEARDLRVMPGTLAAKYESLGGEVKWMGKPDKVIYTSAMSLAGVDARECIMVGDSLHHDIKGANASGMASAFVTGGVHADELGLGEFGETAGEDAVSSLCSKHGSYPSYVLPSFAW

SEQ ID NO: 64337 - protein, 851 aa, Zea Mays
MTNAAGTAPHPTPPTPLQQQQHQPPKDQQQKALALNAFRLKGIGDRIRFHLKGMSVPPVAELAHLIYAFARGIDFAVSAGDIPLTAGDIPEILRKVYELRKETIIQSSLMILAISCKNACSNKWFQPADSRDILRMVNELSGNFCTSTGQAASDSTVLEIISQIMPRYYPRLKFERLITSIEAKVGYDILMADFFIERSLSRDEKIRLIVVQKENLDASSCVSSPPHVSFLVNGKGVDKRTNVSMEQGPQLPTDITKMLKYGANIIQGVGYFNANYIIAVAVVNDLTSFSAPKLDDYAQPITVYPADSDVLEGPSRVSLNCPISFRRIKTPIKGRLCKHYQMNSRKPNWRCPYCNTSSSFTDLRIDQKMMKILEETGDDVTDVLVFADGSWKVVPAQDEKSDRHRGDTIQQAGDAVETGSPSRDVIDLINGNDDGDMQMDWASAPEDSKPVLNSQDLSVSDYLTDFPMTAQTEDLNRGDGNNGGSNMASTSRQNLLLPPTSGLGSSSLGTLESILPQNVLHPVITDAVSPSLETSSASGMQHVSQETHCGTVQLQPQIGPVHGSEVRRLPIPRNPRREPIGVQGLTVPPQNPGSSTRLQPNILNCPPPIPLSSPSSSTYQAHQVKNPDSVIASRNSGSGPLPRTPSVAAASLHLQSTARDIRNTSSHLPSRVVGLPAPHLMGARPPPGISVQAGGANAYRTMQQTPTMDPLRHTRMSMNQTALAAAGQTTAAAYVRPTQADIQNHLFPVQQSQAPRSQQVPRTTTPPLQRAPPHLQPPSVPPTVPSTPQAGPSHGLPPELPVDDSWRPTGQMRGSLTGNAYSSAIRHYRGHSEQQQGEPRPPNTSGARRPQ

SEQ ID NO: 64338 - protein, 463 aa, Zea Mays
MSVASSHRLRPSPSGPARRPGSAAPRVAFWPAGASPPYRGRCTVVAAAAAAGAGGEASSAPVAVSAVAPAGAARDKVRRHTISVFVGDESGMINRIAGVFARRGYNIESLAVGLNKDKALFTIVVSGTDRVLNQVIEQLNKLVNVLSVEDLSKEPQVERELMLIKLNVEPDQRPEVMVLVDIFRAKVVDISEKTLTMEVAGDPGKIAAVQRNLWKFGIKEICRTGKIALRRERIGATARFWRFSAASYPDLIDALPKNPLTSVNRTVNGSFGQPSNAGGDVYPVESYESLSVNHVLDAHWGVLDDDDATGLRSHTLSILVNDCPGVLNIVTGVFARRGYNIQSLAVGPAEKEGISRITTVVPGTVESIEKLVQQLYKLIDVHEVHDITHSPFAERELMLIKVSVNTAARKEILDIAEIFRAKPVDVSDHTVTLQVGILTVCVFLPDFHRFLCTLHSHKLYHIA

SEQ ID NO: 64339 - protein, 93 aa, Zea Mays
MLMITMQFEGHIFLEVHFNHMHMNSQIGKLEIEIAILILCGFKIFLGLNIVSRKMLHFALCATYSKVKQIKAKGLLHLLQMVGIIGIKGLKHF

SEQ ID NO: 64340 - protein, 335 aa, Zea Mays
MCHDLLCMDGNKYVQEVPSKNGSANEKKEVLLEDHDPVWLELRHAHIAHVNETLHEKMTSFVSKNKAAQLQQARSGGELSTKQLQKMVQALPQYSDQIDKLTLHVEIAGKLNNIIKEHHLKDVGQLEQDLVFGDAGTKELISFLRTRMDVSREHKLRLLMIYASINPEKFFESEKGAKLMQLAGLSADDMIVVNNMRCLRGADSKKSSVGAFTLKFDLQKKKPGIRKERTGEESTWMLSRFYPILEDLIEKLSKGELPKDEYHCMNDPSPSFRGIPGSTSARTSPAHQPAQSMRSRRIGGTWARPRNSDDGYSRYVQPRCVKGYLLQLFVVVSIH

SEQ ID NO: 64341 - protein, 258 aa, Zea Mays
MRSLLSILWIPWLYWVIRRNLVLLWSGLNKTVSVFETNIRILGGLLSAHLIASDYATGMRIQSYDDQLLHLAADLAQRLLPAFDTPTGIPFGSVNLLYGVDENESKITSTAGGGTLTLEFGILSRLTNNTVFERVTKKSVRGIWSRRSKLNLVGAHINVFTGEWTQKDAGIGTSIDSFYEYLLKAYLLFGDEEYLYIFQEAYKAAMHYLHHDPWYVEVNMNSGATVWPLFNSLQAFWPGLQVWLHIFLIIDVALSHIF

SEQ ID NO: 64342 - protein, 106 aa, Zea Mays
MPGTAQRRLGGDDGYNQWRRCRFARLQRAIPHRPATHHPLDADISTTRAAVRHDEVLLHIRPPPQPQAVCVPCRFSSFRLYRQGGSGSPLMVRAAGCEPKADGEVM

SEQ ID NO: 64343 - protein, 99 aa, Zea Mays
MAAAAGPYKEMLEVVNACATRIRWRLSPASKRRLLNGCAVVVDEQTQLLPNILFLCTRLRPVVLVDYGGTMPQLQENLCGLLYLARQFKLYKVRSVQFG

SEQ ID NO: 64344 - protein, 195 aa, Zea Mays
MGRCGGGSGAGAGGGALGGCALLTAALVISTLVIQGAGGSKQSHAPAVARKVLLSITNWHPHNYLDDVLHPSQVQDQRLERLGQDAPSFHTGNELPNPHLRQVPAALPSLPVQPYAPHPKISADNPTAAPSFQKIPWLSLTSPPLPAIGRRMQSPAASPETAVHPAKHGKDHGTPVSAPSNKREGITTCLQIIHM

SEQ ID NO: 64345 - protein, 524 aa, Zea Mays
MPLPSPLSTSPSPASQPASIRVAAKGANRRRAMTPSVSCPVKCRPHPCLAPQPPAPSPELLAARGAPIAGELRACRSPPYLPLSRSADSLELRAACRGAPPASRARAAVALGGDGPSAALIAGAQSRHAIFRDELVRRAFTAAEAAHRGQVSNLSHLSKLARRNDTASRIDEADRLRIVFLAMEDARAVLIKLADRLHNMRTLDSLSKTKQQSVAKETLEIFAPLANQLGILNWKEQLENLCFKYLYPENFDELSTKLIEIYNIDMIAAATRRLEQALQVRGLSYYAIYGRHKSMYSIYRKMARKKLVMDKIYDIHGVRVILENKADCFATLEIIHHLWPRIPGKFKDYINSPKPNRYQSLHTVVLTEQTLPLEIQIRTRDMHLQAEFGIAAHWRYKEGYPSSLACDASSKETHTIPSHSDACLLSYSKQCDHKGPVLVILLENEKMSVQEIPQNWTILDLLKRSSNYGMPLRLRLNCHAVHNWNQELKMGDVLELIPSTPCKSRGHTRELHQKFDHRLAVSQS

SEQ ID NO: 64346 - protein, 173 aa, Zea Mays
MQVQGKDVIHGARYSSPLDCAVKTLESEGVKGIFRGGLATLFREAIGNAVFFCTYEYSRYWMHNYLDSSRFSGSSHFVAAKDIGIGVVSGGVSGMAFWTATLPLDVAKTIIQTDPDPHVSRNPLQILSMVYKRAGLGGCYAGLGPTLARAFPANAAAIVAWEYSAKILGIKRG

SEQ ID NO: 64347 - protein, 180 aa, Zea Mays
MASPYAGGVQPPSPAGAVQQQQQNHSLAFRVMRLSRPSLQPDLAALLRFDPRDVFLPEDALTGSDPSAAAKFLHGLLHPADSATAVPGDFTFRDRFLLRDPADALALPGLLVLPQSFGAIYLGETFCSYISINNSSSFEARDVVIKRDREYFFWIHQNPLLSQLDLGVDMISLWNMMSKN

SEQ ID NO: 64348 - protein, 1076 aa, Zea Mays
MAQTPNPSRRSWVGPAPMPFLTPRPERRHLEMRWADGVSQSAARRSGVGAVARDGCERDQEVNVQVMLRCRPLSEEEQRVNAQSAISCNESKREVTVLHSLFKQADKTFTFDKVFGPQSQQRSIYNHAVAPLVTEVLEGYNCTVFVFGQTGTGKTYTMEGEMRQKVSELPDTAGVIPRAVCHIFEILTARKADYSMKVTFLELYNEDITDLLSLEDQSRFPEGRQKRPITLMEDGKGGAVIRGLEEIVVYSPSDIYSLLEHGSARRRTADTALNKQSSRSHAVFSINIQVKETTVGNEELIKYGRLNLVDLAGSENIARSGAREGRARETGEMNKSLLTLGRVINALVEHSVHVPYRDSKLTRLLRESLGGKAKTCIIATVSPSAHSLEETLVTLDYAARAKSIRNKPEANKKTCKTVVLKELYQEMERMKQDVKAAREKNGIYISHERFAQDETKRKTMKEKIEHLELSLEKQNKEVQKFKALYLAEQECHWDFESQNNDLKVNLESLKGKFIDLEEAHCRAHMSLREKDFIISNLLHSEHLIIERAKDMRNTLENATEDISVLLNKQERQSKTEAENKRLLSGFRAELDRSLGVLHATVVGSVCEQSKILESINEQTKLYFLARNESENQLERRIARAKDMYVSGVQCMKELANTMRQQSIIDSEQMRQNISTNANAIGNFLEVMFSEAEQVLNDVLKSTSDLKELLAFSAELQNTGLRRNLASVQAMSKQSIDFFEDIRIHVSQLMTLMEQNQMERSSKLVKFENEFKETCVKDEQAALNKIAAILSELTAKKTTMVSSYMGQLNERYSEDQKNLKLEISNLQQVSDNGKNESVACVGVIESQFQEDMSSHTKSNDQMEGILKQYSEKGSHFVSYWSHIQSSLHDLVKSSIMETDDFIEESRNKNENIFQEGLLFSSQNDAEFHGITSDVLTVSKNSLLLDHETCKMVETNTTIFSDHLELLNEKHSEGVESTRNMMSDCLEKDYMANSPVRNHPRELLTSANSLESIDKLRASLPDLVAKFRLENKLNEMDKGKQYSDQRTRVHGKFKTIISAIKSLLTWRSHEESTAQRIE

SEQ ID NO: 64349 - protein, 1470 aa, Zea Mays
MSLDDQSVSILEAKSDLFVDHQSRDVLETEDTAPRSEIASEPCAKQNFDEENNLTDVKTVNGDKSDDVKSDDVIADAAAAARSAQPTGNTFLTTKVRTKFPFLLKHSLREYQHIGLDWLVAMYEKRLNGILADEMGLGKTIMTISLLAHLACEKGIWGPHLIVVPTSVMLNWETEFLKWCPAFKILTYFGSAKERKQKRQGWMKPNFFHVCITTYRLVIQDSKVFKRKKWKYLILDEAHLIKNWKSQRWQTLLNFNSKRRILLTGTPLQNDLMELWSLMHFLMPHVFQSHQEFKDWFCNPISGMVEGQDKVNKEIIDRLHNVLRPFILRRLKRDVEKQLPKKQEHVIYCRLSRRQRNLYEDFIASSETQATLASGNYFGMISIIMQLRKVCNHPDLFEGRPIISSFDMAGINMQLSYSVCMLLDKSPFSQVGLSDMNLVFTQNEFSMSSWEADEVISAFPLSTTSWNHDLDTFCSNKDRQGSNLTNIFEDIQKALQEERIKESRERAASIAWWNRVRCQKRPVYGTNMIHVLTVKHHVSNILDKRNNPLCHMDYSSSLADLVLPSVERFQKMLDIVESFTFAIPAARAPPPVCWYSKGNSPVFIDPAYREKCMNEFSPILSPIRSAIVRRQVYFPDRRLIQFDCGKLQELAILLRRLKSEGHRALIFTQMTKMLDVLEEFINLYGYTYLRLDGSTPPEERQTLMQRFNTNPKFFLFILSTRSGGVGINLVGADTVIFYDSDWNPAMDQQAQDRCHRIGQTREVHIYRLISESTIEENILKKANQKRALDDLVIQRGSYNTEFFKKLDPMEFFSGHTSLHAEDQEKNCSTTSGVSNDVDLALSIADVEAAIRQAEDEADYMALKKLEEEEAVDNQEFSEEAAGRQEEDELVNEENGKPDEHINEEQKYNSSDVEKEKHITLSTNRLNKEKALTLAVGDEDTDMLADVKQMAAAAAAAGQASSSFENQLRPIDRYAMRFMELWDPVIDKAALNHQVNVEEEEWELDRIEKFKEDLEAEIDEDQEPLSYESWDVDFATTAYRQHVEALTQKQLLEEQERQAQEATKELEEKNDNMSHHRKSKKNKKKTGKLKPLKRVRLSPESEVILEETSVDNAPSPELTSDESPHHYCNKRKKITVATEENSNSRSLKKLKKTTKSSFISEALSPRLKEDLNDSDSKSVGRTKSDGRFFIPCMPVKRVIVIKPERLKRKGIWSRDCASDSWSSEEDAVLCGTVHEYGPLWELASDFLHFLPGGSLYRGRYHHPVHCCERYRELFCKHGMSATDNSNSEKVPSGTGKAILRVSEDQAQMLVNVTSELPNNELLLQKHFMAVISSVWRSKCHRDTSCFTNTYSSALHVFSPVKKPGGSCENWPMVNFRPSFNLVRKALADVQAKSTLMVIPPPSRNQEYPCNYLELELDFLKDQHAYDEDIPSVVNVSIQEPEPSKQTPEPVEQSLLSALSCRQAENRLRSLL

SEQ ID NO: 64350 - protein, 632 aa, Zea Mays
MIEQYSAFMSPVAAADSMTPKKFMALVSAKIQTYFCRGGSIQRAVRRMAGGGGGRRRPGALADPRTGDASSASASCSGDDTSIGSATAKREGARRCIMQRYRSQLEQEVKKLQRQLQEEIDLHLALADAITYNAALILKSSIKLPDKAHELLISISSLEIAITKLEEDLNHLHYQLYHARNERFLAENKPGYLLPTRSDCQPSTACNCTWEEDDEKYVKGRERVSLNMLLEKHQDISSTGLFVHRDEEMQEACSMEKEGEEDQKIDMLPFNLPNLKKGNMSENLWNNPNQLSEEMVLSMKDIFLNLSTSSKMSPEEPFSNSSSSAEHLSGSTLTTLSDSSVIASVQPSPSMYLNHDDGNFDPYNVNGKEAQRDIGSYSSVAEVSWMYIGNEQLEYASGALRKFRFLVEQLSKVDTSCMNCDERLAFWINLYNALIMHAYLAYGVPENDIKLFALMQKACYTICGQPVSAAEIEFVILKVKTPVHRPQLSLMLALHKFKTSENLKKYSIDGTEPRVLFALCCGMFSSPAVRIFSAENVRAELQESMRDYIRASVGVNDKGELMVPKLLQSYAKGIVEDSLLADWICRHLTLDQLAAVQDTSSSHTQRLLGVRSFSVIPFDSRFRYLFLFDNSR

SEQ ID NO: 64351 - protein, 243 aa, Zea Mays
MQTYLYSVLNSRVSRPSPLLRNPFPSSAEASPPAAETLASAAAVMASSNVSTVYISVIDDVISKVREDFITYGVGDAVLNELQALWEMKMLHCGAISGNIDRTKAAAASVGGTTGTTPPVHDLNVPYEATSEEYATPTADMLFPPTPLQTPIQTPLPGTDTAMYNIPTGPSDYAPSPISDVRNGMAINGADPTAGHPSPYMPPPSPWMNQRPLGVDVNVAYVEGREDPDRGVQPQPLTQNIAP

SEQ ID NO: 64352 - protein, 804 aa, Zea Mays
MFQVVVVLVLGYFGNTWKDTQGLKQWYLMYPMEVEGPWYDFLIIPLRFELLCSIMIPISIKVTLDLAKGLYAKFIDWDEQMFDWETNTPAHSANTAISEDLGQIEYILSDKTGTLTENKMIFKQCCISDTLYGNDNGDALNDVRLVNAVSSNDPDVIKFLLVMALCNTVVPIKSNDGTVSYKAQSQDEEALVNAAAKLNMMLISKDTITAEICFNGSKFWYELLDILEFTSDRKRMSVVVKEGETGKILLLSKGADEALLPRACPGQQIQRYLEAVEMYSQLGLRTLCLGWRDLKENEYKEWSKNFQKASCSLDNREFKIAEVCNSLEQDLQILGVTAIEDRLQDGVPETIKLLRNAGINVWMLTGDKQNTAIQIGLLCNLITSGPNSQLLSISGKTEEDVLRSLERALFIMKNTSETKGLAFVLDGWALELILKHSKESFTRLAMLSKTAICCRMTPLQKAQLVAILKSVGYLTLAIGDGGNDVRMIQEANIGVGISGREGLQAARAADYSIGKFKFLKRLILIHGRYSYNRTAFISQYSFYKSLLMCFIQILFAFLSGLSGTSLFNSISLMAYNVFYTSLPVMTIIFDKDISETTVMQYPQILLHSQAGRLLNLTTFCGWFGRSLYHALVVFFITICAYSDEKSEMQELSMVALSGCIWLQAFVVTMDTNSFTCPQILLIWGNFVAFYMINLILSTVPSLQLYTITFRLCSQPSYWISMALTVAVGMGPVVAFRYLKNLYQPSAVNILQQVEQRNGSIRTSGNLESAGANLTNLLTGSRKNRDSNYRPLLSESAESVSASGS

SEQ ID NO: 64353 - protein, 132 aa, Zea Mays
MPLGKYYCDYCDKQFQDTPAARKRHLQGVQHQRARALWYDSIRHQDQHGGASSLLLPDGTLAKGICHHFVRTGACKYGDSCRYFHPKPNGVNPALAAPGKILGGHASWGNLPPSLQPPPEGGYPPLPFIDWG

SEQ ID NO: 64354 - protein, 126 aa, Zea Mays
MALLAPAISGEVGLRLLLAPLSSNIVMRTASCAVGIGLPVYSTFRAIEKKDEQEKERMLLYWAAYGSFSIAEVFADKLLSSVPLYYHVKFAILVWLQFPSNSVSFPCPFHPPSKFHILFNFTILPL

SEQ ID NO: 64355 - protein, 50 aa, Zea Mays
MTKGTKHSLLSLSKRVNKCLSCVAAIFISAYYFHLFTLMLLQLELHPENW

SEQ ID NO: 64356 - protein, 202 aa, Zea Mays
MLILDCCATVSRGGRRRFGNMAGVFLVMASAVRALDHSDAESEFLRKIAKIATAEIVTSKEFNVDWQRAAACLLVAIGSHDPDLMMGEIFLHFSGPTSALPAMLQILADFASSEALQFTPRLKDVLLRVLPILGSVRDGQRPVFANAFKCWCQAAWQYLGDAPSELPLDNDVMSFMNSVFELLIKVWTGSRDLKVRPNFGFE

SEQ ID NO: 64357 - protein, 93 aa, Zea Mays
MSMKLATVNPQVDLNSLPNVLPKDVHQSCGPPHFSLETSDASLSYLSQPHHGSPLGCMDNQSCMHPLDTTFCLAINPQYHFLNGVSDASSQLI

SEQ ID NO: 64358 - protein, 370 aa, Zea Mays
MALALLSPSTPSHRILLRPIPFPSLPVARATSAGSFGLAFFCPLSRGSSSLQRTGAAGGVIDSAGEGSSEEPVAGWLSADLLRRISGAADADRVLDIVAESVEGAGAALGAPECNAIVSAAFDRGNIALALSVFEAMRSGFAGVGGWRWARPDVRTYALLVQRLAAAPRVADAIMIIDYVSRAGASSMDEVPFGIIVRCPTCMIAVAVVQPQDGTQVVSCSKCRYQYELFSGDITSIESEEVSMDISALEKALRFINMRKDGIPAAVHSIVIRSPSGTARTYRFATQNVTLPAQEGERVTISLAAPVNVYRDMGPLKVAARSQGFKPGEPMCLTNHINGQVSKLLRAPSKNKGTFFLSPYLLQLPLHQLP

SEQ ID NO: 64359 - protein, 359 aa, Zea Mays
MNGEVECSVCHAKVPVPPPVSKAYDSHRSTVSSRQRALNVLLVSGDCVLAGLQARRLKVGDKPLFTVSIFMQAARNNVLLSVPAFLYAINNYLKFIMQLYFNPASVKMLSNLKVLVIAVLLKMIMRRRFSVIQWEALALLLIGISVNQLKSLPEGSSVLGLPVAAGAYLYTLFFVTVPALASVYNEKALKSQFDTSIYLQNLFLYGYGAIFNFIGLVVTAIIQGPSSFNILEGHSKATMFLICNNAAQGILSSFFFKYADTILKKYSSTIATIFTGVASAVLFGHTLTINFVLGISIVIISMHQYLSNQIKDEVPSSKVEMAEAHDHRKEPSYVNVPDSGASESKHRHGSDERQPLLPV

SEQ ID NO: 64360 - protein, 895 aa, Zea Mays
MAHLQLTALAGGADDEMEEVALLGSYDEEAGVGPEAEGDRAEAGMRRVQVRVTGMTCSACTGAVEAALSARRGVRRAAVSLLQNRAHVVFDPALAKEDDIVEAIEDAGFEAEILPDSTVSQPKPHKTLSGQFRIGGMTCAACVNSVEGILKKLPGVKGAVVALATSLGEVEYDPSAISKDEIVQAIEDAGFDAALLQSSDQDKVLLNVQGLHFEEDVDVLHDILKKMEGLRQFGVNFANSEVDIVFDPEVVGLRQIVDTIETESNNRLKAHVQDPYIRAASNDAQEASKTLHLLRFSLFLSIPVFFIRMYLEVLAKGKTSDAIKKLVELAPATAILLLKDKEGKYSGEKEIDASLVQPGDVLKVLPGSKVPADGIVIWGTSHVNESMVTGESVPISKEVSSLVIGGTMNLHGVLHIQATKVGSGTVLSQIISLVETAQMSKAPIQKFADYVASIFVPIVITLSFLTFLAWFLCGWLGAYPNSWSAESSNCFVFSLMFSISVVVIACPCALGLATPTAVMVATGVGASHGVLVKGGDALERAQNVKYVIFDKTGTLTQGKATVTATKIFSGMDLGDFLTLVASAEASSEHPLAKAILDYAFHFHFFGNLPSGKDSIKRRKEEILSQWLLEVVDFAALPGKGIQCWINGKKVLVGNRALITENGVNIPEEAERFLVDMELNAKTGILVAYDGDFIGLVGITDPLKREAAVVIQGLKKMGVHPVMVTGDNWRTARAVAKEVGIDDVRAEVMPAGKADVIHSLQKDGSVVAMVGDGINDSPALAAADVGMAIGAGTDIAIEAADYVLVRNNLEDVITAIDLSRKTFIRIRWNYFFAMAYNVIAIPVAAGALFPFTGVQMPPWLAGACMAFSSVSVVSSSLLLRRYRKPRLTTVLQITVE

SEQ ID NO: 64361 - protein, 420 aa, Zea Mays
MPESAGSSGTAGGPGLGRGLVSDEVQSRQSGRQVSALNFQASLAAKDLQVSSESNPRLHSSSSTISHHLRFNHLNYHENKEDGLGSENAETSGLQSSSRKPVMVRGSLINEAVNGDISGEGISSIGSELENVPSTVSTNEIGGSTSESGLGPSSMTSERIMSDSEVEISPQGTSSTTVMTSERSDASQSSLTSVFSNSSTASSVIVEPMPDPIPTTADVPIFSGPHGEAGGSILHDDMMSIFSNDGVGRSIDSSSSETRRSHRRILWDAFSRRGSRGYPESDADEMGFFSTWLDLGDDIFEELGESRYFHRRRHGSIRVSQYSRSRIREHRRAVFDSGNEQNTAACPLGIHQIGRCTCNSFFIAEESSARASISRIVMLTEALFEVLDEIHRQPASLSLSMVSVQAPESVVDSLPCAISA

SEQ ID NO: 64362 - protein, 360 aa, Zea Mays
MRFLKGSKVEVLQEADVPFGSWRPGEIVSGNGHAYFVRYDESPVDSSVAVERVPRRLMRPRPPADDPVRWSLGSIIEAFDSYSWKVAEVVRVLGKNQYLVRLLGSSLELSAHASVLRMRKLWLDDIWIVTQKYSARCLDGGAFRGQSKDKNLDHNFRMDSRQLENQNAFEGDTSRGIKRKSSAISTHPQCSEITKRLRTPNRDGRYSKLVDRSFSPLAEKVDDVDSPCIILRGKCIHAGHKWHTGTTEEFSDTESISSSVGSSSPNSTPHRSQHYNLVYQSGDSCSRTDDDEASTSERETSEHDNNGSREETHVLELHAYRATMLALHACGSISWEQEALLTNLRSSWVKTGSRLILVAG

SEQ ID NO: 64363 - protein, 99 aa, Zea Mays
MPTIQWGRRTRTVLDVGCGVASFGGYLLDRNAITMSFAPKDEHEAQIQFALERGIPAFIAVIGTQKLLFPDNVFDVVHCARCRVHWYANGKYSISSQYS

SEQ ID NO: 64364 - protein, 126 aa, Zea Mays
MNQLESSSVTRGRGKNKRIWTYYEDEELIKALYEISLDPKWKSEGGFKNGYCSVLENELKARLPGCGLSAIPHIESRVRHFRTKYGSIEVMLAKSGFNQMTMLFALPETLRREFILNMIADEAQRK

SEQ ID NO: 64365 - protein, 541 aa, Zea Mays
MGRNGSVKRSASSSAAGAAAGPPSFSVNPADYRLMEEVGYGAHAVVYRAIFLPTEDVVAVKCLDLDQLNNNIDEIQREAQIMSLIDHPNVIRAYCSFVVEHSLWVIMPFMTEGSCLHLMKISYQEGFDEPVIGSILKETLKALEYLHRQGQIHRDVKAGNILIDGAGVVKLGDFGVSACMFDRGDRQRSRNTFVGTPCWMAPEVLQPGTGYNFKADIWSFGITALELAHGHAPFSKYPPMKVLLMTLQNAPPGLDYERDRRFSKSFKEMVAMCLVKDQTKRPTAEKLLKHSFFKNAKPPELTIKNILSGLPPLWDRVKALQLKDAAQLALKKMPSSEQEALSLSEYQRGVSAWNFDIEDLKAQASLIHDDEPPEIKEDDDIPRNIEDLSSRNHLAKSSANECNSSQRAFATTLNSDGNSPTMNEAFDFDISDADTTRRADGYESNTRQNDSLPSTSKRDPESNHWASDGQRQLTSGGNNSSTSERGYGFERDASVQMISDKQRSEMRKTASLSGPLSLPTRASANSLSAPIRSSGGSLALL

SEQ ID NO: 64366 - protein, 832 aa, Zea Mays
MENIDLPTPALIKPVELWTGKQLFSVLVRPNAHTKVFLNLAVQEKIYSKKKGKKEGGEEVKETMCGRETMCPNDGYVYFRNSELLSGQVGKATLGNGNKDGLYSVLLRDYNSHAAASCMNRLAKFSARFIGNHGFSIGVDDVQPGEHLNRQKKKEIDGGYKKCHDLISLFAKGALALHPGCNAAQTLEHNITGVLNEIRSIAGNVCMDTLHWRNSPLIMSQCGSKGSPINISQMVACVGQQSVGGRRAPDGFLNRTLPHFPINSKTPAAKGFVANSFYTGLTATEFFFHTMGGREGLVDTAVKTAETGYMSRRLMKGLEDLSVFYDQTVRNASGGIVQFLYGDDGMDPAKMEGKDGMPLNLDQLFMKVMATCPQRGSDTLSPVGIKQMLEDKFLQHDTSSDGGCSAEFKKNLTEFLDKRIELMKCTRRALHLHEDHVEKKDSCLEESIAAIISGISAKQLQVFLDTCLSRYQSKKIEAGASIGAIGAQSIGEPGTQMTLKTFHFAGVASMNVTLGVPRIKEIINAAKKISTPIITAQLLSRKDVLSARIVKGSMEKAVLGEVAATIQTVLKSSLPNLVVKLDMQLIETLHMGISADSVKLSILNHPKLKLKSEHVRVIDRAKLRIYPAGTDKLKLQLELHNLKSILPKVIVKGIPTVERVVIDEVKVNNATERYQLLVEGTNLLAVMGTPGVDARKTKSNHIMETNQTLGIEAARRSIIDEIQYTMKSHGMNIDRRHMMLLADLMTYKGEILGITRYGIAKMKSSVLMLASFEKTAEHLFNASYSGRQDQIEGVSECIIMGIPMQLGTGILKVRQRLDHVPEFKYQPDPILS

SEQ ID NO: 64367 - protein, 299 aa, Zea Mays
MGRKWNELLSSAPWRTGEAAEDEDAARMSREGKVSVTSNPEEMPTMSVPWSRRPDLDLTIDDFEEDEIDPELRYSFQRNSRGPCYASDTFGVRRADDTVLPLLQEFYLDLAEDNRKITPRDYLELALRPVQGGGRDISAKNAIRDSIRALFPDRECFTLVQPVNNEKDLQRLDQLPVRFKLFLSSFTQIAKLLLKHIYTLNSLMACTNYVCPFMTALNVFAVGAGSARSKFEKLLHSSLKKAFEDYKRNAFLEADLQCSNKVQNMESKVRAACNSSNEKLDDIVRSMSQRPMVLENGKG

SEQ ID NO: 64368 - protein, 94 aa, Zea Mays
MHHLRPAEGRRRRRQEVAATKPSDDGTARRRRRREGQAARGGDGVRLRRRAGHVVHARPDNKDWGSQWQLVTAGNCPFMHFPRATKVEMQTWCT

SEQ ID NO: 64369 - protein, 953 aa, Zea Mays
MDVDSRMATESDSDSDARGGGSGSGSETPTASASASASPSTSAPAPGTPTAAAASPGLVAGPRPAPGYTVVDAAMDKKEDGPGCRCGHTLTAVPAVGEEGSPGYVGPRLILFGGATALEGNSATPPSPAGSAGIRLAGATADVHCYDVLSNKWTRLTPLGEPPSPRAAHVATAVGTMVVIQGGIGPAGLSAEDLHVLDLTQQRPRWHRVVVQGPGPGPRYGHVMALVGQRFLLTIGGNDGKRPLADVWALDTAAKPYEWRKLEPEGEGPPPCMYATASARSDGLLLLCGGRDANSVPLSSAYGLAKHRDGRWEWAMAPGVSPSPRYQHAAVFVNARLHVSGGALGGGRMVEDSSSVAVLDTAAGVWCDTKSVVTTPRTGRYSADAAGGDASVELTRRCRHAAAAVGDLIFVYGGLRGGVLLDDLLVAEDLAAAETTSAANHAAAAAASTNGQREPGRYAYNDEQSGQTVTVSSPDGAVVLGTPVAPPVNGDMYTDISPENAIIQGQRKMSKGVDYLVEASAAEAEAISATLAAVKARQVNGEMEHSPDREQSPDAAPSTKQNSSLIKPDVALVNNSTAPPGVRLHHRAVVVAAETGGALGGMVRQLSIDQFENEGRRVIYGTPENATAARKLLDRQMSINSVPKKLKAPIKIFGDLHGQFGDLMRLFDEYGAPSTAGDIAYIDYLFLGDYVDRGQHSLETISLLLALKVEYPHNVHLIRGNHEAADINALFGFRIECIERMGERDGIWTWHRVNRLFNWLPLAALIEKKIICMHGGIGRSINHIEQIENLQRPITMEAGSVVLMDLLWSDPTENDSVEGLRPNARGPGLVTFGPDRVMEFCNNNDLQLIVRAHECVMDGFERFAQGHLITLFSATNYCGTANNAGAILVLGRDLVVVPKLIHPLPPAITSPETSPEHHIEDTWMQELNANRPPTPTRGRPQAPNNDRGSLAWI

SEQ ID NO: 64370 - protein, 284 aa, Zea Mays
MLQSWVPLIILITSLRKMYAMDGNVLFTIARTDLHHYMALPPFIHHLESAKKGNLVLTGPSWATSAYSPIAFTLYLHDGSPQAGEAAEDDEDIGRIICDCIDGDFSNYNRAIVETVQTGYGPAEVIYAVLSNGVQGRVAIKLARLPVSKAGEEDATAILGRIVARSKLFDVGCVLFYKEGDNGVSVRPGGLIQLAREALAVPLHMPLTIELDLHRCSGDEIVGGVLEFNPATNGQHTERLVGENGAELEVTISWSQYPWMDSKRRLQGPFSLRITNESGETLVA

SEQ ID NO: 64371 - protein, 91 aa, Zea Mays
MKGRYFRDISIVRAGGDSAAPAPKVDKVVVYRSFMKAGLRFPLSKFLVEVLKTFEIFLHQITPEAIIRMGIFIWAMRSQGLEPSAKCFCNM

SEQ ID NO: 64372 - protein, 137 aa, Zea Mays
MARIPSLKSLNAFPHAEEHLLKKTYSGAVVTILGLLIMITLFVHELQFYLTTYTVHQMSVDLKRGETLPIHVNMSFPSLPCEVLSVDAIDMSGKHEVDLHTNIWKLRLDKHGHIIGTEYLSDLVEKEHGAHHDHGAS

SEQ ID NO: 64373 - protein, 328 aa, Zea Mays
MYVKYHDLHGGKQESRKSNYTDLANKYYDLVTGFYEYGWGDSFHLAGGYPGETSREAIKRHQHFLALQLGLKKGMKVLDVGCGIGGPLIEIARFSSTSITGLNNNDYHISRGKELIFSAGLSEQCCFLKGDFMDMPISDNTFDAAYAIQATCHAPDAQGVYSEVYRVLKPGQYFALDEWCLTDRFDPNNAKHLAIKAEIELGDGLPDIRTTRQCVQAMKDAGFEVVFAKDLAQVFPCPWYRVMDPTYFSWAHFQCTRPGRIVTRAIVNTLEFLRIAPAGSMGAYNVLMSASDGLLKGGREGIFTATFFVLGRKPLKEVDIVSLSRKLI

SEQ ID NO: 64374 - protein, 137 aa, Zea Mays
MEGFDTGNEQILLIGATNRPQELDEAARRRLTKRLYIPLPSLDGLFMLSEEETSAICKLTEGYSGSDMKNLVKDASMGPLREALQTGVEIAKLSKEDMRPVMLKDFENAMREVRPSVSSSELGTYEEWNRQFGSLSI

SEQ ID NO: 64375 - protein, 761 aa, Zea Mays
MRCAPPPAAAAWWPAHVREGPSATRPGYCGSESEFAPRARAIAAGRSGSPNMWLFWRTRNRFSLEELRYLTDQLQKVHVVNEANKEFVIEALRSIAELMIYGDQHDALFFEYFMEKQIMGEFARVLRISKLSRVSLQLLQTMSIMIQNLRNEHSIYYIFSNEHINFLVTYPFDFRIDEMLSYYISFLRAISGKLNKNTISLLVKTKNDEVTSFPLYVEALKFAFHEDSMIRVAIRTLTLNVYHVGDESVNRFVSRTPLSDYFSDMVQHFQKQCIDLDKLVARSSRKGNSSVPISSIEDAIVQIEDTLYYFSDVMSSGIPDLERFITENILRVLVFRFLLPSLQRQSTDLDLSVTTSMYLLCCILHIFKNKDMASTVAAALFHQPDGPDDRKQRTPNGYTSEHDSCKSENHCTTASGIEQSSEEPNSLSSVSWKHLPNNSSRSDCCQGNTPREHLLSYITEGDDSQALGSLCLFATLLQTKELDESMLDALGILPQRKQHKKLLLQALVGEDLAETQLFSSSSSLTDDSICSDFDIYVRKLQDKYGLQCHHPRQMTSKAHRYQVLDALVDLFCRSKVSADVRLVGGWLFRQLLPHGEEEFTAFHLRRLKDSHKDCSSKLSEESGGCWCDMLLPIVKEAWRNCKKAIEASSPPKGSKSIIVPMDLCSFEGDSSVAIAEALYEMVKGFVLQHQVILFCLGETFTELPPIYPLVDLPINTRASAADFGGSVPKPGLEVNLAKNRYKAWEVVTSTHSPFFGPFFGH

SEQ ID NO: 64376 - protein, 1170 aa, Zea Mays
MTTMSDDGDRTCPLCAEEMDITDQQLKPCKCGYDICVWCWHHIIDMAEKEETVGRCPACRTCYDKDRIVKMAATCDRTVAEKNAEKKHRTQKVKPKAAPSAAATSTVESKKHLASVRVIQRNLVYIIGLPAHLCNESVLECREYFGQYGKILKVSVSRPTGPPSQQASANSNISVYITYAKEEEAIRCIQAVHNFVLEGKVLRACFGTTKYCHAWLRNMTCGNPDCLYLHDVGSQEDSFTKDEIISAYTRTRVPQMASGVSQRRTGTVLPPPGDDFSYSAVVSAKHTFKNGTLNTTSQPRLSPPNSSSGRSTLPSAASWGQRDLNARTTATGATSSQSHTKPKSESQSNPFSSSSVFSCTKTPSSWNDDTSTAAKISEGQQLSEKESRTLQPYKPGISKETQALSSLESSLDIDFSTIPSAWNDDDIVVPDVMPKGSDENQVANKNGELTHPASKSLVLSKKDIKMNITSKTPSDFVSSPAISKSDVSTSDGDHSLTNITPKCLASNAVECQSSHTAVEKMLEDIGSKDTDMEKLSAQISSVTLGGNDEIQSMAGNQQPDVMPCTSVDVLMDQNFGRDLAHPNPDELLLPSENKDSIVSCQYSSDKRLDWSLEMQNCSVTPLNDRMDSALLTDKIHSRQLDGSEQSSYSSFVEFPSTVDTSLWNDTENNAALTIDNITSSQMQPGFSSTDNTYALLNGGQDGLGTVYTHDNVSVYTHGNVSGHPGMGSHHHRAMGSLRNNSIGSFDKTISVNKYERRIISDTLSEFNPWDDSYSTANNFARMLRESKNNDVHCIAPSWKSGTGIKESRFSFARQDNQGNLFDSSLRNCGTGTEQNFSLLPQNSRGNIYQNGLAFQSLENEFSNNNSPGVLDMATTGTSMSKISAPPGFSAPTRVPPPGFSTAFPSQDSLNPTPVFPSGILCHGGSIPPPRFSSFSSGISTQEVSKPPTRPPSPFSSRFSSQDGLDPSSRFPFSSGFSSHDGSNQSYGSTNPENLLRGTVQGGNSNHYQSQFGRHSSDMEFDDPAILAMGKGLMPGIGDSGLEMKNTPAFQAQLQPASSDPRFQLHVQPNVQSRQNMRFTDPMQDGLNHMNDNYLASRFLAQNQGPLSPYVQIPQQPRNSQVINGHWDGWSDLRQGNNAPMSDMSRILYPSEVNKLHMLGSNDVHNRAFGM

SEQ ID NO: 64377 - protein, 391 aa, Zea Mays
MCHDLLCMDGNKYVQEVPSKNGSANEKKEVLLEDHDPVWLELRHAHIAHVNETLHEKMTSFVSKNKAAQLQQARSGGELSTKQLQKMVQALPQYSDQIDKLTLHVEIAGKLNNIIKEHHLKDVGQLEQDLVFGDAGTKELISFLRTRMDVSREHKLRLLMIYASINPEKFFESEKGAKLMQLAGLSADDMIVVNNMRCLRGADSKKSSVGAFTLKFDLQKKKPGIRKERTGEESTWMLSRFYPILEDLIEKLSKGELPKDEYHCMNDPSPSFRGIPGSTSARTSPAHQPAQSMRSRRIGGTWARPRNSDDGYSSDSVLKHASSDFRKLGQRLFIFVIGGATRSELRVAHKLSGKLKREIILGSSSLDDPPQFITKLKMLSTEELSLDDLQI

SEQ ID NO: 64378 - protein, 875 aa, Zea Mays
MASSAVAPRWLRGKVKAVTSGDCLVIMGCTKAEIEPEKSITLSYLMAPRLARRGGVDEPFAWESREFLRKLCIGKEVTFKVDYTAPNIGREFGTVFLCDKNVAYSVVSAGWAKVKEQGSKGGEQNPHLGELLRLEEVAKQQGVGRWSKEPGAAEESIRYLPPSAIGEASGFDAKGFAVENKGKSLEAIVEQAPSMGRRPSAPTVIAETDDTANDTNGEDSEGTPAQLTTAQRLVASAASAEIPPDRYGREAKHFTEARVLSRDVRIVVEGTDSFSNIIGSVYYPDGETAKDLALELVENGLAKYVEWSANMLDVEVKIKLKNAELQAKKDQLRIWTGFKPPVTNSKPIHDQKFTGKVVEVVSGDCIIVADDSAPYGSPSAERRVNLSSIRAPKLGNARTDVKPDHFAREAKEFLRMRLIGKQVAVEMEYSRRISTVDGQSVAPTANIADTRVLDYGSVFLGSPSQTDGDDISSAPSSASQPGVNVAELLLSRGFAKTSKHRDYEERSHYYDALLAAESRAEKAKKGVHSQKESPVMHITDLTTVSAKKAKDFLPFLQRNRRHSAVVEYVFSGHRFKLTIPKETCSIAFSLSGVRCPGKGEPYSDEAIALMRRRILQRDVEIEVEAVDRTGTFIGSLWESKTNMGSVLLEAGLAKLSSFGLDRMSDAHVLTRAEQFAKQQKIKIWENYVEGENASNGSAPESKQKEILKVVATEVLGGGKFYVQTVGDQRVASIQQQLASLKLKDAPVIGAFNPVKGEIVLSQFSLDNSWNRAMIVNGPRSVESLNDKFEVFYIDYGNQEVVPYSRLRPVDPSVSSSPALAQLCSLAFIKVPSLEDDFGQEAAEYLSECLLSSSKQYRAMIEERDASGGKSKGQGT

SEQ ID NO: 64379 - protein, 1200 aa, Zea Mays
MKSEPFEAGGYKWYILVYPQGCDVSNHLSLFLCVANHDKLLPGWSHFAQFTIAVANIDPKKMKYSDTLHRFWKKEHDWGWKKFMELSKIQDGFLVDDVLEIIAQVQVIREKVDRPFRCLDRPYRRELIRIYMTNVEQIYRRFIEERRSKLSKLIEDKIKWSSFRAFWSAIDPNTRHRMSREKTDTILKMLVKQFFVEKEVTSTLVMDSLYTSLKALEYQMKGRKGKTKLADLEELPAPMVHVDMDMFILADDVIALLERAALEPLPCQPLAPKDDKTSQPRMKDGSSGEVYNVSMEREERRLTELGQKILETFVLSHIFSGIEVAYQEAVALKRQEELIREEEEEAGLLEHQMKGKRGGGVNEKDKRAKKKQTKQKKNRKAKDKERDEKCEVKILERLRDETAIDNSDGLPSQVEVIAKIDALEEGSSDGSDMSNRGKNQRNKGLSIISFAEEGDGLPSTSNVTGGLGRNSSGCCTAPKLDQDTVLLTLRDRLRKLGQRLHEKNIEGQKLLKKHFEARDAKAKEEPSDSSNSLDKPPDVPEIPVHSSEDTVDLKVNGTPKKDASVVNPVLEDSVSGIPVTANNEPVPSPTTTKMDPVSNKVNGSSLKMKVTMASPCSKSHPADMDKDASLPSKSPRTNRAAPVPPKLPSADKATLVPSKLPSVDKATPVPQKSPLVNKVAQARPKSPAVDKATPHRPKSPAVDKATPVRSQSPAVDKATLVRPQSPAVDKATPVRPQSAAVDKATPVRPKSPAIDKATPIAPKSPPVDKASPALPKSLSGAKDALFPSRSLQIDKFTPAAPRLSQDDKAALPSSEQSHISPATSSEAQGATTRKVTTTTSLSEAAAAWRPSSAPVLPTPRSTGPAASHIQTSTLLSRSMSEAAGRRPVNDPSFSAPSYTPQTYRNAIIGKSGLSMTSASLAYQPSSLDQDTAPSRPLSAYASSTVMMPPAGRSDQSSARHGFKSGPGKLEAHDGWQQWKGDSNVDMHLWRDHAPYQQMTNSQAYEQSRRDDTYQQACSRGTEKFSRHAGLQARQQFQTETPASHVWHQPQGPVAEEFPHLDIINDLLEEDQINGSIPESFRQDYNVFGLPFSPRGNLSDMEMASVRSPARFNSPKYDGGLSGAYDMNAVNGLRERQFPSLDIYSNGLSDVSASKPWLNGSASPSVSLGVNTNGYHPQVGEYLGGGVNGVSLWRRHANGRW

SEQ ID NO: 64380 - protein, 285 aa, Zea Mays
MTEQTAAQFGKRKQWIMCPTCRQRTDIENIAFVVEKPWDKHEKSIEDLAESTISVQGSYGTKFEAVTRRILRITSTDGTAKVLVFSSWNDVLDVLEHSLAANNISYVRMKGGRKSQAALSQFKGQESNINVDKVNRAACKMQPVQVLLMLIQHGANGLNLLEAQHVILVEPLLNPAAEAQAISRIHRVGQDKSTFVHRFIVKKTIEESIYKLNRSRAVCSTINRKSKNFKDEPVLTLKDVESLFPMAGPDEPLEQADQNYGDSLRSLPPSVAAGLAAERRRLMEQ

SEQ ID NO: 64381 - protein, 162 aa, Zea Mays
MAKTKQGKRDVDAYTIKGTNKVVRVGDCVLMRPADTDNPPYVARVERMESDGRGSVRVRVRWYYRPEEAKGGRRPFHGAKELFLSDHFDTQSAHTIEGKCIVHSFKSYTKLDNVGPEDFYCRFDYKAATGAFTPDRVAVYCKCEMPYNPDDLMVQCEGCKDW

SEQ ID NO: 64382 - protein, 213 aa, Zea Mays
MFYAPVLFNTLGFKSDASLYSAVITGAVNVLSTLVSVYSVDRVGRRMLLLEAGVQMFLSQVAIAIVLGIKVTDHSDNLGHGWAIMVVVMVCTFVSSFAWSWGPLGWLIPSETFPLETRSAGQSVTVCVNLLFTFVIAQAFLSMLCHLKYAIFVFFSAWVLVMSLFVLFFLPETKNVPIEEMTERVWKQHWFWKRYMDDDNHHIVNGKLTGASV

SEQ ID NO: 64383 - protein, 548 aa, Zea Mays
MARIVSRALPFASRSSLRLPLPPPFPGAALVRSAAAGSPLPPAAEAALAASLLSWRGHTATPESSIAAPPPFAGFLAGIRRFRKGRRGQASAKRSQPQDAPPPPPPPPPPPKEREIELVARIGIEEDMPDDPEVLNIVEILKLNVPMAMKIALDGLLDSSYSTRDTSISDVGKYDKVEVSVLLCNDNFIQDLNKEWRDVDCATDILSMSQYIPDLDVPILMLGDIVISVEAAERQAGEKGVTLLDEVRVLVVRGILHLLGFQHESSNEAAAELEKEEQLILKSLRWKGKGLAKSVLDSSKPQTDSLDGQVTNDLKKAGSLRFYKPKFKYIFCDMDGTLLNSKSQVSARNAEALREARSRGVNIVIATGKARPAVIDALSMVDLSGRTGIVSESSPGVFLQGLLVYGLEGRRIYKRNLDQEVCREALSYSIENKIPFVAFSQDHCYSMFDHPLVDSLHYIYHEPKAKIVPSIGQLLETAEIQKVLFLETPERISSALRPYWAKAIEGRAHVVQAQPDMLELVPPATSKGNGVKVLLNHLSISPDEVELI

SEQ ID NO: 64384 - protein, 1070 aa, Zea Mays
MKRVTLSSGLSSSHGTSLMGAYAAGSCRAVKSSIYIWVLVLSVFTYIMIHILVFMKVVPRFVSEKRFVPKRLKDVARSVERWILSRCGVHRSEKNSSHEKDLEEARKFTLVLVTFAATVAYQAGLSPPGGFWAENDENKTPATSMLRSGNLPRYNTFVVCNSTSFVASLVTIILLLSPELSRHGIRSRAVTVCVVVDILGLVGAYAAGSCRSVVTSVSAVLVAVLVWICFAVLAGIFVNRSVAEWFGKKIKPDIMRCIDRFGRVFSSNHGRKRSRNPEGENSIASHQQTEESIKGEAEAETARVPEYQLPYHQLAPDIEEGECPGEQQSPGKQQPTNIEVVSISEHASVNEKQAENSSSVMCKLGSQSTDPNSAANEAMTETETENIQDANMEEQQSSLVDGLKTPTTVADQESTTVECLSDIAPNNHNGATNSFKEEKEASEQHLQANEIESFRTNNVARPVENGNVGMYEVTPRQDDGDVNAGANPTDEHLKKSRTYLLLLAILAVSLAYQSGLNPPGGFWTQRGTNNSPKSTHHRPYHLPGDPILEDTRHRRYIAFFYLNAIAFVASLVMIIMLLNRRMSYKGIKRYALQMAMIVDLLALTGSYIMGSSRGTKSSIYIWLLVCLVLVYVAVHVLIATHVIPEGCKKVVAQKIENFSCRYIWTKASFRNRGIDGNGSDCEAGQSQRSDADDKTWERRRNLLLMLAVLAATVTYQAGINPPGGVWSDDSSASGKPGDPILQHNNSKRYDVFYYSNSLSFVASVVITILLVNKESCEHGIKSYALRVCLVVGLVSLLIAYSAGSSRKARESIYLIVIAVAVLIALVIQVLLLSCTQDSLRGPTGQFIERLLQLLFGTDKAWHGDTSKQKESSGRPEKKVRKRHKYLMLLAVLAASITYQAGLNPPGGFWSDDNEGHVEGNPGLKPPGALWSDNKGHLAGNPVLLDINPRRYEIFFCFNSISFMASIVVVMFLLNKSARKKAVPLEVLHLIMILDLLALMTAFAAGSCRKFRTSVYVYGLVLGVVVYLVIAVLLSSGIAKCLRPMDRNRVSSQRSPIRAPTASTRILGDHA

SEQ ID NO: 64385 - protein, 127 aa, Zea Mays
MQCFIKRNKNNSTFYLYLGFTSSPVDKGKFLMAARRFRRGPHTEYIISLDAEDLSQGSNAYMGKLRFHTNTTCSNPEAPGECIALSNALQPKRLGKTHSRQSSGAPWAPQLYEIKHPAGMSTCNAGA

SEQ ID NO: 64386 - protein, 1118 aa, Zea Mays
MRLRNTDRAPRSSGRRNNVLSWISEVKDTSNVGVRKKRGRRAPPSAKRLRDKRVDKAIESDGAVDSDSDDTDGQVDKNQPSAHIEEHVDGRTGDDLATAGHSGNSSNGPSSASEEQDHSTNSKDKLQKASSQNTKKVFGNSTNGKQGASNLEQECANEDGSHVLVAAVYKDIDNERSSQKIRDDQVSDAQLDTASSDDKSSEEVEDVKVCDICGDVGEEEKLAVCSRCNDGAEHTYCMRVMMEEVPDSEWLCEDCQTAVESENENRLQKSQVKAGTSKELSLEGEINKPAIAAKGRSSSDCELKAGNIENKESNTTNERNGTVKTRTEEDAVTTSSTRDIFSETGGLYMGADSRKRMEPSHETFVSDADKGKQPSHQVSTSLVVNALKNQAPQSRGQLSKSTSFNNSKVPKVKQLLNEVPQKPKFLKESWSSIINKKEGPISMTTKSATFKKPKPCEPTNKAKSSVLSPVEEPRVPNQLASHNVTNGNSELKKPRLAKVPGSMMLSNAERSAGGILGSGAHREVIQNSDPSHRDAKIKDQTGFRQGASSSNRTIRCQRCNEYGHSTHFCEVEKLRLSSGKPLSERNLKDASAKRNKTSEVSTLASSEKTPSREPEHVVKCAINQNLINGPNDGIPAPFSHVKKHSLSPRANVSIPGSGVDCSKPKFKNNDPSLSGTAGIFVHNGRIMPNDHRDEPAQGFSAGDEPTSSTVPELGWIWQGGFELQRTGSSPELCDGFQAHLSCSASQLVLDAVKKFPSKVQLEEVPRKNSWPTQFQKNGPTYDNIGLFFFARDVQSYENHYSKLVENMLKNDLVLRGSVGTVELLIFPSNILSKNFQRWNMLYFLWGLFRVSKKDSSNLPSYLSTSRVERNFNDDLQAMDWMPSTHSFSQNRSDLAEPDPDLLKSTNFEPSLEASREVCLDGENSLNQLVRRRALDDHLDSDAKACSTISNGAMGSSAMSMQRKHQKPDYPEHQDKKRDTFGGNVSERDFDVNTVPVTCSVSLTHLQEEPGKLSTAIDLMDIDHGVSAGALDRSHASGGAGKRSFETAEVAAEVPEHKKTKLDNNVVPISSGPRENACTNDGNSDKLMPGSSSSDGKRVFPLDLNAVGDEDIVNIPAFR

SEQ ID NO: 64387 - protein, 287 aa, Zea Mays
MNEALNNGKRARPLYLDDDVLEDEAGQDDDVQVMGSRSMSASSKASSCTVPSPGTTAKRNKAIFQLKPHPIAAPKKLLNLICFFLYYLLSKMPTKPSDCIPFSNSTMGRELCIASVRTGEITKLILATTHLESPCPAPPKWDQMYSKERVAQAKQSLEILGGFPNAILCGDMNWDDKGDGPFPLQDGWTDAWVELKPGEDGWTYDTKANGMLSGNRKLQKRLDRFVCKLADFKMDSIEMIGKEAIPGVSYFKEKKIRKENQRIELPVFPSDHFGLVLTITQQKDDNV

SEQ ID NO: 64388 - protein, 504 aa, Zea Mays
MSTPLCVRSPNSQRRAGQPERKRRRQQVTGSLLCPLVSRVQTTASPWRRRRRSPGAASSLAGPGGSRASGAACPSSTRPPRPPSIKDRKSELALLETLDSGKPLDEASGDMDDVAACFEYYADLAEALDGKQQSPISLPMENFKSYVLKEPIGVVGLITPWNYPLLMATWKVAPALAAGCTTILKPSELASVSCLELGAICMEIGLPPGVLNIITGLGPEAGAPLSSHSHVDKVAFTGSTETGKRIMISAAQMVKPVSLELGGKSPLIVFDDIGDIDKAVEWTMFGIFANAGQVCSATSRLLLHEKIAKKFLDRLVAWAKNIKVSDPLEEGCRLGSVISEGQYEKIKKFISTARSEGATILYGGGRPQHLRRGFFLEPTIITDVSTSMQIWQEEVFGPVICVKEFRTESEAVELANDTHYGLAGAVISNDQERCERISKALHSGIIWINCSQPCFVQAPWGGNKRSGFGRELGEWGLDNYLTVKQVTKYCSDEPWGWYQPPSKL

SEQ ID NO: 64389 - protein, 235 aa, Zea Mays
MVGGRRARTCTTAPPPPPPLRRRCRSPPPTASCAGKLVEKTREVTLHTEDMEDSICAVRSMADFGLPLADDMIKDINRSLQIMSKTQPKRGLIQNPSWGFQSRKSSGTWDELGSTNGSSSRNYLSSMFNTAKQKASGLRWPQPNFATKDDTSENSASSSALESPQAGGQGASTPDTEKDELPISSRLSEGTAANRSLPATGVSETVEAYNKFKEEQELKLREWLRDSEEAVNDKD

SEQ ID NO: 64390 - protein, 772 aa, Zea Mays
MQEGCKAYLLDDSAASLLMRCHTCSKGVLDFFPELPPCVVNMQALVTSTDPDAPLGSGADSIPTHVGEGALEPGHGDVAVGGLVELGAVPVPVEATTRRRTPTLSFAGNYSQHALTIWRPSFMQQIRFDAHTPLREAWEIDAHMQSAVRGPGAFNVYGRAGEHPAPWTDPPGPLDRAPAVGTFQIELQQQAQVRSDQSASRTSGRGEALESRADQDVCEDRPHDAQTSAVEEAMAAGAGDPGQLDQLLLLDPYAEDDITNYCVEFHNAVVTTIYSSIIIKPETGSSSSSSFACSTNCPSQALHNIGKPSLVAVVTIAGTPSSTLIDAQVVLGEMQPREHSTLMTATIELRFILWYFFILDLVALQQSPPWPQPVKSLVVVGYILPKPPWLAFDRGNLFRIHYTCSTRSASLQYTLQLSPDAGNIQNQCLDLCLVNLITGSALNVRVQQLLVSVGSPSNALVLKIPIQGVVDALHRKTLQGTGLNEEQMRQASVADNGHRQLNKILVDLDQDNITAKNYAIAFYTEKHIQIPCLGGEHEVTFFHEYRDSVERVFVDHPSYHRPGNLYGAKVVLLGFQHYAVMLGTTVIIPTALVPQMGGKYEDKVVVIQTLMFVVGMNTLRQSFLGTRLPAVTGGSYTFVLYTISIILGGRSANEPSSHIKFLGIMRGTHGALIVASALQIIVAFSGLWCNVARYLSSLSATPLVALVVFGLYELEIPRAGKIKALSVDAVIVFGSQRIPQVIHSVMWIMFILFRVIWCLQFSWDPGGSNWWK

SEQ ID NO: 64391 - protein, 215 aa, Zea Mays
MDQWTLLLGDWFLDTRTRVLTHATIEEIEAEKSLIEDQAKEKMEKAIETVQTNFNTVRTGRASPAMLDRIEVEYYGTPVNLKSIAQISTPDATSLLIQPYDKSSLKLIEKTIVAANLGVTPSNDGEVIRVTVPPLTSDRRKELAKTVAKLAEDGKVAIRNIRRDAIKAYDKLQKEKKLSEDNVKDLSADLQKVTDEYMKNIDSIQKQKEQELMKI

SEQ ID NO: 64392 - protein, 203 aa, Zea Mays
MASSSVAADMELDRPNLEDYLPPDSLPQEAPRNLHLRDLLDISPVLTEAAGAIVDDSFTRCFKSNSPEPWNWNIYLFPLWCFGVVIRYGLLFPLRSLTLAIGWLAFFAAFFPVHFLLKGQDKLRNKIERKLVEMMCSVFVASWTGVIKYHGPRPSTRPHQDLFRRLSWKVWVASGLTVMISGIVKLRHGSCVIMFNIQTKTLS

SEQ ID NO: 64393 - protein, 184 aa, Zea Mays
MLTILSFSSPSGQAHHVANNKYVHHLQWKYSLGSFNLLGHTAPAQAASLLIVGPFVDFWLTNKRVDAFNYTSIVTFFIVLSCIIAVGTNLSQFICIGRFTAVSFQVLGHMKTVLVLTLGFLFFGKEGLNFHVALGMLLAVIGMIWYGNASSKSGGKERQVYPTPSEKSQKHGALSSQSELDQKV

SEQ ID NO: 64394 - protein, 57 aa, Zea Mays
MFCTSSSSSFGLITPIGMFFIASLSGSSPTSSRFSSAPWEPLVSSNSTSYVSSTTPV

SEQ ID NO: 64395 - protein, 434 aa, Zea Mays
MALEAGSSGCGGRGWGGGFRSLMRRKQVDSDRIRAEGQPQLAKELNVPELVAIGVGSTVGAGVYVLVGIIAREHAGPALTISFLIAGIAATLSAFCYAELASRCPSAGSAYHYSYICVGEGVAWLIGWALVLEYTIGGSAVARGISPNLALFFGGQDSLPWILARHQLPWFGIIIDPCAAALVCVVTVLLCMGIKESSFAQGVVTVLNAFVMIFVIVAGSYIGFQIGWVGYKDSDGYFPYGVNGMLAGSATVFFAYIGFDTVASTAEEVRNPQRDLPLGIGVALAICCALYMAVSVVIVGLVPYFAMDPDTPISSAFAKHGMQWAMYVVTTGAVLALCSNLMGSLLPQPRILMAMARDGLLPSFFSDVNKQTQVPVKSTIVTGICAAALAFTMDVSQLAGMVRNQLSVIVCVGGEDTGLGDFLYYLGHTNHVWL

SEQ ID NO: 64396 - protein, 93 aa, Zea Mays
MSEALQKDKEIGEEEEEEEYVLLELDNCLYSDISPGAQFVLSGLDTLTPTLIVGDNLKMVSHVLVLFFILCTVPLPFGLWTVAGPVLLEVLCA

SEQ ID NO: 64397 - protein, 242 aa, Zea Mays
MYRFLVDGVWRCDETKPFVRDEYGLISNEVLVENNVLPVVQPEPSIRGTNMDKGTILKTMPLEPSSQNPSMQIAVIRHVVSGILLHNTIYDVVPLSSKGLALVPFWDDRQGTITGMLTASDFVLILRKLQRNIQVIGNEEPISAWKEAKLQFYGGPDGAVMQRTPLIHATLISGPRKKLNSACFLFEARATNLPHQISVAKAGLVNKLCFLPDCHCFYICAFILRETFCPKKACSARFKQVI

SEQ ID NO: 64398 - protein, 144 aa, Zea Mays
MREHERRVWSVDFSIMDPTKLVSGSDDGSVKLRDMNQAGSIGTIKTRANVCFVQFQPDTARSIAIGSADHKIYCYDLRHIRAPYCTLVGHTKTVSYVKYLDASTIVSASTDNSLKLWDLSMSTGRIIDSPVQTFKGHTNTKCLR

SEQ ID NO: 64399 - protein, 375 aa, Zea Mays
MAAAGGRTLGRSSFSRATSNLVASSSGASGVKIGPNGASFVSSGIPDLDRILGGGFLLGSVVMIMEDTDAPHHLLLLRCFMSQGVVHKQPLLFSGAMKEPVLFLGTLPAPVSSSKEDGRHRAMGPAASSDGRANDEGLRIAWQYKKYFGDDKTSRAEHKDNKQEFSNDFDLRKPLERHLLNGQNIECVSTQDADTLSSLQDCCSAFVSKLPRKDGGSSTAGRIAIQSLCAPQCRYFEKDWDMVSFIRSLKAMVRSSNSVAVVTFPSTVLSNSFCKRWQHLADTLLSIKAIPDEDKDLAKLLTGYQDMVGFLHVHKVAQPNSQVPVILEASTLSLKLRKRRSLVLERLNQAPVDGSSGPSSAASSSCSSQGSQLDF

SEQ ID NO: 64400 - protein, 359 aa, Zea Mays
MAWCVGPDRHRDQPPPNPAALLAAELSSNARTTSRPPQLKPRGKAGCECETDQTKNTYQSPAHSGRGRTIGTRPSPPSSSSHVLFHSSNGLCFIRPYCHNLPADGLREHLLDVDGGGAAAVPKIRVRGLRRRADATGEEILRGVHLDVPRGAVMGVIGPSGSGKSTLLRALNRLWEPAPGAVLLDGADICALDVLALRRKVGMLFQLPAMFDGTVADNVRYGPQLRGKKLTEAEVKSLLHLADLDPALCSKPASELSVGQAQRVALARTLANDPEVLLLDEPTSALDPISTQNIEEAIVRLKKTRGLTTVIVSHSVKQIQRIADLVCLVVAGEVVEVLAPSDLSDAKHPMARRFLELSG

SEQ ID NO: 64401 - protein, 274 aa, Zea Mays
MATARLPSRSFLSPAQQSYPRLPASVRLCLSHHEQPPTGPKRHRRAATSHPAFSAAARGRAKKIPIADTDEPAAGVRVTDRGISYRLDGAPFEFQYSYTEAPRARPVALREAPFMPFGPEATPRPWTGRKPLPKSRKELPEFDSFVLPAPGKKGVKPVQSPGPFLAGMEPRYQSVSREDILGEPLTKEEVSELVKGSLKSKRQLNMGRDGLTHNMLENIHSHWKRKRVCKIKCKGVCTIDMDNICHQLEVLGSRAREMTLVESVANWEPSTCPR

SEQ ID NO: 64402 - protein, 152 aa, Zea Mays
MGWQGKDPSTDFRGGGFISLENLLYFSRNYPKSFQELLRKQNGDRALWEYPFAVAGVNITFMLIQMLDLQAAKPTSLVGAVFLNLLLENDRAFDILYCITFKLMDQKWLEMHASYMDFNTVIKSTRRQLERELLLEDIQRIEDMPSYRFLAC

SEQ ID NO: 64403 - protein, 260 aa, Zea Mays
MDSSSESDRSHQEASAASESSPNEHTSTQSDNDEDHGKDNQDTMKPVLSLGKEGSAFLAPKLHYSPSFACIPYTSDAYYSAVGVLTGYPPHAIVHPQQNDTTNTPGMLPVEPAEEPIYVNAKQYHAILRRRQTRAKLEAQNKMVKNRKPYLHESRHRHAMKRARGSGGRFLNTKQLQEQNQQYQASSGSLCSKIIANSIISQSGPTCTPSSGTAGASTAGQDRSCLPSVGFRPTTNFSDQGRGGLKLAVIGMQQRVSTIR

SEQ ID NO: 64404 - protein, 152 aa, Zea Mays
MWHFIPSVHSRSTAPTLSSTSDRPAAMAFASPRWRYAGGMPRVNQCPITRRTQCHTKELGERNRYSYLTGDPWVDDAGCREQEHTAILNVVEASRVSHPRHARQERDPRRVPRQSTTCARDSHGHCPGPEISRGRAPTNRPVCHYGPRRLTE

SEQ ID NO: 64405 - protein, 82 aa, Zea Mays
MSKVDFRKMLKSSLTGLDKTINAMYRKLQKNMTAEELLPSLWEKCKKEFLDKYATFLKLISKIYPDEKVISVNEMRDTLASL

SEQ ID NO: 64406 - protein, 121 aa, Zea Mays
MSSASSSAAAANAGEGSGGAEEGVEITYVSYGGEQHLPLVMSLVDEELSEPYSIFTYRYFVYLWPQLTFLAFDARDGKCVGTVVCKMGEHRGAFRGYIAMLVVLKPYRGRGIELGCISRVG

SEQ ID NO: 64407 - protein, 52 aa, Zea Mays
MADGQTEPRIGFGIEALPKSCAGCLRNSFRYCGLRLSLATYSSLSLYLNSTL

SEQ ID NO: 64408 - protein, 339 aa, Zea Mays
MASASTAVRMLPDGGADDEERWLAEGIAGVQQNAFYMHRALDSNNLKDALKYSAQMLSELRTSRLSPHKYYELYMRAFDEMKKLEMFFREETRRGSCSVVDMYELVQHAGNVLPRLYLLCTVGSVYIKSKEAPAKDVLKDLVEMCRGIQHPLRGLFLRSYLSQISRDKLPDIGSEYEGDAETINDAVEFVLQNFIEMNKLWVRMQHLGPAREKEKRGKERNELRDLVGKNLHVLSQIEGVDLDMYKETVLPRILEQVVNCKDDLAQFYLMDCIIQVFPDEYHLQTLETLLNAFPQLQPSVDIKTVLSQLMDRLSNYAASSPESSCKLKLLLSSVMLLER

SEQ ID NO: 64409 - protein, 423 aa, Zea Mays
MRPARPPTMEMQPPPTAMQGRRSPRPLEESIESWLPISSSRNAKWWYSAFHNVTAMVGAGVLSLPYAMSQLGWEVGVTVLVLLWAITLYTLWQMVEMHECVPGKRFDRYHELGQHAFGERLGLWIVVPQQLVVEVGVNIVYMVTGGTSLKKFHDTVCGDSCTDIKLTYFIMIFASCHFVLSQLPSFHSISGVSLAAAVMSLCYSTIAWVASAHKGRSPDVHYGLRATTAPGKVFGFFGALGDVAFAYAGHNVVLEIQATIPSTPERPSKKPMWKGAIVAYAIVAACYFPASLVGYWAFGNQVNDNVLVSLSKPKWLIALANMMVVVHVIGSYQIFAMPVFDMIEAVLVMKFRFRPSLMLRLISRSAYVGFTMFIAITFPFFGALLSFFGGFAFAPTTYFLPCIMWLRIYKPKTFSVSWFTNWE

SEQ ID NO: 64410 - protein, 227 aa, Zea Mays
MESTLLKMLSQNCKPDVWTMNSTLRAFGSSGQIETMESCYEKFQASGIVPNIKTYNILLDSYGKAKMYEKMGAVMEYMQKYYYSWTIVTYNVVIDAFGRAGDLEQMEYIFRLMKSERIKPNCVTLCSVVRAYGRAGEVKKIKTALRIIENSDITLDIVFFNCLVDAYGRVGCLAEMWDILDLMKEHRCKPDKVTCTTMIKWFLIKGIDDHRVQYLRDLKDGRAKDDT

SEQ ID NO: 64411 - protein, 79 aa, Zea Mays
MPTEHLKCVNLKIFKLADWLDKVSILCFEVVEKDGSNHLDDNTTEEELEAAREIELERLPTPETLKNLEDFCEEWVCTK

SEQ ID NO: 64412 - protein, 732 aa, Zea Mays
MEGDDFTPEGGKLPEFKLDARQAQGFISFFKKLPQDPRAVRLFDRRDYYTAHGENATFIARTYYHTMSALRQLGSSSDGILSASVSKAMFETIARNILLERTDCTLELYEGSGSNWRLTKSGTPGNIGSFEDILFANNDMEDSPVIVALFPACRESQLYVGLSFLDMTNRKLGLAEFPEDSRFTNVESALVALGCKECLLPADCEKSIDLNPLQDVISNCNVLLTEKKKADFKSRDLAQDLGRIIRGSVEPVRDLLSQFDYALGPLGALLSYAELLADDTNYGNYTIEKYNLNCYMRLDSAAVRALNIAEGKTDVNKNFSLFGLMNRTCTVGMGKRLLNRWLKQPLLDVNEINNRLDMVQAFVEDPELRQGLRQQLKRISDIDRLTHSLRKKSANLQPVVKLYQSCSRIPYIKGILQQYNGQFSTLIRSKFLEPLEEWMAKNRFGRFSSLVETAIDLAQLENGEYRISPLYSSDLGVLKDELSVVENHINNLHVDTASDLDLSVDKQLKLEKGSLGHVFRMSKKEEQKVRKKLTGSYLIIETRKDGVKFTNSKLKNLSDQYQALFGEYTSCQKKVVGDVVRVSGTFSEVFENFAAVLSELDVLQSFADLATSCPVPYVRPDITASDEGDIVLLGSRHPCLEAQDGVNFIPNDCTLVRGKSWFQIITGPNMGGKSTFIRQIVIWGDSLSSCIHTYLIQELHTSRWVAQKLNCSRLQKGFAMTQNVAGTKKSAV

SEQ ID NO: 64413 - protein, 319 aa, Zea Mays
MRKGPHYLDMVMIFAKATDKAMAGLRAKLETAYKTSGGKKVNLISHSMGGLLVRCFMSMNHDVFTKYVNKWICIACPFQGAPGCINDSLLTGLQFVYGFESFFFVSRWAMHQLLVECPSIYEMLPNPEFKWKEKPIIQVWRKNPEKDGTVELVQYEATDCVSLFEEALRNNELTYNGKKVALPFNMSVFKWATKTRQILDNAELPDTVSFYNIYGTSYETPYDVCYGSESSPIGDLSEVCHTVPSYTYVDGDCTVPIESARADGFSAKERVGVKADHRGLLSDENVFKLLKKWLGVSEKKSEWRCVSKSYSKVGNWVAL

SEQ ID NO: 64414 - protein, 230 aa, Zea Mays
MCTFSNHESMVYCEMCGVFRETFVKSAKDGLLKDTAVAVSSEPRTSAASKNDSAKAPVKTRAVNSDGDSMRKHASMSYDKANSTQLPSAGSSLGAEKKKKTPVLSEEVPVERIALLASDGFQSKGNQNSGASSSSQNDNVIQKLSSDVGQLNVNKNNVNVTKSCLPDEYKPEKWMLADLESRALSQLNLAIVGHVDSGKSTLSGRLLHLLGRISKKYMHKNEKESKEKVC

SEQ ID NO: 64415 - protein, 313 aa, Zea Mays
MQILRLLAARRFRRRRRRPVSTITATATAPVTPRGGAAGGCMYGYGEEEDEGPFFDLDLTCCSAPASSAGSQAAESGSESEDTSSCGAAADGGAAARSDLDFVISLHRSRPSSPSYEERLFCRGAAPARPPPLMFCASEPSDAASRSRARDSSGGGRLRLRTLSFGSAKAAFSGGRASFSRSTSGARSARLFAAYDQDLPDEGRALRPPSGDVIRRYLSKISSRLRRVGVGVGVSHPAAATDLRLRKSRSASAAQASSTAQSPPPRRDDSLAEKQDGIASAIAHCKESLHRGPCRRRWTRRWRDRGATQGRNL

SEQ ID NO: 64416 - protein, 62 aa, Zea Mays
MNDAIRTYLSMVIRDTSYFGKIKWLSLIRRHWFDRFCHVWAAFDLFVGSVSWVSSAPEQFAL

SEQ ID NO: 64417 - protein, 194 aa, Zea Mays
MQESKKCVRWTLRVTSIHGLRAPLPFLQSVKVSFPERPDLKSVVLKEQPFSLQRETSMNKPFFMLLTLNFSDGCSCLSSSIGWPVDFQKRKDSFVRDRALVLRELYSAAQRESCIGQQEILERENLPRAETSIHGIVTNIVRYDTEDEKLAPPKNDLMNHSRSNPAKRHVEGTDCHSSLPKKLKYFLKDKKLNC

SEQ ID NO: 64418 - protein, 165 aa, Zea Mays
MHRGGDRSGGPSSGGDRSGARFQRGPSRWSGSSGGGLGGSPPNRYSSRGAADGGGGGGGGSGGGGRFHPYRGSSDYSSGGGGYRGGSGVGNDFGDQRQRYGGGNRGGGRGDFQDHDSRSNYVKLFVGSVPRTATEEDVRPLFEEHGDVLEVALIKDRKTGEQQGF

SEQ ID NO: 64419 - protein, 460 aa, Zea Mays
MESARAAADQAAGLDVDKLTYEIFSILESKFLFGYDDPKLFSPASAGASPSPGAAAAAAASSKVCILSIDGGGGGGRAADGLLAGAALVRLEASLRRRTGDDGARLADFFDVAAGSGAGGVLAAMLVARGADGRPRFSADDALAFLLRSLRRGSGGLGLGLGLRALFKSLRRPGGGAAAAFRGVFGDLTLRDTVRPVLVPCYDLGTAAPFLFSRADAVETRAYDFRLRDVCAATCAGDSVEARSCDGSTRIAAVGGGVALANPTAAAITHVLNNRRDFPLAAGVDDLLVVSIGSGEADQRGAASSASQIVRIAAEGVADTVDQAVAMAFGHNRTTNYIRIQGRREGRAVAPPRRRRRCWRRGTWSRCCSAGRWWRSRPTRRSWSGWRTSWSRSATGAGPAPARAPPRRRLRSSSTTGRRRRRRTRASSATPSRASCRPRADPQPAASSQRNGPNCERPGV

SEQ ID NO: 64420 - protein, 587 aa, Zea Mays
MSTAATACATRAAARPPLNTAPARRAPPSAVRPPSATPARRAAGCCFCAAASSASSPSTWDWTRWSRHFDEVDQAESYASLLQFQLEEAVENEDFAEAAKLKRDIIEATGNDAVAHVMAELKNAIEEQRYQDASRLTRLAGTSLVGWWVGYAKDTDDSIGRIVRISPGVGRYVAKSYNPRQLVTASSGTPLFEIFLVKEDDETYTMKVVHMRPTKGTSGAPSISSTITESPAKVENENSSESSAISDSVTEEANTDTTVRGNEDAEEKAQDVGSSKDSSVEGLKSVLNFFKSRIPEFKVQVINVDVAEETELAANSSEELVQDDVKSTPESSLEEPATEELEQEEDVPEENTDEESKSTEVKLFISGVVHNKEDAGAKSYVRVPAEINNMEKDSFELYIPGEGSDRDLAETKAAKQKVADMAAKLASELMPSDVAKALWGTAKSSSKINKEVQELLRLTLSKARVKLTENTIFKRIIMDTNSTDPFNGLYVGAFSPYGPEIVQLRRKFGHWNSTDDVEFFEYVEAVKLTGDLSVPAGQITFRAKIGKGKRLENRGAYPEEFGVVISSCRSDCLKDAKILPVTKVRVE

SEQ ID NO: 64421 - protein, 100 aa, Zea Mays
MGSLVLCCGDGAVMNSTNLGLLRHGVSIWIDVPLEMAANDMLKSTGTQATTDPDSFSQAMSKLRQRYDELKERYGVSDITVSVQSKDRSSNRLSFPLSYN

SEQ ID NO: 64422 - protein, 278 aa, Zea Mays
MLITTLQIVFREDFGTEGRGGYFDQYGIIRDIIQNHLLQVFCLVAMEKPVSLKPEHIRDEKVKVLQSVNPIKPEEVVLGQYDGYKDDPTVPDDSNTPTFASVVLRVHNERWEGVPFILKAGKALSSKKAEVRVQFKDVPGDIFRSKKQGRNEFVIRLQPSEAMYMKLTVKKPGLEMATEQSELDLSYGMRYQNVKIPEAYERLILDTIRGDQQHFVRRDELQAAWKIFTPLLHDIDDGKLKALPYEPGSRGPKEADELSARVGYVQTHGYIWVPPTLA

SEQ ID NO: 64423 - protein, 278 aa, Zea Mays
MGSTSATGTTSSSSSAAHGGGAAHVLLLPYPGAQGHTNPLLQFGRCLAYHGLRPTLVTSRYVLSTTPPPGEPFRVAAISDGFDDGGAAACPDLDVYWRQLEAVGSETLAELIRSEAADGRPVRVLVYDPHLPWARRVAQAAGLAAAAFLSQPCAVDVVYGEVWAGRLPLPVVDGKELFARGLLGVELGPDDVPPFAAKPDWCPVFLRASLRQFEGLEDADDVLVNSFHEIEPKVRSPLPRPAPVCCFAQMNFGVAYTSSSFVHNHVYSLNNIWLVCLL

SEQ ID NO: 64424 - protein, 650 aa, Zea Mays
MARLFRESRRDSSHSSSSNGFLPPAAASSPSSASAIPSPFPDLGVALSAADLREAAYEVLVAASRTTGGKPLTYIPQSSSVATGPPVSPASSASSASSASLQRSLTSAAASKMKKALGLRSSASSKGVGSPGSGGKAAPPRRPATVGELMRVQMRISEPADARIRRGLLRIAASQLGRRAESMVLPLEFLQQFKASDFPDPQEYEAWRSRNLKLLEAGLLVHPLIPLNKSDSSGQRLRQIIRGAYDRPLETGKNSESMQGLRTSVMSLAGRSHDGTSDGCHWADGFPLNLHLYQVLVEACFDNDEGTVVDEIDEVMELLKKTWVILGINELLHNLCFTWALFNHFVMSGQVDIELLSAAENQLAEVAKDAKSTKDPNYCKVLSSTLSSIMGWTEKRLLAYHETFNTCNIESMQGIVSIGVSAARILVEDISQEYRRRRKEETDVARSRVETYIRSSLRTAFAQRMEEADSKRSSRNPTPVLSILAKDIGDLATKEKNIYSPILKTWHPLASGVAVATLHSCYGNELKQFVAGLTELTPDTVQVLKSADKLEKDLVNIAVEDSVDSDDGGKSLIREMPPYEAENAIANLVKVWIKDRVDRLKGWVDRNLKQEVPTGIILLPLLWRCFGLLVKHWMHFSNCLYQCIQLFFLI

SEQ ID NO: 64425 - protein, 1001 aa, Zea Mays
MASHGIGAAAGSDAPHAEVVTMGQTNPSPYPPVSSSHHSWSSATGSVSWNNTVDKLSQDTVYYDPQRDVSVSGGNQNVGSSAPHVAQASMGITDAAHSHVPYSSSDQHGYNPVEYANYYYSYPQAANDSSVQQGANQHPGAAYQPLTSFQNSGSYIDPTSNTYYNAGDHQTVPGYGSSSYYFQNNTWNGGSTGNNFAQSYQNYSPSDTNAQQSSTSVPANSLPYQQQYNQWPYYYNQSVPSASSNPVAGNSTTDNLAVNTPSSYSYPNSQPPPPGTTSWKSNSSASVAPPMQVPGVLEHQNQYGNQAEGHYNQGPGVQWSQNHYAYQTQPYPQKINSNYSQLSNPEDQLRTVDSNGPSTNLSSNHVSENFKPNLLDSVTMNTSSESKIQVPINPRIAQGFSMVIPKNEKKSSGLDLSRKPAYVSVSMPANDAKASQVGPDARSIPFSLRNYAMRNLNRCKNDTQRAACRSIMEEITKKAFAEGTLLTKNWDTEPLFPLPESVVGMAGASDLSPFLSVSTPRKRVKSRWEPVVDENVTNKVEQIAKGLISSNVHSTLDPKNRIPNPVRGSSWDRGKFLQSCQASSNKVNQRPAKKQKMASNLSQIQNGSASSDSEKEHDLTKHYASATALANSPEEKKRREHRSKRFEKSKDSSLKSRNASANNDGMASFRARRAISSLRTRTYEEGTLAVEDMDWDALTVKGTCQEIEKRYLRLTEAPDPAKVRPEDVLEKALAMVETSEKNYLYKCDQLKSIRQDLTVQRIQNELTVKVYETHARLAMQAGDLPEFNQCQSQLKRLYAQGIKGCYFEFSAYNLLCVMLHSNNKRDLLSSMASLSKEAKQDAAVKHSLAVHASVLSCNYVQFFKLYKKAPNLNSCLMDLYVERMRFEAMKCMSRSYRPTVPVGYVAQILGFLRTDTGCATNGDDGLEGCEKWLKAHGTVLSEDSSGELQIDTKASSSTLYMPEPENAVAHGDASLAVDDFFARTDGQLKRGSSDGPTVDTP

SEQ ID NO: 64426 - protein, 251 aa, Zea Mays
MRFNLRKNFPLLTTKRVFWRGVVEELLWFISGSTNAKVLQEKGIHIWDGNASREYLDRIGLAHREEGDLGPVYGFQWRHFGAEYTDMHADYTGKGFDQLMDVIDKIKNNPDDRRIILSAWNPSDLKKMALPPCHMFAQFYVENGELSCQMYQRSADMGLGVPFNIASYSLLTYMIAQVCDLSPGDFVHVIGDAHVYRNHVRALEEQIQKMPKPFPILKINPSKKDIDSFMASDFKLVGYDPHQKLEMKMAV

SEQ ID NO: 64427 - protein, 353 aa, Zea Mays
MVLEATMICIDNSEWMRNGDYAPSRFQAQADAVNLICGAKTQSNPENTVGVMTMAGKGVRVLVTPTSDLGKILACMHGLEVGAEANLAAAIQVAQLALKHRQNKRQQQRIIAFIGSPVKYDKKILETIGKKLKKNNVALDIVDFGESDDEKPEKLEALIAAVNSSDSSHIVHVPPGENALSDVLLSTPIFTGEEGGSGFAASAAAAVATGASGFEFGVDPNVDPELALALRLSMEEERARQEAIAKKAAEDTSNTENINASSSNSDSVMAEAELASNAAAGDKQEQPKDANMSSDTDMSKVFEDRTFVSSILNSLPGVDPNDPSVKDLLASLHSQGEQEKKEDKSDKTEDEKN

SEQ ID NO: 64428 - protein, 61 aa, Zea Mays
MSRGTPLYGVAPETSPASWRSSQANSWTPVIDISGGTMSAANSPTSLCLNPSPTVRSTQAG

SEQ ID NO: 64429 - protein, 110 aa, Zea Mays
MGAERNHEAIQTREPPGEEESVVSIREPSTGIHRSFGQAAYRGDPWLDCPSRTADSGGAGDDDGTQPTSPEPDGGDALLLRIPAFSLFDKDGDGINLTSIQRTRSVHCFR

SEQ ID NO: 64430 - protein, 160 aa, Zea Mays
MLTRHRASMNFTCAEMRDSEQSSEAKSAPEELVQQVLSAGWREGLNLACENALNRYDATAYNTILRNARPQGINKNGPPEHKLHGFTYLRVSDELFQEQNYTTFKTFVRRMHANLDYNPNVDPVAPLERSKAEIPIEEILEVAQPKLEPFPFDKDTDLPV

SEQ ID NO: 64431 - protein, 162 aa, Zea Mays
MDFPFSPASSTSPTQATTVKSPAPRLCASSIVTGRRGRCPAVAPGVLAHLPAPTNFAPRRPWSRSSPAHAPSFMFSLFLPRSDTRKDIKAYDTHKLSLAVSITPVKKIRWLENHQWKHISTGGWCNRTASENRIFPLAVGVTEPPVKIRFPLSVLLHLAVVL

SEQ ID NO: 64432 - protein, 323 aa, Zea Mays
MFIMDRSIMADGETSAEEKRRWTGPPEAQELEERLDSLRDKIAAASLVAGSRFGEEQRRSLLQEWLRLASAKLDLDLSGISEFDLSAEALPWLMPPEEADKRTTHTRQEAQELEERMTCLRLLFEDAADDRILARRELGAAADEFLLRLTTRQQALTREYSRLANLKRPLDLSGMTEADRAAEAERLREEKLQKARQLQDQGDMSGARECEGLARIIDFDVKQGGEYLNSICCVGNIYTFDHTEESPVGPMRFTNRPWQDKMCVNCASINILSVKIACSDIDFPIQVYGTVVARDCIDYKCVYLFRRDNDHCQLISSNVRIYN

SEQ ID NO: 64433 - protein, 249 aa, Zea Mays
MASASFIASQQGTRFSPFAHPRLEASWPPGVMKTEESPYHITHQIPLGSSSSSRQQHFVALGAATPAYAKEGRRFPFLQEGEISFATGVVLEPPAAAPACQPLLRTGAPSESSGAGGSKMFSDQGLARVLDSDCALSLLSAPANSSGIDVSRMVRPTEHVPMAQQPVVPGLQFGSASWFPRPQASTGGSFVPSCPAAVEGEQQLNAVLGPNDSEVSMNYGGMFHVGGGSGGGEGSSDGGTSSSMPFSWQ

SEQ ID NO: 64434 - protein, 675 aa, Zea Mays
MALRHLVTGQNNCVPDGASSSNPLNALANAFLGQSSKAQSIKELPGSVNVPSTSDFSVSAPLSNIPGSENEFKQDQRPLARGADFIRGGPANDWIESFRPPRVPQLGVEAQFPDFEQIYNNAGTTFQFQPPLDGPPQRVLSGVLHSFLTSGPAGVPFQPLPVPAALGLSESDKQCIRDRSCIMARHIFSDQPEEYIQSQVNTLLHSLDIDNRMRGPMHGQYPELQEYWKQSQSSTRPAPMHNAADKWITEFGKQNNNPENWANSFEQQYGPNGWASEFEQMAMRQMGGANMANLAAMEQSRVLAQTLASNNDPKFQLSQGADKWVSEFSSQPNHGALNENWVDEFSKLNVTDEWAEEFSGGGFGESSADPWVDEFQEHLSSFKQSPGASRGVYVFSENNPYVGHPNPMQEGQELFRKGLLSEAVLALEAEVLKNPDNTEGWRLLGVTHAENDDDQQAIAAMMRALEANPTNLEVLLALGVSHTNELEQGEALRYLYRWLQNQPKYGGLVPLQSTDSPYGPDVVRLFNEAAQMSPEDADVHIVLGVLYNLSREYDKAIASFKTALQLKPQDYSLWNKLGATQANSIQSADAILAYQQALDLKPNYVRAWANMGISYANQGLYEDSIRYYVRAVAMNPKADNAWQYLRISLSNASRADMIAACDARNLDALQKEFPL

SEQ ID NO: 64435 - protein, 637 aa, Zea Mays
MTFSMDMDLNASPVPDDDEQQPYNEPVEAEYAQEEHVESAVATLRREREERRKRLKREQQDDGSRLHSQQIRVDYAPQPKRHSRIKEAPQGWLDCPAFGEPIDKIIPSKVPLDETFNESVPPGKRYSSKQLVNKQRKAGREIGLVIDLTNTTRYYSPAEWTKQGTKYAKIACKGRDAVPDNESVNKFVYEAINMFAQRRPPGIYKRDYIEALYSFYHEVPENMMIACPPTPEWKRPDDLDLNGEAKQDDDDDNGDPEPPRNESEDKIITNDDVLGDEVPYDQQEALRVLCYKLLEMPLIRGHSQFPGSHPVSLNSENLQLLRQRYYYATWKADGTRYMMLIMRDGCFLIDRNFCFRRVQMRFPHKSLEGLHDMTLIDGEMIIDTVPDSGLKRRYLAYDLMALGAVSKTKLPFSERWKMLEDEIIRPRYYEKNKFESGSKSNPLYKYDMELFSVRRKDFWLLSTVKKVLKVFIPSLCHDADGLIFQGWDDPYVTRTHEGLLKWKYPEMNSVDFLFELTNDNRQLVFLYERGKKKLMDGARIAFTDDVDPSSIAGRIVECSWNKEEQCWSCMRIRSDKSTPNDINTYRKVMRSITDNITEEKLLEEIDEISLLPMYADRMQQAHTKMAQQQRRRLPPQC

SEQ ID NO: 64436 - protein, 623 aa, Zea Mays
MLKTVSVRLSRDDSLRPCQALLSRYSETVVPLIRRFCSTPIKVEEVANIEADGKVSYLDAAALPCDNSDCRGEPSHGSRPWTKRLKHYGPSQKGNRNHHETKLPGSGRDGSSRKGSHPQKGKTKLPGSGRDGSSRKGSHHETKLADRDELIQKGSHHEKELADTPFKPFLFQIVLDTSMSSLMPVLDGWVKIGNRLERDKVNMVLFHLRKQRMYNKALKFVEWIERRKLLNFEERDYASHLDLIARNYGVEAAQKYIERVPEAFRSEVLYETLLVNCVCRDDAQKAEQVFNEIRELSLPLTISACNQMLLLYKRVSRNKVVDILTLMEKENIKYSIFTYKLMIDLKVRSNDILGMEQVLNSMKENGLEPNFTIQTMVAKFYISGCFTEKAEEVINAMEVHVKANRHAVRSLLDLYAILGRPVDVERVWNLCAEPKLEDFLAAIKAWSKLGHIERAEEIFDVLVKTFPKLTSKYFNAMLEVYAENKLLDKSKKFIERMCLDGCTIGPLTWDAVVKLYVNLGELSKADSFLMNVTEDNPDRHPLFSSYVILLKAYAEKGDIHNAEKIFDRVKQTNFPARTLPYNLLLAAYASAQVTPYGFRERMKADKFSPGKSQIEQLKQLDSL

SEQ ID NO: 64437 - protein, 333 aa, Zea Mays
MMLPTATATAVFLTAAPSSFSTRRRRSRAIFASLSPSFSSSEEPLLVRAARGEDGLPRPPAWMMRQAGRYMAEYQALAKRHPSFRERSENTDLIVEITLQPWRAFAPDGVILFSDILTPLPAIGVPFDISDSKGPVIQSPVRSKEQVRELVPIDLDMLQFVGESLKILRNEIDGKAALLGFVGAPWTIATYIVEGGMTNTYTNIKSMCHTAPDVLKGLLSHLAQAISDYIIYQVNSGAQCIQIFDSWGGQLPPHVWEQWSKPYIKQIRCTGQDTHRGFKYLYSVFKDSVFKDDVNYRICLVHHWTGYQTCYLERFVIILLIDVFGMHIGYYVQ

SEQ ID NO: 64438 - protein, 210 aa, Zea Mays
MCGVYERSSPVFAQSADLMDVEDCLRIVERELHIAQCNDREKVMFGPRLLRGVAQSWWEYYLAIHAEPETITWEEFRDNFRRCHILEGLIIVKKGNSDTKARTHVSEYRDMFLQLSRYATEDVNTDAKMQYRFLRGFVDPLHYQLMNHTFSIFQHLIDRAIIIENKRKEMKDQKRKIGGPQPESNNRPRFSGNPPQQLKQNHCQGYQQQN

SEQ ID NO: 64439 - protein, 255 aa, Zea Mays
MLAYLKCGDLGEARTVFDGMPPQAADVRVRTSLMSAYAKAGDLQKVVLLFRQMQVLRGQSRCTCCFLCPQVRCQFGQPYERACAVANALIAVYSRCGRMEDAKRVFDSMHPWDAISWNSMIGGCFSNGWHGTAVDFFSKMWSQGLDSVQSGIDDAALGSKLVFMYVKCGDMGSARRVLDAMSSKGNVHVWNLIMGGYAKGWLGGSWIYSKIGFQGRVCSLQCTDIILCKVQHDWRCSLGVRYNASSRYHFLELCD

SEQ ID NO: 64440 - protein, 476 aa, Zea Mays
MPPERTRKSRTEELWEREVGGLPPKRFANSVMASKSLNIQKRLRKHRSCVNTISFSADGRLLLSGSDDRTLVLWDWEEAAPALSLHTGFSSNVYHALFMPVSGDRSIVSCAAEGDVIHSQIQEGGRVVTHTHKLVELGFAVHRLAVEPASPHTFYCCCQDSSVWLFDLRARNAMELFKCRAANYHTAENIALYAISLDPRKPCCFAVAGSDQYVRIYDTRKIFVDGNSSFSRPTEHFCPPHLIGRVEEEITGLAYSQTSELLASYGQEDIYLFSREHGLHFNNVEVNKRLLEDMIEPSFSDKLPVPKKFKGHRNEETVKGVDFLGPNCDFVTSGSDCGSIFIWRKKDAELIRAMRGDKRVVNCVEQHPSGIVLASSGIENDIKIWEPGEGENRSIVQADEDDDNTVWIHGSSDSDDFFDDNGFGLMVMEPIHLYENSDNDSYEEDTSSEEHDSDGDSSAGDEDSDGGNSAGDEGDD

SEQ ID NO: 64441 - protein, 457 aa, Zea Mays
MTRKIPSIVKSALDPQTKVGFSHWGRLHASRNALTTGWLPFNTADGSALLGEIDVAFLAAYSAGMFFAGHIGDRMDLRVFLTVGMAGTAVFTTLFGAGYWLNVHSFYYFLVIQMVSGLFQSVGWPSVVAVVGNWFGKSKRGLIMGIWNAHTSVGNIAGSLLAAFLLKFGWGWSFAVPSLIMALVGLMVYVFLPVSPEAMEIDSDGGELNCEKDAVKEPLLEPGQEVKHSAVGFLEAWRIPGVAPFALCLFFSKLVAYTFLYWLPFYISHTRIGGEYLSDATAGSLSTIFDVGGVLGGVLAGHISDRLNARAITAASFTYCAIPALFLYRTYGSMSMAWNVSLMFVTGMFVNGPYALITTAVSADLGTHSSLNGNSRALATVTAIIDGTGSVGAAIGPLVTGYVSSRSWSAVFTMLMAAALLAGLLLSKLVCAELQGKTHSSVSKDAGGEHGAYSDEV

SEQ ID NO: 64442 - protein, 561 aa, Zea Mays
MGFTRASVSPALLCLQLLVDFVHMRPDFGSVLRRFPLCLATFALESRVSCNAATRLLGRACVFLGAELSQGGRQTLGRHWRNWRDTLEGVLQSTAGKQGSGGIQSCIRAALRFSGCPPTEHGNLAHDGGAGRDDPVGAVHSEENSGALVQLEDGTAAPLEANKTMCHNALFDILISEKFAMLCDLLAATFHVSKPDDVIGLQIIDAKMRNGDYAQNHALLDHDIKQIWKKFEHVGQEMAGLASSLSVISQASHQKQASGVSEIDVAEHKIEETSLVGVARKALRELTPQCDSGYSTIPKRAGRSGSDGICKDCGRKADSKGRIICDRCEAAYHVSCLKLAIDEEAPAKWYCPSCVEPDVALKHKNHGRSHEGCDVCEWLVVKPEEPAEDVSEPELAVKTQESSVSSMGEDSEPDLSTTALANLCKNCGTCEDEDRKFMVCGHGLCSFKFYHVLCLKERQIASEKQKNLKCWYCPSCLCRRCFKDKDDEKIVLCDGCDEAYHIYCMDPPCESVPRGKWFCTRCSARRSVQGMQRYEKSILEKVKRAPGANGPKVQASAGPEK

SEQ ID NO: 64443 - protein, 442 aa, Zea Mays
MKILNLSMILHMTILLKGICLTMMIIIRRAQRTLTEELFTWLLVESSLELREFMQSNILLEIQANGPTQVDNTHMANRDGFDQFDDNMTNQGEGITQPGGKGVNQHRERGLNMGLGLQRMNRARRGKLPIVITEGRIRPVAPIVAAKFATECNIAVRNHVLVLKSWKEYEKHPGLFKLFTAKLSAKFDINTEDALVKNACFQMMRNALRQQRYKLKKQYFDPFPLHLVRKTSPIKSTSDEQWNDLVEHWKGPKNMATCEHNKGNRGKVKFHQTTGSRSYMVHVENLGDKYMDQEPDALDLFKECHYSKKKQGYTSTVQLAITQMEDKRSTPGEGEQPMSTTQVVADVLAENTKKNRFLQNVGIQNARPRSSVQNIEAQLEVERKANAELQSLVSIQRERMDVLLKQVHEAELVRIREQEEMKKKQDAMDAQLELMLSQIQPS

SEQ ID NO: 64444 - protein, 167 aa, Zea Mays
MAAPPRATAVLAWGSGEDGQLGMGGNEEKDWAHCVEALGSYAVTAVVAGSRNSLAICEDGRLFTWGWNQRGTLGHPPKTKTESSPGPVHALAGLKIVQAAIGGWHCLAVDDNGHAYAWGGNEYGQCGEEPERKEDGTRALRRDIPTPQRCAPKLKVRQLLEGHIQWF

SEQ ID NO: 64445 - protein, 359 aa, Zea Mays
MFKQVDVVVLEVGLGGKYDATNVVRAPVVCGITSLGYDHMEILGNTLGEITREKAGILKKGVPAYTVPQPEEAMSVLMKRATELGVSLQVVHPLDPQKLEDQPLGLHGEHQYMNAGLAIALANTWLERQGHLNRLHVKHSGTLPDQFIKGLSSACLQGRGQIIPNSQVNSENDRDSSLVFYLDGAHSSESMEMCARWFAHATNSDGIQPGPSEQPHTDRDSRKFLLFNCMTVRDPQRLLPRLLDTCAQNGLHFEHALFVPNQSQYNKLGSLASPPSEREQIDLSWQLSLQKVWGNLPHHNKGLNDVNSSGATSVFESLPLAIKWLRETAQQNQSIQFQVLVTGSLHLVGDVLRLLKNNK

SEQ ID NO: 64446 - protein, 94 aa, Zea Mays
MSAISNQKKRTLEALQQQYTAAKAKKLQDEQVKSQKKSNFNTPKPKFDAPRGSKGLVITPRRTYAQPSPHKDVAFSSSNCQQKPSTSSGTTSIS

SEQ ID NO: 64447 - protein, 151 aa, Zea Mays
MDKIEKATGEAGGRRNLSGPVNQTDSYAQRPRETVSMSLKEIMHSTDRSGERTMERPRTSSRTGSASRRAVASSSRQASSVEPSEQQYSRASRLFSSNSGSRPSSTQRVNPSPGEARATSLSRAAVARGARDEPLHRSLELLSLGGGGKRK

SEQ ID NO: 64448 - protein, 78 aa, Zea Mays
MKLITWYRKNQKNLLAVTWNPIIGYTIDEKIITCTNMARESNRSRRSTEGAAGWGIGRSSHSNSLSANHYHYYLCYIS

SEQ ID NO: 64449 - protein, 431 aa, Zea Mays
MGKDKPYPWICGCYRVLETYGLQDYLNQQGFHVAAHGCATCVGNSGDLDGSVSAAITENDIVAAAVLSANRNFEGRVNPLTRANYLASPPLVVAYALAGTVDIGFEEEPIGVGKGGKEIFLRDIWPSNQEIDEVVESSVQTHLFKKVYDSIMERNPRWNQLPVPKEALYPWDDRSTYIRKPTYLEGMSMTPPGPPTVTEAYCLLNLGDSITTDHISYSGKIPEGTPAAKYLLEYGVEPKNFSSYGGRRGNNEVVMRGAFANMRIVNKLLNGEAGPWTIHVPTGEKLYVYDAAMKYKSEGHDMVIIAGSEYGSGSSRDSAAKGPMLLGVKSVIAKSFERIHRSNLVGMGIIPLCFQAGEDADSLGLTGRERYTIHLPTSTAEISPGQDVTVTTHDGRSFTCTLRLDTQLEVTYFNHGGILPYMVRNLAAQMK

SEQ ID NO: 64450 - protein, 407 aa, Zea Mays
MPKYDGCCFYIGTPQKKEYFLCAETPGAAKAWVSTLHATQLVLRAHKEAVNSLAGNGSPATLGTVATAVANANATAMEATKEIEAALKVSMRAALGLGTNNSNDGQLDDLTIMKETLRVKDEELQHLAKDIRSRDATINEIADKLTETAEAAEAAASAALTMDEQRRLLCLEIERLKQALERQVEQSMLKLRQSEEKVISLSKEKEQLMKERDAAFQEAHMWRVELGKAREQAVIQEATIARTEEKARVSEADAAARIKEAAEKLRTVEKEKEELLALVGVLQSQVQREQSSTKQVCGERSESCSGADSPPPLTKHVDASDDDVDKACVSDSRSVLVSSDSTEVQLAVDGVDIRPVGDAEWGGFQQSDALIADVREVSPEADGGSLDIPVVNPPPISDHVQGGATHP

SEQ ID NO: 64451 - protein, 103 aa, Zea Mays
MCPCPDVHLYCTVPGYGFRWFLEESPTHSICRNGSGAVQKPSAVHADRDACMSSAMSDKCVVAQGGRRRFIDRQTADLQRARGLSLGGEATSFCYTTCPGGSG

SEQ ID NO: 64452 - protein, 948 aa, Zea Mays
MGTRMPIFPRLSSALSTALLEWILMLLLFIDAVYSFLVTRFARLCRLPAPCPFCSRLDHFLGNEKPCFYRDLICKTHKSEISSLAFCSLHQKLAGARNMCEGCCGEVAGDDKTDETDSNQRIGDAFNSPREKVCSCCGQHFKRRSVALSSRETAELEPTRAFGSPKTYTEYSVVCQVDEPLEPKDIYHQSDYRSNEPDGLLQMTSDSETEVPCAIDVRSSQSREADVKGEDLQEDPACEQPVLPSPVVIKKSEIVVRKEPSVEDTCITSSACPAVDDHPNSGGGVDQMEEKESLSRKWAPQHDPVLVIENSGLQDAGISQIMPSDELPQVSGETEPSQSTNEGNTDPYKSQFTILEEHYAVSEEGNIKCILEQFDVTEITSRSGGEFRQRSASAADSHTNALVLENTHHGASEDAEQKGAGSKTSGEVEDYTKKIEPTGDMGEHELVVQDPSGSAPKDLIVKDYVDEPHVSTTTMRSSGEVPQDHSATEENPKTIDSIVERRPSLSSQISITLRSSGEVLQDHSATEENPKTSESIVERRPSLSSQISITLRSSGEVLQDHSATEENSKTSESIVERRPSLSSQISMNEAYRLAIGNKGSLTSPTLTDVILGKDSTSSINEELRLLLSQISASRGLEAPWADPGPSPRAYGRGDELVVQNITNRLSLERNASGLESLDGSIVSEMEGESTIDRLRRQIDLDRKSIHLLCRELEEERNASAIAASQALAMITKLQDEKAAMQMEASHYQRMMEEQAEYDSEAVAKANELLTEREQLIEELEVELENYRRQYGGGSTQRRGNRVAFKQENRDTTMLDGGGLEDPLINTQQGINSLVGLEEERAYIATGLRKLEQKLQFYSNNSVSVELPSPDVKDDLSDKVYVTEDFSLHCQESSMESKEAGSSTTSGEVDLVAVQEEIAKLNRRLKTLEGDRSFLEHSINSLRNGDEVM

SEQ ID NO: 64453 - protein, 699 aa, Zea Mays
MSSGGGGGGARGPSGPVPASARKLVQGLKEIVNRPDAEIYAALRECNMDPDEAVSRLLSQDTFQEVKSKRDRKKEVKETPEPRSRGASNSSRSSRGGVDRAGRGNSVQSGSSGTDYMASRSSILGPAVAATNAMQKPTVPSLSTNKDVVPNGSVGAQQSSSGFQHNWFGVPGQMSMADIVKMGRPQVRSSGKPMAAGDTSYAGQTPSLSSSINQNSKQSASTALPTTFDQGFPALPDPIPHTVNSSHGSAGNNHTHENDWFPQDDLPSGVQPTCIEASGDQSLFVASLDQSMLVADASYSQEISHAEENNSTAVEATLSSERHLEIVEDDNHFNDGLLQNSSAYQAQVHSYVDNEVGISNVDAESASMNFQHLSLQNEDIAATKSAEDNPAVILPDHLQAANADCAHLSFGSFESGAFSGLLSSKVPKGSLEDDEVLIPDESRSVNRIDVRNQDYYDDDALNSSENVDVETRIGNMDNIDGPSVSESDALRQGAIDVPGLQYDLPSVSSHAYSNTTQPSTMEEPQGNTQAQPLSHFSGLLTSKQGGFPNTQSTQHVPSTSISSGLPLPQQLPVYSQPTLPLGPFTSLVGYPYLPQNYYLPSAPFQQAYSSNGPFHQSAAPAVPGAGMKYPMPQYKSSPPASTLPQPSSLSGYGGFGSANNIPGNFSQNQGAPAAPTTLGFDEALGTQFKHPNHYAALQQ

SEQ ID NO: 64454 - protein, 205 aa, Zea Mays
MAAPAADEAWCRKTVPRVMELVCRRLPQRDACALLAVSPWCYRALVANSRLWEVLDLREMKNAGNRLISALSLSGISLENLEFLNLNACQKISDKGIEAVTSLCPNLQRLAIYWIVGLTDSSIGHITKNCKHLVHLNLSGCKNIKDKGMQLIANNYQGLKRLNITRCVKLTDDGLNQVLLKCSSLESLNLYALSSFTDSVYREIG

SEQ ID NO: 64455 - protein, 512 aa, Zea Mays
MAMAAVLANGDSQGRPQRNYQVVVAGTRDMGIGKDGVLPWKLPGDLKFFKELTLITSDPVKKNAVIMGRKTWESIPVKSRPLPGRLNVILTRSGSFDFATVENVVICGSMESALELLASTPYCLSIEKVFVIGGGQVLREYLKGPACEAIHLTDIQSSIECDTFIPPVDFSVFQPWYSSFPVIESNIRHSFVSFVRVRKSVAETHESNGKESTEVDTKNDKFETENFSFLPKMVYDRHEEYQYLNLVEDIIRSGAQKNDRTGTGTLSKFGCQMRFNLRKNFPLLTTKRVFWRGVVEELLWFISGSTNAKVLQEKGIHIWDGNASREYLNSVGLAHREEGDLGPIYGFQWRHFGAEYTDMHADYTGKGFDQLMDVIDKIKNDPDDRRIILSAWNPSDLKKMALPPCHMFAQFYVENGELSCQMYQRSADMGLGVPFNIASYSLLTYMIAQVCGDAHVYRNHVRALEEQIQKMPKPFPILKINPSKKDIDSFMASDFKLVGYDPHQKIEMKMAV

SEQ ID NO: 64456 - protein, 274 aa, Zea Mays
MNHCMFDGIGAMEFVNSWAETARGVAELTVPPFLDRSVLKARDPPVPTFPHHEFAEIPDVSDTAALYGAQELLYRSFCFDPDRLERVRGLALADGALGRCTTFEALSGLVWRARTRALGLAPEQRTKLLFAVDGRRRFAPPLPRGYFGNGIVLTNALATAGELLSAPVSRAAGLVQDAVRMVTDDYMRSAVDYFEATRARPSLASTLLITTWSRLEFHGADFGWGEPVMSGPVTLPEKEVILFLAHGKERKSINVLLGLPATAMDAFQELMDEI

SEQ ID NO: 64457 - protein, 97 aa, Zea Mays
MYCYTSSDVVKEFNKHDREPSKYVKHWTGIKPKTGAKYTCDIGYERFLGPEIFFNPEMYNNDFTTPLQVVIDRILSCLEARLCLKISIGGYSGTSKR

SEQ ID NO: 64458 - protein, 137 aa, Zea Mays
MRRGNTCEGADGGRSEEEGAHARDATKRRTPTKGGSHGEQGTSRGTARTLSHLNAREMGLRSRVPWIRSLAGDLGEVAEVGSRLETAAAMGLEVERRASGGLCPPSREPDGRRGTRERKSSGCCRGNREKKMGVSAS

SEQ ID NO: 64459 - protein, 139 aa, Zea Mays
MAVAPPTAAALEQLSSSKMFDGFNLRFRHQSATLGCAMTFSIYLPPSPASNLPVLYWLSGLTCTDENFIIKSGAQRAAAAHGIALVAPDTSPRGLNIEGESDSYDFGVGAGFYLNATNEKWKNWRMHQFLGTQWEGMAR

SEQ ID NO: 64460 - protein, 763 aa, Zea Mays
MGATLCPLYDLISEEPNSYKDLVVSFVNILKQVAERRLPTSYDYHQMPAPFIQIKLLKILAVLGSGDKQASGHMYTVLGDIFKKGDTASNIGNAILYECICCISSIFPNPKMLVAAAETTSKFLKSDSHNLKYMGIDALGRLIKINPDIAEEHQLAVIDCLEDPDDTLKRKTFELLYKMTKSTNVEVIVDRMIEYMINITDHHYKTEIASRCVELAEQFAPSNQWFIQTMNRVFEHAGDLVNIRVAHNLMRLIAEGFGDEDEGADSQLRSSAVDSYVRIVGEPKLPSSFLQIICWVLGEYGTADGKHSASYIIGKLCDVAEAHLTDDTVKAYAISAILKIFAFEIALGRRIDLLPECQTLVDELLASHSTDLQQRAYELHALLGLGKNDVESVMPADASCEDIEVDRNLSFLDSYVQQALENGASPYIPESERSGLTSVGSYRSQEQQETSAHTLRFEAYEMPKPSLPLATSQTSMSTPNTDLVPVSEPGYYKEDHQTSRPQPPSDAVSGEFGVKLRLDGVQKKWGRSTYSSSTPSSSMSSQQTTNGASHSDGGGPSSQPRESSYGSKRQQGTEVSAEKQRLAASLFGSAAARADRKAQASRKTGKDSPSTEKVATTNVAAQSVKEQVIPAAAPPPDLLDLGDETVPSSRPSADPFSQLVGLLGPASAAPALSGTPATTTSTSKAPDLMSIFSDDVPTGVTSSGSTDPTPGDAISVSSHKGATAVAPKKGSSLQDALQKDSTARQVGVTPTGNNPNLFKDLLG

SEQ ID NO: 64461 - protein, 163 aa, Zea Mays
MLELSFREERKLETGRKVHLGAEIGLDPQQVAVWVPKRRAPPKRKLLEEEVGQYIYNIEHAFRGHMPGWKVTRLKDKLVLAEEELTRFRSAGNDAVSGDGGDVMARAVCSGSPSSSFSTGTCQQPGGGGGGGDHLGDDDLLYVPDYAYADSSVVEWFSLYGLM

SEQ ID NO: 64462 - protein, 288 aa, Zea Mays
MDCASMMKEVQTPHFHTLFHNASISVLKLYFFSVKLGNYHSSVAAVVNNDTSAQEDEQHTIRSILDQGKTTTTIGKVNNDNLSRLLTEYLGMDNMLALVCKTYDGVKGLEKYDKDDIIDKTSGIHGLGRSVGKFVDGRFIVFCLENLRPFSSDVIIDDPQRKLILHRPRLPGGESPPGFLDFVVNMIHLDRAHLRFLIASGHGLRETLFSHLQVYKTRTNIQSSLPLIKDGVVSLDGGLLRPNGSFCLGHSKNLEVKFAVTTDVSSLLENVVEMEEQVKRKNWEKEMV

SEQ ID NO: 64463 - protein, 797 aa, Zea Mays
MAPMAANAAWHMGEWDHMADYVSRLDDADENKLRMLGNATASGDGSSNGAFFRAVLLVRYKKYDDARMYVERARRCLATELAALVLESYERAYNNMVRVQQLSELEEVIDYCTLPMESPIADGRRELIRNMWNERIKGTKRNVEVWQALLAVRELVLPPNEDRDTWIKFAELCWKNGRISQARSTLVKLLQFDPESSPELTLYHAHPQVALAYLKYQYAVGDELKRRDAFSKLQELSVQVATTMGNLPGTSANHGTMSNAGVPLIARVYLTLGSWKKALSPALDDDSIQEILISYHNATLSAKDWGKAWHIWALFNTEVMSRYTFRGRPDIAGKYVVAAVTGYFYSIACASTTKGVDDSLQDILRLLTLWFNHGDTSEVQTALQKGFSLVKIEMWLVVLPQIIARIHSNNRVVRELIQSLLVRIGKGHPQALMYPLLVACKSISILRQRAAQEVVDKIRQHSGGLVDQAQLVSKELIRVAILWHEMWHEALEEASRMYFGEHNIEGMLAVLEPLHAMLERGDETIKENAFIQAYGHELLEAHECCLKYRATGEDAELTKAWDLYYHVFRRIDKQLPSLTTLDLHSVSPELLKCRKLELAVPGTYAAGHEDLRQDERVMQLFGLVNTLLENSRKTSEKDLSIQRYAVIPLSPNSGLIGWVPNCDTLHALIREYRDARKIFLNQEHRLMLAFAPDYDHLPLIAKVEVFQHALQNTEGNDLAKVLWLKSRTSEVWLERRTNYARSLAVMSMVGYLLGLGDRHPSNLMLDRYSGKILHIDFGDCFEASMNREKFPEKYHSV

SEQ ID NO: 64464 - protein, 909 aa, Zea Mays
MPQQAVLVGLTAGMVAAEGKAAGNKTMMQKQQASSCCSDRDQDMADLELALEAVVPVSVQRQDSLYRDATRAGGGGQQQHEGWARTLRLAFQCVGVLYGDIGTSPLYVYSSTFAGGIRDTDDLLGVLSLIIYSFLLFTIIKYVYIALRANDDGDGGTLALYSLISRHAKVSLVPNHQPEDELQTTDAAAAVLGKHGSVRRRTVQLAASHGREQRAVWVKELLETSKPVRISLFFLTIVATAMVISDACLTPAISVLSAVGGLKEKAPNLTTDRVDHCGHPGASVRRAALRHPQGGLPVRPRLLLWLLLIGGVGVYNLLRHDVTVLRAFNPKYILDYFRRNGRDAWVSLGGVLLCFTGTEALFADLGYFSIRSIQLSFGFGLVPAVLLAYIGQAAFLRRYPEQVSNAFYQSTPESIFWPTFVLALAASVIGSQAMISCAFATISHSQALGCFPRVKVLHTSRQYRGQLYIPEVNLLLALVACVVTLASKTTAVIAEAHGICVVLVMLITTLLLTLVMLLVWRVNAACVALFFAVFAAAESVYLSSVLYRFAHGGYIPVAMSAVLVAVMVLWHYVHVKRYKYELERTVSHESVVRDLLPRCRTVPGVGLFYTDLVQGIPPVFPHLVDKIPSIHAVLLFVSVKHLPVPHVDATERFLFRQVASSSESDTAAGPRVFRCVARYGYRDLLEEASDFAGSLVERLQYYIRDVNLYGVEHQQPGAKVSYPSSRCDSMILMARQRSSVMMLRQSSAASYYSSYAAAAETQQLQLARARSTSGAGGILLHSASERAEQLARARSTGIFAEEMLTPAESFSELSRMGSIGGGGMQAVKISLEEMARIEEEQRFIEREMEKGVVYILGESEVVARPHSSLLKKLLVNYAYAFLRNNCRQGEKMLAIPKSQLLKVGMSYEI

SEQ ID NO: 64465 - protein, 193 aa, Zea Mays
MTPFGIGVPRYDSGSQQGFRSYAHHHPLIHRLTPRSGSNLVAPLGSVPAVVAETRGHGHGAPGHMYQHSSVQGSPFPPTTRRVRPRALTITSFIAATSSAEIAGPLGHGFPAPGAVNRSVSDAEGIDRAYTWGREGYDLFPWTPAEWGTFNPMQNHAHGSFTRRPAGERMPQSRPENGYQPPVPTSQRMPPFL

SEQ ID NO: 64466 - protein, 363 aa, Zea Mays
MPLCVLCLRAQVRFLLVAWPATLQVVPELLGVILVFSCWNNPLGNRLAEVGRYGAIQIHTQLEEERHLGEDATGELVGWREVGELVRQRERAVVEPCHLDRLAHGRARAREGEVVDDHGHGRACASAPPDAAAPQIPRELCNCSSLAHLSLGVNQLEGEIPAGLGLLSQLRTLYIHYNNLVGSIPPSLGNLTLLQILDVLENKLVGSIPVSLSHLDRLVDFEVGRNNLSGTIPPLLFNKSSLLYLGVASNKLHGSLPADAGTNLPGVKKLLLGNNRLSGTLPSSLGNATMVEILGLGLNRFQGRVAPEIGKLCPFNVEMSANELQAEDEQGWEFFTLFTNCTRLQLIDLPLNRRWIGAARLAR

SEQ ID NO: 64467 - protein, 168 aa, Zea Mays
MESLKKAVADAKKPRSIQDLLKEQVAKLREQASGGGRGNGNRRGGSGGSGGPDDESFKETLDEVVQVILATVAFILVYIHIIRGEELYRLARDYTRYLVTGKRTARLKRAMQRWRNFSESFMQKAGSEDDQYERPAVSKPAWWQQPQKFVHFVEDLCRGNWRPHAQES

SEQ ID NO: 64468 - protein, 121 aa, Zea Mays
MSLLYHTCDCNAALSKEEWPEEDYPIYANGPGYVISSDIADSILSEFLNLKLRLFKMEDVSMGMWVERFNSTRLVKYVHSVKFCQFGCIDDYYTAHYQSPRQMLCLWDKLQAGKAQCCNMR

SEQ ID NO: 64469 - protein, 220 aa, Zea Mays
MANMEARLTSTLSRRCEAIEQRIDASDQRFQASEQKAEARFISPEMDHAEIDNWKPAIEKRLGNLSLEMSRANKFMEHESMAQDCFKPGLLPTDMSSFGRATAPHHSADEPNGNHMEFHHREREFDRIPIPTHGPVKGMYYDTSQRIDPDSYPLSYAAMEGGRSGHGKLPHINFPQFDGDNPQLWKSHCEKYFDMYDVDPAMWIKVATMHFTGRAACWLQ

SEQ ID NO: 64470 - protein, 183 aa, Zea Mays
MEVFAAFGDGFYINQFQEPGRAEAAFAQYDVATVLKKFYSIEIDELTAPPGVEIIDFLEASPSPLPWLSEEELGQYAEKFRKSGFTGPLNYYRMWETNWRLLAPWNEAKITVPVKFIAGDKDIGVQSFGVEKYIKSGEFKSTVPDLEVAVIEGHHFLQQEQAERVNSEIISYLVRFTSQEASS

SEQ ID NO: 64471 - protein, 170 aa, Zea Mays
MVHPQQNDTTNSPVMLPAEPAEEEPIYVNAKQYHAILRRRQTRAKLEAQNKMVKGRKPYLHESRHRHAMKRARGSGGRFLNTKQQPQEQNQQYQASSGSMCSKTIGNSVISQSGPICTPSSDAAGASAASQDRGCLPSVGFRPTANFSEQGGGGSKLVVNGMQQRVSTIR

SEQ ID NO: 64472 - protein, 140 aa, Zea Mays
MEEPVPADPPRIFWKSRSSANGRSLQQEPDKDATEETNEQAQEEPMKTDDATDTAAAAAATAEPYPKANLSEKRKALFEPLEPINGKRGAAETLLPPPDFEPASYPKGWLVGKKRKLVNVDVVESMRRIAIQEMNRKVHA

SEQ ID NO: 64473 - protein, 161 aa, Zea Mays
MAEKEETKGRCPACHTRYDKDMIVKMAATCDRTVADKNAEKKQKAQRVKPKAAPTATTTSTVESKKHLATIRVIQRNLVYIIGLPAHLCNESVLERREYFGHYGKVLKVLVSRPTGPPSQQASANSSISVVKACLGYYFPRPDSCGSRQHWVCSFTDLLRV

SEQ ID NO: 64474 - protein, 197 aa, Zea Mays
MSYAYLFKYIIIGDTGVGKSCLLLQFTIGVEFGARMITIDNKPIKLQIWDTAGQESFRSITRSYYRGAAGALLVYDITRRETFNHLASWLEDARQHANANMTVMLIGNKCDLSHRRAVSYEEGEQFAKEHGLVFMEASAKTAQNVEEAFIKTAGTIYKKIQDGIFDVSNEFGMEGVHVFRMNCPGAGLYRAILFCIC

SEQ ID NO: 64475 - protein, 184 aa, Zea Mays
MTLYLQLVSTSLHAGSPRLALLHLRRSCEFNPRVSMSSYSPPPPPPRDQSMDTEAPNAPITRERRLNPDLQEQLPKPYLARALEAVDPSHPQGTKGRDPRGMSVLQQHAAFFDRNGDGVIYPWETFQGLRAIGCGLTVSFAFSILINLFLSYPTQPVTFSRPPVLYVHASGRSALEESWVGRCR

SEQ ID NO: 64476 - protein, 257 aa, Zea Mays
MARPRGKKRTAPRAAATDSVQPEAAATETAAAEPANRGRWKRVKAPPKPKPETDYFAEKRNLEDLWLSAFPVGTEWENIDKIKEFNWSFENLEKALEEGGELHGKTVYLFGSTEPQLLDVNGESKIVLIPIVVAVDCPFPPSDKIGINSVQRENEEIVPMKAMKMAWVPYVPLEDRLSRIDSLKTKIFTLGCTQRRSALKHLKIERVKKFDYCMPYYMPLQPLEDENDTVISFLYPLEPPVRFLIYFSEEYYLIGAN

SEQ ID NO: 64477 - protein, 316 aa, Zea Mays
MTKESKIHEVQGPKGVYPEDQEYVFVSGPHPEGSSSSTNASQQLNLPAKYDNLSVSPPKLTFLSAPMPINGLPINRQQSAGTGSFDSHYSPASVISQGSADISDAMDQPPSDYLTRIRLLEQYASAIAGLVRDEIKGGRHLVAFSIQLIVLATWKQAIHLCNTFVASLARESPSQDIHMKGLSADASHLLANSKLADDVCVQIEKQFLSEVEYAEELASTVGQIADGTEMPDAIEMIFQSALLTGRRGGVDEMFGKAADAMTGYTRAVSMLRFLLIEAPSLALNPPLTLTRSDRHRLRTYIEALNTRLCQMQSQRH

SEQ ID NO: 64478 - protein, 261 aa, Zea Mays
MDVRDLHQQPQQQQAPPRVGSPPQAGAGGVMMQHAAAFGAAPPPSGLPQASAANVMHGMSLAFNPMASPDASSPISSMKIVDMPLGSMYRPDSGATGLQQQQPGSGGVGASGGAIVAVSGGDLVKKKRGRPRKYGPDGSIGLGLKTAAAGVTEATGAQSGGGGSTPNPDGKRRGRPPGSGKKKQLDALGSSGTSFTPHIITVKPNEDVASKIMAFSQQGPRTTCIISANGALCTATLRQPATSGGIVTYEVHSGSTAQSAG

SEQ ID NO: 64479 - protein, 260 aa, Zea Mays
MTRHNISKSLAVVLRARMQPNPISSPPPPTPPPPPTDPDPAAPLVASVSHWLHVSASAASPPPAALDSFSDGYRSLDLVGRREVLRSLAVDYDVPRARVRDLMKQYMSVTSAEPSGVDDVEAEEGKEGAASALYRMERGLRDALRPRYAGFLEAMNAQPGGLKLLAVLRADLLALLGEENVSALRALDSYLKEKLVTWLSPAALTLHQITWDDPASLLEKIVAYEAVHPIRNLIDLKRRLGIGRRCFGYFHPAIPGGLVG

SEQ ID NO: 64480 - protein, 50 aa, Zea Mays
MMRCVRERSRSSSPSQLWVAGSLSPFDVINYLFFIELLLYNKDLTFISVP

SEQ ID NO: 64481 - protein, 481 aa, Zea Mays
MAHRGLHIAWLQFSTDYTTCSLKSLRHGKTPMPVAPGHVTPLMELSHLLVDQGFEVTFVNTDVDRAAVVAALEASGGVAALGGGIHLASIPDGLADDEDRKDISKLVDAYTRHMPGYLERLLADMEAAGRPRAKWLVADTNMGWSFEVAKKLGIRVVSFWPAATACLAFMLKIPKLIQDGLLDDKGLPVRQETFQLAPGMPPLHSSQLSWNNAGEPEGQHIIFELVTRNNKLNDELAEMVVSNSFYEAEAGAFKLFPGILPIGPLSADGAFRKPVGHYLPEDERCVKWLDAHPDASSVVYVAFGSITIFSARQFEELAEGLELTGRPFLWVVRPDFTPGLSKAWLHEFQRRVAGRGMIVSWCSQQQVLAHRAVACFVSHCGWNSTMEGLRNGVPFLCWPYFCDQYLNRSYIVNVWRTGLAVTPDADGIVGREELRSKVEQVVGDADIKDRARVLKDEAHRCVAEGGSSNDNFKKLVNLLSE

SEQ ID NO: 64482 - protein, 657 aa, Zea Mays
MGIDLNMADGESQERRPPPAVCRELWHACAGPVVALPRRGSLVVYLPQGHLAAAGGGNVAVDLPPHVACRVADVELCADAATDEVYARLALVAEGEAFGRNLRGGGVDGDDDMEDFDVERKSRMLHMFCKTLTASDTSTHGGFSVPRRAAEDCFPPLDYNQLRPSQELVAKDLHGAKWKFRHIYRGQPRRHLLTTGWSSFVNKKKLVSGDAVLFLRGDDGELRLGVRRAIQLKNEALFDDFSCDSTKRHTLLAVADSLKHKSVFHISYNPRATASEYIIPHHKFLKSLNLPFCIGARINLQCHNEDVSERRSGMVVHVSEIDPMKWPGSKWRSLLVRWEDGVECNGQDRVSPWEIEIAGGSVSVAHSVSASSSKRTKLCPQGNLDVPTMYVTGNGNGCTDSVETGKFPRVLQGQDLMSFRTRHVPSAPQTVEAAKLQSSGASFNESIGFSEVLQGQEISRAVPMFQGMMSEACSLKGGYGLHSYMRTPVAVTGLSATTQECSLTLSTPPGAQVPSVYPDNIFNRTVVRQLGLASKFDGGATNAQQSVPFDRPREIWSKPQHEISDQTKMDHFETRRASAPGDDAAKHGSGGEVVRKTSCRLFGFSLTEKILPADDDGIKEVTYEPECQNPRMLDLFGYNCSAPSAALPALCAAPFGM

SEQ ID NO: 64483 - protein, 53 aa, Zea Mays
MELNRFICHHPIPCKLIISTNMRDVLIGWFLKIHSKCTHPNSCGNAHFSFETL

SEQ ID NO: 64484 - protein, 106 aa, Zea Mays
MTTYSLRGRRETLAEEGIVRDIIRDQEGVILKCCNIMVAPIAIPIVVAMKKAKAMQVSQGMSAKVVSCMDLSSTSLTNVAMRNISLICIRSGRNAKTQRLTLSTCM

SEQ ID NO: 64485 - protein, 212 aa, Zea Mays
MFALVASISTHLDCGGTSVKNPLFFENPCSYDSFDAAVALHASRYQASEQSAHAPHSTIWGAEETCDEFIFNLSASRKQEGSNTLSSSPDTNNGVHPSNSEGFKGFLEDLAGEADADNHYNNDDAKDEEFYAKSPPRNDETNELKDQSLADIYWPDSLGPLDLDIPSVRYEADDILIGDSQNSWNRLMANSLDAFRNLSFFSDKNDSIPSIM

SEQ ID NO: 64486 - protein, 266 aa, Zea Mays
MASSATREVLMLEAPPPSDPAAGPWRAVPDAEAIDALPYIDGDYGDAAVKREVDRLVEEEMRRGKRKPADFLRDLPPVPTAGFENHPMLSKEYERVRAGKPPFMLDMSRYGLEPPPMNKRNDVGAWRQALRNAQSQLQHQIIRIENLELMLKYGVDVWKLQNRQMESVLSSFGVGGWSRSCTKQPGEEKRFCTCGRGTGAVLHVWMRSWFPGLPLRQQSACGGTALNVPLVWFTDCTISYWEATKNDVSKSYFVDLMCDMSVIVRA

SEQ ID NO: 64487 - protein, 86 aa, Zea Mays
MARGGRLLILSLGLVLLYFVSGELRRDPEGRAVLLPGQPGVARRRRHEPLLCRQWQAPLELLLQQLGARGAVRSQLWILHLLLMSV

SEQ ID NO: 64488 - protein, 170 aa, Zea Mays
MKTVKSMKKIVEGLKNMVEILFKLPMIKLLMAAVEEGIENSAVEEGKEKENDKEKEEENGNEKSKETGNETEYEKVKNIKLVHIDYILEKAETGVQFVGNVMRSSSQTRRAHCWFPCVDSATERCPFDLEFTVSMDFIAVSNGDLLYQLVHSGYPWLLAHLKFFLTESQK

SEQ ID NO: 64489 - protein, 99 aa, Zea Mays
MPFSKKQVAAWSQFTLVLLLVSRAAVVSVALCEAAVGTFSANKLDCQSYCTQKGYKSGHPTCQCSNGLHGVSPGTTSHCLRGRHPRDDAGEGVGILLEL

SEQ ID NO: 64490 - protein, 557 aa, Zea Mays
MEAGITTADILKDVISLIFEKAVFEPTFCPMYAQLCSDLNEKLPTFPSEEPGGKEITFKRVILNNCQEAFEGASNLRAEISKLTGPDQGMERRDKERLVKLRTLGNIRLIGELLKQKMVPEKIVHHIVMELLGSGTDKKPCPEEEDVEAICHFFNTIGKQLDENTKSRRINDTYFIQMKELTMNPQLAPRLRFMVRDVIDLRSNNWVPRREEIKAKTISEIHSEAEKNLGLRPGAASVIRNGRSSPGGPLSPGGGFPMNRPGTGGMMPGMPGSRKMPGMPGLDNDNWEVPRSKSMPRGDSIRNQGLLLNKPSTVHKTSSINTRLLPQGSGAALIGKSALLGTGVSASRPLSFTPGPTPAQTTPKPIRAAPAVVPAPDKQASAPKGNTAELQKKTIALLEEYFGIRILDEAHQCIVELQSPDYYPEIVKEAVNLALDKGTNFVDPLVRLLEHLYTKKIFKTQDLESGCLLYGTLLDDIGIDLPKAPAQFGEIIARLTLLGALRFEALEVILKKMEDTYNRKAVSNAFMKTLEANPSGQAILGSPAAAAVIDACNSLLE

SEQ ID NO: 64491 - protein, 202 aa, Zea Mays
MRISLSNDKYQVIKPPVDFEWFEFENESRLSKNLYLGKSEKGVYCALRYPSTVSFSIYILDESDGKTEWIMKPHYYLGSQGIDGPGPWTLQDINYNWDTQYEDSMEEKFEWDSDSDNVVENRSNGGYPCLPRIELLGFHPYKDVVFLSDTLRRGLAYHLDSSKIQDLGNLHPTYYGTEQGIQPFLLTAFPYTPWRGWFPEDT

SEQ ID NO: 64492 - protein, 1306 aa, Zea Mays
MEADAPLDLALFQLSPRRQRCELVVCGNGRTEKIASGSVKPFVAHLRAAEEQASAQPPPLAIRLQLERPAPWFSKGTLERFVRFVSTPEVLELANTYDLEMSQLEGARKIYAQGGTGDATSGGAAENVTASAAAAADITKKELLRAIDVRLSSLKQDLAAACSRASSAGFNPISVSELILFANHFGASRLSEACTKFMSLCQRRPDISPQTAQPAVSSHWKVFDDGNVRGSSSSDMSIDEPLVDLSESKNKSTVSGSGSQVHRLSNIQGLESAAAQQPKPTIQQAVDKQEAETDASPAPSKGELSRRLSVKDRINMFESQKKEQTPSSGNSNSAGTGRVVPGKGEHRRVPSGASMEKLVRRWSSVSDMSIDLSNNESSSLNDKKDNGTPAGTPTSTDLEADSKVRANEDSNGQKDSITSHSWPCQKDNVPMDLATTDLCPPSILSNTLAPHKESIYGDGAENDMVMNSSIESEASFGKEPGVIQGHTRMSNHATSNVSTQDRLKSSAKSVEEALLKNKVIVTSASSEEHVCMIDKEITAVAHEVPVASEQIPQNDIRGLHTKDIHTEAEVTGRKDQPSRSFGRVSGGVNPKPKASSNSRANAKGSSVRDAIASTETEFRDVSLQRNRLPRKSEDVGKKVTAGSDSDCSGRQGKNLSRQSSITDQELNLQARVTRPGKGNQDRHGELQMKANELEKLFAEHKLTSSRRGKPTDVQVESTPMVSEVKPTMVLHETIHTKQVVKESITVNDFDAGELLKMVNNQEFNISTPQKLGILSLEESRGKFYEHYMQKRDAKLKEGWKLQREEKEAMLKAMHDSLERSKAELLTKFSRSADVPDSTYVSHCSQKIPPSRSARKNKDQGVGSFLVEEEMNSDYLSGDGSSRSADSRKHFSNKVASTQNASAGPIHKRSSRTASSGYANRRNPPENPLAQSVPSFSDLRKENTKPSPGVSRVSARVQQKSFARSKSIIEESKSILKEDQSRRSQSMRKNQIPDELKDISSGNDDIYNWAPSRISKNQSEGPFAYSTRRSGPPKPFLRKGNGTHPVIGIAGFQAAAAMMANALQHGDSGDFEDQQEDSPDDAKEEEEYESMEENLRESDFPADSDSENPRVSHEFGNSDDPGSENGDADFPSKTPAIGSTKFTAFTGNVHNPAGDVPAPWSSRLPQLFPYTNDNSDGDAFADSPSGSPSPWNSHSLDEITDADVSRMRKKWGSAQMPFAGVNAPQQPRKDVSKGLKKLWKFGRKTRGGDGLVNDWVSASTASECDDDMEDGRDLVVGSSDDFRKSRMGYLASYDGFVENEVFSEQGI

SEQ ID NO: 64493 - protein, 416 aa, Zea Mays
MADRPSLPALIIAIAVLAGSYCRVASSASPAVEDELRGGGGAGGPTTMRRRAASVMVPITILKSAVSDGAVCMDGTPPAYHLDPGSGAGSRSWIVNLEGGAWCNSAKTCRLTRSSGRGSSDHMDKEIPFTGIMSSSRAVNPDFYNWNRVKVRYCDGGSFAGEAFDKDTGIYFRGQRIWNAVIRHLLSIGMANADQVLLAGCSSGGLAVILHCDQLRAFFPSGSTVVKCISDGGLYLDAVDVSGGRSLRSYFGDIVAMQGIAQNLPPACTARLDATSNIIDGVKTPLFLLNAAYDFIQIVLSLAPDRADPSGAWRACKSNRTACSASQMSFLQDFRDQMVASVKGFSGSRSNGVFLSSCFAHCQSEQLGTWNTKPGGSPTIQNKGISKSVGDWYFDRAEVKAVDCRYPCDNTCHHII

SEQ ID NO: 64494 - protein, 68 aa, Zea Mays
MSGCQASCWRRASARSPAPCWDLRWRTTGTSSTRWTSRGPTSGSSTGGRTRSQATVHSDPGVTHVMAR

SEQ ID NO: 64495 - protein, 413 aa, Zea Mays
MVKRLRRKGDVSSAPPPKAAASRSTNPDKFKKKGVKTDPEKLKAACTESANIAEASASAQTPTPKPVKTSPAAAAAAEIADDRVAQSKTEDGKFSRKETMKGREEQKGEGASDGVTQTKTEDMNVTRKETMKGGERKGDGSRKEMMKGREERVKTEEKTGKEKEEEKSGSGFIFMCSARTKPECYQNGVFGLPRGKMDVVEKIQRGTKLFLYDFDLKLLYGVYKADTRGGLDLVRHAFDGKFPAQVKFSVFKDCLPIPESSFKHAIKENYSSKGRFTQELNTKQVQRLLALFKPISLSKPAPQHIEDIRKPSDYEERRQLQHIEERAAPINVHAHPLEDRYKMTRSLHPPLFDEPRRGLVLNPYHMQEPQHVPLNYYHQVATRSPYHQPHMDIMHESSTMSTTMFNHCLLIRH

SEQ ID NO: 64496 - protein, 260 aa, Zea Mays
MAGFARATAPASPSPAAALLTGERLVVFLFAARVALAAPVHLAAALAVLVAAALAVELAVDGSGSAPLRRFRTRPGASSGILLGATTLPSVMLSRLIQLSRLLPADPNGPKEFAYLEMQYWAASISCLSVLALFLWHLQKSPSNGISKHLEYGSLFIVLYLMTFFLSFLLKTDEGLMVTTNMAYMLCHGVAAVILIKHILEKFPSCASFGEALLVSGGLVLYFGDMLAHTLSKMEFSMSSKAFIHTPQTRSDMTAIIQDC

SEQ ID NO: 64497 - protein, 1976 aa, Zea Mays
MDRPPHLVIDLNEAPPPPSSDTPPAQAPSPPQELAPPVQAPPPPPPPPPPPQFPPLLPPQLPLGAPNQQVRLQQEALDVVLRVHRPLELRNTPFGPIGNVPAGLLPGLGLPLLPLQPPAPHPGEAGWGNPPAPCSSCGRQEILGGTLVCDACDRGFHPNCVRVWPPLFPPPPPPGPPGARRPRAAANEDWICPACERRGARSTRWKLGAVELDINAAPPEDPVTVIANDIRRQNITDGPQLTVANLPHFEGGHLQNTTLYDGMQFMPAFDLAQCFGMRQNFTSMDQDLIADGNVPQRSAHLRRRRDLPQTSTLPKVAVNHELGSAGTSMDPSFFNNTIKQSPSENRSSLKPPIFLMENSNHQPHHHTVALPVQYSDFFITSLGEIDNRTSYHNSYQIWPVGFTSYWHDRVTGSLFECEVHDGGNFGPLFKMRRLPCSAFQLPDASTTVCLNVVRNADTIETKEGSDLIEDTANDANDNISMLLSDFSETNQDFLSCLGNDLEGKESLGCSNVETKDMTVPDVLSDPGSFSWAPTNDANMYDKIGDFSYEGTSPSSVWRMISCAMMEACEKMYKEHGHLVLFCTHSSEKSPFDYESGPQRTDGPFNLLAKFCSSNGPKVPQFIEKENDVQSTCALLKEWLYPDRIGFDLEFVQEFVESLPKSGACSHYQFLCNRTGINSSLTIASGTLVAVNKNSPMHARHGSVVSGPQDHAQPSSSSIRELPPGNPISRKLAPELAGDVFQILEFLGRFAEIIGLKELPSIEQVEDELIDPWPMHPNKNDIHNYMDHNPPMNSPANVSSSYSNGESGDGGILCGALPGVVGMEKDASLLAEAETLICNSSANEGNTVFMMDYKDTDIVDSPEEPASDTTLPDWVKSLEPVRKLPTNVGTRIRKCVYEALERKPPEWARKILEHSISKEVYKGNASGPTKKAVLSVLTEACRTKVPQNTEKPRKERNIISISEAVLKKCRIALRRAISSDESKQFANLLGTTLTNSNENEDEGILGFPGMVSRPLDFRTIDIRLAKGAYRGSWEAFLDDVQEVICNLQTAFADRPEVLIMVVALSESFESLYKTEVQDLVEKFDRYLSNENDSSEIHQELQDALTAANNKLPKAPWEDGVCKVCGIDRDDESVLLCDNCDSEYHTYCLNPPLARIPLGNWYCPSCTAQTHVAVQEQKKCLGEEAHVFIEKLNKLAVAMDEKEYWELTVAERIYLLKFLCDELHNTALIREHLDQCSDKSNDLQQKLRHLNYELKELRYRVEIKNPYATQSRWMKNDQVSNSSGLVENQQRAMPTASEHLEEAEQVNVGVNLNNPAEGVPAALLDVGKPCSTDNGISSTSVIEGNKSLGLSEQPSKIITDQTDRDSIAEGSNSCEKSLVGKSGTCDPNVGETHAATVINAPNGDLPDENAMTLSQDNIETSTSKLVDHDADMNESNNLLERISQLHGSISTVESQLSMASLRGECLGRDSVGRLYWVTGRPCKRPRLVADGSMMIPKDRDISMVTSHSQSTFDRGWNSASLVIYESDEEMKCLVDWLRDIDPREKDLKDSILHWQKSIYRQASFPITDPPVSKFSKSEPLMELPNTNAFIVLEQKYGLQTDQDTSELSKRRGTKSRSGSEERVYRCDCLEPIWPSRHHCLNCHETYLTLMEYEGHNGGKCTSSNDCPNESKEIDEPKLKGSKSDIKEKDPVVHNCSVEPSNSGKLESCPYDFEEICRKFTTNDSIKETVKEIGLLGSNGIPSCVPSPAYFLDPPVLLNESKRNDDKPNDWTSSLQECQAVSAKMSGQEGSQVGQDFSGNAGDEELPKSKKPVRDSTSAKEAPSTDISTRLLTVNGGLVPESSLMPVIGRNFHILKQLKINLLDIEAALPEEAFRASKSQQIRRRSWRAFVKDAELISYVVLAINFLQSMIKAEFLKKDWWYWSSFTAAIKTTTVSSLALRIYTLDDCIMYTKDPAPNLQPADNARSGNKGKRKKDIDS

SEQ ID NO: 64498 - protein, 701 aa, Zea Mays
MLFLLPMVAASTERISHPPVAEPRECDWYNLEKSKRVKSFRCGEYDECIEKAKALARQQKRTHAEGRYVRREDAILHALEIERSHFSNNCDDFEEETGNDLCASQNMCSAKSININGLSKKSRGARSLYDTEENSAQESCQTLTLYKKPQNLSSSSTRYASSKRKKRKGHKNHEDDTVQGFQRMRDLREIGTNNVPKQKSGAGIVSDVPLLESGPSFDYDLSSANGIKKGKQSQTSIKKKRSNIGQSCDSLSKKDRHHPLSMLCEDSEVSGTYYHWDRSGQSSSEYLGGQIPNLFESSRAKTSLSTDVNNCSYSSGTSSLEILLDTSHIKHKGSVNAVTLKVADPCTTRILNDDCPDCDEFLAADTLEGDVLEEGKGHLDTYGSCASIKDQISKLGNQSTGCAIGGTPSTWHNRNSEKKSITSVNLIPKESHKRDKNSLLQCEGIIKSEGTILRPAELEDNTKHTTPEHDESSETISNHSNSEKGTKSLPNYFPLQVLPPPGQQPDLKLPRCPVTSPTKRTSPTKRAHAGYRLYDVELTVQRSYKGHHVPLVSLISKWTGKPIVGYPVTVEVLEDSRPTTSRNEHRPPMGSLGSLPKSRVAEPRQARSSPASRSKSKPSGRKKASEHDLDKSWRPHIKKPASSPRKMRRLSSFAGSRRESADQKPVVVKAGGPAVACVPLRLVLSRINEALSFPLRQENPT

SEQ ID NO: 64499 - protein, 429 aa, Zea Mays
MLRRLRLRLPGRAASAAAGAAAAMASLTNVAYADGLFRRQSAPSNPGDEDNLGASAFGRDPETLERMARALREINNSPLAKQVFELMRKQEETRLTELEVEKVQYAIYEKLRDIERMQKKAEDYRNSLQQEAQAKAQALRFEDELARKRMQTDHAAQRRQDAELVKMQEASALRREEARRATEQKILEEMIRTEKEKAEIDQETNRVKAIAEAEARVHEDKQSEEVVKRMLLERMKGEKEKWLTAINTTFSHIEGGFKALLTDRSKLMMGIGGVTALAAGVYTTREGARVTWSYINRILGQPSLIRESSMSKFPLPMSRLLKPSSASLSEGAGFEKVILHPSLKRRIEHLARATANTKSHGAPFRNMLFYGPPGTGKTLVAREMARKSGLDYAMMTGGDVAPLGSEAVTKIHQIFDWAKKSKKGVTVPI

SEQ ID NO: 64500 - protein, 217 aa, Zea Mays
MWPLFSSDDVFAPSLAPLIIIINIMKVTVIGLGFVKAEGVVNSMTRHGDRRELLKGPLYYACAITLTTIVFWRTSPISIAVICNLCAGDGVADIAGRRFGHVKLPHNPEKSYAGSIAMFLAGFIASVLFMCYFNIFGFVEKSWTMVAAFGVISLAAAVVESLPISTRLDDNLTVSVASVLVGALVFYSIGARNLCCMSSEVRRSIPATVGMVFAGSS

SEQ ID NO: 64501 - protein, 788 aa, Zea Mays
MVASSANAPPGAGARRPRSRPRGSVRSRSLRWSTPPRSPLPSSLSASPRRHCSLPALDPITPLPVGTEVEVRVDDDGFYGSWFEATVLDFAPARGYRHPARYTVKYVHLLAEADDEGVLAEPFAPSHIRPRPPLPSSPPRFRPHHIVEAFHNEGWWSGIVVSAAGAGVTVAFPVTREVIEFPSGLVRPRCDYVDGDWIPSRVAMVVRPSRTVRVYEVGDKVEVVRNRDVYGDSWFPATVKVVIDNLSYVVEYFDLEEEEGGLEKATEYLHWRFIRPAFEHTPGEGEFQLQPGDAVEAYCDGAWSPGVVHRVVSEGEYDISIVGKKAELLVTKVVELLKPRYKWNGNRWRIATAKIQLKGNKNFSRDFVLALGVSRDGPTTLSPDRLVSIGPKRCSSTKVLACKKLAKRRGSKELCSPNSSLDVTRTDQQGGRKEVAEAMKECSLALECPKSDAQGQLDRTLEDAKNITELSNQENLLSMLPPGFKSVSNRKGTNIHDAQLGEEPAVMTNNSLIEPNGNDDMCTDHAATTKLAENYNVMETAIMSIDCPAQQPCGEVDERSVLGLKNAGSTQCIIDSSPSSESLLPSPQALFVKSSPVWHIVEAMHVFKELPQQPHFIPLQEVPPTLREGMALGMMVSFADLVKVTMEASIGNDMEWFEDKIRTISHLEANGFSVQSIQSAMTEMVKVKTEHTSYHCEIGKLSSKLVENMASSSRAGALLDEKDEAAARLEEELVSIRQESQKIAKEKEKIDAEVVSIKTACSGYEDLCSGVERKFKEVLAGLQRKRLT

SEQ ID NO: 64502 - protein, 230 aa, Zea Mays
MASPTQGQVITCKAAVAYEPNKPLVIEDVQVAPPQAGEVRVKILFTALCHTDHYTWSGKDPEGLFPCILGHEAAGIVESVGEGVTDVQPGDHVIPCYQAECKECKFCKSGKTNLCGKVRSATGVGVMMNDMKSRFSVNGKPIYHFMGTSTFSQEIATRPFQLVTGRVWKGTAFGGFKSRTQVPWLVDKYMKKEIKVDEYITHNMNLADINDAFHLLHEGGCLRCVLAMQI

SEQ ID NO: 64503 - protein, 100 aa, Zea Mays
MTLQGEAAALADRYGLAVGLPAATAVLLKKQMQYRYSHGIEYWWTYMRADAEGLHEIQRLSGAGKLQIPVEKTFPISHVREAHAAKEKKLAPGKVVLEFD

SEQ ID NO: 64504 - protein, 412 aa, Zea Mays
MGDGASGRGGRSGAGRRVGEYELLRPIGSGAYSQVWLGRHRVRGTEVAVKEIAMERLSKKLRESLLSEVDILRRIRHDNVIALHDSVKDHGSIYLILEYCRGGDLHAYLQRHKRVSEKVAKHFIRQLASGLKMLRDNNVVHRDLKPQNILLVENNENTLLKIADFGFAKFLQPFALAETLCGSPLYMAPEVMQGQKYDAKADLWSVGVILYQLVTGIPPFNGDNQIQLLKNILRTHEIRLPSDCELSHDCIDLCRKLLRLNSVERLTVEEFVHHPFLSEHAPERTLSRTLSEIRDGFPINNISPTRPSSQSSQEDCMPFPLDDESSGQDEGPIPDSKSPMKSYGFPTGKRLDKTSGQSPSKHTSLFSRYVLGNNHAPSSQHHGHTDKMTKESKIHEVQGPKGVYPEGICGYK

SEQ ID NO: 64505 - protein, 141 aa, Zea Mays
MLTWYALGTRYSLWQFVGAGTCVAGLALVLLSDAKSQDEQDPKKIPLLGDALVIAGTVGFAFSNVGEEYCVKKKDRVEVVAMLGLFGLLISTAQMYPQKFIISYITCIANWHDLLVITYIALFRKVKLLPQFSWNKKVVTV

SEQ ID NO: 64506 - protein, 108 aa, Zea Mays
MLQCHGYQVKKNLVTADTSSTDSITLQLRLRRVSAKDELVPGDILFLPVNIQESSVTEKTKKFGNKNEIDFLRDLEIYKDRAIIVLNKPPGMPVQGGVGIKNSIDILA

SEQ ID NO: 64507 - protein, 84 aa, Zea Mays
MAAAAGPYKEMLEVVNACATRIRWRLSPASKRRLLNGCVLWYWSTMVAQCLSYKKIFVACYILPDSSSSTRLGLFSLARKASPT

SEQ ID NO: 64508 - protein, 263 aa, Zea Mays
MAAGDAGRAPTAAAAQSLVESFCGVTSATPQEAAFYLESHNWALESAVRSYYDSVDGEADAVAADPVPPPPAAPAGGGEDTEDEDCVVGGGGGGDDDEDDEDYVDGDGSDDEDAALAAEAAEEEERRRPFKRLKRTHDARGGSGSSAKARGNVRTLADLDSGKGTAGSDENSEDDDEWTPPPEYETRDRSRRKNNTDEIFKQAKKKGAKQERNASQPPEEITHNIHFWRNGFTVNDGPLRSFDDPANAPFLKVKNSVLCYCAY

SEQ ID NO: 64509 - protein, 104 aa, Zea Mays
MHGFMQQSDQLKHSKPILQEVMTPVPKKSLSRSTILSHASSDASLFVLGKSAGVSKIRTSSSPVVPFSVALHTVGDSAALLDHLCRQTGLPAPPPPSQRRRRCR

SEQ ID NO: 64510 - protein, 303 aa, Zea Mays
MGRRLSATAAAAAASAEPLLPPALKRGVLIERCASHADDELQWFRSCLRWVCMDHSGPGQAALSWLLFLVLAAIVPAAAHFLLAFRASRRPFSAVVQLSLSAASAAGFLCLSSSFRRVGLRRLLHLDKLRSKSDRVRASYTARLAFSFRLLASLVAPCFAAEAAYKAWWYATSADRVPFFANDVLSDVLVCSLEMASWMYRSAIYLLTCVLFRLICHLQGLRLEDFAGSLLEEVEEGRAGVDAVLREHLDIRKQLKVISHRFRKFIVAALLIATASQFASVLLTTRRDSVDDLLNTGELAYSS

SEQ ID NO: 64511 - protein, 129 aa, Zea Mays
MADCLHQQALHHHCMWMPKNFDPSPTMPRARTPQDYIIRSLAAATRPHRIGASSPGPRAHRPQCRSGQRKARAGIQRMAWQQQYGMHARAHGRTRDDSSRGIPRAVEHGAPPAGAERSGPPEKTRERGS

SEQ ID NO: 64512 - protein, 852 aa, Zea Mays
MEPKPSSAAHADAPAVEAPRRRGGGGKRKSAGSSFTPSKRQAKERNASFHVPPHLLHSGPLTRAARQSPHKLSGTPSESVPASSAAATGDGVSGGQAVVDAIRPETEETPAPELPLVDEMFEAVRSRGAGVHVVPTFAGWFSWKEIHPVEKQTLPSFFNGKSEKRTPEVYLAVRNSIMMKFHANPQLQLESKDLAELSIGETDARQEILEFLDHWGLINFHPFPPDGHEESKPEETQDNSNDEKASLIEQLFKFESVQSYMTPLPMKEDADFDLCCDCYNEGKFDPGMAKTDFILMDSAGVSGASGTSWTDEETLLLLEGLEIFGGKWAEIAEHVATKTKAQCMLHFLQMQIEDRFHDGKDINQNIPVSTDQATTEKAIAETSEKMEVEDKVEGRGTVDEKASEKTEGNCEETKTENASVVVNKDTQNSDGRDSGASPSTEEPKQSSDEQPVVKENSADVDTSGEKLSNVAIDILKSAFEATGHSPEYEGSFADAGNPVMALAAYLAGLVEDDNTTTSFRSSLKSVSDVSPALQLSSRHCFILEDPPDELKDICASVSKKNRDGDQKQDEDMIQNSIDTEKKEINEKEGKSLSVEKKNNSSMSQNDHQESGIKSVSSDDCSLVEPKTNNAKESGDSTAIGDKSATETTKGNTEQVNDLPSVEVEAPDDSSSKGKDELNKTKDAVATPATVQEQKHSQTLGNGDREEPNNIESVVVGEEKGSVVTANRPDSIARLKRAAATAVSAAAVKARFLGDQEEYQIRRLTALVIEKLFQKIEVKMSLFSEIEQVVFRTREYTEKTRKKLLKERNAIIAARMGALPSRPNQTGVAGNRLPPGYGNPPVRPPNAMPRPTS

SEQ ID NO: 64513 - protein, 423 aa, Zea Mays
MDAGAGATAIRVPYRHLRDAEMELVSLNGGAPGGDTGPPPPPPKDQPRSRADRTKLVLACMVAAGVQFGWALQLSLLTPYIQTLGIDHAMASFIWLCGPITGFVVQPCVGVWSDKCRSKYGRRRPFILAGCIMICAAVTLIGFSADLGYILGDTTEHCRTYKGSRFRAAIVFILGFWMLDLANNTVQGPARALLADLSGPDQCNSANAIFCSWMAVGNILGFSAGASGEWHKWFPFLTTRACCEACGNLKAAFLVAVVFLLLCMSVTLYFAEESPLDPKDTQGLSDSAPLLNGSRDAAHASNEPNNERFPNGHVGLNNVSANNNTEEFTNVNSNTEKGGVFNDGPGAVLVNILTRMRHLPPGMHSVLLVMALTWLSWFPFFLFDTDWMGREVYHGDPNGDLSERKAYDNGVREGCPWRWFIPC

SEQ ID NO: 64514 - protein, 270 aa, Zea Mays
MYLFLLFSWKQGVSSQQTTEGTGVFGRFRFLNQRVSSQSEDSLSCHRIDLRTSTIKIDADENDLRFCFRIISPVKAYTLQAESGADQKDWIQKITGVIASLLNSPFPQQLSYGNVAAESNRSTSSVDSLSIEDNKSSEGHDDIFNLLRNIPGNDSCAECRSPDPDWASLNLGILICIECSGAHRNLGVHISKVRSLRLDVKVWEPVIMDLFHALGNDYANSIWEALLPKEDQGMNDSNGAILFIEKPKPSDAFSIKERYIQTKRSRSEYH

SEQ ID NO: 64515 - protein, 457 aa, Zea Mays
MCMSAKVPAVVRLAKEALAEEKCVVIGLQSTGEARTEEAVAKYGIELEDFVSGPRELLLKLVEDNYPLPPKPDCFEQGEEKVQEFQHKRHYGSDMSLKGRVSKLGKKEDVSEDGGDEYPPHSDHESTESDEDFYMCQICNTEEEKNSLFCCCICASRVHPGCLTPPSTDIVNDDWSCYGCKEKVKSYLKERDAYLTELSKRYDAALDRKSKILDIIRSLDLPSNPLDDIIDQLGGPDNVAEITGRRGMLIRASDGKGVIYQARNTKEVALDMINMHEKQQFMDGEKNVAIISEAGSAGVSLHADRRAKNQRRRVHITLELPWSADRAIQQFGRTHRSNQTSAPEYRLLFTNLGGEKRFASIVAKRLESLGALTQGDRRAGPSLSAFNYDSNYGKKALTMMYRGIMEQDAFPVVPFECSENQATLEEFITKAKAALVSVGIIRDPIMYYLTFSQAYLI

SEQ ID NO: 64516 - protein, 293 aa, Zea Mays
MDVDLWISKVKEGQHLAEHELQSLCEYVKEILIEESNVQPVNSPVTVCGDIHGQFHDLMKLFATGGHVPETNYIFMGDFVDRGFNSLEVFTILLLLKARYPAHITLLRGNHESRQLTQVYGFYDECQRKYGNANAWRYCTDVFDYLTLSAIINGQVLCVHGGLSPDVRTIDQIRTIDRNCEIPHEGPFCDLMWSDPEEIETWAVSPRGAGWLFGSRVTAEFNFVNGIELVCRAHQLVQEGLKYMFQEKGLVTVWSAPNYCYRCGNVASILSFDEKMVCQFFCLQGSARSITHT

SEQ ID NO: 64517 - protein, 531 aa, Zea Mays
MAIAADSAADQDPNPIPNEAAGESVELPAYTDHGEPNADLADVDYEDEEELDGVTAEAAARDKVEAVFQRLSEAPVGIRVHDIIIKGNTKTRDALIEAEVVGLIRSAVTVQDLVRTANIAAVRLRLLDVFDSVHVLLDAGPPELPGTTNVIIQVVEAANPIDGSVGCFSKPEARSWTVEGSVRWRNIFGYGDIWDASGAYGWDQSSEISIGVSLPRFRSIPTPSTARASLLSHDWLKFSSYKERLLGLSFGLLSDMHHDLSYNLTWRTLTDPSQAASKSITRQLGHNLLSALRYTYTIDQRDSHLRPTKGYAFVSTSQVSGLWGSKGLRFFRQFDIRGAVPLGFYNAALNAGISAGVILPLGRGFMESPSSVPDRFFLGGHSSPVISLCSLTSLLGFKTRGVGPTELRRIVPSESVTNESTASPGWDYLGGDFAVSAFADLSFDLPLKLFQDAGIHGHAFLSAGNLAKLSEGEFRNFSFSKFGRTFRSSAGVGIILPTKLLRAEINYCYILKQFEHDRGKTGIQFSFSSPM

SEQ ID NO: 64518 - protein, 318 aa, Zea Mays
MKGLFKSKPRTPVDIVRQTRECLVYLDLHSDSRSGDAKREEKMTELSKNIRDMKSILYGNGESEPVTEACVQLTQEFFRENTLRLLIIHLPKLNLETRKDATQVVANLQRQQVSSKIVASEYLESNKDLLDILILGYENMDIALHYGAMLRECIRHQSIARYVLESEHMKKFFDYIQLPNFDIASDASATFKELLTRHKATVAEFLSNNYDWFFEEFNSRLLSSTNYITKRQAIKLLGDMLLDRSNAAVMMRYVSSKDNLMILMNLLRDSSKNIQIEAFHVFKLFAANKNKPPEVVNILVTNRSKLLRFFAGFKIDKV

SEQ ID NO: 64519 - protein, 229 aa, Zea Mays
MVLNSHQMSPNLLLWIVLGAFLMATSLRMYATCQQLAHAAAANSFLGHTELRVHVPPTIALATRGQLQSLRLQLALLDREFDDLDYDTLRALDADNSLHVPSMSEEEINSLPVFKYKVQAQQGNAPARKSDEASQLSVSSTGSGNEKKQDGLKADGTGKTPQDELTCSVCLEQVMVGDLLRSLPCLHQFHVNCIDPWLRQQGTCPICKHQVSDGWHATGNGEEDASYMV

SEQ ID NO: 64520 - protein, 65 aa, Zea Mays
MMDFVFSESEGGIYDNRNGMDYHIPVSDSVAREPPMHIVHIAVEMAPIAKVDLHFIFCDTNDDGT

SEQ ID NO: 64521 - protein, 1347 aa, Zea Mays
MGDDAELEEGEACACGDDTAFVDPDVALSYIDEKLQDILGHFQKDFEGGVSADNLGSKFGAYGSFLPTYQRSPLPQTRSPPKAGNITSKSPFHQSNEDLSQKPPAVAVSSTPQSNGPVVPFSGDSIKKEIRPSTKSERGSVSHDSYGPSKCSDQNRLKVRIKVGSDNVLARNNAAIYSGLGLDISSPSSNEDSPDGRGSLSPEVNNVPHESPQTILQIMTCFSVPGGFLLSPLPANILQLTKKVVSSSKKWESNVDVENVQESYEGHVAKRVKSDGNKKRLIDAKNSKNKNDISAVMKKEIDMELVAGQKIVSEALKISLLSDPRAMDAKGENRLEEEPAENNLVGIRDARLKERCTKTDSMTVKVEPAKAEVMECLENSSFGSSEMDLSAVKGKSKPKTEKGEATLEDRNTTNDKDLISDRKQKKKIKSGSKYNASNFEGSISNVINEGASAVFHMGKISGLEALPYDTNGENNSKSEVKKMQREQKANVSTSSDFLEEEKHIHSSAAVKERSDMQSKPIHTGKKPKAKSHRDVRDNNFPEGSYGSKEQDSLENKSAFGDPRPKEKPWKFDSEDSDAPGISRKDSSYVKLDKHLATEEQKMHILPPATASTANAAFIHAAPVVIEEHWVCCDICQKWRLLPYEMNPSDLPKKWKCSMLQWLPGMNRCEISEEETTNALNALYVPAPANGIPSVGLPHVASSGLVTSSTPNMNGHIEQSRKRKNVLSDGNFVAEGSHQTQGSGHPMSNQHAPNKSKTHTDGIQYPIDRDSVSKSVDPTIKKQRSKSKHHSSYSDGVDLVERPKKHSKVKSKRDLDRDEYKASKKIRKEERHFDRDRNLGSGLASRDVPDEAKAFPVKSVTSKGSGERSDLSSSKQKNVSHHNHLENSKKARQDYVGFPEDESKEYFHQSDVQRSDLSSKKRIVKKWEESQYNPVAQVSKGAIKETYRDQNLKEAKLMSLNSEELFSMTSSKPPKAQHADQVLFYDGGRTNSELVEDNTHFSGKTGLPEQENSLSDKALDLGKPASDVAYIQTSAVTSSSSKASVSQKKKQTTQAMKTSSIESLSLSPQRNSNIDNVSASHSRVSGKDGSLNANSSTVPAMAKQLNTQVGVAVNDQWSSEPILVGSSRRKSDRDNGQVQLTQGHASDGIHPERGLNEDLQPESGRKDSNIKNSHIPKSSNHLHSGEKNNYNTDGSPMQPGKHLVDPKTPVLDKGDSSMHENKKSANSLQDRNGSTHCPPDGNPLLGLPSGKEKSYLKNNRQDSQKPKPQISPLKESKLDSHSTPLKPNGSKLTPQSRQYNAENGGRHGTAKQAIRSPADTFSPARKDNTSTAKKEKSLKVQDSTLTPP

SEQ ID NO: 64522 - protein, 407 aa, Zea Mays
MLLRWIAAEGRRRARPSRPLARSLSYGRVVDAAARDGELRVFVVAGEVSGDSLASRLMAALRALSPVPVRFAGVGGELMCKEGLQSLFPMEEIAIMGMWELLPHIYSIKRKIEDSANAAMLFQPHAVVTIDSKGFSFRLLKQLKCRSNQKVQSPLHIHYVSPSFWAWKGGESRLSKLHNFVDHMLCILPFEEEICRLNGLPATYVGHPLLDDAIGLNMGTELCSDKSKYQRSCEAFRLEHGLSPGATIITMLPGSRMQEVVRMLPIFLHTVQNLRHTFDELSLVIPVAPHRDVRTYIENVVQSEPFPVVLIPGGSLKERYNAFSASRAALCTSGTAVMELMLARLPCVVAYQAHFITECFIHLRKKINFISLPNILLNSLVVPEILFGACTAKNLAAKLRLLLEPIA

SEQ ID NO: 64523 - protein, 434 aa, Zea Mays
MEVAMVVSARASLLILVISLCSPYKFIQSPMDLGPLNLLPTTSTAAASSDFGRILFRAPAAVLRPQSPRDISMLLSFLSGSPSLSRVTVAARGAGHSIHGQAQAPDGIVVETRSLPGEMEFHHVRGGGEGRASYADVGGGVLWIELLERSLKLGLAPRSWTDYLYLTVGGTLSNAGISGQTFKHGPQISNVLQLEVVTGRGEIVECSPSKEADLFNAVLGGLGQFGIITRARILLQEAPEKVTWVRAFYDDLGAFTRDQELLVSIPDSVDYVEGFMVLNERSLHSSSIAFPASVDFSPDFGTRSSPRIYYCVEFAVHHHHGYQKQSQAAVEAISRRMSHMASQLYSVEVSYLDFLNRVRMEEVSLRSAGMWEEVHHPWLNMFVPKPGVAGFRDLLMDNVSPDSFQGLILIYPLLRDNFQEVQVGQASISLHYPQ

SEQ ID NO: 64524 - protein, 234 aa, Zea Mays
MTAKSEQTPRITELHVRVDCNGCENKIRKALRAIDVYIDQASHKITVVGMADPWRMVKAIRKAKRVPTIFSHTDPAAAAEADQPPPPAAEAEEAEAKGEAQAPAPAPPPPADPPAAGDRAEETAPADTSAPEEHKEAKPAETPAAVDATVVVRTVRDHPYGYGAGGHGHRMCSEANHPVDSFYSHHRPTSPYVAEYGAGGGYAGFPVQEGRGKEDAINITCMFSDENPNACSIA

SEQ ID NO: 64525 - protein, 78 aa, Zea Mays
MIDPRTSLYRQLIPRLPLSGLFITYLALFLMDGHGQPALLYLVPCTLGVIVILGWLRGELYELWNFGKSPGENFVNEP

SEQ ID NO: 64526 - protein, 683 aa, Zea Mays
MCRLCFSGENEGSTKAAKMLPCKLCSKRYHRNCLKSWGEHRDLFHWSSWVCPSCRSCEVCRRPGDPNKLMFCKRCDGAYHCYCQQPSHKNVTHGPYLCPKHTRCHSCGSGVPGSGHSTRWFLGYTCCDACGRLFVKGNYCPICLKVYRDSEVIPMVCCDVCEKWVHIECDGISEEKYQQFQADQNLQYTCAACRGECSQIRDTEDAIRELWKRRDVADHELMATLRAAAALPSLEDVSPPYQNSDDEKLGAYALKNESRNTLKFSLKSNSSKPPPDTPEQEKIVFKSSGSNKKPSKKKSGQANKTVDGHDEIFLERRHAVKSSNSCLGDQTINENHDRSPFKNDDNVYVSSSTRSLEKNLKSPSMKAVANNADMIPKVKIKGSKVSSLHYKDGEENTPKNDTGKATKLVIHLGSRHKTRSGSPKSELSNSQREQDLGSIHGGKIDVTSQLKSSRNEVKERSVMKLVRDTGVQQRNSLLGDLGTSKKHATGKRSNALISGMENANETGTRNRSFAQKQSHSSQVENHGTADSPDSLKPSLLKLKFKRPHFEQLNTQASQPEEPTSWVSQQEEQLNVAKGQRSKRKRPSMEKADGLDGITPAKRHQQSTDEVMDANWILRKLGKDAIGKRIEVHLTSDGKWHQGMVSNVMGGTLCIRLDNGRSENVELGKQAIRLIASRSKGGKR

SEQ ID NO: 64527 - protein, 154 aa, Zea Mays
MESPPLTAEAIAFTEKKMDMTLEDIIKMSKKKNPGGKNPPRQPIKKRPFQNANTNKGNGKVQRFMESRSTIRQGVLAQRRSNLGGSQFAATKQAAKKAAAMPMRSGAVYWKKPSIHGVIYSCWMSAIFGHQCLRFTLVLFVNYGWKDRRRCDND

SEQ ID NO: 64528 - protein, 94 aa, Zea Mays
MRVERQGHCYCKSPLSLVLRVVGGKNSQLSLSTCYSLNTIFTSLIGLFWNTNYVSDRFMRLSSFHFNANPAGQHHVTKQASHIKGRCYSFRVCF

SEQ ID NO: 64529 - protein, 995 aa, Zea Mays
MAKPAPAEPFSIRGYAMRMRAVDAAECYPFVGGCRSDVEGESPPRFRPMDPKPLSRWWKHELAAGQARLLAGAKGGEAAASGGGLRKGTKRKGSRSSSTGERARKRRHVLQFRSFLTKKEITAKPQSTSCLHEHKLHMAFPRKHKSSTVHPSTELQPRKKREEARDHMPTHGNSMNKRNRERAGPSSEMNSDLIGIKEVTSAVNKQSIEVNGSTNNPTNTGYELVKTPTGPKDDIFGDLPLLELESSKTMFRTGVHELPTVIEESLITNQTEADSIPEAVPLKLIDASDITAQTPSPLEDLVKSEATEPPCISHNDVAGSHPSTVEIDGLPNHMNINMVKPGLGDMQLKFTDVSALGSHSVLRSKRGSGNPMQGCFDVNKNCSQEMKKHGTNSISSPPAMRTRPEETKFKDAPVKGKKSTDITGAVVTLPTLANQLSYQASVLPSAVSHTVFSIRVDSNDLSSLRSMPAEECIPTTRPGNFRTNVCHGSREHVDPYAAQSTDNQGSSHSKLHPICSPANIGMAFMKLPGLERMEISNCNARIGENRFSNAESMNTVRCQKQQLLSGMTYVMEGQKQIGLSSSQVGKPGLDGYGGQGDHHLQQPTVRLMGKTVSVCSHGKDHNVWTMDKVSPDNVAIETSRLSNSTSGQNTTFSGLHNQRPEPISSVPIVKDCTWNFGNQFVRQAELNKAAIGSSNSQTRHLELHQPPHLISIPQNQQSHLWTPAAHMSRKDQCFVGPAANQSSLVPKSLLNASMQEKYQKSTLLSYDDPSSMPIRQPYQTPGVKSSSGSVISFFEYGANNSLSRSSSPGLTLSLTTGLANDSISAGRAACAGSLTNADGRKAASFAEPIGNRSVYADNVSQQPARPISNRTAYATDNVSQQPAKRQVVTDRHDFMSMGPNIVNHSPGWSLSDAVGPQVLDFSKRVARDAVQTSRNESNNPRASSGPVLPIETWSRPGVVAGANNMLKPGQNLNDHSKLLYSTKFPVDSAINSVVL

SEQ ID NO: 64530 - protein, 1159 aa, Zea Mays
MDLSRLASVAGPSRAAPRAGLQIGAAGNGFRVCSLRHRGAGNGRLTSAAALLRGSSGLFYLAPARGGPPRLRARGRPRCQGSDSLAYVDGPLEAAKGSGEVYDDDATSSGPDDDDNDKGPADVDGLREMLQRCRNELEVARLNSTMFEEKAQRISESAIALKDRAEGAQRDVSAAVATVQEVIVKEADAKEAVQKATMALSMAEARLQLASEALDAKRGSVGPMEVSIEGVEEEALVSAQEEIKDCRAALLRCEEELERIQEQKMNLQKEVDRLTELAEKAQLDASKAEEDVTNIMVLAEQAVALEMKATQRVNDAEAVLLKAEKVISSVDTVVELTSLAEEQKSAEEDSVSEGYEYSSNGTDDVPVRDEVSSIERLMVGDLTVEGIEQLEPSREIYDEASSDKMSVEPQKEAEPDSDKLKQGKKQEMERKEFTKEPLSAQKSLKKRSSRFFPASFFSSKADGEFTPTSVFRGLMKSVQKQAPKLVVGILLLGAGAFFLNRAEKSQLFQQQEIATSIGKVTSTTKPIVREIRQIPQRVKKLIELLPHQEVNEEEASLFDILYLLLASVIFVPLFQKIPGGSPVLGYLAAGVLIGPYGLSIIRNVHGTKAIAEFGVVFLLFNIGLELSVERLSSMKKYVFGLGSAQVLATTAAVGVIAHRFAVLPGPAAIVVGSGLALSSTAVVLQVLQERGESTSRHGRATFSVLLFQDLAVVVLLILIPLISPNSSKGGVGFQAIAEAMGMAAVKAVAAITAIIAGGRLLLRPIYKQIAENQNAEIFSANTLLVIFGTSLLTARAGLSMALGAFLAGLLLAETEFSLQVESDIAPYRGLLLGLFFMTVGMSIDPKLLLSNFPMISMILGLLIIGKTLLVTFVGRVFGVSTIAAIRVGLLLAPGGEFAFVAFGEAVNQGLLSPQLSSLLFLVVGISMALTPWLAAGGQFLASKFEQHDVRSLLPVESETDDLHDHIIILGFGRVGQIVAQLLSERLIPFVALDVRSDRVAVGRALDLPVYFGDAGSREVLHKVGAERACAAAITLDTPGANYRAVWALNKYFPNVKTFVRAHDVDHGVNLEKAGATAVVPETLEPSLQLAAAVLAQAKLPMSEIQESINEFRNRHLSELTELCATSGNSLGYGFSRVMSKSKSISSDDESETVDGALAI

SEQ ID NO: 64531 - protein, 176 aa, Zea Mays
MEAYYQFSTTASFQHISSSGSAARFSEQDKADLQALSKEEKTGIVSMQIHRMIMLNYRPYYVPASPSSLASSLSLSLEKRKETRTHKKNILTRGSAGPVGTDTDTATATVPSEAWHRSFAKEQLQVQKNKVGSVLKNSKGGMDGVSLRLFITSQPCRGIRNFRYILFMNLIHDPPA

SEQ ID NO: 64532 - protein, 287 aa, Zea Mays
MTWCNSFNDVRAVEDNLATAAAAKKQQLQASSHVNLIRTCPSCGHRAQYDEQVQQAAAIQDLPGLPAGVKFDPTDQELLEHLEGKARPDTRKLHPLVDEFIPTIEGENGICYTHPERLPGVGKDGLIRHFFHRPSKAYTTGTRKRRKVHTDEEGGETRWHKTGKTRPVFTGGKLSGYKKILVLYTNYGKQRKPEKTNWVMHQYHMGSDEEEKDGELVVSKVFYQTQPRQCGTVSSTARDAVPLAASATTGHHHHDGGNGGDDENSMLMKEVGIVDFYSRGGGGGGGR

SEQ ID NO: 64533 - protein, 1765 aa, Zea Mays
MGLLSVSRWAFEQGLVCSPNNWNCMEKLLEVLISIRDEVACLSVANLILNSWPSHHRALHVKKTIECAEPVPFAPRGIDILEPKHAKLIFSNKRKSVDDEICQEIGTKKSKHSATLQLNEAKWLALLDGILSLISANTEKAGEYNCSNTVDRCSISEGSAKGLAYNIIDVVISTDTLKSVETAGGNGNDSHHGEILPYDCKATVKEKDGNSDREHPHERRSTRLERLRSRKSGKDENGSDGKDISHAMTQFLESFILKGPSPVEKAYCSGNADASNPDTHNYTSNEEANDLKQFLCKISKNFGPHHIGYMLLEEMAHLKVPFQDYFVKLIELDKLTRGWAEDRSASCNLFLAELYYDRALCSGSPPTSSELSDSSYHLCKIIESVALELPFNISVREIHSTNLDTESSRTGESSSELIERSHENGHINMLNDQKSKHDSSSNMNCAFWIRFFWLSGCLSLSSDCKEKAYKEFNIALSILKNSNKTKSYGEVILLPHTKLVKSLTTDRILREINLIRLESLLWNNDENINKITHTEFMQLLPPLLLSTKDAYVGNAYGPQRESENVISLELSALDVLISACEKAKPMNIQVYLDSHRRKIQVLTVAAGMVGSVTPLKAKGSSNVEFVEAMNRNRLENVVEAVKDVSRNASKAKDIIDQCDNSDGQDGWSPLMSIVGDIQSLLLTIMCAAVKIILSRKLSCSGTSYQVDHLECSCLIDAAIAFCKLQHLDPTISIKTQVDLIVAVHDLLAEYGLCCAGRDGEGEEGMFLKFAIKHLMALDVKLKSQLNSNGMEEDAVPKDVRAEDSVADEPSVSDNKQNSDDEEESELDEIQSCLDSALDQAFFCLYGLKINPDSCSEDDLAVHKNTSRGDYQTKEQCADVFQYVLPYAKALSKTGLVKLRRVLRAIRKHFPQPPYDLFVNNPIDNFLDGPDSCEKILSEICESNESREAILNVLFPGERGYEAFKKLSTASSEPYSDVYENLYYFIAQAEDISATDKHTGFVLKKEGEEFVEQSANIFKYDLLYNPLRFESWQKLSNLYDEVEVDLLLNDGSKHISILDWRTNTDLIRRVEMGRRHSRRCLLMSSLLAKTAPEQSEAHELLALVYYDSLQNVVPFYDQRATLPVKDSSWETFCKNSMKHFEKAFEIKEQWLHAFYLGKLCEKLGHSFSKALSYYNKAMMLNPTAVDPVYRIHASRLKLLYTQGKQNLEAIQVVADYTYNQSTKENVLSMLGSMTKVLQSSSDKTSLDTKEENKFFESDILDKVWHILYDDCLYALGTCVEGELKHFHKARYKLAQGYYRRGEAGDLERAKEELSFCFKSSRSSFTVNMWEIDGTVRKGRRKNPNVGGSRKNLENTDLWTLEKAYTYLRTDKRFALCLGDIVPVGLGKYILVLTAAIHNPEIRRASGDASVEQLLEKMFTVFMDHANMWADISNIPEVNSPELSESNLYSYIHQYIHLLESDVRLDVLEGLNEKIRKRFKTPKLSNSNFAKICKHASLAWCRCILIKLASITPLPESADATNQPAPLSNGLLLYVDLQPDELLISSPDGPAQFKGLDMNWFETLNRIKNIPVKQTSEDNLETAVTLMKSTYNFYRESPCGTFPSGINLYTVTPSQAPIEGLPPTAAVVETLDLSIPRKLLLWVYTLVHGRYSNISSVVKYCDEMKLRSKRGTPAASASSQVVQPVSHSTVSSQVVSKEKSSQVEPAEAAQNPSDLAATCVPAYQEVGGASASQSAIEAQKATAAASQLTRSGSSRAMENAQDGGERK

SEQ ID NO: 64534 - protein, 113 aa, Zea Mays
MNRTRRTAGVGSYQLLGRADSHRRWMEQGCPYRARRAIATNFWPPELNDNHRHAPQENAKLPDPMLHPERRRSSVSPVAASLLPHRSPRFLWRGITRSWGAPMLAGARGLMIL

SEQ ID NO: 64535 - protein, 612 aa, Zea Mays
MNAVLNRCIQNHCLQFADVLETNLSSMQSASTRGRQRSCDVTKQVPVADTWAPVPWRCGPRRRLARSSLHDMAASVLQAERHLLLLGSGRNRPLLRMLPPRVLFPHRRRSWPRAVRVSPGDGEGAGGFASAVEKRSIPGIVEEEGYGARGEELEGDVAGALEQRWPPWDGLAERYKLIGATSLAFVICNMDKVNLSVAIIPMSHQYGWNSSTAGLVQSSFFWGYALSQLPGGWLAKLFGGRKVLEVGVVTWSLATAIIPVVAGFMPGLVLSRILVGIGEGVSPSAATDLIARSIPWQERSRAVAVVFGGLSFGSVLGLLFAPPIIQNFGWESVFYIFGLLGIVWCLGFESLIVQRFGDKKSLLNLGQSSTGSDGLISYAMSSESSHSSLEDLQNSLKDVPWGAFFKSKAVWAMIYAHFCGSWGHYTCLSWLPTFFSEELNLNLTEAAWVSVLPPLGSMIITSIAAPFADNLISNGVDTTKVRKICQTIAFVSPATFMMLSSVDLGLPPWEIVAFLTSGVALSSFALSGLYCTHQDISSEYASILLGITNTVGAVPGIVGVALTGFLLDSTHSWSISLFAPSIFFYLTGTVVWLAFASSKPQDFSKSGPESEP

SEQ ID NO: 64536 - protein, 258 aa, Zea Mays
MDEKATMESKLSSAAAFVEGGVQDACDDACSICLDAFCDSNPSTMTKCKHDYHLQCILEWCQRSSQCPMCWQHISMKDPMSQELLEAVEQERNIRANPSRNTAVFHHQMLGDFEIPVGADDAELEERIIQHLAAAAAVRRSHRHHNRRDGHQSRSEASSHPQFLVLSADERTISGQEGDYEQASAVASGRPLRTLVEQERTRGLADASSPSLRCSTPADSTGRSNNRISGIESTPVDQDGTGPSALQSMAVTLDKQNS

SEQ ID NO: 64537 - protein, 209 aa, Zea Mays
MVDDPAVSSVILGFDAPRKEDGVQDNPGAKKRSRPESSAPPGTKACREKLRRDRLNERFNELCAILEPGKPPKADKVAILSDAARLLNQLQGEAQKLKQSNESLQESIKSLKAEKSELRDEKTRLKAEKERLEQMLKGVVSHAAVAAPGPFVPHPAAVAPSFHHHPAAFAQAGKFVPYPSYPPPAAFWQWIPPTSLDTTKDPAHWPPVA

SEQ ID NO: 64538 - protein, 419 aa, Zea Mays
MWAEAQLDKRRSRDDFTSKVQYDSCVGIKVDTDQKNNAAESTLVPVDNPIRNNNGNSSLTNNDLLVDKQNQLITGDVFQQWNGVSQELSTNPESLSVQQYASSEKTRSQLKSFIGHKAEQLYVYRSLPLGQDRRRNRYWQFSASSSSYDPGSGRVFFESRDGYWRVIDSSEAFEALVSSLDTRGIRESHLHSMLQSIEPTFREAVERKKCVSLEHTTGWTDNGSNESPNCNNEFGSPCSTLSGVASDNLMAYSDTFKIEIGHNEAEKSSISKRASVFLKWMWRECYCHQSTYTMKYGKKRCPELIQSCDHCYQIYLAEEQHCSSCHKSFKPIHNFLEHLSQCEDNQRTNPSWKTQIVGLSVPVGLRLLRLLLATIEASVPAEALLPFWTDLYRKSWGVKLYSASSAEEVLQCLVCWKVQ

SEQ ID NO: 64539 - protein, 421 aa, Zea Mays
MVFQKRSSSELEASGGGQVAEMPRVPKSARGKRSVRKKEAQNPPQMSAFDLLATVAGKLLDEGVGSLGNMSAGAPALTACAKDVRVKKEQCDEEMKQFKHEVTDQDSCNESAILPHIVFQRAVNNARNEDPKAKSEAQDKESSMISCTKAELGCNFGVIADRWSPESVESGAFTGDAVASLMPPAPAGFHKNAPEMYNLLDSMDVDVKPPPLVSSDSTGEMPLYGDKVHRSTSLPRVSKGVGFFAVDRDDDDDKSSGCTHPSTTTNKDFRSNCTAEYSRVRKLLTSKYRKVAPARVYKSDLSYSDVDRKPSFRNKKMHYTRQRTQRSTFKRRKLFDRHSVLASEFGTAHGKGNTKKVTGRDSHAVSLEANKGTSSTPFQKSRGSNDCHVKLKIKSFKVPELLVEIPESATVGSLKKLFSRQ

SEQ ID NO: 64540 - protein, 491 aa, Zea Mays
MECLRREPVESLLKLPSGCVQEHWPATLREFVLTARSLVIPREQKAPQSLVSDIHVAPVGTVLAQGMNSKKKHEIENLAAVVHAIAKRCGAKTVVDVGSGQGYLAQALSFEYQLRVVAIDASSHHASVTIARAERIKKHYAAKCVEKQLLMVPRAVTCHVLSSDTLAAVTLDACKDDNGEHVRDTKTSTKKITQIQESTQGTPPLILAGLHACGDLSVNMLRVFVSCEQVKALVSIGCCYNLLSEDTYEDTDTCPGFPMSKAAKHSELVLGKSIRDLACQSAERWRNLTMDIALQNFDVHAFRAAFQMVLEKYFPEVSRLSPSIGRQGKALRRQRLRKVVESQMTTKKNDDFSCSTLKEQNKNTNDVHPVIHEVDTGPDDIHQNAHQKFILFKDFTLSGLGRLGCGSVEDTSLLEIWKDVQPFSEYIGPFWCLRAALGPLVETYILLDRLLYLQERSNLVEALLFPLFDPTISPRNMAVIAWKLCANSSEA

SEQ ID NO: 64541 - protein, 502 aa, Zea Mays
MSSCDDDHASLLRSHAGASSPSCPSPRGSAGHQHHADVEADEATVTASPRLASGGGGVRGLLRNLERRMSARGSGPGRRQHQHYQQLDRSVAIESPPSQRQRERAAAGDDDELGDGAPPEWALLLIGCLLGLATGICVAAFNRGVHVIHEWAWAGTPNEGAAWLRLQKIADTWHRILLIPVTGGVVVGMMHGLLDIFEQLKLVKSGQRQGINFVGAIFPTIKAVQAAVTLGTGCSLGPEGPSVDIGKSCANACSEMMESNRERRIALVAAGAAAGIASGFNAAVAGCFFAIETVLRPLKAENSPPFTTAMIILASVISSTVSNVLLGARPAFIVPAYELKSAAELPLYLILGMLCGAVSVVFDRLVGWFSRFFGHIKEKFDFPIIVYPALGGLGAGIIALKYPGILYWGFTNVEEILHTGKSASAPGIWLLTQLAAAKVVATALCKGSGLVGGLYAPSLMIGAAVGAVFGGSAAYLINSALPGNAAVAQPQAYALLQSVQSH

SEQ ID NO: 64542 - protein, 212 aa, Zea Mays
MARALLLLRVAVARYPPLPASPALLQPLLRRHAPSQYRSQLRFLSSLSSSSVSTSSDAPSDGGGGRDGEEDGAKSGGRVDYLGMSDEELMEQCDMGTFKASGPGGQHRNKRESAVRLKHLPTGIIAQAVEDRSQHKNRASALSRLRTLIALKGTEAFEMKSFVKSSASSAPYPIGAMFDRCQEALFLGKTFEVSCGLFKGCSSSLDCRKYVQ

SEQ ID NO: 64543 - protein, 88 aa, Zea Mays
MPRTAVLRSAQAGPGASPGRPTPAQRSSMPPPRAIVRATPHAPVQCPGHLDGSAQSCLVSGSTTSTSTKGRIYHKTDTGLPSLYDIWL

SEQ ID NO: 64544 - protein, 103 aa, Zea Mays
MYLVVSFISETRFLAMNMEDELEETEIEGFDAQTQTLFCQNAINDLLIQVTANSVRLVSCTSRELVDQWNAPAGFSVNVASANASQVCCYPKQTQERVKGRET

SEQ ID NO: 64545 - protein, 553 aa, Zea Mays
MSSNDAIGLLQPAISEIASISDKNVVGKFFLDAIRKLLDATKAVNAEPVDDSSMEIEADSNKNSMKRALLLDFAASLMPGLAAKSINVLFSYVKPAIKDSDSLIQKRAYKVLSMLLKDAEFIEKNLDVLSELMISSLPCQFPSKRYRLECLYHLIVYILKDSSMVRKREIISSFITEILLALKEANKKTRNRAYDLLIEIARACENAGNDEGKEGLHQFFGMVAGGLAAGQTPYAISAVVTGLARLTYEFSELIGVAYNLLPQTFLLMQRNNREIVKANLGFVKALVAKSKADILHEHLTGVVEGLLSWQSDTKNSFKAKVKSLIEILVKKCGLDAVKAVMPEEHMKLLTNIRKINERKMRKAKSSEDGDAMSMASGATRQSRWNHTQMFSDFGSDDESDGPFSTQHTATSRSRTESKASTRLSRRRQGDKKLLDKFIDHSTGDPLDLLDQKTVRLALKSAAGKKRAAPDDDDDKFEVDPEGRIIVREEREKWKKKPAPRDDEEADGKSSVRSQSIKKRKTSGSGWAYTGHEYTSKKASDFRSHCLTTQTTQM

SEQ ID NO: 64546 - protein, 50 aa, Zea Mays
MELSIDLAPALPLRGGNSNREYINTGTCPTAPSPHELSITESPTRLLPPP

SEQ ID NO: 64547 - protein, 355 aa, Zea Mays
MMSVKLSYCGNREYLDVRPDGWLDYAAKRIAQLGADKCYNHTLCDELLSILLPAKPPFHPRQFATCAVVGNSGDLLKTEFGQEIDAHDAVFRDNEAPVNKKYAKHVGLKRDFRLVVRGAARNMAPILKGSSDEALIIKSLTHKEINAVIKELPNPVYLFQGIVLRRGAKGTGMKSIELALSMCDIVDMYGFTVDPGYTEWTRYFSAPRKGHNPLQGRAYYQLLECLGVIRIHSPMRAQRVEDWSDIPSKEEIRRAHTIAFRLKKHETGQLAELGPFSNCKVWGTVDPDYGPVSGTSDMSETRKNSNYSKWELLPFEKLRREAQEHHIQMGGVSLYKMDGNKLDDLVCVRHQRSSS

SEQ ID NO: 64548 - protein, 501 aa, Zea Mays
MYFYPYILTVVKHAFRLYSLVADGNNKKICLFPFRRCTQVTQHFSLQIDLDTIEVSNLNRQFLFRQSHVGQSKAKVARDAVLKFRPNININPYHANVKDSHFNVDFFKQFNVVLNGLDNLDARRHVNRLCLAADVPLVESGTTGFLGQVTVHVKGKTECYECQPKPVPKSYPVCTITNTPSKFVHCIVWAKDLLFAKLFGDKKQDNDLNVHSKDDTSSKTDVFERSVDEDLEQYTQRIYDHVFGYNIEVALDNKETWKNRRKPNPIYIRDALPEDAVQQNGRSQDHVNEEQDPSAMVSLGLRNTQEIWSLADNSRVFLEALKLFFDKREKEIGSLIFDKDDQLAVEFVTAAANIRASSFGIPLHSLFEAKGVAGNIVHAVATTNAIIAGLIVIEAIKVLKGDYQDYRMTYCLEHPARKMLLMPVEPFEPSKSCYVCSETPLVLEVNTKTTKLREVIEKVIKGKLGMNLPLIMVGATLVFEDGEDLEEDEIANYALNLEKVL

SEQ ID NO: 64549 - protein, 245 aa, Zea Mays
MMEGGSRADGRNPNQLRPFTCTGNPLHRAHGSARWAQGDTVVLAAVYGPKSGTRKGENPEKASIEVVWKPKTGQIGRQEREYEMTLKRTLQSICLLTVHPNTTTSVVLQVVGDDGSLMSCAINASCAALAFAGIPMKHLAVAISCGVMDNGVVILDTSRAEEQQARSFAHLVFPNSRKSVESKDTTQRDEESERGLITCITHGAMSGTVLHQDDYFNCIERGVMASSRISDFMRKTLQKEASRDA

SEQ ID NO: 64550 - protein, 519 aa, Zea Mays
MLPVRVEGKLYKNFVEEISCGAYHVAVLTSRTEVYTWGKGANGRLGHGDTEDKNTPTLVEALKDKQVRNVVCGINFTAAICIHKWVSGVDQSMCSGCRQPFNLRRKRHNCYNCALVFCHSCSSKKSLKASLAPNGNKPYRVCDTCYSKLTKGLETDMHFSAKRAATVPGFSDTIEEDLETRSNAQLSRLSSMESFKHLDSRYSKKNKKFEFNSTRVSPVPNGSSHWSGLNISRSFNPVFGSSKKFFSASVPGSRIVSRATSPISRRTSPPRSTTPTPTLGGLTSPRVPTDGKPTNDALSQEVLNLRSQVESLTRKSQLLELELERTTKQLKEAISIAGEETAKCKAAKEVIKSLTAQLKGMAERLPGGAAKNTKLPPLPGISIPSDISSLAMESVGSPSSSGEQIINGHNGLLASNGPSSVRNKTSHPEVGKNGSRPPDAESCHDAEWVEQDEPGVYITLTALPGGARDLKRVRFSRKRFSETQAEQWWQENRARVYQQYNVRVVDKSTASADNDIAAN

SEQ ID NO: 64551 - protein, 230 aa, Zea Mays
MVERERGEGEARALASGPGQQQQQEGAAEGERVEKEGDEREEEDRDDEAVEWSEIRLAIEELSPAAHLKRVDGDGKAAASSLPTLRFLALSHLLVRVLDKIGPTMAVLRLDVQRNIERLQELYLLDPATYSTLTGIVEKEVKEGTARKVDSCARAILWLASCAVTEAGGGLYAAAAAEPRAARGGRVRGHPEAVARLDLLGGVQDSVEAHPREEGLHRHAAGDGPGLLCT

SEQ ID NO: 64552 - protein, 83 aa, Zea Mays
MLGEGDQSNWLLRTLVRHSTKHAILITQTKTIYCIAFMCYTTCTTSALAKMTVQHDDFLSSVVVQIYHLSASSPTERDVPSIA

SEQ ID NO: 64553 - protein, 82 aa, Zea Mays
MGITIEEGQMHNFTSTTSKNIKDKGMQLIANNYQGLKRLNITRCVKLTDDGLNQVLLKCSSLESLNLYALSSFTDSVYREIG

SEQ ID NO: 64554 - protein, 248 aa, Zea Mays
MDPQPPPICREAWEGCSVLLDINDGDRLAFFRLTPGATVKIGNKTCSLKPLVGRPFGSLFRLGAGGLVPCAAADATSRDHNTPDDANGQTQDETRDNRSLVDNNTAQNLSSDDIEAMKRDGATGDEIVEALIANSSTFGNKTVFSQEKYKLKKQKKYAPKVLLRRPSARSICETYFKKTPARIGFMRVDTLSLLLSMANIGAYSDVLVVDMVGGLVVGAVAERLGGKIYSSFSLVVYGKHWLRSGHMA

SEQ ID NO: 64555 - protein, 78 aa, Zea Mays
MAPGDDSNPAASYIHTHLIERCMTFGMSMEECMEALAKRADVLPVVTSTVWKELEKENKEFFDKYQEWISEKRSAGTS

SEQ ID NO: 64556 - protein, 503 aa, Zea Mays
MSHLDAASLLAPSPPLAKPHPRSRFLCLISSMLAVLGASLAGLLLFALHPAPNPVPNYASLFLSLGSNDTAASHLRALTLHPHVAGTKANALTARYVFDALSALSFPTHITPYSVLLSYPVHRSLSLSAPGRGVVTSFSLKQETYPNDPYAAAAAETIPTFYAYSASGSVSAEAVYANYGREEDFSYLASRGVDVAGKVAFARYGRIHCEDIAHNARAAGAAAAVVYTDPLQYGGAPGEGWFPDSRWLPPSGVQVGSLFRGVGDPTTPMWASSEGCERVSLEEAMNTDDMPLIPALPVSAQDAMEIHRAMGGAVAPEDWQGREDGPVYRLGPGPAVLNLTYLGNDSMATIENVFAIIEGAEEPDRYVILGNHRDAWTFGASDPNSGTAAMIELAKRFSMLQKQGWRPRRTIIFCSWDAEEYGLTGSTEWVEENREMLYSRAVAYLNIDVSVVGPGFLPSTTPQLDELLQQVTKVVQDPDNSSQTVYDSWIKSSTPLRLLAYGE

SEQ ID NO: 64557 - protein, 405 aa, Zea Mays
MMTDVVPYPFRQNGDYLYITGCTQPGGVAVLSEETGFCMFMPDTNKEDLVWQGETAGVEAAVDFFKADKAFPLSQMQKILPELIEQSKGVYHNVNTTSSYKNLDAFRRASLNNKVKDLTNYTDELRWVKSKSEIKLMRESASIVSQSLLQTMLMSRTHREESQLAAKIEYECKMRGAQRMAFHPVVGGGANGSIIHYSRNDRKIRTGDLLLMDVGCEYHGYLSDLTRTWPPCGRFSPAQEELYSLILETNKECIKLCKPGTSINEIHNHSVKLLIKGFQELRILEKGKSIQYNYLNPTAIGHSLGMDIHDSMTLPKDKPLEPGVVITIEPGVYIPAAPVLNERAPSRYRGMGIRIEDEVLITDDGHEVLTASVPKEVSHLTTLMNMGRGGSAADAHGHELRAACS

SEQ ID NO: 64558 - protein, 281 aa, Zea Mays
MNLLEDRLQHANGAVVLATIKVFLHLTMSMTDVHQQVYERIKAPLLTLVGAGSPEQSYSVLCHLHLLVMRAPMLFSSDYKSFYCQFSDPSYVKKLKLEMLTAIANESNTYEIVTELCEYAGNVDVPIARESIRAVGKIALQQYDVNAIVDRLLQFLEMDKDYVTAETLVLVKDLLRKYPQWSHDCIAVVGNISSKNIQEPKGKAALIWMLGEYSQDMHDAPYILESLVENWDEEHSPEVRLHLLTAVMKCFFKRPPETQKALGDTLAAGLSDTLQAFAIQS

SEQ ID NO: 64559 - protein, 53 aa, Zea Mays
MIGGGRAADSHPASCSSSSSSSSSPSGPSTGGSRLHRSKRRPDILNMLMDDEG

SEQ ID NO: 64560 - protein, 441 aa, Zea Mays
MAAVGVGAADERWASLCNCVVNFLLEERYHLTALELLQELQEDGRSAHALRLRAFFSDPALFPPDLVARSSSAPPGADPQILLEEKIAAEEKLALTEYDLRLAKEDLSQLKLELQKQKESSPDDSNGLLLGASIREGYTRQQENWDVKISALGPLKDNERKDLNCAVKEYLLLAGYRLAVMTFIEEVPDQDLDVWPNSSACVPDALRRYYYQYLSSTAEAAEACVELAKSVGEMRTETELLPQCWEQINHQYEERRLLVAQSCGELAVYVRPEIRDSLILSIVQQLVEDAATVVREAATHNLALLLPMFPNLDKYYKVEELMFQLVCDPSGAVVEVALKELVPAVVRWGDKLDQISRVLLAHILASAQRCPPISGVEGTIDSHLRVLGEQERWNIGVLLRMLTELLPFIHQKAIQTCPFASADPTSSTPENFSASCLKSYA

SEQ ID NO: 64561 - protein, 459 aa, Zea Mays
MQHALREIETVLMAPDADDAATSTKHEFEEHKPAQLMRQRSRTWSHESRQPSPGVVRTQLASGYPTASYEFRPEKRLRELREDPQSMVKQLLTKCAEALSEERIEEFLNLVQQARGVVSITGEPIQRLGAYLLEGLVARHANSGTNIYRALKCREPESNELLSYMKILYNICPYLKFGYMAANGAIAEALRNEDRIHIIDFQIAQGTQWITLIQALAARPGGPPHVRITGIDDPVSEYARGEGLDLVGKMLKSMSEEFRIPLEFTPLPGIYATQVTKEMLDIRSGEALAVNFTLQLHHTPDESVDVNNPRDGLLRMVKGLSPKVTTLVEQESHTNTTPFLMRFTETLDYYSAMFESIDTNLPRDNKERINVEQHCLAKDIVNIIACEGKDRVERHELLGKWRSRLTMAGFRPYPLSSYVNSVIRKLLACYSDKYTLEEKDGAMLLGWKNRKLISASAWH

SEQ ID NO: 64562 - protein, 581 aa, Zea Mays
MMEVAGAQARAVPLLLRNTASLRTSVSVSCTGSRRSWVAAATAEGDETRGFDKVPMDTPGAYRLVDRDTGRSVIVWGGTDDSDEASMPSPAVLSRTTDRRHSQGIGNFGRFKAQKIKSLVTRSAHRKRESSNRSSTAWSDESSFNGSDDEEESYFERRKHVSDSERHPKMSSGSRDGRTRSAHSLSSVLSQYRGDDDTDFPGSEATSGSKRWGNVADVTYGRQNQKQREPLNFPQRKGPLDGGFFSRRSFKEIGCSDEMLGALRNFDFPRPSHIQAMAYGPILEGRSCVVADQSGSGKTLAYLCPIIQNLRNEEVQGLHKSSPRNPRVIVLTPTAELASQVLNNCRLISKSGVPFRSMVATGGFRQKTQLESLDQELDVIIATPGRFLYLLQEGFVQLANLRCVVLDEVDILFGEEGFEQVLHQLITVAPVTTQYLFVTATLPLDIYNKVVETFPDCEVIMGPGVHRTSSRLEEILVDCSGDDNEEKNPETAFSNKKTALLKIIEESPVRKTIVFCNKIETCRKVENALRRVDRKASQIKVLPFHAALDQAQRIANIKEFLNKQTADSMFLVCTDSADATI

SEQ ID NO: 64563 - protein, 326 aa, Zea Mays
MNPCQSFPVCYATDMVAMGISDNVAKVGVCYGEVVSNEAVRRTKELWEDAYDEPYDMAGSEVDVGAVSTAREAFYWVPAASEEDANRLYKSLQPRFLIEVYVFLKGEFDKEPTSKEFLRLRTQRCHRSLKLNISMSNLSCKSWQKVWHLYCEFATRGLFIEFRRTLSGCFRKSKFLKNISFSWSDVLHEKALALTEELDVRMRAMASITPPVQAPYLLKCVPDRVTDDGGAMISDVILRMRNYRPQEGRWLTRTVLDHSGRECFVIRMRVGRGIWRRGAETPMAVKWEDRSIEVREGSWSYIASTSSVGYAPDSGHRNSDERSSGE

SEQ ID NO: 64564 - protein, 708 aa, Zea Mays
MAFKGLPRDSRGSLEVFNPDAPVSDRATTSPFLLPPAAASHPSLLAAGDGGDADVGRATQRAAEWGLVLQTDEHTGRPQGVVARPSGSNRTSESGNSIDERAAAAGAGRALPRVSEELRAALSAFQQTFVVSDATRPDHPILYASAGFFNMTGYSSNEVVGRNCRFLQGSGTDPVEISKIRQALAAGSNYCGRILNYKKDGTPFWNLLTVAPIKDEDGRVLKFIGMQVEVSKYTEGNKDTALRPNGLPESLIKYDARQKDHARSSVSELLLALKDPRSLSESRNNTLKRKSQESAGSALVPGKRSSETGSRRNSHSGMRNSLQKISEVPEGGNKTRKSGLRSFMGLIGMGHGNVEKNILKPREDPLLDSDDERPDSFDDDFRKKEMRKGIDLATTLERIEKNFVITDPRLPDNPIIFASDSFLRLTEYCREEILGRNCRFLQGPETDRGTVKKIRDAIDNQTEVTVQLINYTKSGKKFWNLFHLQPMRDQKGDVQYFIGVQLDGTERVREAAAKDGAILVKKTADNIDEAAKELPDANLRPEDLWANHSKPVLPKPHMKDTASWRAIQKVLENGESIDLKHFRPVRPLGSGDTGSVHLVELLGTGEYFAMKAMDKSVMLNRNKVHRATAERQILDMLDHPFLPTLYASFQTKTHICLIVDYCAGGELFMLLDRQPMKVLKEDAVRFYAAEVVTALEYLHCQGVSSTRY

SEQ ID NO: 64565 - protein, 62 aa, Zea Mays
MDSRERKELVVVLSSTCRPVGRAWDPTPVRGRRRRAAMHQGTAASRSPDPRRPDLSVRSRVS

SEQ ID NO: 64566 - protein, 77 aa, Zea Mays
MVSRAPSFSPKREMALPLSPEVSLASSLASMGSMYMHLVTPPMDACQLVFIFLFLWLAYVIRVCAKLISVIELSTCW

SEQ ID NO: 64567 - protein, 629 aa, Zea Mays
MAAAIIMPPHTDPPRPATASNPTAPASHPQRQRDAPTPSLRALFLRAVDPSRPSSWSTAVADLLSSGDPVAALAVFAAALRANPAALRPALPPALRAAAAATSLSAGRQLHLLALRSGLFPSDAYCASALLHMYHHCFRPLDARRAFDEIPTPNPVIVTAMASGCMRNNLVYTTLSIFRSMVASGSAGVVDEAAALVALSASARVPDRGITGGIHALVSKIGLDGQTGVANTIIDAYAKGGGHDLGAARKLFDMMDRDVVSWNTMIALYAQNGLSTEALGLYSKMLIVGGDVRCNAVTLSAVLLACAHAGAIQTGKRIHNQVVRMGLEDNVYVGTSVVDMYSKCGKVEMAWKAFQKIKGKNILSWSAMIAGYGMHGYGQEALHVFTDMRKSGLKPNYITFITVLAACSHAGLLSEGRYWYNTMKTEFGIEPGVEHYGCMVDLLGRAGCLDEAYGLIKEMKVKPDAALWGALLSACRIYKNVELAKICAERLFELDATNSGYYVLLSNIYAEAGMWKEVERMRVLVKTRGIEKPPGYSSVELKGSVLHDLDVEERESMLRIHSEKLAVAFALMNSVQGSVIHVIKNLRVCTDCHAAIKIITKLTGREIIIRDLKRFHHFKDGLCSCGDYW

SEQ ID NO: 64568 - protein, 384 aa, Zea Mays
MASLFGNGGYIYSSGSEGEDEDEGTEGYRKGGYHAARPGDRFAGGRFVAQRKIGWGNFSTVWLAYDTLHSRFVALKIQKSARDYAHAALHEIELLSAVAKGDPTNSKCVLRLLDHFKHAGPNGQHVCLVTEFLGDSLLRLIRYNRNKGIGLSRVKEICRSVMVGLDYLHSELGIIHTDLKPENVLLESTINPAKDPVRSGFTPILDRPVGNQYGGTVISFSEKMLKMRARRAVAKISQRRVSLGGVGAELEKERCLDGISLKCKIVDFGNACWADQQHAGEIQTRQYRAPEVIIGSGYSYSADIWSFACIAFELATGDLLFAPMNRQGCSEDETARYLVYSSTKLSNTPLQLFGHLKIALTQIYISGPLGFDDGNSWEDASEDC

SEQ ID NO: 64569 - protein, 176 aa, Zea Mays
MEQLDYKFHEKYTALKKRKLLDEGLERKREAELNELYDAMKDWVSELRKDNAELNEKLVEKQDELEKARQEFLEDIRTRDAEILKLKQLLDEKAEKNNSAATGFPCLAPEAVLENSTPLSPKRKTPFSHGKLECSRRHTRISGNRTTEIRSAHMLSLLLQSLVRMKISVTVSSSPG

SEQ ID NO: 64570 - protein, 432 aa, Zea Mays
MDPSSGSTSRHGRLLISPSLSTPTFSTHSPSPSSAASPAPHRNSTSSPKPLVSFPSPSSANRPRSSYVGAGPRAATAAASASGPAFAHNARLAAALVPAAAFLLDLGGLPVFAVLAIGLAAAYLLDALQLRQGSFFTVWAALLAADVAFFFSASLSSAAAASLPLTVLALLLCAETSFLIGVWASLQFRWIQLENPTIVAALERLLFACVPIAAPALFTWALVSAVGMANASYYFATFCMVFYWLFSIPRRSSFNSRKQDAPMLDSDGILGPLESCVHSLYVLFVPVLFHAVSHRATLFTSLASVCELLLLFFIPFLFQLYASTRGALWWITRDARTMDQIRIVNGFVALVVVVLCLEVRVVFHSFGRYIHAPPPLNYLLVTVTMLGGALGLAAHAAGKVGDAASSVAFTGLAVLVSGAGAVVIGFPMVFLR

SEQ ID NO: 64571 - protein, 389 aa, Zea Mays
MVLVMSTVSFSERKQSSITGEKGHINNQYNTCFWMLVKSGKSEQEAQLALKGTFAKDKNELLAKQFQINYDDELAMFRKGSSVYREKVETTVKIDDYGEPIKRPRLKVTVAHVDTIGTAFWENHPHILREGKFMHGFVKKFGINHIFSPCNWIIVRIIACQFDQFSTIHSFDKPNDETALRLMNESASLMMEQYPDIVFGYGFSNEYSFVFHEKSELYQRRESLILSSCSSYFTSLYMTKWKEFFPYTELMQTPHFEADALCYPKLKIICEYLSWRQAECHAGNQYNTCFWMLVKSGKSEKEAHEILKGTLSKDKNELLFQQFQMNYNNEPAMFRKGSCVYRRKVEELAGAEDGGNGTSRERWHVKVDHVDLGPGFWRKHPWLMTNCTQ

SEQ ID NO: 64572 - protein, 102 aa, Zea Mays
MPLHARAPPLRHSHLLLTAATARLRPCAAPATKPRRRSLVLVRASSSDPPQQQLNLSVLRFTLGHSNWGSLVRTRILESTCKYFKIFHDRVVQKSDAATRTC

SEQ ID NO: 64573 - protein, 783 aa, Zea Mays
MCTLCAVQRWSRRVATMLPWLVVPLIVIWAATQLLLPAAYRFEVTSPRLACVSVLLLTLFWYEILLPRLSLWRARRSARLREERRAHALELHKLRKTATRRCRNCSNPYRDQNPGGGKFMCSYCGHVSKRPVLDLNSAGKAPTGWPCAQDCGYWLDLRCSSGNNSSFLGFSWRLLSSFCSTAMRWLLRNIFRLTSSGDGEGLSIDGKRLAKRGENGGKTEESKTEKARRKAEEKRLARLEREMLEEEERKQREEMAKLVEERRKLRDEKAEAEERSKSATPVGEKDAKREAEKRRQERKKKEDKGSSKSNSDCEDIDRRLVREGDRKRDFDRKSDLDRREGYKPHYFDSNNHSNKTGESRSKYFGRMTGGFLSSSRGFGSSSFFGRSAQAPAPQVSKVSRPVVPATDQGNTVKRDVPHAATQATGKSATAGETRNAWTNFNRPVSPNVHPYPTGLKKSWHQLFSRSASVSPCPDVTTSAHDMVRKAEPNGAQIYNAHTFLSQYPPLDYKPSSSQSMQFPESTLLEEPEQFEDPCYDPDAIALLGPVSESLDNFPLDLDCGFFSSDVAKESHGRPSPIESPLSRSRTVEEKPIEPPHSSVARGPGGSILPESSSEQGTWQMWSTPLVQESLGLQGPQSQWLRQNTNQFNHSANLFSSGGGAISPLGTGLNDSDPWLQKAPFQQLPPDTPSLFLSHEMPGKLHNDLVFGSPNKSARERPFGPPGYLWPKEELALNGAQDGGGGHILSPSGGARVGGGVGLFSSASPDVQSLWSFHETFNEKESIE

SEQ ID NO: 64574 - protein, 179 aa, Zea Mays
MSPPLDLDYIGLSPAAAAAAAHDDLKGTELRLGLPGSGSPDRRVVAATATTLDLLPAKGAKRGFSDEAPTPSPGAASGKGKKVAEEEDDKKVAATPQPVAKAQVVGWPPIRSYRKNTMSTTQLKGSKEDAEAKQDQGFLYVKVSMDGAPYLRKIDLKTYKNYKDLSTALEKMFSGFSTG

SEQ ID NO: 64575 - protein, 1065 aa, Zea Mays
MYAVGKVGSLISRSVYTVSGPFHPFGGAVDIVVVQQQDGSFKSSPWYVRFGKFQGVLKSREKVVDISVNGVDAGFHMYLDSNGEAYFLRNADPNGEEGEFIVSPASSGDEREVPIQEAQLRKSKSTSCDSSTMEADVGEGKILARTTSRRITILERMFGRKSIKNNAHAVDRVSSLERAEVAAELLDTKWSTNLPRSSKPNGSNDEPSKSNNDQMETSKPVFSEHSLDHGKEMDSNDNAHCNSCSPRGGRNSSADETDPCLQATIVKKEVVEIHARESSDFTDNITSITHQQGSESSSNDLGTDKLMQQSVDTQDELLHDVEDVTERETHAEEVISNDIFEIHVVETDITSGKSEVDSEIVTVDPEPDRANQNFTDTNYQNYGTTDISSERHEVSLIPSAQDAVQEKIVILSSSEAVEGSLDAVPEKVVILSSSETVDSSYAVSCILDDTVHDASDISQADGVQHEEHSSISDGSTEKLISEESSLVCYGVPSNKKDLVNIAVQESKAFILKNPASQILEESGPGLDVSTDSVSLSHADSAPDLACQHVSPNVEDTTSYEPGIGPEDVTKNSVVENGACSGELVVSVIQTSAGDGLTKCIAHPAVFSNKIEVEGSPTSAGFSSLISVEVQNTKLEDDTNKSSSVIGDEAGFVPEATAELDEEAEPVISLSEYTEEIQFQFSDAENFADRKATDDMVANKTTGEVEHDESDCDTEKQEEGDVGLVNDLENCSASLKPVSSPVSIPAIDFQSGNSNREAKSLPNLRSHIHDLERSYSFQLSRSLQSTAENNGIDLVKSMNYAFLEQKSEAIGDFSEENNSPPEVTNTVALDGNHADDLKVDAFIPFAELSLCRHLLSEGMGEDAACSAFDSEKVTLEEFRNMKQSLMRNNKLVVRIAGRYFPWDAAAPIVLGMISFSEEQVFEPKGMINVERVEQSAAPGGSWSIWPFSFRRTRTITAIQPVCESIVETSVSTPKELTHFKELDRERNKSRVKRIERKVRSLTPTSDELASLDLREGRNVVTFTFSTAIVGKQQVDCHIYLWRWNTRIVISDVDGTITKKMDTSFYF

SEQ ID NO: 64576 - protein, 135 aa, Zea Mays
MSAENERHQRMGWGGSFRVRSKLQASSFVGRFFSVPLRSVPFVSLSSLALPLTNTCHRPPADRSAKAARCSGRWRESSEGQDSGGEDWQKNLILMQGADALRKWDEGGRLSGTVPRLSIHLFLRERERDHFEPHT

SEQ ID NO: 64577 - protein, 401 aa, Zea Mays
MILGFTQNECPEDAERLFARMQLENVRPDSFTLVSVIPAVADISDPLQARWIHGYSIRHQLDQDVYVLTALIDMYSKCGRVSIARRLFDSARDRHVITWNAMIHGYGSHGFGQAAVELFEEMKGTGSLPNETTFLSVLAACSHAGLVDEGQKYFASMKKDYGLEPGMEHYGTMVDLLGRAGKLDEAWSFIKNMPIEPGISVYGAMLGACKLHKNVELAEESAQIIFELGPEEGVYHVLLANIYANASMWKDVARVRTAMEKKGLQKTPGWSIIQLKNEVHTFYSGSTNHQHAKDIYARLAKLIEEIKDMGYVPDTDSIHDVEDDVKAQLLNTHSEKLAIAYGLIRTAPGTTIQIKKNLRVCNDCHNATKLISLLTGREIIMRDIQRFHHFKDGKCSCGDYW

SEQ ID NO: 64578 - protein, 85 aa, Zea Mays
MCSRITSLNIVRVGMKVQPTTRLHMFVITQFFGVWTTPEGTKSRRLFFALKSQECARKLRADLAIEEQWEQELRRMLKGIVTDTS

SEQ ID NO: 64579 - protein, 419 aa, Zea Mays
MPGAMGLFKKLDVGPLELGDYLAIGAIFSATDSVCTLQVLNQDETPLLYSLVFGEGVVNDATSVVLFNAIENLDIDNFDAIVLLNFVGKFLYLFFTSTILGVATGLLSAYIIKKLCFARHSTDREVSIMILMAYLSYMISMLLDLSGILTVFFCGIVMSHYTWHNVTESSRVTTKHTFATLSFIAEIFLFLYVGMDALDIEKWKLASSSPKKPIALSAIILGLVMVGRAAFVFPLSFLSNLSKKEARPKISFKQQVIIWWAGLMRGAVSIALAYNKFTASGHTEVRVNAIMITSTVIVVLFSTMVFGLLTKPLLSLLIPPRTGLNTSSLLSSQSMLDPLLTSMMGSDFDVGQINSPQYNLQFILTAPARSVHRLWRKFDDRFMRPVFGGRGFVPFVPGSPVERSVPESHLGTVTEAERS

SEQ ID NO: 64580 - protein, 287 aa, Zea Mays
MATKALSVSSLTSTAFASFSLPRPRRPSPSPPLLRLLGPRPRASTLSAAAPDDEDGVDTVEQLLHPRPPETSAPAGSRGRIDRLMKLQRRADGDAVPGGRRRWFPYLDAFRPAAGGAELSSGEVIDVLEPHILEARRDRIRQAVGNRSYAVCLVVEGLSDFGNVSAAFRSADALGVQSVHVISCDSSKRYRDNRHVSMGAEKWLDIEIWNSPAECFSALKKRGYRIATTYLGTDSVFFSHFNILGIWYPFHSCTSLSIGFLGNLRSTILHEFQMPCVIECTVICSFL

SEQ ID NO: 64581 - protein, 89 aa, Zea Mays
MPEHMVRKLRNLMKSWPGELYGADYFTTKTTVATRTTSPRHNINYHHGHEQMCAQGARDRAWRDRQYQARQGIARAATRAHARELSREL

SEQ ID NO: 64582 - protein, 90 aa, Zea Mays
MPQREAAMDPPCVAPSPCDVLQQQRRPSLRRARQVGPLAVDLRSPCTSSSKPAPSVDVTPRAMPMRRNASRWTTHATHRSGQVAFVSFTI

SEQ ID NO: 64583 - protein, 444 aa, Zea Mays
MGYMDPECMVTGRANAESDVYSFGVVLLEIACGRRPLVPRHGVGMRIPRLRLQIVEAASHNSKFLFLASCAPPAGIVLVEFPKSQPPQYTPPDPCSITATKILRLHLQSTRLPLVSRLLFTSFASRRSLMAAAAAAAAAVSSPIAPRAVAAAASRRGFVTFGGGAARSSPTLRSGRGFSGVQTHVAAVEQAVVKDATKLEAPVVVVTGASRGIGKATALALGKAGCKVLVNYARSSKEAEEVSKEIEASGGEAITFGGDVSKEADVESMMKAALDKWGTIDVLVNNAGITRDTLLMRMKKSQWQDVIDLNLTGVCLCTQAATKVMMKKKKGKIINIASVVGLTGNVGQANYSAAKAGVIGFTKTVAREYASRNINVNAIAPGFIASDMTAELGEELEKKILSTIPLGRYGQPEEVAGLVEFLALSPAASYMTGQVLTIDGGMVM

SEQ ID NO: 64584 - protein, 1280 aa, Zea Mays
MTVLHDVSGIVKPRRMTLLLGPPGSGKTTLLLALAGKLDKDLRVSGKVTYNGHGMNEFVPERTAAYISQHDLHIGEMTVRETLAFSARCQGVGTRYEMLTELARREKAANIKPDHDIDVYMKASAMGGQESSIVTDYTLKILGLEVCADTLVGNEMMRGISGGQRKRVTTGEMLVGPARALFMDEISTGLDSSTTYQIVNSLRQTIHILGGTAVISLLQPAPETYNLFDDIILLSDGHVVYQGPREHVLEFFEFMGFRCPARKGVADFLQEVTSRKDQGQYWYRQDRPYRFVPVKKFADAFSIFHVGRSTQNELSEPFDRTRSHPAALATSKFGASRMELLKATIDRELLLMKRNAFMYIFKAVNLTVMSFIVMTTFFRTNMKRDASYGNIYMGALFFALDTIMFNGFAELAMTVMKLPVFFKQRDLFFFPAWAYTIPSWIVQIPITFLEVGVYVFTTYYVIGFDPNVFRFLKQYLLLLALNQMSSALFRFIAGIGRDMVVSHTFGPLALLAFQALGGFILARPDVKKWWIWGYWISPLSYAQNAISTNEFLGHSWSKIQNGTTVGIGVLQSRGVFTEAKWYWIGLGVLVGYALLFNLLYTVALAVLSPFTDSHGSMSEEELKEKHANLTGEVIEVRKEKTSRRQELELSHSVGQNSVHSSEDSSQNRKGMALPFPPLSLTFNDIRYSVDMPEAMKAQGVTEDRLLLLKGVSGSFRPGVLTALMGVSGAGKTTLMDVLAGRKTGGYIEGDITISGYPKKQETFARISGYCEQNDIHSPHVTVYESLLFSAWLRLPSGINLETRKMFIEEVMDLVELTSLRGALVGLPGVSGLSTEQRKRLTIAVELVANPSIIFMDEPTSGLDARAAAIVMRTVRNTVNTGRTVVCTIHQPSIDIFEAFDELFLMKRGGEEIYVGPVGQNSSKLIEYFEGIEGISQIKDGYNPATWMLEVSSSSQEEILGVDFSEIYRQSELYQRNKALIEELSTPPPGSSDLNFPTQYSRSFFTQCLACFWKQKKSYWRNPTYTAVRLLFTVVIALMFGTMFWDLGRKTNKQQDLFNAMGSMYAAVVYIGMQNSGSVQPVVVVERTVFYRERAAGMYSAFPYAFGQVAIEIPYIFVQTLLYGVLVYSMIGFEWTVAKFLWYLFFMYFTLLYFTFYGMMAVGLTPNETIAVITSSAFYNVWNLFSGYLIPRPKLPVWWRWYSWICPVAWTLYGLVASQFGDIAHPLEDSPTGQTVAQFITDYFGFHHDFLWVVAGVHVGLTVLFAFLFSFAIMKFNFQNR

SEQ ID NO: 64585 - protein, 257 aa, Zea Mays
MPWEAFDPSRKRWMRLPRMPCDECFSCADKESLAVGTQLLVFGREYTGLAIWMYNLLTRSWSPCTPMNLPRCLFASGSSEIGHWETIPDMNLPRRLSSGFFMDGKFYVIGGVSSQRDSLTCGEEYNLETRTWRRILDMYPGGTSASQSPPLVAVVNNQLYAADQSTNVVKKYDKANNAWNILKPLPVRADSSNGWGLAFKACGDRLLVIGGHRGPRGEVILLHSWCPEGGEDGADWEVLSVKERAGVFVYNCAIMGC

SEQ ID NO: 64586 - protein, 271 aa, Zea Mays
MAPAFPRRRPTSPDSPPHTAAAPMAHPPCSPPWPPGGGFGLPESPPNVSPPNQSEKSTGRSFCTSRTGEGRGARQHYVPAGRVSPGPMASAMSSRSRPAGHFGVFPVNAMAGTGGSDGGVQLADKLKIIKTDNFDPDAYVQSKCRAMDEKKMVVFVMQQAVWNVDTNNEAVQGFRRSLHDETRLSYMLSCGSLERLLNMRNLKLWMVRMTMMKTMMTRMMMIMIQRRTRELLEGKGNRENDLQSASSSEDRQRALEPNSWRWCLAGKRRLS

SEQ ID NO: 64587 - protein, 138 aa, Zea Mays
MGVAAPRVTEENLAALFINCGQVVDCRMCGDPNSVLRFAFIEFTDEEGARAALNLSGTVLGYYPVRVLPSKTAIAPVNPTFLPRSDDEREMCARTIYCTNIDKKVTQADLKLFFESICGEYHWLIAMTATGLSAEVAW

SEQ ID NO: 64588 - protein, 82 aa, Zea Mays
MVTFKTRIYHCNIDSTGKVHLDILKDGWSPAFTISKVLLAIKDIISNPDPYSPLMMSISRQYLTDRAKHDEIAAEWTMRFAR

SEQ ID NO: 64589 - protein, 460 aa, Zea Mays
MDRRKIEADLFGGKLHGVAATNALELGIDVGHIDATLHLGFPGSIASLWQQAGRSGRRAKQSLAIYVAFEGPLDQYFMKFPHKLFGRSIEHCQVDSHNLKVLEQHLPCAAYEHPLCVQYDECYFGSSLDSVMTTLKDKGYIINNRAGPFSSSMWNYIGPEKSPSQAVSIRAIEQDRYKVIDKLNSRLLEEIEESKAFFQVYEGAVYMHQGANYLVEELDLASRTAFCRKADLKYYTKTRDYTDINVLGGEFAYLPTSICRTNRVKTTAQANDCTVTTKWFGFYRISKSSNTISDSFELNLPPYSFTSQAVWVRIPHSVKMTVEESKLEFRGGSHAASHALLNIVPLHMMCSASDLGTECANPHESRGIPDRILLYDRHPGGIGIASQAQMLFEELLLAALEVVSTCNCTSAVGCPNCIQSLTCSEYNEVLDKEAAILILKGVIDYERSYFEAEDASQRSC

SEQ ID NO: 64590 - protein, 52 aa, Zea Mays
MDKSDAVSDSTVTCNGVLITIASVRLGFSSPSHVDTWMKFCSGQLFLWNETG

SEQ ID NO: 64591 - protein, 55 aa, Zea Mays
MCELNFVYMTCQIDCHCCGQQFVTENYDLYIWSRQSMRTGFVPVALIAQSQEVKE

SEQ ID NO: 64592 - protein, 431 aa, Zea Mays
MASLFGAGRRRSPEDDGEDDRSGRGRTKRFRLSPEEDAASPAEAGPGAATETGWLSGFVYGAKRVISSVLLFSSPEETGSGEDEEEEKDDDDDEEGIHLNEHEATHDTHGAIVPYSEPKLTIEQMVMKETFSRDECDRMVELIKSRVRDSTFPEAHEYVKPEEIPSRNAGITHDFTGTWRSLSRDRNVPESVPLSSMRTRPGSFSQGSPLQASPELCTAAVTEAKKWLEEKRQGLGFKPEDNGPCTLNTDILSSVTTKEDYLSSFWTKLEESQRARIGSSGGSADAPKFWNYGSNSRLFENDTSIFSLGTDEKVGDPTKIYNGSGKFAATEPVGGCCLPITPTEDRTDGITEPVDLARNNGNAPQENQVASEILPDKVPEGNDVSSTGITKDTTGHSGDVKAPTSEPHLGETRINSASGCRIAPPLHGLRY

SEQ ID NO: 64593 - protein, 255 aa, Zea Mays
MILRFSLQPDSPHSQILRKAGQKKAEPNRHVSSMSSVKRFADNFNGLNLPLNILINNAGIAFSPFTLSDDGIELQFATNYLGHFLLTNLLLEKMKITAMESGIEGRVVIVASDSYKHTYREGIRFDKLNDASGYKGILAYGQSKLANILRSNELSCRLKEEDAKVVVNSLHPGVVATNITRHLGIIKDILSPIAKLVLRGVEQGAATVCYLALHPQVAGVTGKYFVDFNAVELKPPATDKELSKKLWDFSVSLLQ

SEQ ID NO: 64594 - protein, 684 aa, Zea Mays
MDAVEVKDFRPISLIHSFAKLVAKLMATRLAPLLPSLVSVNQSAFVRGRRIHDNFMLVQQIVKLLHKKKEPHILLKLDISKAFDSVSWSFLLEVLRKMGFGQRWRDLLCLLLSTSSTQILVNGEPGDIIIHRRGLRQGDPLSPMLFILVMDTLNSLINYATSLGLLQPIAVQQVRHHVSFYADDVVVFLRPHILDLVSVRRILDLFGHASGLRTNLVKSSVSPIHCSDDELALSVETLSCSVKVFPCTYLGLPLTTCKPSKEVLLAFVDKVADYLPGWKASLLNRAGRLVLVKVVLTAVPIYWLIALDLPKWFIKAVDKKRRGFLWKGHQQANGGNCLVAWDKVQRPLQYGGLGIHNLELLGWALRIRWLWAQKTDVERPWAGLSISIPYKARALFDMAVNAVVGNGEKIIFWTDRWLDGLTMAEMAPNLFRTDPMRIAKRKTVAQALFGRSWVRDIKGALTVQVLIEYLQVWDFVEEVVLQADVPDHFRWKLTQDGCYSSKSAYEAFFVGSTKFGPWKRIWKTWAPSRCKFFLWLVHHNRVWTADRLERRNLPHPVSCPFCDQMTETVHHLLVGCVFARQIWALILQQLGLLQLAPQPSVSRFSGWWKRTVAAVPKGLRRGLNSLITLVAWEIWKHRNRCVFDNSRPCVVEVLKAVNVEGGLWCLAGASKLQELVFGSVPTGA

SEQ ID NO: 64595 - protein, 699 aa, Zea Mays
MSVWNYVVTAHKPTSVSHSCVGNFTSPNQLNLIIAKCTRIEIHLLTPQGLQPMLDVPIYGRIATIELFRPHNETQDFLFIATERYKFCVLQWDAEKSELITRAMGDVSDRIGRPTDNGQIGIIDPDCRLIGLHLYDGLFKVIPFDNKGQLKEAFNIRLEELQVLDIKFLHGCAKPTIVVLYQDNKDVRHVKTYEVALKDKDFVEGPWSQNNVDNGAGLLIPVPAPLGGVIIIGEEQIVYCNANSTFKAIPIKQSIIRAYGRVDPDGSRYLLGDNTGILHLLVLTHERERVTGLKIEYLGETSIASSISYLDNGVVYVGSRFGDSQLVKLNLQADASGSFVEILERYVNLGPIVDFCVVDLDRQGQGQVVTCSGAFKDGSLRVVRNGIGINEQASVELQGIKGLWSLKSSINDPFDMYLVVSFISETRFLAMNMEDELEETEIEGFDAQTQTLFCQNAINDLLIQVTANSVRLVSCTSRELVNQWNAPAGFSVNVASANASQVLLATGGGHLVYLEIRDAKLVEVKHAQLEHEISCLDLNPIGENPQYSSLAAVGMWTDISVRIFSLPDLELIRKENLGGEIVPRSVLLCTLEGVSYLLCALGDGNLFSFLLNASTGELTDRKKVTLGTQPISLRTFSSKGTTHVFASSDRPTVIYSSNKKLLYSNVNLKEVNHMCPFNTAAFPDRAGFLYLQLKMEACN

SEQ ID NO: 64596 - protein, 379 aa, Zea Mays
MKLRLHLFVLCVIIIFLVYNMANFQHKQTTLEAKSHPFDTVTVSDRDAVKVPQKAEARIGYLPHGIVESNSDMDLKPLWLTTSARSKKPKQNDNFLIAIAAGINQKKTVDAIMKKFLPENFTAILFHYDGNVNGWNDLPWSKSVIHIAASNQTKWWFAKRFLHPAVVSIYQYIFLWDEDLEVDNFSPRRYLNIVRSEGLEISQPGLDSKLSEIHHRITVRKKAGTFHRRVSRANKKCSREGPPCSGWVEGMAPVFSKSAWQCVWHLIQNDLIHGWGIDYKFGYCAQGDRTKNIGVVDSEFIVHRGVQTLGGSTITKDGIRGKNAKPLGQKAAQIQRSRVRCVPDTLFKCLLHTPPSQNKCTSRLWTSQNVFDFDQVYRK

SEQ ID NO: 64597 - protein, 103 aa, Zea Mays
MLQGPKETFVTIKVKHGDCGPVESMKVQRQLVTRTPVFYRLEKRENNDSSVGYIHITEFNAVAKKDLAKTSTEIRRLLFCSGFEGQSWWTSASWNRDSKALSE

SEQ ID NO: 64598 - protein, 759 aa, Zea Mays
MHLVVYGKENLDCIQGLVERMFSDIKNTDQRSLKCPSHPLSEEHLQLLVKALPIVEGDYLRIIWPITPSIQFYKEAPCHYLSHLIGHEGEGSIFHIIKELGWAMNLMAGECSDSNEYSFFSVSMRLTDAGHERMEDIVGLIFKYLHLLKEDGVHEWIFNELAAINEMEFHYQDKVRPINYVMRTVSTMRLFPPEEWLVGAALPSKYASQRINMILNQLIPETVRIFWESKKFEGSTSSAEPWYNTPFSVENVTPSVIQEWIEKAPTEKLHLPKPNIFIPKDLSLKEVHEKVTFPTVLRKSPLSQLWYKPDMLFSTPKVHIIIDFHCPLSSHSPEAVVATELFVDLLVDYLNAYAYDAQIAGLFYSIYVTSAGFQVSLGGYNDKMRVLLNAILVQIVKFEVKPNRFSALKETSVKDYQNFNFRQPYSQASYYVSLILGDKKWPVAEKLEALSKLESDYFAKFVPHLLSKTFLECYVQGNIEPSEAKSIVEEIENTIFTTPNSLFKSMSPSEYLIKRVIMLENDLKCYYQTEGLNQKNENSSVIQYIQVHQDDAILNIKLELFSLIAKQPAFNQLRTVEQLGYITSLSLRSDYGVLALQVVIQSTVKDPSYLDVRVDEFFKMFESKIYELSDKDFKRNVKSLIDSKLEKFKNLWEESHFYWGEIEAGTLKFDRVESEVAMLRELKKEEFIEYFNQYIKVDAPQRRTLSVQVFGGNHLVEFKKAINEANPPKMYRITDIFGFKRSRPLYSSLKGGPGRITMD

SEQ ID NO: 64599 - protein, 148 aa, Zea Mays
MDGFRFGESDGDALPVPDLGQRARAGRPAAWLVAAATRDVEARLPWAVPKVSIRLARWSTHAEEGVGALELLDGVHGFDSHISSGPQFLSRGAWYRLWGRGWRLGEYVAHEFRLFASRDLKHKIVLHCLTPIYLLKAWSHLLRMSSQV

SEQ ID NO: 64600 - protein, 848 aa, Zea Mays
MTSSAAAAAAAAQVAGGGGGGEGDAAAAARGGTEDGMYTELWNLCAGPLVTVPRVGDKVYYFPQGHIEQVEASTNQVAEQHMQFYDLPWKILCEVMNVELKAEPDNDEVYAQLTLLPESKQPEENGSSEEMPASPPAALARPRVHSFCKTLTASDTSTHGGFSVLRRHADECLPPLDMTRQPPTQELVAKDLHGVEWRFRHIFRGQPRRHLLQSGWSVFVSAKRLVAGDAFIFLRGDSGELRVGVRRAMRQQANVPSSVISSHSMHLGVLATAWHAVNTGTMFTVYYKPRTSPAEFVVPCDRYMESLKRNYPIGMRFKMRFEGEEAPEQRFTGTIVGNVDPDQAGWAESKWRYLKVRWDEASSIPRPERVSPWQIEPAVSPPPINPLPVHRPKRPRSNAVASLPESSAPTKEAAPKVTLETQQHALQRPLQTQDNVAPKSVFGDNSELDSAHKSSLRPSGFDLDKSTIGMQRKLGSDIWMRMNRPDGYSEMLSGYQPPNEGARNSQGFCSLPDQIAAGRPNFWHTVNAHYQDQQGNHNLFPGSWSMMPSSTGFGMNRQSYPMIQEVGGMSQSCTNTKFGNGVYAALPGRGIDRYPSGWFGHTTPGGRVDDAQPRVIKPQPLVLAHGEALKMKGNSCKLFGIHLDSPAKSEPLKSPPSVATPAAEKWMADGIDADKSPEPHKTPKQLGATQVDPVPERCPQASRGTQCKSQGGSTRSCKKVHKQGMALGRSVDLTKFNGYTELVAELDEMFDFNGELKGCSKEWMVVYTDYEGDMMLVGDDPWNEFCSMVHKIFVYTREEVQRMNPGALNSRPEDSGLANSTERGSASTAAAREAPGYQSASSLNSDNC

SEQ ID NO: 64601 - protein, 343 aa, Zea Mays
MAFKLITKPAAASPAAAYWGDLARGPQGTSRVAFGPAPRNKGLRAANNSATPIAKVERVDRSDILTLDSIRQVLIRLEDSIIFGLLERAQFCYNADTLDSIRQVLIRLEDSIIFGLLERAQFCYNADTYDSNAFHMDGFGGSLVEYMVRETEKLHAQVGRYKSPDEHPFFSKDLPEPQLPPMQYPRVLHPIADSININKEIWTMYFDELLPRLVKEGSDGNAGSNALCDTTCLQALSKRIHYGKFVAEAKFQESPEAYTPAIIAQDRDQLMRLLTYETVERAVEHRVEAKAKIFGQEVNIGAKDNGSQPVYKIRPSLVAELYSYRIMPLTKEVEVAYLLRRLD

SEQ ID NO: 64602 - protein, 151 aa, Zea Mays
MIQYFKIAGWSVEDSQIEGKFPRNSNPKEIIVKIPNSMFLFCLINDYKMAVQFSMASSRKVRNANKRYTKINEDWQDKDETNVHKSKVRKKKLSDMLGSQWSKDELERFYGAYRKYGKDWRKVAGAIRDRTSEMVEALYNINKREQLLLRG

SEQ ID NO: 64603 - protein, 142 aa, Zea Mays
MGKSRFYLGDVGNGAAMKLVVNMVMGSMMVSFSEGLLLSEKVGLDPNTLVEVISQGAISAPMFSLKGPSMVKAAYPPAFPLKHQQKDLRLALALAESVSQSIPTVAAANELYKAAKSLGLSDHDFSAVIEALKAKVQSQSSQ

SEQ ID NO: 64604 - protein, 88 aa, Zea Mays
MMPPSGGCCLETNGCEPSSPRSGRLRQPGPSFASDILAASAPTTWWRWFQGTETERKCRRRRGIHCQPVYSGRLESATISGWTTNGKI

SEQ ID NO: 64605 - protein, 223 aa, Zea Mays
MEYPHQQAGPSSTTITLICPYATRRRKRAAGDDLSSAVDMDVDADAQRATDKLKAVSEALGHEIRVFSSENFASQTSKLPSADHEEDDDFYELQPADYYNLISNRMGEHFKMLKTRKMREAELAAQRAKRTKTVMRVRFPDGYILEADFIPSERIHSLVDLLLKVLARPDLPFYLYTVPPKKRILDTSQDFYTAGFVPGANVHFSYDLPEGMHHHNDSCQVKK

SEQ ID NO: 64606 - protein, 235 aa, Zea Mays
MVAASGLALPRVAAPCPARPRGGLRPALLRFAPPVALPPHQLRCCASTVDDGLVSAAASKPRLPRVVGMGSKLVGCGSAIPTLGVSNDDLSKIVETSDEWIAARTGIRNRRVLSGDETLRGLSIKAAQRALEMAKVKAEDVDLVLLCTSTPDDLFGGATQVLTDVGCTKAFGFDITAACSGFIVGLITATRFIKGGGFQNILVVGADALSKYVDWTDRGTCILFGDAAGAVLVQV

SEQ ID NO: 64607 - protein, 86 aa, Zea Mays
MRAKSDRGTSCPTEHGMRAKWNFFSRLDCATPADQHAKSKRKQENCAEGLNLQHLTLHLLRLVNPSMTISNTNILAILLNKRTYLV

SEQ ID NO: 64608 - protein, 1093 aa, Zea Mays
MAPEVIEMSGVCAASDIWSVGCTVIELLTCAPPYYDLQPMPALFRIVQDVHPPIPEGLSPEVTDFLQQCFQKDAMQRPDAKALLMHTWLQNLRRALPGSLRQPTPLRNIDGDDEGSRGDNSLGFCDTPGDIQTTITSNVDQENGSKEPIMDSTVQSKSEELHDGNLKLTEGSSSNSVALMKDNVVLNKGPTLVLHEKLPVESSSGGADLNGKVMAHELLQGGPPGKVELENKESSSSDVFSFQAGRQNIGFQKVVEPSVVEGPKQLSRFSDKPEDASLEDLFPPNDKWGDNGAEPSTSTTVQELKYNGVQNAFLKGLNARVEKQKENDNESMNGGKLIEFAMQLENIDALGFGEHIPGESLFPVQSVEYNKIVAQLRPGESEDVILLACQKLLSIFSYRPEQKHIYMAQNGFLPLMELLEIPRNRILCSVLQLINNIVKDSTCFLENACLVGLIPVVMNFAEPNRPKDVRVQASLFLQQLCQASTLTLQMFVACQGIPVLVFKLQHSTPRNNFCRIAAKNGMLPRLVNTLYSLNEATRFASVSGSGASVTQNGSTPRRRSGQLDPSVLESCKARLDHHHSSGSLQSLQTDADKHHILMDSSSPRFSDKTGSNLERNDNDLVIRPQRLSVSAGRTSTDRSPKHVELVSNGHISGQNDQVRPLLSLLEKEPPSRHISGQLDYVCHITGLERHETILPLLHTSTERKTNGELDLMMDFAEVSRHGRENGHLDSSIKVSNRVHSMKYAPSTSASNEGASTSGAASQTASDVAREYLEKVADLLLEFAQADTVVRSLMASQSLLTRLFQMFNKIEPPILLKILRCINHLSGDPNCLETLQRTDAIKHLIPILELCDGPLVFQIHSEVLNALFNLCKINKRRQEQAAENGIIPHLMNFVMSDSPLRQYALPLLCDMAHASRNSREQLRAHGGLDAYLNLLEDDVWACTALDSIAVCLAHDNDHRKVEQALLKKEAIQKLVKFFQDCPEQYFVHILDSFLKIIMKSSRLNTAMATNGLTALLIARLNHRDAIARLTLLKLIKVVYEHHPRPKQVIVENDLPQKLQNLIEERRGGQRGGHQVLVKQMATSLLKALHINTVL

SEQ ID NO: 64609 - protein, 142 aa, Zea Mays
MITKALLDVYTIKREIGTLDGIKLGLVGDLANGRTVRSLAYLIAKYQNIKIYFVSPDVVKMKDDIKNYLNSKGVEWEESSDLLEVASKCDVIYQTRIQKERFGERIDLYEAARGKYIVDKKVLDVLPKHAVIMHPLPRLDEL

SEQ ID NO: 64610 - protein, 164 aa, Zea Mays
MFKQKEEFQHTAYSTNAYVTLGALWKPALQGNRVVKLEIAIASKDRDVRSKGAKRGRMSDLEAKLDELRRDLSSTGSDAIFPHAVLTAQQISLLSSQKPTTPAELEKVIGKVKTRKYGSKIIELMRSHDNSGSGRGKEAGDEHRAKKIKTKDEDVVCVESSEEE

SEQ ID NO: 64611 - protein, 79 aa, Zea Mays
MRRAFLKAMRKSNNPRRHVVYAFGDHYDFRKKLQIINLLTGYIYLVDGLGRIRWQGSGSATQEELSSLTACTSILLDEK

SEQ ID NO: 64612 - protein, 146 aa, Zea Mays
MVEASPESGAAATGGASSTAAVRKGKSCKGCLYYSSVLKSRGYNPICVGIPRSIPQVPNYVVDEPKEEATAQGHDLRRFSYWWTADWSRESHRQLNKLQHMLQRMQQLPSALTNKDNRDLRTCRGRNSWTGLRGALDWSLQVLRRI

SEQ ID NO: 64613 - protein, 314 aa, Zea Mays
MYLFRHYCCGRGVVKGLGRLVLMGSGVAAVFAAAFVPFVYYGQMQQLISRLFPFGRGLCHAYWAPNFWVFYIILDKILAFLLRRLGFNIAIPEASFTGGLVGDSSPFAVLPKVTPIATFLLVILAMAPCLIKAFSNPQPKHIIRWVSYACTCGFMFGWHVHEKASLHFTIPLALIAMDSLNDARHYFLLSIVSCYSLFPLLFENQEYLIKVLLLLTYAALMWVGFTVHFAAKSDLEGKKISRSGSTVKKNGIIGWIGLSYLLGIAGIELWSQVFHHHVFGDRLPFLPLIMVSFYCGLGMMYSWVWQLVHIVRHT

SEQ ID NO: 64614 - protein, 132 aa, Zea Mays
MDSFEGSDHITQRKVVPAKHIALVDGKNEPAVEGLPNGWLKECRPRKNRYGSRVKSDTFYIDPINGYEFHSLKDVHRYLESGDISKCIRLPNKRKIEDLHTKEDQSHHVSFIFKFWPTSEFALDLVLAATLD

SEQ ID NO: 64615 - protein, 65 aa, Zea Mays
MSPIVVESGTGSGGIPRRSCLHRQAAPHADQIPASPSTDGQVTEDSEAQQVETIEQELVEGKLCP

SEQ ID NO: 64616 - protein, 113 aa, Zea Mays
MATIAALRLTFWLSNTVVLREIIVQTFGISHQFTPSMMNLSMNGGAKKLDGKSMTMLWRNSYNGMQAKFAARQMPDDWQETSTLLATLEKIESWIFSRIVETIWWQVNVCLRH

SEQ ID NO: 64617 - protein, 817 aa, Zea Mays
MSMAGIARGRSRWRQGDGSSNRNAAHSTVPNPDHQGVVSSRKQATYPGMLSDSVFATVDRQSKTRKAIAVPMKILIEEEFSNDVNSRHISPGAVGRLMGLDSLPSSGIHNKHRHTKSHAPKTSPSSFHGRTGLHDIPHRRSVDTINVFEGMEATKTNMHRSPRSKIGSTTSRSDKVVSADIDFIRQKFMDAKRLSIDESLHISEEFNETLDALVSNSDLLLDFLQNFDPAVIRDLHNHGSPSSTANCITILKPSRRNQFIDMDNIYPQEKGTESIFNEQMEGKHSLWKPYSNVPLQSLKEDSCSSRQKLSRSSHQENTGKRGSPTRIVVLKPNLEKPHDIEEALPLHHKISHSDYRRHKECPEVDRWTPNTEDYMCQVPLGDSETLSRMGKGSREIAREITKQMRAARGGSRKHSVKPETRTLASDERSQFQSSVTRPKTPESIHRYSESCDAWASSSLNSLPTYSTETSESKEAKKHLSNRWKKTRQCQHQETDNDSFNTLGDMLALSDQNASNVATHKMTCRKCPKSEVQSDRIQSSYPLGISTNDGWKDTTTSKLTRSKSLPPSFIRGVQKSNNRKRSGSVTYNEFSMLKDVLKVGPHYSEYAYRSRQRRSLSRDSTIHGDESDPMSTDNEENMVVEREIHVNYEEPINGTAVTYTSGQSQHPTNLDHELDAIGVLDTSSAVPFSNKKSLSPAEQDQQVLKMTTTALDNCFLVPNLDDLMPKHEQIEYHQADDYPATYDPHIASDSPEENNHHLGDVSETLCILPDVLESPANSNKDDQQSPMSVLESSMDGEDVYSGDFEKISADLQDCNLGF

SEQ ID NO: 64618 - protein, 59 aa, Zea Mays
MLRRYVCSEHAFGLLEPRRFRTLAMHLLMLSLLLQPQPVWMMDRFLSSLFFFPFFTAAS

SEQ ID NO: 64619 - protein, 346 aa, Zea Mays
MQRDTSSSDVSASHVGRVRRRKHPTEATTDGNRANGQPLLVNDQNKYKSMLTRTYSTVWMIGGFAFIIYMGHLYIWAMVVVIQIYMARELFNLLRKSSEEKQLPGFRVLNWHFFFTAMLYTYGRFLSRQLVNTVTSDHLLYKVVSGLIKYQMFICYFLYIAGFVWFILTLKKKTYKYQFKQYAWTHMILLTVFAQSAFTVANIFEGIFWFLLPASLIVINDIFAYLFGFFLGRTPLIKLSPKKTWEGFIGASVTTIISAFLLANVMGHSQWLTCPRKDLLTGWLYCDPGPMFKPEHYSLGEWVPHWITARESSQLTRQYILQHNKVLIYTLLFWTFVRNPEASPKS

SEQ ID NO: 64620 - protein, 501 aa, Zea Mays
MRSQLNASFSPPPSLRRALPSATPRALRFHAFPWRFRAPQHHGRGAGARCATNLPAPGSHGVGVLASERRADDGDTTVKNADAPSTSTATQGNLNMAAIVSIAFCFLHRIVSGRMQSMMNLFPWMSNGIASLPFACISDPTRKPMPLKLDLTLPPLPDFGWNFSRLYYRFNSQLDRNIALSIITLLITCFSFVIVGGLLFHKFRKQQQSLEDCFWEAWACLCSSSTHLRQKTRVERVIGFFLAIWGILFYSRLLSAMTEQFRNQMHKVREGAQVQVIEDDHIIICGVNSHLMSILNQLNKYHESSIRLGLATARKQKILLLSDLPRKQIDKLADSLAKDLNHIDVFTKSCSLSMSTSFERAAAHKAKSIIILPAQHERYEVDTDAFVSLLALQPCKQIAPVPIIVEASNATTCELLKSITGLNVQPVEMVASKLFVQCSRQKDLLKIYKHLLNQHKNVFNLFRRPELEGMKYMDVRRKIHDSFVVSSGLEKFIFTQARKNY

SEQ ID NO: 64621 - protein, 467 aa, Zea Mays
MLPRRFSNHPGSSSPLPFLVVCGLLLAAAVAFSPVAAAEAAGRGGGGGGGGAGHEGRAGKPEVEAEAEARGDGVAVAEAGGEVVAQGNATEAKEGSLADMIDRALEKEFPESESEQGGGETDPGSFNNTVAEKQGVLETVARRVTKKNETKDNKSFPFKEVFLDRSEQEDVPTLIDRKDNVFIISNPKSKYPVLQLDLRLISDLVVVIVSATCGGIAFACLGQPVITGYLLAGSIIGPGGFSFVNEMVQVETVAQFGVIFLLFALGLEFSTAKLRVVRAVAVLGGMLQIMLFMFLCGILATLCGGKTKEGVFVGVLLSMSSTAVVLKFLMERNSINALHGQVTVGTLILQDCAVGLLFALLPILSGTSGLLHGVASMTKSLVVLITFLTILSILSRTGVPWFLKLMISLSSQTNELYQLAAVAFCLLFAWCSDKLGLSLELGSFAAGVMISTTDLAQHTLEQHWDAN

SEQ ID NO: 64622 - protein, 2608 aa, Zea Mays
MAPINSGNMEQHSQRLLEPDLPVQVRLQLAMEVRDSLEMTHTPDYLNFLRCYFRAFSAILTAYTKPQATENAEHKLRNVVIEILNRLPHSEVLRPFVQDLLKLSLRVLTQDNEDNALLAIRIVFDLLRNFRPTVEAEVQPFLDFVVNIYHKFPTTVSYFFDNPNTSASMAASMPMQHLDPTADASVMMQVPGGGQLNPSARSFKIVTESPLVVMFLFQLYAKLVQTNIPHLLPLMVAAISIKGPDKVPPHLKTPFNDLKGAQVKTLSFLTYLLKSNADYIKSYEESICKSIVNLLVTCPPDSVSIRKELLVGLKQVLNTEYKRGLFPLIDTLLDERVLIGTGRVCIETLRPLAYTLLAELVHYVREDISLPQVEPIYQKGVDQQSMDEARVLLGRILDAFVGKFRTLKRTIPQLLEEGEEGKEQPNLRMKLEVPLQTVLNLQQPLEYTKEINDYKSLIKTLAVGMKTIIWSITHAHWPRPQQQNQQSSNLSLQHFRGLREDEVRKTSGVLKSGVHCLALFKEKDDDREILQSFSQMLAIMEARDIMDMFSFCMSDLFDSMITNNQLLHIFSTLLQAPKVLRPFTDVLINFLVSSKLEALKQPDSPAAKLVLQLFRFLFIAAAKAPESCERTLQPHVPVIMEVCMRSATEVEKPLGYMHLLRNMFRALNSAKFDSLMRDLIPSLQPCLNMLLSMLDEVILALWSHLRPPPYTWGTKSLELLGKLGGRNRRFLREPLALESKENPEHGLRLVLTFEPATPFLVPLDRCIHQAVGAVMQGNGLEAFYRKKALQFIRVCLDSLLNLRENVPGEGVSPGVLGTLLISNLDPSRRRNDASDMKGDLGVKTKTQLLAEKSVFKTLLVAIIAANADTSLHDEKDDYVVDICRHFAMLFHVDSPSSSQSGFMHPIGSSLPSIIMGSRSRCNTSSNLRELDPLIFLDALVEVLSSENRQHAKAALSALNIFAETLIFLARMKHTGMLRGGPSTPMLVSSPSLNPVYSPPPSVRVAVFEELLPRLLHCCYSSTWQAQMGGVMGLGALVGKVSVDTLCIFQVRVVRGLLFVLKRLPVHANKEQEETNHVLTQVLRVVNNADEANSEPRRQSFQGVVEFLAQELFNPNASMVVRKNVQACLSLLASRTGSEVSELLEPLYLPLLQPLISRPLRSKNIEQQVGTVTALNFCLALRPPLLKLSPELVNFLQEALQIAEADETIWVTRMMNAKVVLTWNKLRTACIELLCTAMAWGDLKAQNHTELRAKIISMFFKSLTCRTTEIVNVAKEGLRQVVQQQRMPKDLLQSSLRPILVNLANTKSLSMPLLQGLARLLELLSNWFNVTLGAKLLDHLKKWLEPEKLVQTQKSWKAGDEPKIAAAMIELFHLLPPAASKFLDDLVTLVIDLERALPEDQFYSEINSPYRAPLAKFLNRYVLEAVDYFLARLSHPKYFRRFMYIICSDTGDLRDALARSPQKILASAFSQFYSQSEASAAQLSSVKDEALTGAVSESITVQSSSNMVTTSESYFNGLELVSALVKLMPEWLRNNRVVFDTLLLAWKSPARLARLQNEQDLSLPQVMESKRLIKCFLNYLRHDRTEVGALFDMLSVFLYRSRIDYSFLKEFYVIEVAEGYSPNLKKTILNHFLNIFQSKQYGQDHLVVTMQILILPMLAHSFQNGQSWEVVDPTIIKTIVEKLLDPPEEVSAEYDEPLRIELLQLATLLLKYLQTDLVHHRKELIKFGWNHLKREDNSSKQWAFVNVCHFLEAYQAPEKIILQLKLIVRHADLFYSCRAHFVPQMVNSLSRLGLPYNTTAENRRLAIELAGLVVAWERQRQSEMKVAQESESQNQLGDMLNPSVIGGDPKRSSDVPSFADDLSKRVKVEPGLQPLCVMSPGGASIPNIETPGSSGLPDEEYKPNAAMEEMIITFLIRVSLVIEPKDKESSSMYKQALDLLTQALEVWPNANVKFNYLEKLLGNLSPTPQSKDPASALAQGLDVMNKVLEKQPRLFIRNNINHISQILEPCFGNKMLDAGKSLCSLLKMVFSAFPLEAATTPQDIKLLHQRVQELIHKNLAAVTTQQIALELNNAHSIISFSLFVLNALAEVQKNFIDPFIGLLFRVLQRLARDMGSSAGSHIRQGQRPELDSSVNSRSTIDSTVISNMKTVLKLISERVMSSSDHRKSMGQILQALLSEKGTDSSILLCMLDMIKTWIEEDCRLASSTGSVSSLNPKEIITYLHKLSLVDRKSFPPAAQEEWDAKYLQLLYSLCADSTKYPLSFRQEFFHKIERQYMLGLRAKDPEMRKRFFKLYHDTVGKTLFSRLQFIIQLQDWEAVSDVFWLKQGLDLVLAILVENEPITLAANSARVPTLMIAGPVPDRITMPQQVPDAQESMDGTTLSFDSLAARHAQFLNDANKLVVADIMAPLKELAFADPNVAYHLWVLVFPIVWVTLHKEEQVALAKPIIALLSKDYHKRQQGCRPNVAQALLEGLHLSHPQPRMPSELIKYIGKTCNVWYIAIALLESHIVHMNEAKCSESLAELYRLLNEDDMRCGLWKRKSITAETRAGLSLAQHGYWQQAQNLFYQAMIKATQGTYNNTVPKAEMCLWEEQWLSCASHLGQWEVLA

SEQ ID NO: 64623 - protein, 77 aa, Zea Mays
MLRTTSPVDITQAQNVLGNKGTEIAKVAHRRTDAEAGVEALDAVQQSVVVAASATSFPHQHGRVNGSGQFIRIQPCM

SEQ ID NO: 64624 - protein, 352 aa, Zea Mays
MTVRAAAVLVAAAVLVLLLPGWAAAEWNLTKKGSVVTYDGRSLMIDGKRDLFFSGAIHYPRSPPEVWPKLIERAKEGGLNTIETYIFWNAHEPEPGKYNFEGRFDLIKYLKMIQEHDMYAIVRIGPFIQAEWNHGGLPYWLREIDHIIFRANNDPYKKEMEKFVRFIVQKLKDAELFASQGGPIILTQIENEYGNIKKDHATDGDKYLEWAAQMALSTQTGVPWIMCKQSSAPGEVIPTCNGRHCGDTWTLRDKNKPMLWTENWTQQFRAYGDQVAMRSAEDIAYAVLRFFAKGGSLVNYYMYHGGTNFGRTGASYVLTGYYDEAPMDEYGQTDSVDHYISVLFLSSSCSSS

SEQ ID NO: 64625 - protein, 192 aa, Zea Mays
MMHKLELLKLRESIGAFSSAGFLEMDVYLGSMRCLLLKITTCTSSRSTIQQGLLLSPISPLFSPQPPYSHITRQRSTPTARSRSHSRTCASTGTTTECSGATATPERGAHSAATTAVWAAPGAATRTPTGSGGARSARRWSGTVARGTRRATQTTVCCGSTSRRFVAPASAGLASAEVAVVRADDAGAVLEY

SEQ ID NO: 64626 - protein, 109 aa, Zea Mays
MEANLRGYDAYKNENYIGAVDAYTQAIDLDPSNATLWSNKSLCWLLLGMAETALEDAKQSRTLRPDSGIACYREGAALHELQRFFEAAIAFYEGANLKPENQEYLSAFM

SEQ ID NO: 64627 - protein, 874 aa, Zea Mays
MFKSMVYYVNTSIGEVEVWPKGEASAGLTMAAWAREIRVERISPPSERCPPLAVMHTVAVGARCLVMESRPPVVADVVPPLVVMHTACLRENKTAVVPLGDEELHLVAMTSRRNLTNHACFWGYKLPFGLYNSCLTMLNLRCLGIVFDLDETLIVANTSRSFEDRIDALQRKLSNETDPQRRNGMLSEIKRYQDDKSILKQYIEGDQVYDDGKVYKAQPEIVPPLSDNQQPMTRPVIRLQDKNIILTRINPLIRDTSVLVCLRPAWEDLRSYLIARGRKRFEVYVCTMAERDYALEMWRLLDPDSRLINSVQLHDRMVCVKSGLKKSLLNVFHDGSCHPGMALVIDDRLKVWDEKDQLRVHVVPAFTPYYAPQAEDENVALVNGNRDSLPFDGMADAEVERRMKEANAQSFHQTAGDFVMPVAPAQNFVSTSVASLAPPLGMMPSPFSQPVAPPGFSDSLQGSPAREEGEVPESELDPDTRRRLLILQHGQDTRDPTSPLPAIPPVQVPVPPVQPHGNWFPTEDGINQSNLNRGSAGFTVESDSIVYEKKQPPHPSFFHGGDSPMPSDRFGYQNQRFPSQLPHEDHPMMQNHAPPKYRSFSGEELASWHVPSSQRNNQIESGRHFAQYAGTSAGILEGIALKCGSKVEYKSALCDTAELQFSIEVWIVGEKVGEGIGRTRREAQRQAAEMSLRNLANKYLSSDPNKLSDMKENDFSSNRNVFGYSGNTRDDMLPLSSTSEESRFMKMENNNSRKTGSSVAALKELCTVEGYNLVFQACPSSADGLVGKESYAQVQVGGQILGKGVGLTWEEAKLQAAAEALGTLRSMLGQLGHKRSGSPRSLAPNFNKRFKPDFPRTVQRVPYGTYSRIEGHVP

SEQ ID NO: 64628 - protein, 556 aa, Zea Mays
MARNNEGHLQLPEMDHIQPKNTPHNEPLPLGQKLMLHHGSDAPLRIGHSSHENMRLRSNDLPPLSHTVQTQGYRVGNPGASHAPFVHCHAGSSSSHLPEPAVNYPHRSEEGFAPVGSHMDNRRAATKRKDPIVHPAGISATGYYVGSSSNTQLSNSVQPNPAPLSEPLLRQIPLSIDRSGWDGLHLIHQEGFQRNVRARQRHSHNISLEPRTASTYPLNSVHVPSFGSTTSASLSMSVERNQASVSVPTRNVPSGAPGITSRSLTRRAYYPVVGSSNSSVDVVPTICGSSGAAIFANGGYALNADAGTVSIYPNPAPATSSGSITMPMPMLHQMVIQSHPPATSAATSTSMWIAQPLPARTAAASRHARRVSAGLANNGRYRRARSSYYSLHPLMMVEAERFMMDQLVFYESRAAAADPHRDMRLDIDNMSYEDLLALGESMGNVNTGLADEKISKCVKEVVCCSSDQMQTDQDDQDDDGSCVICLRQGYAGDTEMQARLPRRLHQEVAADEELVPGVQSRRRLGRHQRSEQLFCAPPRSIHFLGSGRIIYAVPFF

SEQ ID NO: 64629 - protein, 843 aa, Zea Mays
MMEVGLNPGEELDFGDNQEDDDDAGDISPASKELAAMVAAAAAAETVELDDGGAGVEAAASAAAAASSSSAAARYGDDRTPRDGMVFKSYEEVLNFYKRYALRTGFGVCVKKSSFTKAGLCRRLVLVCNKWGNGKEDACYQARPTAKTNCQATVVARLLGDDLLHLTDVNLEHNHALNPSAARFLRCYKTLPSGLSKDLVVRAARGECSVAGDIDVPIFDEWGRLKTGQADVLAINAFFTQMQAKLPNSFYVMDFYVEGHLRSVLWADSRSRAAYQYFSDAVWIDTACLRNKYHVPLVSFLGVNHHGQLVLLGCGLLSDESTESFLWLFKSWLTCMKGQPPNAIVTDECVAIKAAVREVFPKTRHRISDWHVVRSISEKIGDLPEYEAMRTNLVTVIYDSLNDNEFEARWKNWIDRFSLQDNEWITFLYENRHLWAPAFLRDTFSAGLCTVSQRESPSTFFEDAVSSETTLVTFLASYMTLLDNKYKMEQQDDFDSLNSSRLLISKYQMEEQLSRLYTLNMFMKFQDELKATMHCQVQLDGSASSFIVIDLTEAGSEMLNKKYEVVHCMATNRMECNCGLFQFHGIVCRHALSVLKWQQVYDIPPCYVLNRWRADFKQLHYLDNPSKDLATSNHVERYDYISLQFLRLVEIGMVSDEKYRHAVRLLKDMKETLLDDNLCRDLEQKLTPAERAIVNGDNHTQPGSSEGGAAKKRRGRPPKKNKEINMDSMVNPYGNKDPLLVSSDVTQKDTFHSASTTSNLGTHVRTHGIVDLMEEVNPSELSFDSRYGVQSGHSHHFGNNQLNTGNTLRFGQSTSAAEQSRVQWVFHNGMYQDDQVTYGRRTS

SEQ ID NO: 64630 - protein, 335 aa, Zea Mays
MDSARSWLQKLQPRDKDRERGAKTPAPASPNGGAGNSARMAAAAGEEALSSATKQKVAAAKQYIENHYKSQMKSLQERKERRWMLERKLADADVSEEEQNNILKDLEKKETEYMRLRRHKMGVDDFELLTIIGRGAFGEVRLCREKATSNVYAMKKLKKSEMLRRGQVEHVRAERDLLAEVDSPYIVKLYCSFQDDEFLYLIMEYLPGGDMMTLLMRKDTLTEDESKFYVAETILAIESIHKRIYIHRDIKPDNLLLDRSGHLKLSDFGLCKPLDSSCFPNLSDLDYAAGKSTNPSSDGDKQSSNSTAPRRTQQEQLLHWQKNRRMLVGAQLCKF

SEQ ID NO: 64631 - protein, 622 aa, Zea Mays
MNLRTFGSMCGDNGVTVGSGSESGIQTQKCTKSKGANESGNNSGSNDDEAGMGLNARDDSDNGSGTQAQNSWTKLAVEIDSPQAMSLDQLADPANSTCAQVIHSKSEICSHRWLPGSSNRNCKKQKYTNDDFKGKDLEIDGPGNLYMDHQSSPNERPIKAADHENNSKESMMGNLGDATVRAADLIGSMAKNMDAQQAARAADTPNFSSEVPEGKGKNDDFKGKDLEIGGPRNLYMDHQSSPNERPIKAADHENNSKESMIENLEEPTVRAADLIGSMAKNMDTQQAARAAEDTPNFSSKVPEGKDGANDTVNDDEQRNSALRRSNLSAFTRYHTSAASNQGGTGLVGSCSPHDNSSEAVKTDSTYNMKSNSDAAAIKQGSNGSSNNNDMGSTTKDVVTKPSTNNERVMLPSAIKANGYTSTFHPVQQWMVPDNATAGKAKADEVANNAGRNSHPGDVQSNLTQQHRPTLHYVHFENSGSGALQCGSSNVFDPPLEGQATNNYGVKAGSNSGSNKGQNNGSTAGASTAAANAGRTDTEIRAIDKSGPGGGSGSGNDTYVRRLAASMTPRQEQLKKYREKKKDRNFGKKVRYQSRKRLADQRPRVRGQFVKQAVQNQEGDGER

SEQ ID NO: 64632 - protein, 194 aa, Zea Mays
MEEEVGKRFYPMVPVPHVPKINGEIPSIDEATMDHERLTERLRLYELVENKVKGDGNCQFRALSDQLYQSPDHHEFVRSQIINQLKTNRDAYDGYVPMAYDDYLEKVARNGEWGDHVTLQAAADKYGVKIFVMTSFKDTCYIEILPKVQKSNKVILLSFWAEVHYNSIHPQNDAPRSQTTKRRRWWPFSQHHHH

SEQ ID NO: 64633 - protein, 153 aa, Zea Mays
MASEKKQSNPMREIKVQKLVLNISVGESGDRLTRAAKVLEQLSGQTPVFSKARYTVRSFGIRRNEKIACYVTVRGDKAMQLLESGLKVKEYELLRRNFSDTGCFGFGIQEHIDLGMIHQQASMGWTSTSCLSVLAIASRAAGGASPVLGFSIG

SEQ ID NO: 64634 - protein, 496 aa, Zea Mays
MAQRWRSRARWDSDLDEDGSPPFRQPRRGGSDEEDDEVGNEDLSLEIIARAQRKRRWASCGGVTGFANLLSVSSGDDEDAVVELAEADEPRRKQKKRQHWKQRKRQRKEATAAAAAAAAVDEEEKEVGTTQEEQIGTAESVLTEDGVDAPTSHSMFLRKLLRIPRYFDPGETLLETCFNCSEEGHVAANCPMGKRKKPCFVCGLFGHNAKQCKQGQDCFICKKGGHMAKDCPDKHKRNDHQSTLCIRCGETGHDMFGCANDYPPDDIEQIRCYACNQKGHLCCSDFFDNSLEQVSCYNCAQSGHSGLGCAKQRREASAVTTPTLCFKCGEEGHFARGCTKNAKSDGPKGWSSPHSQRKGRWKNDGKSPSHIRRKEKWKKDSSARSAPHDACTTSKSNSPSFEERMGASNHKSKWRGGWTGDDDLPSKKYKPNGWGSPATPKRSYTNHQYLSGGGDYFTPQSSRRHNHGTASPGARKHRFSSSIFAASNTHVRFKRS

SEQ ID NO: 64635 - protein, 680 aa, Zea Mays
MTPAETSPPAPPPRASHPVSSPLLLQDPTTQATCPWREQLTVRGVAVAAALGALLCVVIHRLNLTVGVIPALNVASGLLAFFLAAAWRAAAGWLGFGRGPPFTRQENTVIQTCAIACAGLAFSGCSASYIFAMDRKTYELVGPDYPGNRAEDVKDPSLGWMISFLFLIALVGPFSIVLLRKVMVIDYKLAFPGGTATALMINSLHGKTDGDLAGKKLHCLVKYMGISFVWSFFKWFFSGVGDSCGFDNFPTFGLEAFKSTFYFDFSPSYVGFGFISPHIVNCSVFLGSVISWGFLWPFISAQAGHWYPDNLGNSDFRGLYGYKVFIAISIILGDGLYNLVKIFIVIARELCSMQSKQHELPVQALEDDGSCEQLADEKLQTEIFLKDSISPWFAASGYIVLAAISTASVPAIFPQLKWYLVLLCYFFAPVVAFCNSYGMGLTNLNLAPTYGKIALFALASLVGSDGGGVIAGLAACGIVMSVACSTADLMQDLKSGYLTLSSPRSMFTAQLIGIALGCVIAPLTLWLFWTAFDIGDPDGEYKAPFAIMFREMAILGMEGFSALPLHCLDICYAAFFLALATSLLKDVAPANVSRFIPIPIAMAAPFYVGAYFGVDMFIGTAILYAWQKLNREQADGYAVAVASGLICGDGIWSIPSALLSILGAVPPICMSFEASSAPRQ

SEQ ID NO: 64636 - protein, 435 aa, Zea Mays
MDWDLKAVGAWDLAELEQDHAAATAAAGPSEGHATDTAAAGTGTGTGTESRPPGAGAPAECSVDLKLGGMGECELGAGAATACREREAAAGATKRPRPAGQQQQQCPSCAVDGCRADLSKCRDYHRRHKVCEAHSKTPVVVVAGREMRFCQQCSRFHLLAEFDADKRSCRKRLDGHNRRRRKPQPDTMASASSITSQQGTRFSPFAPPRLEASWPGVMKTEESPYRITHQIHLGSSSSSRQQHFVGAATSAYAKEGPRFPFLQEGEISFATGVVLEPPAAAPACQPLLKSGAPPPESSSAGGGKMFSDQGLTRVLDSDCALSLLSAPANYSGIDVSRMVRPTEHVPMAQQLVVSGLQFGSASWFPRPQASTGGSFVSSCPAVQVEGEQQLNAVLGPNDSEVSMNYGGMFHVGGGSGGGEGSSDGGTSSSMPFSWQ

SEQ ID NO: 64637 - protein, 260 aa, Zea Mays
MIDVAAHGAEMGASCGVVAARGTGNGARRGAGGGGNRVGLEEGVKIGGWGGACKGKHIFVEDDVTRDDDAVGGEVQAPIPLVVRGVAEEEAASGARRKFDRGSSGNVRVAGTTEHAQVVVGRGCVVQGEVRCRVAHRLRGKTVEEMCGSMKGLCLVGGRERRLKEKAADHVGGGANHALGPTVLSRGVGTRETQLDAVSEEERAGGVVVELTAIVALQGTDRAPELGGYPGEEVSEGGKRVGLQPKGESPKEMGVVIQND

SEQ ID NO: 64638 - protein, 1052 aa, Zea Mays
MSRSGPRRGIFDGLPIPADKSESLSRIDESWAAARFDSLPHVVHILTSKDREGEIQFLKEQSDLIEDVVDEVVHAYHHGFNKAIQNYSQILRLFSESAESITGLKGEMEEAKKLLGRKNKHLGQLWYRSLTLRHVLSLLDQVEDVAKVPARIENLMAEKQLYAAVQLQVQSVLILEREGLQAVGALQDVRSDLTKLRGVLFYKILEELHAHLYNNGEYSSAVLSMVDSEQAPTSTATGRLVNSMQPLSRRTRSIKGDNHIGGPVDGFPKVSSVDGGSSFDGPDDNSLDMSESDGHTRKDSKSFSHEIPIFLSYATPDEFLESMIKADAPLNVKYLRTLVQCLSMLGKVAAAGAVICQRVRPTIHDVITSKIKACSEDASKSSMGKAAKTNDVLHSNGPTPRFQMFTQKTKSGASVMAAQLVVSPISPTMAPTGDAQRAATQLLRSIFECLVEILENHIIVGELLEQKSTSEVDNVNTPHIANGDASWNPDSESFQATGGFSVAFSLSVVQSECQQLLCEILRATPEAATADAAVQTARLANKDPVKEKRDGSEGLSFAFRITDAATPASNEGQGWRRNSNVPQEGYGTASVIPDQGIFLAASVYRPVFEFMNKIGLMLPQKYSQLGSDGLLAFVNNFLKEHFLPAIFVDYRKCVQQAISSPAAFRPRVHATSAYSSSVELGRPVLQGLLAIDIIAKEVLGWVQLMPNYATELVEYVRTFLERAHERCRASYMEAVLEKQSYILLSRNDIESLMRLEPANISLQNSTGEHDNNATGAEAVEVEIELSDLLLDMCPIKQENLIHDDQKLILLASLSDSLEYLADSVERLGESFISPPTTSESINHSHGRHARSSSAIPKSLASLANEYRRLAVDCVRVLRLEMQLEAIYHMQEMTKREYVEDQDAEDPDDFIISLTTQIARRDEEMAPYITESERNYIFGGISSVAANASIKALAQMKSINLLGVQQICRNSIALEQALAAIPSIDSEAVQQRLDRVRTFYELLNLPFESLLGFIAEHEYLFSAKEYLSVLKVNVPGREIPADAERRISQILGH

SEQ ID NO: 64639 - protein, 56 aa, Zea Mays
MPLVDLSSSPPPSTDLLVVSSKHGPGALKFYLNRFCRLGNLNSKDGCEGDVSSILQ

SEQ ID NO: 64640 - protein, 1000 aa, Zea Mays
MASGSRATPTRSPSSARPEAPRHAHHHHHSQSSGGSTSRAGGGAAATESVSKAVAQYTLDARLHAVFEQSGASGRSFDYSQSLRAPPTPSSEQQIAAYLSRIQRGGHIQPFGCTLAVADDSSFRLLAFSENSPDLLDLSPHHSVPSLDSSAPPHVSLGADARLLFSPSSAVLLERAFAAREISLLNPIWIHSRVSSKPFYAILHRIDVGVVIDLEPARTEDPALSIAGAVQSQKLAVRAISRLQALPGGDVKLLCDTVVEHVRELTGYDRVMVYRFHEDEHGEVVAESRRDNLEPYLGLHYPATDIPQASRFLFRQNRVRMIADCHATPVRVIQDPGLSQPLCLVGSTLRAPHGCHAQYMANMGSIASLVMAVIISSGGDDEQTGRGGISSAMKLWGLVVCHHTSPRCIPFPLRYACEFLMQAFGLQLNMELQLAHQLSEKHILRTQTLLCDMLLRDSPTGIVTQSPSIMDLVKCDGAALYYHGKYYPLGVTPTESQIKDIIEWLTVFHGDSTGLSTDSLADAGYLGAAALGEAVCGMAVAYITPSDYLFWFRSHTAKEIKWGGAKHHPEDKDDGQRMHPRSSFKAFLEVVKSRSLPWENAEMDAIHSLQLILRDSFRDAAEGTNNSKAIVNGQVQLRELELRGINELSSVAREMVRLIETATVPIFAVDTDGCINGWNAKIAELTGLSVEEAMGKSLVNDLIFKESEATVEKLLSRALRGEEDKNVEIKLKTFGSEQYKGPIFVVVNACSSRDYTQNIVGVCFVGQDVTGQKVVMDKFVNIQGDYKAIVHNPNPLIPPIFASDENTSCSEWNTAMEKLTGWSRGEVVGKFLIGEVFGNCCRLKGPDALTKFMVIIHNAIGGQDYEKFPFSFFDKNGKYVQALLTANTRSKMDGKSIGAFCFLQIASTEIQQAFEIQRQQEKKCYARMKELAYICQEIKNPLSGIRFTNSLLQMTDLNDDQRQFLETSSACEKQMSKIVKDASLQSIEDGSICLIHSLYL

SEQ ID NO: 64641 - protein, 71 aa, Zea Mays
MSKLLLVRLVDDAARGAPGVVRRPIRVPLLLGARRQRRRGGGPGGAEAQRPEHLEPMPTCLRCEPDDESGQ

SEQ ID NO: 64642 - protein, 542 aa, Zea Mays
MEAWPPLAPAAATPACALAWGAAATAQRKAVEQESAAQAVSRIVASCANSSGVAVAVVDANAVISGGSALSTSAGRLVTVPEVLEEVRDATARRRLGLLPVPVETVEPAPEFVKKEAEIHGTSHLREHPPPLHEVNVRKLSEAQMPGWGSNVPNLKEWEELDQMSEAGGDINSRILPLKDIESQDILMCDTNSLCGAQEDTELQPSKKDAPVAWEDDENNVGWMPAVSRSMHRRYLQRKARRDALKESGQSFETSSVVPSIDDDKVLSENSGLEHGLTSTDGLSSVTEIISARSDDFEHQAENDTEIAGEHLHSDQRAYGDDADACTKELENLDIEGEDEGGGDAHFIVDESSEQSWTLRSLSESTVACVTSDYAMQNVILLIGLRLIAPGGMQIRQMHRWVLRCHACYKVTQEVGKIFCPKCGNGGTLRKVSVTVGENGITMASRRPRVTLRGTKFSLPMPQGGRDAITKNPILREDQLPQKVLHPKLKKSNKDDDFLGVVDIFSHGGDKKAPLKPPVRKALAMFSGKRNPNDNHFSRKKY

SEQ ID NO: 64643 - protein, 646 aa, Zea Mays
MAPPRPPTGPILFLPLVFLFLFTTAAASAAAPEDEKFTEELLLRPLPDRKALAHFHFRSSAPPAASVGRHHHLFPKAISQLVKKYHISELELSFTQGRWNYEQWGGFDPMSTNNAKPPGVELWAVFDLPLSEIDATWKNLTHTLSGLFCASINFLESSTAFSAPRWGFKLNEGNLRYGALPREAVCTENLTPWLKLLPCRDKAGIASLLYRPSIYKGYYHSQKLKLRSSQSLGIILDQTLTVVLQPNNVHGEQLHSNHGQLQPNWSMRHLFNRKLSGKCLVSKSSRVFIEVDKGIADEVNISGSVHSWSNEFFVLSNSPDKLIKGQNHLEMQSSFLYVYDASNYSEEQPLDLGITWKLPLIWTCTPSPFHASRFLMGSGNERGSIALSFMSTNLHKKISGSANDCSIKAVIFQVVPWYVKVYYHSLEIFIDGSRKTVSEVVDKIHVIPSEDKLLPGTLEMLLRFPCSMQSGTLTLDFDKGFLHIDEYPPDANQGFDIPSALVSFPEFSSARSYPEIDPVLGSPLLENFQEDSVVKSYTEVLLVPLTTPDFSMPYNVITFTCTVLALYFGSLLNALRRRIGEEERELKKRATRHGLISRLLAKLRGQKVDPSESGSSFESTGSKKLLFKVVFVAVAAVLFHYFSNNS

SEQ ID NO: 64644 - protein, 333 aa, Zea Mays
MAAPAQAQAQVLPLLRWSRSASFLCASSRRLFSALQRPSAAARCEAGSKAMLKGMDYSELENWVQAQGFRPGQAMMLWKCLYGNNVWAHCYDELAGLNKDFRKMITEHADLKALTMKDIHIASDGTRKILFSLEDGSVIETVIIPCARGRTTICVSSQVGCAMNCQFCFTGRMGLRKHLSTAEIVEQAVFARRLFSDELGSINNVVFMGMGEPFHNIDNVIKASAIMVDEQGLHFSPRKVTVSTSGLVPQLKRFLQESNCSLAVSLNATTDEVRNWIMPINRKYNLNLLLGTLREELNLRQKQIVLFEYVMLSGVNDRSDICFSVFADCFCML

SEQ ID NO: 64645 - protein, 857 aa, Zea Mays
MDAYQHQRRFAGAGDAPPPPPHPSHPSAQWYPAPPLPYHPPHPGHPYPPQHHHQWAPPPDMQHQHHPPLPQPYVYQPPPPPMAMQQQPPPPPGNPWPPHHGAGQHPPPTYPPPPPGQAWTNHSWAQNHGYQGQQRETNHLLDRGPMVSPAKNFGSFSSTYEQEVSYNYSSAPGTGNNMLQYPNSQAQPFPTTAAVQGGFSQGCLSMPVPLTEQPLFGHERQPIDPSDQPLEFNSRKAPDLAVHINVNSNIPAPQTLAPNHDVAATSTHSWTPSATVGYLPRAPVPPQTAQMDPSVHAAPLFGAASSSSYVSPAAFGVGNVTEVFPTDPNTPFSVADKSKKPPVPNWLREELLKKKSEPLSASAQNSENLNPMEANEAVQTIGRPDQSDSRSNDSAKSTEDDDDDEDEIEAARMAAINKEIKRVLTEVLLKVTDELFDEIATKVLNEDDSAESNEATGVFGSKETGLGRSRAKASAKVVLPAKSTNSSDHKDSTGLSSPKGALLGLASYDSDDDDDADTDSKDKMPISNLSSKDNAGAVNTEGDKSTLGKRNGNHNEQNSSLGSSPSGEDLKSNNQNFQRNANAEPEQMHIRDTENGEFRFKAKTRTEPKGAFDRMDEKAHTYAEVDIQNRKTSFGNNAEKHNDLESSHRHSEKSSKEDFVNELKADHTKELEYSRAEKYNNDDKYSMYGNIDKRGSCKEGKGSDSAAKHESDTREPHYRGNSKLDGAKGDWKDLPKDRERNRDDRRGKGKDEKDDRLRQMTSHNSRSSRSRSPRGRSRTRKENSHVRGSVSSDEPSDSVKKRKHYSHKTSMSPSPPKSRNRRISRSPHSKHSHRRHSPYSSAGRKRRSRSRTPVKRR

SEQ ID NO: 64646 - protein, 354 aa, Zea Mays
MALEAGSSGCGGRGWGGGFRSLMRRKQVDSDRIRAEGQPQLAKELNVPELVAIGVGSTVGAGVYVLVGIIAREHAGPALTISFLIAGIAATLSAFCYAELASRCPSAGSAYHYSYICVGEGVAWLIGWALVLEYTIGGSAVARGISPNLALFFGGQDSLPWILARHQLPWFGIIIDPCAAALVCVVTVLLCMGIKESSFAQGVVTVLNAFVMIFVIVAGSYIGFQIGWVGYKDSDGYFPYGVNGMLAGSATVFFAYIGFDTVASTAEEVRNPQRDLPLGIGVALAICCALYMAVSVVIVGLVPYFAMDPDTPISSAFAKHGMQWAMYVVTTGAVLALCSNLMGSLLPQVYSDKT

SEQ ID NO: 64647 - protein, 556 aa, Zea Mays
MASDGAPRGRRPKRPASGGLVQPDVLTYKRRRRGTGANAGHSAVTSGPDPDPVKMSAVVHATNSQQGGRQTLDRHWRSWRDTLEGVLRSTAVNQSAGGIQNCIRDALRYNGWHPTEHGNLVDDRGTDEEDATGALHSEESSGALVKLEDGTVASLEANKAMCHDTLFDILISEKFAMLCDLLAATFHGSKPDDVIGLQIIDAKMRNGDYAQNPALFDHDIKQIWKKFEHVGQEMAGLASSLLLISQASNQKQASDISEIDVAEHKIEETSLVGVTRKALRKFTPPCDSGYSTIPRRTGTSGSDGICKDCGRKADSKGRIICDRCEAAYHVSCLKLAIDEEAPAKWYCPTCVEPDVPLKSNNHGRAHEGCDVCEWLEVEKPEEPAEEPELAVKTQESSVSSIVEDSEPDLSITALANLCKLCGTCEDENKKFVVCGHGYCSFKFYHALCLKESQIASEKQRNLKCWYCPSCLCRRCFKNKDDEKIVLCDGCDEAYHTYCMDPPRSSVPRGKWFCTPCSAWRSANGMQRYEKSILQSVKRVPDAKGPKVQAAAAAPGK

SEQ ID NO: 64648 - protein, 303 aa, Zea Mays
MSSGGGGGQQFRYTQTPSKVLHLRNLPWECAEEELVELCKPFGRIINTKSGVGANRNQAFVEFTDVNQAISMVSYFASSSEPAQIRGKTVYIQYSNRQEIINNKSPGETAGNVLLVTIEGVQASDVTIDVIHMVFSAFGYVHKIATFEKAAGFQALIQYTDADTASAAREALDGRSIPSYLLPEHVTSCCLRISFSAHKDLNIKFQSNRSRDYNNPYLPINYSAMDGTLQPAVGSDGRKVEAQGNVLLASIENMQYAVSVDVLHTVFSSFGTVQKIAIFEKNGGTQALIQYPGMCLQIDHARL

SEQ ID NO: 64649 - protein, 774 aa, Zea Mays
MSTTQASEAAADKGLPLAVDATMIDEYASQSKLLQEFVKIPTIGKAWIFNSKDDDMSKAVVSIGKSDLLANKRRQFLLNTHISKSPSKSVDFQWSPFPTEISGVSAIVPSPSGEKLLLVRNSEDDSPTKLEIWGPCQLENEIHIAKSVHGSLYTDEWFEGISWNQEETFIAYVAEEPPQPKPVFNDYGFKKEGLSEKDCKSWKGQGDWEETWGETYSKKRIPALFVINISSGEVRPVKQIPRSLSVGQVIWAPSSSYSLVFVAWSSDNGFQGTPRKLGIKYCYNRPCALYAAPDPFGQEAEKSLTEGNKGETTTMIKLTANLSSAFFPRFSPDGKYLVFISAKSAVDSGAHNATNSLHRIEWCTDGKLDGSLGVADVVPIVLCPKDNCFPGLYCFGLLRDPWLTDGQTMIISSVWGSREVILSVNVVSCELSRVSPQDSDYSWNVLAVDKNNILAVSSSLITLPQMYYGIKVSQTESNWEWQGVSTPFPKPSDKISSVLAEHKFSILKIPISNPSDELANGAKLPFEAIFVSHKDSASNPTIVVLHGGPHSVYPSSYSKSLAFLFSQGYNLLVVNYRGSLGFGEEALQSLPGNIGSQDVNDVLTALDLVIKRGLIDPSRVAVVGGSHGGFLTTHLIGQAPDTFVAAAARNPVCNLSLMVGTSDIPDWCFVEIYGKEGKKYFSESPSVDDLCQFHQKSPISHIAKVKTPTLFLLGAQDLRVPVSNGLQYARALKERGIETKTIVFPEDIHGIDKPQSDFESFLNIGVWFKKHMGK

SEQ ID NO: 64650 - protein, 557 aa, Zea Mays
MDPTTPVLALSKAFASSRTKPFLLLAPHRRRSLFAARASAPSSSSVPGDLLISLARLALRGPGPPAAPRRWFASVSSASPLASGGPPRGGGGRGNGDGDGGGGGDGWKRPRASQGAGVVEEAAAQGADVIVLDVGGMSCGGCAASVKRILESEPQVRSATVNLATEMAVVWAVPEDSVVQDWKEQLGEKLANQLTTCGYKSNLRDSSKVGSQTVFERKMQDKLEQLKQSGRELAVSWALCAVCLVGHISHLFGVNMPLMHVIHSTGFHLSLSIFTFVGPGRRLILDGLKSLLKGSPNMNTLVGLGALSSFAVSSIAAFIPKLGWKTFFEEPVMLIAFVLLGKNLEQRAKLKATSDMTGLLSILPSKARLMVDNDAEKSSLIEVPCDTLAVGDYVVVLPGDHIPADGIVKAGRSTVDESSLTGEPMPVTKITGAEVSAGSINLNGKLTVEVRRPGGETVMSDILHLVEEAQTRAAPVQRLADKVAGNFTYGVMALSAATYMFWSILGSQLVPAAIQHGGNCLSLCSWACHSHCCTGWHFIRCNKRTSFTWWGCFGEVL

SEQ ID NO: 64651 - protein, 321 aa, Zea Mays
MSSDGRLRRALAAFGGDVWDLVDAALAAAARDSPGDLRARRDGIVQRLYAGAARCRNCDADATPAPAQPRKANDAVAAAASPAAAASAFPASPEQEVDADGLDDVDDAADAGMESKILAIRDFLEDPDQSEDDIVSLLQNLADMDITYKALQDTDIGRHVNGLRKHPSSEVRQLVKLLVRKWKEIVDDWVRLHNSCGDGSGSIISDGDSPDKVQSKYHQNTHASDFKYPPSPQRHNVLSSERSSNHNLVESTMEKRRTSPAPAYNNTKQNNSNNYSSISSSAPARAIREQKNTLLDSEKLDSARKRLQENYQEAQNVNLSK

SEQ ID NO: 64652 - protein, 258 aa, Zea Mays
MGRRNDDIDWKSVFLSYFSHGASSDPAATRASGVAMAASSDDDERRRGSPGLHQRSEEPRSELERRFGKCCRPGAQVDGGAQAQHCRVTRAAAKAAVGLGPDVSSASNVVYDLSPINDDKEGEHVHDKNYSKLSPKFSEKKNYGQVPLSKQKSQGHGGKRKSIPVAKIYSSQPNSTTHAIDLKEPDHQSSLPSKFSKRRKQQLQKSSSIYSRKDLMSLHLHKVTSSNLGGAEAHGGHPRWQERTKHISHHHCLSDMET

SEQ ID NO: 64653 - protein, 179 aa, Zea Mays
MASCDLLDVDPLELQFPFVLDKQIPCPLRLANRTDRTVAFKVKTTNPRKYCVRPNNGIVPPRSLCTVVVTMQAQTVVPPDLQCKDKFMVQSVVISDSLSAKDITSQMFAKEGGNVLQEVKLKVAYVMPPEPPSEIAEEHDGLDRVLVPMQRIVDNGKSTSELSSGSVSLRSLDHLLVEL

SEQ ID NO: 64654 - protein, 699 aa, Zea Mays
MAAGGAGACPPPGLGFGGEYYSVVDGACSRDGSFFGGKPVLAQAVGYAVVLGFGAFFALFTSFLVWLEKRYVGSQHTSEWFNTAGRSVKTGLIASVIVSQWTWAATILQSSNVAWQYGVSGPFWYASGATIQVLLFGVMAIEIKRKAPKAHTVCEIVRARWGRAAHAVFLAFCLATNVIVTAMLLLGGSAVVNALTAINVYAASFLIPLGVVVYTLAGGLKATFLASYIHSVVVHVVLVVFVFLVYTSGNRLGSPRVVHDHLTAVASAVRNCSAPLSHPDQACGPVHGNFKGSYLTMLSSGGLVFGIINIVGNFGTVFVDNGYWMSAIAARPSSTHKGYLLGGLVWFAVPFSLATSLGLGALALDLPITAAEAAKGLVPAATATALMGKSGSVLLLIMLFMAVTSAGSAELVAVSSLCTYDIYRTYINPDATGEQILRVSRATVLVFGCLMGVLAVILNLVGVSLGWLYLAMGVIIGSAVIPIALLLLWRKANALGAILGAVSGCVLGVTVWLSVAKVQYGRVDLDSTGRNAPMLAGKPGVHPCLAWPQQYDWESSRQITTVESVPADSDLAEELKEERLVHAKRWIIKWGVAFTAVIAVVWPVLSLPAGRYSAGYFTMWAVIAIAWGTVGSAVIIFLPLVESWDTICKAIMGDMPEAEERYQEMQKEKDLGTMEMVHPASGTRPSIVANDDEDNLSLA

SEQ ID NO: 64655 - protein, 65 aa, Zea Mays
MPYLRLRHSLHIICVLCSSPNKNPWRFGERKMKSALRSLGVQCYARTRNRCRYHGLQVEFILLVR

SEQ ID NO: 64656 - protein, 307 aa, Zea Mays
MPPYYTLVLRSLASLEGLAVAADGTFKTFQAAYPYVVRKLLSENSLETRRLLNQAIFNKRKEFQWQKIDAFLKLASARTNFKYNSEVLPEPDMKSMNVASLVEISDAYSLDRAIATPERALHTANLCVRLLLSKESIVIRRLIMTANAKSLARDLISRDALMFRVLLSKVIADVVYQWMLSATGLKRVMETKIQTPMTTGKNEGHLVLAEEPSTLMVLQAAVKDRRIQLMFTKFVRELREEPVLMIRVSWNVFLISVSSAAVGLHRFLVFFLKEDGARFLDDKVKKMKIWLMEFSKRTANLEIQGIL

SEQ ID NO: 64657 - protein, 392 aa, Zea Mays
MKLRLHLLVLCVIIIFLVYNMASFQHKQTSSEAKSHPFDTVTVSDRDAVKLPQKAEVRIGYLPHGIVESNSDMKLKPLWLTTSAQSKKSKQKDHFLIAIAAGINQKKSVDAIMKKFLPENFTAVLFHYDGNVNGWNDLPWSKSVIHIAASNQTKWWFAKRFLHPAVVSMYQYIFLWDEDLEVDNFNPRRYLNIVRSEGLEISQPGLDSKLSEIHHRITVRKNTGTFHRRVSRANKRCLREGPPCSGWVEGMAPVFSKYAWQCVWHLIQNDLIHGWGIDYKFGYCAQGDRTKNIGVVDSEFIVHRGVQTLGGSTITKDGIRGKNAQSLRQKAAQVQKSRGRDPGLDMRTKIRRKSRSELRDFQKRWARAAREDRTWVDPFAHSRRKRRNRNPQ

SEQ ID NO: 64658 - protein, 58 aa, Zea Mays
MSIQALELAFPNTNVQFANYLVRCFCTNRVWVKSVHHDTQLWYLCLLTIGLFGVRVVL

SEQ ID NO: 64659 - protein, 152 aa, Zea Mays
MAVWPAGRVAARLSSSRWWRAPQQAGKTSLVRLRRVVWMATAAVAAPAGARASAGDGGWGRWPVAQAVGSGARGLDLDPVDRICLNSWQLSLGQFTPFLTTESDLRPWLLLLEECKQRHTRNLNNLEPDTRNVSHSMTLTSYDQIQQSTPHH

SEQ ID NO: 64660 - protein, 748 aa, Zea Mays
MRRGLRRGLGILLVPLPHAPSRLPPISLAALLPRRFNGFSRHSFCSFPVGERAVEQFSDDEYDHEYEDLRPSSSVANIDEWRWKLSMLQRNAEEQEIISRDRRDRRDYDQIANLAKRMGLYSEMYGRVVVASKVPLPNYRPDLDDKRPQREVVIPLGLQRRVEGLVQEHLDRAFLPLNKCGGNTKNGSDMTENANLDEQHDSLLDRSVMEKILQRKSIRMRNFQRSWQESPEGAKMLEFRRSLPADKEKERLLAAIARNQPRRISAMAVAERVSTERGENLGESVGYKVRLEGIKGKDTHLLFCTSGILLRRLLSDRNLNGVTHVFVDEIHERGMNEDFLLIVLKELLSRRRDLRLILMSATLNAELFSSYFGGAPTIHIPGFTHPVRAHFLEDILERSGYKLTSSNQLDDYGQDKVWKTQRQLLPRKRKNQITTLVEEALKNSSFEIYGSRTRDSLVNWNPDCIGFNLIEAVLCHICRKERPGAVLVFMTGWDDISCLKDQLKAHPLLGDPNRVFLLACHGSMATSEQRLIFEKPPPNVRKVVLATNMAEASITINDIVFVVDCGKAKETTYDALNNTPCLLPSWISKASARQRRGRAGRVQPGECYHLYPRCVYDAFADYQLPELLRTPLNSLCLQIKSLQVGSIGEFLSAALQPPEPRAVENAVEFLKMIGALDGNENLTDLGRYLSMLPVDPKLGKMLIMGAVFRCIDPILTVVAGLSVRDPFLLPQEKKDLAGTAKARFSAII

SEQ ID NO: 64661 - protein, 301 aa, Zea Mays
MLCVRAEDALAAAAAAAAASDKMRSVTLGGTIQRAVRRMAGGAGRRRPHALADSGTADSSASASASCSGDDISSTGSAKREAVQRCTMHRYRSQLEQEVNKLQRQLQEEIDLHMALTDAITYNAALILKASMKLPDKAHELLISISSLETAITKLEEDLHHLHYQLCDARNERLLAENKPECLLPTASDCQPSTACDCTREEPEQTLRYSRFKDYHQVEDGLSTEPEDQQDDEKDAEDGEHVSLNMLMQEACSMENEGKEDQKIDALTFSQPNFKKSDMSGNLWNNPNQLSEEMNVYLVQH

SEQ ID NO: 64662 - protein, 451 aa, Zea Mays
MTATASCFSSPVAWARPRAGPAGASAALRVGRCPAAAVAAHDVAFHPDVSRAADSLQAEFRAVDRAIALNSSRVAAAFRRARVAPHHFGGSTGYGHDDGGGREALDSVFADIVGAEAAIVRPQFFSGTHAIACALFALLRPGHELLAVAGPPYDTLEEVIGIRGSANVGSLKDFGVTYREVPLVADGGLDWDALACSIRPETGCAFIQRSCGYSWRKSLSVADIHKAIGLIKMQNPNCMVMVDNCYGEFVEISEPAMVGADLIAGSLIKNPGGTIAPCGGYVAGKEHLVEAAAARLSAPGLGVEFGSTPGHVMRALFQGLFLGPQMVGEAVKGGLLIAEVMSAKGYKVEPLPRVPRHDIVQAVELGSRERLIAFCEVVQQTCPVGSFIKPTAGETPGYASEVIFADGTFIDGSTSELSCDGPLRDPYAVFCQGGTHWTQWALVLGNVLKVI

SEQ ID NO: 64663 - protein, 1007 aa, Zea Mays
MGNLCWSTNRERWRRTAPSPSVPACSDLPAAVSSFADAFVDFAVSDIFFPTFPSSSSLPPRPKTPTTFLPSPSRLVAIGDLHGDLPKSLSVLRLAGLVPPSCTPTPPPPPASSWPAGPTLAVQLGDILNRSDDELRLLYLLHRLSLSAETRGGAFLPILGNHEVMNVSGDFRFATPQGFHDRAVCGGVLACAGFAAWAAEAGVAGAAGCWRTGVAGAGAVYTASLIVSRDCLKLNSTLGLWTCFCPIRSKPNPLPSYIDIGSWAGLVNPRRRKKYMLPSANWQEMKKLSSGKKSGKGDGLGRPGESLDSQARQIAVRSPLPWREAYQSSPQIPRYSPLRLRSRLRRRAPPSPPAPHRATPMYSQLVDGDSDSEGSLISDISASPPRGRSPSPPPPPPPPPEHRPNPKHTATVKPKPPKSKAKPKLAASACTAAVSPPPLPSAALSDPHGLVSRIAAAPALVTATSTVSSSSFRRLVQSRNPSFDPAAAFSAPTPAPTLAPTEIATAATAQCPAPDAPPQTRPKRVHPNSVSEVVPPAAEAEQPKRPRGGAEGNFVRLNINGYGRRRTFRNAQARRPTKYRSWRRQRHGGAKPQGRGDEEGDFVAEAMIEREKKRAGGDGGVLEAVEAAREDPSEQNLENLLRIIYGYNSFREGQLEAIQKVVAGESTMLVLPTGAGKSLCYQVPAMILPGLTLVVSPLLSLMVDQLMKLPAFLPGGFLASNQTSDEFHETLQRLRGGEIKVLFVSPERFLNEEFLLIFRDGLQISLVAIDEAHCISEWSHNFRPSYLRLRASLLRRKLNVQSILAMTATATTQTLEEIVTVLEIPSDNLIKTSQIRDNLQLFISMSNNRLKDLLLLLKASPFVDMKSIIVYCKFQGETDYVSKYLCDNNITAKSYHSGLLMKNRNRVQELFCSNKIRVVVATVAFGMGLDKSDVEGVIHYSLPESLEEYIQETGRAGRDGRLSYCHLFLDSTTFYKSRSLLHRYFHVKIQWGAFAPWLKSRLRASSI

SEQ ID NO: 64664 - protein, 1886 aa, Zea Mays
MASKGPRSKLDHETRARRQKALEAPREPRRPKVHWDHVLAEMMWLSKEFDSERKWKLSMAKKIAQRANKSIVDQATKGERKQKEKEHRMRKVALNISKDVKKFWIKIEKLVVYKHQLELEERKKKALDKQLDFLLGQTERYSTMLAENLVDMPYPENLENRTSQINQRSHQEEVPEKNLNATISDDFDNMEVDDDYESSLDEEPEDDEHTIDEDEAQITEAERNEELAALEAEADLPLDVILKMYTKTKVSREGSPDSKDMLSNLGSKILIVDSLKQANGRDHEPAHSSSEDGNSSEEVDDGHSYAEFVKKNHCCVPSWCGAFAVRLMALSLAAAIEDKDYIATEEVKDDEATLSEEEELAKKEDPDYLEEVKLLQKESEIPLEELLARYREDGCADHETAELKNSPHFVEEVNTDMSLDDQSVSILEAKSDLFVDHQSRDVLETEDTAPRSEIASEPCAKQNFDEENNLTDVKTVNGDKSDDVKSDDVIADAAAAARSAQPTGNTFLTTKVRTKFPFLLKHSLREYQHIGLDWLVAMYEKRLNGILADEMGLGKTIMTISLLAHLACEKGIWGPHLIVVPTSVMLNWETEFLKWCPAFKILTYFGSAKERKQKRQGWMKPNFFHVCITTYRLVIQDSKVFKRKKWKYLILDEAHLIKNWKSQRWQTLLNFNSKRRILLTGTPLQNDLMELWSLMHFLMPHVFQSHQEFKDWFCNPISGMVEGQDKVNKEIIDRLHNVLRPFILRRLKRDVEKQLPKKQEHVIYCRLSRRQRNLYEDFIASSETQATLASGNYFGMISIIMQLRKVCNHPDLFEGRPIISSFDMAGINMQLSYSVCMLLDKSPFSQVGLSDMNLVFTQNEFSMSSWEADEVISAFPLSTTSWNHDLDTFCSNKDRQGSNLTNIFEDIQKALQEERIKESRERAASIAWWNRVRCQKRPVYGTNMIHVLTVKHHVSNILDKRNNPLCHMDYSSSLADLVLPSVERFQKMLDIVESFTFAIPAARAPPPVCWYSKGNSPVFIDPAYREKCMNEFSPILSPIRSAIVRRQVYFPDRRLIQFDCGKLQELAILLRRLKSEGHRALIFTQMTKMLDVLEEFINLYGYTYLRLDGSTPPEERQTLMQRFNTNPKFFLFILSTRSGGVGINLVGADTVIFYDSDWNPAMDQQAQDRCHRIGQTREVHIYRLISESTIEENILKKANQKRALDDLVIQRGSYNTEFFKKLDPMEFFSGHTSLHAEDQEKNCSTTSGVSNDVDLALSIADVEAAIRQAEDEADYMALKKLEEEEAVDNQEFSEEAAGRQEEDELVNEENGKPDEHINEEQKYNSSDVEKEKHITLSTNRLNKEKALTLAVGDEDTDMLADVKQMAAAAAAAGQASSSFENQLRPIDRYAMRFMELWDPVIDKAALNHQVNVEEEEWELDRIEKFKEDLEAEIDEDQEPLSYESWDVDFATTAYRQHVEALTQKQLLEEQERQAQEATKELEEKNDNMSHHRKSKKNKKKTGKLKPLKRVRLSPESEVILEETSVDNAPSPELTSDESPHHYCNKRKKITVATEENSNSRSLKKLKKTTKSSFISEALSPRLKEDLNDSDSKSVGRTKSDGRFFIPCMPVKRVIVIKPERLKRKGIWSRDCASDSWSSEEDAVLCGTVHEYGPLWELASDFLHFLPGGSLYRGRYHHPVHCCERYRELFCKHGMSATDNSNSEKVPSGTGKAILRVSEDQAQMLVNVTSELPNNELLLQKHFMAVISSVWRSKCHRDTSCFTNTYSSALHVFSPVKKPGGSCENWPMVNFRPSFNLVRKALADVQAKSTLMVIPPPSRNQEYPCNYLELELDFLKDQHAYDEDIPSVVNVSIQEPEPSKQTPEPVEQSLLSALSCRQAENRLRSLL

SEQ ID NO: 64665 - protein, 58 aa, Zea Mays
MANELVAKLTFVCWDKCVTGSVGSSLSRSETSCLSNCAKRFAEVKMMALQRFTTTGRG

SEQ ID NO: 64666 - protein, 56 aa, Zea Mays
MPWEVRAEPRLANLGIGSLILLGMQCSRRGWPDLDQKWESRQTHAPPRPASITLRF

SEQ ID NO: 64667 - protein, 752 aa, Zea Mays
MEVELPNIHKATSSDHWSLTSSQYPSGKFPKVSVGIMIPKAGSIPRARGGDATPTPTFDRNLSQGTDGLSRPKGDNTSLRVSQEALNHDVSTEGAPKADPVTKVSVSQPDDNTCEQTGTFSFGTRREQGISVEKLETPEFLSSQRKRNTESADKAKPNSEMLRMKLWEILGGTSQNKQAAASPNPDDMETPDQPKGQTVKGPSSGNKEVFTSPFLDNIKTPDPLKRQTVNFTKCKLSLDPIESDSDSPKVDERRPVTRSLGRKKALASSKKQSRSSKKPLSTFQSTPKKKMLDNVFIFNEKCTPKTVDQGETNKATESRGSRSPDSAKKRVNRKQPYLSPTEDEGIKSSETSFAKGYKSHKWPSDIDVPDKSPVEHMGRKSNLKEDRMSKRRLSSAAPFPTAATQENTDSDKEQEQCPENFLTRAFDQASKELSKSAKKPFSTFHSTPKKKMQGNVFTFNEKRAPKTVDQDKMNQTTESPGSESPGSAEERENSKQPSHSPLSPTEDEGTQGSKSSEQSFAKGYKSQKWIPDIKGTDKSPLEYVGRKTKLKEDRMNKRYLSSPTPFATSVSDKDQEQCPENYLTRAFDQLIVVLGRFQTKIKSETSKKSSEILAATRETICQHLEGVEAQMQADVDKLVNAGRSKRKRLESTFEDQQEKLRILHEKFKEEVNKQLLNCRSSLEDFESYHAELKGVADKQKSSHKKLLANAEKTVGAQLNDAETKIAEVQKRARKRMNGLKYVLKELITETVD

SEQ ID NO: 64668 - protein, 403 aa, Zea Mays
MARPRKAKPPPPPPRAAAPSIAEALLMATICMVGLPVEVRVRDGSTYSGVLHTACVDAGYGVVLKKAKKIANGKGDANLSLGSFVDTLVVHPDDLVQVIAKGLSLPVKGVCKPLDSNVVASNGSLKRQNSHANDPKMSKPENISPLMQTEKCTSVGQGKNTSVKKNGQNSGSATSLSSSTGLMGPCFSMNGVSGSATMVPKVDAATSSAIAAPLVASDVKPSQPVSNSATKMIMSSKSTAKEFKLNPCARVFSPSFASSRQVLAAMAPVDTYYISHSAPEVPMGVPVYESKSVPGVSPLTNKVHCSNLSPANYAISPQYVQSDPLHGTPSGFQGWPRPVLLNSYQASMQKFQGNTPVYLAPPIMATGNLPLVVPSPAPLVQPFQAIHPIMVPAASSVVPGKYM

SEQ ID NO: 64669 - protein, 457 aa, Zea Mays
MGLLSNSSTLRFVPSLVVDAKVIHLDYNNIRIFLSLKDVKVMVETTLGKEELKEAVLMCTNRKAAIKKIDTKASQEFLNEHKRLCVEQRSLATLRVLTQFREGARAPNPPGPMASSEIEVVEDATPAATSGGAGRAVAEVARQEGEGEALKDDVYTGAAYGDLEKLHRLVEREGRSVTVQDALGYHALQWAALNNRVATAQYILEHGANVNAIDHTGQTALHWSAVRGHVQVAELLLKEGAKVDATDLYGYQTTHVAAQYGQTTFLCHIVAKWNADHDVPDNDGRSPLHWAAYKGFADTMRLLLFLGAYSTRQDKEGCTPLHWAAIRGNLESCTVLVQAGKKEDLMVQDNTGLTPAQLAADKNHRQVAFFLGNARSIHERGCVGNSYFVKLSKIGLAPLLWCIIIALMVVYIHSIILEDYNTKMTVIFGLFAWLGVFLASVGLVMFYRCSSPTGRIT

SEQ ID NO: 64670 - protein, 186 aa, Zea Mays
MDAGTGFTSQVYELSSYFLHKEWIMEQWERNFYITALAGANNGSSLVIMSRGTQYAQQSYKVSDTFPFKWINKKWKEGFYVTAMATAGSRWAVVMSRNAGFTSQVVELDFLYPSEGIHMRWDNGYRITATAATWDQAAFILSIPRRKPTDETQETLRTSAFPSQHVKDKWSNNLYLASICYGRSVS

SEQ ID NO: 64671 - protein, 249 aa, Zea Mays
MAAATATVTFSPSPPSFLNSHIPRGHRPASTTTIAFARRFRGVKPSPDRSRGKVDQVAHPDDGFGALEAELWRLRRLVELKIHRLGTEADAAYRDLRSAVREVSGDRVVLTFRRSSLRYLTGALLFLLACAIAARLLLGMVLRAWQRRGLRRGLWGEGGRAVVRRRDRSLGGKEVVVAVSSPPKEAARTSRVAEPAKEVWRGYSQAKLPDWWPNVGATVMEPGPEMEKWARMANRLVRVRDVTIVLHIC

SEQ ID NO: 64672 - protein, 1008 aa, Zea Mays
MRLSVRVIEARNLRAMDSNGFSDPYVKLQLGKQRFKTKVIKMNLNPTWDQEFSFLVGDIKDVLKLDVYDEDILQMDDFLGHLRVPLEDVLSADDLSLGTRWYQLLPKGKTNKTVDCGEICVSISLESSGASRSWSEDLGDEITDIQRDYSLSSQNTAPSISFAYRETEICEEDDEYSVTSEIHAEDRSSEVTDRNQAAAEDKPNGNSSADLNGTETSSGETDKSDKLSFVDRVYQIFAKKNGDTMPTSSGSSEALEEVQEEASGCELLVSQIDNVCPETPFSELLRSLELRHEGVDMPVNLQGILVNQSYLASPSDLNNLLFSPDSDFKQTMVELQGCTDFKTEPWRLDNGGESLKRVVTYTTAPSKLVKAVHATEEQSYLKADGKEYAVLLSVSTPDVPCGTYFRTEILFRIMPGPELDSQQQTSHLVISWRMNFLQSTMIKSMIENGARQGLEQNYAQFSDLLSQKIKPIDVEGSGSDKEQVLASLQGGEESDWKIAFLYFCNFGVLSSFFVSLYIILHVLRVNPSAVQGLEFPGLDLPDSLSEIIMGGLLFLQVQRILKNITCFLQAREQKEIFEFDAMDDPPSVMSVHVYDFDGPFDEVTSLGHAEINFVKSNLSELADVWIPLKGNLAQSWQSKLHLRIFLNNSKGTGMVTEYLSKMEKEVGKKMTLRSPRTNTAFQELFSLPAEEFLISSFTCYLKRKLPTQGQVFLSPRTIGFYSSMFGRKTKFYFLWEDIEDIQGIPQSISSWSPSIIITLHKGRGMDTKHGAKSMDNGKLKFCLQSFASFSVANRTIMALWKARSLSTELKVQLAEEQSQINTLQSEDSGVFVGIEDAKSLQMTEVFSSTISTNMASLMEVFAGGSLEMKVMDKVGCQKYSATQWESDKPNEYQRQIHYKFSKKLSPVGGEVTGTQQKSLMPNKKGWVIEEVMELQGVLLGDFFTLHIKYQVEDLAPKQRASNVQVSLGIEWSKSTRHQKRIEKNVLSSSSARLKEMFNLASRELSHAR

SEQ ID NO: 64673 - protein, 457 aa, Zea Mays
MQTTGPASPDKPPVVDPEADDKVEEGARAKEDDAAKVSGEDEDEEEQEGRRGRRQRRRRGGAAGDSSVAMVKRELLARCLTCPLCDRLLRKATTISECLHTFCRNCIYNKINDEDLDHCPVCKIDLGCTPVDKLRADHNIQDVRSKVFPFKRKKVNAEEAESPIMLPVKVKERSISSLVVNTPRVTPAASTGRRTRVVTRKAAALRGLGPIIVDPLKKDNDNSNKQTDNSSLLDSLSKIPQTRRQLLSNGDTSSHPSVKDKADDNKDFDKSELWKPLNCLVEAASKTKPLTSAQSPALKGEFRESPSSEHFSRTKVKVEDNKSDDPEPIVLLRKRGRPGRKRKNPLPETNAASTATAIQARKAFSPIWFSLIASFDQKGNPPLPQIPAHYLRIKDGSIPASSIQKYIMQKLSLVSESEVGNLDPVNLHHLLRHVQMVLVASLFSHAHGKFVCPFPPS

SEQ ID NO: 64674 - protein, 188 aa, Zea Mays
MEVKEVCVQDMLVDLEKGKCLLPIEDNSGMKVNSIAGHASTMRPSSWDDLVALKDDKSHHICCFSSHRQDSSVKSGEPMKAEGEIKVGILDKSTADKENKKWYKKPPRPPRSQTTSPLDPADQKLISALSELAVLKKARIERMKALKKMKNSKPASSIGNLVALIITVILCFFILWQGGSGGYEALSL

SEQ ID NO: 64675 - protein, 510 aa, Zea Mays
MRKSRVNPSRQERSGGMATPRRLIRERAEAAVATLVAVRPHEIPPLMSAAATFFFILSAYFVVLPLRDEGAISLGLDTLPGLFAGSLLLTVVAAPIASLAFSLPSIPKPKALMMIHRFFSISLLAFFVLWYTSTPGQSGPTSQSSEGGSDKPAGWRNQSWFYIVVRISLFLWVALLNLITISSTWARVIDVMDSESGSRLFGFIGAGATLGQLFGSLFAASMAWLGPFLLLFSSLLMELAALSSKGICLDGNHASAELHQTGAGQAPNTMADDEISSLVTSPRQPVQSQESKPELFIMFEGFWLILRSPYLIYISLFLWLSAVVSSVFYFQKVTIVATTISSPTARRRTFALINSFIAVFILAGQLTLTGHILTVAGVTVAICASPFVAASNLVALAVWPTWVAVAVTETIRKVTTYVLTRPGRELLFTVVSQDEKYKAKVCIDVIVQRLGDATAAGIYRWLFSSLEKKTSKVTLFALPLCFLWLVIAFHLGRLQTNLARLQAASAPSYS

SEQ ID NO: 64676 - protein, 391 aa, Zea Mays
MPRQRKGNTCAGNIKCNAATAMWRSFNFDPIQMVISLILQCMLQVRLADPDIVSDPSEYQKIAQSVSELDQVVTTYRQFKDCERQLEATKALEKENEGDPDMLEMIASELEALSNQLAELEEKMKFLLLPSDPLDSRNILLEVRAGAGGDEAGIWAGDLVRMYQRYCERNNWKFKPVSCSEAEMGGYKTYVMEVKGKQVYSKLKFESGVHRVQRVPLTEAMGRVHTSTATVAIMPEADEVDVVIDPKDIELKTARSGGAGGQNVNKVETAVDLIHKPTGIRIFCTEERSQLQNRERAFQLLRAKLYEIKLREQQESLRNQRKLQVGTGARSEKIRTYNYKDNRVTDHRLKMNFELTSFLLGDIESAIQSCATMEQQELLEEMASSVGAVNV

SEQ ID NO: 64677 - protein, 83 aa, Zea Mays
MGDCWCCWFHVCYFRCCKSPRTHCKFRRAMVPDRCRDILVAVGACCFAETIFLHDNCIGLFTSNDRTSQEYTQFSMWNHFHVH

SEQ ID NO: 64678 - protein, 161 aa, Zea Mays
MAMQQHAASASSSSLGLHLLASPSSIREATHTKVFVGGLAWETSSDRLRRFYERFGDILEAVVITDRHSGRSKGYGFVTFREAESASKACEDPTPVIDGRRANCNLASLGRAQHPVPPGRPRSAGSYLGVPVPKAFYLGGYSHHRPFPLGYYQGFPVPQYR

SEQ ID NO: 64679 - protein, 196 aa, Zea Mays
MDNGFMDIPHPPLMNDPFVLVGCSAPSSTVENMGQSTLCMDGLNPAIVSCSHVNGNTQIMNDITARDDGSRLVLGLGPTPNFYSAVSTGSKQAQRLSGQSSTFTDSGMLRLGLHTDGGGAIQCLQGPNGALHSLGIVDEASTSTTVRSMGGYMPSLLFAPRSNPTVNETQVEIPDSLNLTHSTSNSQHIQRHLQFT

SEQ ID NO: 64680 - protein, 602 aa, Zea Mays
MGSSPSKATGEDALVLCKDRMRHIRQAIDSRDALSAAHLSYTQSLRSVGTALRQYAESEISPESSLSISEVDKSPSHSSMASPSPSRAVESVASLGHRASPSITPPSTRIHCMKAAATTPLTFVIDQSTAEFVGRESPVSAFVPPPPPLPPELCTTWDFFDPIDAAGTSSSNNENEVTLNFSRLRDLRESRVAEVVPLKEVEEEIMSRRHTEISDDNTPPEQEREPKQGGTGKPSQLVDTSTKATSEQVAAKLEESEMEKELCAEAEDPSEFITHRAKDFVSSMKDIETRFMRAAEAGNEVSRMLETKKIRLDICAKIPGSPVKLPSARFVSALRVCCNRDVILNQETAQHVSKVVTWKRSVSSLSSSSKSALMTSIMKDDVDDSNSDFVEEFAMVSGSHSSTLDRLHAWERKLYDEIKASENVRKAYDEKCNLLRRQFARGLNAQVIDKTRAVVKDLHSRVSVVIQAVDAISKRIEKIRDEELQPQLVELIQGLIRMWKLMLECHHKQFITITLAYHVKDSTSARQASETGSPLTNRTSRPSTRGSRSASCSRPRTGAGANARSPSLLGRLSPLPYSSSAGTGSPGQNLSLLTSYADPSKT

SEQ ID NO: 64681 - protein, 252 aa, Zea Mays
MPPPVLRLFAAAPPRALGGRARAHRGDGGFARLRLRVRAAAGEAAPAPSRTQMIMDKISAGEGVGGAGGAYSYSALKRLDQIWSSICEAQADSKVPEVVTRVEGLLADSDLGSGSEIFDVIVCGGTLGIFVATALSSKGLRIGIIERNIIKGREQEWNISRKELMEIVEIGILSEAELEQIISSDFNPNRCGFEDKGEIWVENILNLGVSPAKLVENMKERFISSGGAIFEEKSLSSIYVYDDLAESCASLY

SEQ ID NO: 64682 - protein, 775 aa, Zea Mays
MEPKPSSAAHADAPAVEAPRRRGGGGKRKSAGSSFTPSKRQAKERNASFHVPPHLLHSGPLTRAARQSPHKLSGTPSESVPASSAAATGDGVSGGQAVVDAIRPETEETPAPELPLVDEMFEAVRSRGAGVHVVPTFAGWFSWKEIHPVEKQTLPSFFNGKSEKRTPEVYLAVRNSIMMKFHANPQLQLESKDLAELSIGETDARQEILEFLDHWGLINFHPFPPDGHEESKPEETQDNSNDEKASLIEQLFKFESVQSYMTPLPMKEDVRAPPPLPSLIPESVLIQDVVAAAEPSVEYHCNSCSVDCSRKRYHCRTQADFDLCCDCYNEGKFDPGMAKTDFILMDSAGVSGASGTSWTDEETLLLLEGLEIFGGKWAEIAEHVATKTKAQCMLHFLQMQIEDRFHDGKDINQNIPVSTDQATTEKAIAETSEKMEVEDKVEGRGTVDEKASEKTEGNCEETKTENASVVVNKDTQNSDGRDSGASPSTEEPKQSSDEQPVVKENSADVDTSGEKLSNVAIDILKSAFEATGHSPEYEGSFADAGNPVMALAAYLAGLVEDDNTTTSFRSSLKSVSDVSPALQLSSRHCFILEDPPDELKDICASVSKKNRDGDQKQDEDMIQNSIDTEKKEINEKEGKSLSVEKKNNSSMSQNDHQESGIKSVSSDDCSLVEPKTNNAKESGDSTAIGDKSATETTKGNTEQVNDLPSVEVEAPDDSSSKGKDELNKTKDAVATPATVQEQKHSQTLGNGDREGTSSAFFSHKTLYMNYETNKG

SEQ ID NO: 64683 - protein, 102 aa, Zea Mays
MYLYDEYITIMRHLYIQLLNTVRMLISHFQFILTSESTQYMFDAAPISRNSWIGLPACLRQLFSLLVKAFMRSNFSMFLIPKESCSVIVFIVNLVSMWRETT

SEQ ID NO: 64684 - protein, 184 aa, Zea Mays
MPHIGQTTVEVDLLNYGVIEGDESCKHFSELKVLHPWMIKDGMNLTKEQRLEKIESQKLEKYEAKGDKRHDLKDDQSVQEEYINAYYEALRKSWKRKKQKAECSMKARFLSLMLKGNAKLTINTSRMMMKKALNKYSSFLIWTVGTQGLLCNPLSTVALTLALWRFFSKQDDLNPYVVPMAMGI

SEQ ID NO: 64685 - protein, 385 aa, Zea Mays
MPTPPLSDFDSTERDTWRKAAEQPRDWTSSQQASRAVSTGKPTVEIILSLRLRVLCSLSLSPSLGSLYKYHSTSLSQYTNTTQVCFVSVQQEASLGVRHGRREDGVVRRHRSGGSRDGDGYGAEEAAGAAAGVQEQAEAAGGGDAGERGGDAARGAGAGGGVRRGGRGGGVRAPPPRGRVRALRARRRRRRHAAPGRVLRRGHAARAVRGAGAVRDRGAVVVVGVGVRAGVLGVAGRGGRAGDRRDPGGGDDCRGWGGRGGRRVRERPGAPAARRWRGGRGQRRWKGGGNARAGGRGTGWHWHRRRPRGRGAAARAAAARGGSVGPAADARSRSRTGPRSAPFLEAVGSCMASLCLARDALLPGHGDGSLRFWWRCLQTVFSGSP

SEQ ID NO: 64686 - protein, 1016 aa, Zea Mays
MTIATGQQEISAGHPQFIFPTPRPRPDRTPAAPPPASTSPVHRAPEVGAIRRRHISVLFGADWGSAARSSIPPPVFAAARQIPRRDGRVLTLHHATPPSSSPRDCRATIGGAAIAQSTVAACSCDTLTRSAATSISSSSTLLGGDGRKDLCEGERKGRKGDRTGGGARLLTTYSSQPALQYENQKLVQQLEVQKSEMHALERKFKELSDDQCSYDKTLISLNKLWNQLIDDLVLLGVRAGGDLDNLQALDHEELSEESLESCPSEEIFLLRLLKTNNIRDNSDTSLLKFVEEALAFRSSATVTLMKSLQETISSQQARSESLSLALNGQKSNEDVIVALRNHNDCLKEVAENASQAISIINEKHKRYLDEIEAFKSNHSRELQEIKRISGELEESIAELEESQRKLVVLQLQRHGSVMDASGANAVNGGISTHKSSDKSMSWQDLKDAVDAAKTLAGNRLLELHQTQEDNLILSKELGDLEGQLKDEKYVLVSKPYMILNDKLQHLNAEIERYRGLVEVLQNDKDQLMQREKEISAKAESLDSVKQTIITYEKKIEELETQIQILFSEKNDLETKVEETLQDSGKKDFKNEIHVMAAALSNELGMMENQLSRSKDAASEALALREQAESLRSLVAKKIEEHKKISDKYNSQVIEIKSLKALVEELEQEKQELEFIADMYVKESSESRTIADIEESETRARNQAEYLRSNLEEHSLELRVKAANEAEAACQQRLSFAEVELEELRTKVDASERDVVELKEAIRIKEAEGDAYISDIETVGQAYEDMQTQNQHLLQQLTDRDDFNIKLVSDSVKMKQACSSLLSDKLMLEKQLQQVNTSLESSKLKIARGEEQMKTCVAQAIKTSAENRHLTISLERIALELSNTDKELKWLRSSVGSSEKEYEQTQQKISELRALLEHERSERRRLEEQYEEVKNEVMELTSETEETTVRKLEDEIKECKGILKCGVCFDRPKEVVITKCFHLFCSLCIQRNLEIRHRKCPGCGTPFGQNDVREVKI

SEQ ID NO: 64687 - protein, 592 aa, Zea Mays
MEAGPPGRPRLGHHRWSHACAPGNVICKAGWAAPNLWALHRLCPVIYICNIWLVTTTSKLAILLAFMVGILECLMGLLRLGWLIRFISHSVISGFTTASAIVIGLSQIKYFLGYNVTRSSKIIPLIESIIAGADEFSWPPFVMGSIFLAILLIMKNTGKSNKRLHFLRVSGPLTAVVLGTIFVKIFHPPAISVVGEIPQGLPRFSIPQGFEHLMSLVPTAVLITGVAILESVGIAKALAAKNGYELDSNKELFGLGIANICGSFFSAYPATGSFSRSAVNHESGAKTGLSGIIMGIIIGGALLFMTPLFTDIPQCALAAIVISAVTGLVDYEEAIFLWAIDKKDFFLWAITFITTLVFGIEIGVLVGVAFSLAFVIHESANPHIAVLGRLPGTTVYRNTLQYPEAYTYNGIVVVRIDAPIYFANISYIKDRLREYELNLPSSNKGLDVGRVYFVILEMSPVTYIDSSAVQALKDLHQEYKARHIQIAIANPNRQVYLLLSRSGIIDLVGAGWCFVRVHDAVQVCLQHVQNSSSNALKLPVQASGVLTDSVSTPKPEQQHQKQHGLFKDLWKAQDSNADAGGEVQPLLRQNLV

SEQ ID NO: 64688 - protein, 111 aa, Zea Mays
MWLNSQDCNREQCSCSVLPKKKRLVLYNFARCVHENNYSVLTKVSMHEAVEVVHGHLHRRSVSSNTVGRRFQATLNPLTQCNVFYLYLLTVFEAFLDKALVILQVQYGKIN

SEQ ID NO: 64689 - protein, 88 aa, Zea Mays
MTRTSPARGPRVRVWVEEGEQPRRCADGSQGHWGSLPEDCAAENREVDAGGGRGNGGVGLGAEAGRCAWRGKQFTGLRAVVRGGCGGR

SEQ ID NO: 64690 - protein, 790 aa, Zea Mays
MPKIDLPGLGKKSKSSANNPSHLRPLYGESAMRRARILLLPLLLLLAVAGPAAAATAMTADAGIILDLAKSLTNPPPSWTGTDVCGGVSFSGITCDGAGRVTGINLVKLHLSGTLSSSLANLTSLQSLQLQGNVLEGDVPSLARMGSLETLVLDGNAFSALPPDFLEGLPSLLKLSMDNLPLNPWSIPDAIAGCAMLQTFSASNASVSGSLPAVLANLTSLQTLRLSYNNLTGVLPVGLEALGALETLQLNNQKSDGKLSGPIDVVAKLPSLKTLWLQSNLFTGPIPEFDPNSQLEIFNVRDNKLTGPVPPSLSGIASLQDVSLSNNFLQGPKPNFTAKTVDLKSGNGFCREDSGPCDPLVTTLLEVALGFGYPLQLAKWAGNNPCDPWPGISCIKMDVTQIKLPRQNLSGIISPAFASLNRLQRLDLSNNQLTGVIPDALTTLETLKYLDVSNNRLTGQVPEFKQPNIKLMTAGNRFGESGGDSGGGGSNDGSSSSNPTGSHNSKSNVGMIIGILLSVILLVICIGLFLHHRRKKNVDKFSPVPTKSPSGESEMMKIQIVGTNGHSSISGSVPTELYSHSSVDSTNIADLFESHGMQLPMSVLLKATNNFDEDYILGRGGFGVVYKGTLNGKLVAVKRCDSGTMGTKGLQEFMAEIDVLRKVRHRHLVALLGYCTHGNERLLVYEYMSGGTLREHLCDLQQSGYTPLTWTQRMTIALDVARGIEYLHGLAQETFIHRDLKPSNILLDQDLRAKVSDFGLVKLAKDTDKSMMTRVAGTFGYLAPEYASCI

SEQ ID NO: 64691 - protein, 82 aa, Zea Mays
MAPPRSRQRSKHSSSSPFAEAVARVAAGRSEAGALKTGRRERGGAEASGKGGGTERESGAPSRWENLLAGRREREGGGGGDV

SEQ ID NO: 64692 - protein, 661 aa, Zea Mays
MAEAGVARGSGSAGDALFRELWHACAGPLVTVPRQGELVYYFPQGHMEQLEASTDQQLDQHLPLFNLPHKILCKVVNVELRAETDSDEVYAQIMLQPQTEQSEPTSPDPEPPEPERCNIHSFCKTLTASDTSTHGGFSVLRRHAEECLPQLDMTQNPPWQELVAKDLHGNEWHFRHIFRGQPRRHLLTTGWSVFVSSKRLVAGDAFIFLRGENGELRVGVRRLMRQLNNMPSSVISSHSMHLGVLATASHAISTGTLFSVFYKPRTSRSEFVVSVNKYLEAKNHKMSVGMRFKMRFEGDESPERRFSGTIIGMGCMPANSTSPWANSEWRSLKVQWDEPSAILRPDRVSPWEVEPLDRTNPQPPQPPLRNKRARPPASPSIAPELAPVFGLQRTQELYHSSPSSMFSSSLNVGFNPKYEGPTPNTNHLYWTMRETRTESYSASINKAPTEKKQESTTSGCRLFGIEIGSSAVSPVVTVASVGHDPPPPALSVDAESDQLSQPSHANKATDAPAASSDRSPNETESRQARSCTKVIMQGVAVGRAVDLTRLDGYDDLRRKLEEMFDIPGELSASLKKWKVIYTDDEDDMMLVGDDPWSEFCRMVKRIYIYSYEEAKSLTPKAKLPAIGGDTGVKPDPSKLPPESDVPQSDSDNSAPVAADKD

SEQ ID NO: 64693 - protein, 137 aa, Zea Mays
MWCLHAGEKHVIFNSEGSLDKFNKPGKLYTQLVSAQLKIQDIKSQRSALLLEISRIKQILEQEKNIIPGFPAALQQMDMKSLEEEYKALQGDKSGEVEYFQSLDETINGMKGILDPVKCQCGLEYNLKLDGEAMDIS

SEQ ID NO: 64694 - protein, 92 aa, Zea Mays
MVELHGAHLVSHERPDEVNNALMDLIKATGSAMKPEEWSAQPENTSETGALISARPITVTMRTDEGVIVMGFEHIRNIVRIMKPARVAPIDS

SEQ ID NO: 64695 - protein, 414 aa, Zea Mays
MDKATKLLIYGASAHMLLSMMAMVIESRKRKRYSRRVGITYGPMEERDRMRLDYLNTKIWMSDTTYVNMLRLSRSSFFRFCRGFRDRGLLEDTIHMCVEEQVAMFLNTVGHNLRNRLVGTNYGRSGETVSRYFNKVLRAIGELRAELIRPPSLETPSKIAGNPRWDPYFKKMESEGAGEHFVEQADGSGHVVWTSAMSAYMLSNLASLVVEGIRTSTGFKKVHLNMCAKALNDYFKMKLTGEQDHKSDAEFLNKPLENYKEMFIVFGNNMAIGKYAKGSSEALGTEDRKCMAETEIDEGDGNAVPSPIDDIGASSSAPRPRKKARVTGKEEAGLFGAFKDGAERLAMAIEKAGSDDLPPDLLQTLQSIPGFDDTHKAFYFAYLVKNPRLARQFPTLPLTYQISLLARFVSENFP

SEQ ID NO: 64696 - protein, 237 aa, Zea Mays
MNTVASLPLAPRLLIKPSLACFSRKDVGRYGGIKVYAVLREDGAEFARNNNLEALFQVDDPGPRAPVKKFLDVNEALEVVRFDIQYCDWRARQDLLTIMLLHSKVVEVLNPLAREFKSIGTLRKELAELQQELEKAHNQVHLSEARVSSALDKLAHMETLVSAPSTAEPPTSSSLSATASSTARVRAKNKQPRRRLDVSGPVKPYNPSLKNFWYPVAFSAASFRIYGPRRVFSLSCR

SEQ ID NO: 64697 - protein, 440 aa, Zea Mays
MGNMTRSNSPVSRRIVLSFLDFLNSVELAPGVDPEALEVAKDCLESIFSVNSTATGDAIQPGLLFELFASLEANERDQSDSQVEDTFELGDELFAKFYAALDEINFFKTSPAGAEDPGLLSKATQYFDDALLAMQKLGKKRASLVDIAESFKSRGNEFMRSNQHLKAVELYTCAIALNQQNAIYYCNRAAAYTLLNMNNKAIEDCLKSIEIDPHYSKAYSRLGSAYFAMGNYHDALYKGYLKAAELDPSNENVRQNIEVTKKKLAEQRVPPEEQNTHAGQAQGPHPIFTSGGVPFNLFPPGSSPVQEFFAGWSSDVGAPPPGHSISINLNDIFGQANVNASGQGSSQTGNSNNHTPSASFSTGAAVPPPFAFSGSGNEGTQARQASNGLEGEHGEPGIHRDDDVHINLAGPEQAAEALRAVMQMLGPQMGQHEGAPRGPG

SEQ ID NO: 64698 - protein, 51 aa, Zea Mays
MRSMSLGGPPRPNKEAGAMVGIQFNSGGGGVLTTIRSYLKWRGEGVPGTTQ

SEQ ID NO: 64699 - protein, 553 aa, Zea Mays
MASLFGAGRRRSPEDDGEDDRSGRGRTKRFRLSPEEDAASPAEAGPGAATETGWLSGFVYGAKRVISSVLLFSSPEETGSGEDEEEEKDDDDDEEGIHLNEHEATHDTHGAIVPYSEPKLTIEQMVMKETFSRDECDRMVELIKSRVRDSTFPEAHEYVKPEEIPSRNAGITHDFTGTWRSLSRDRNVPESVPLSITEAKKWLEEKRQGLGFKPEDNGPCTLNTDILSSHDDSVSDLGSPVDLAKSYMQSLPPWKSPFLGRQKFNTPPSKYFISSAEVTTKEDYLSSFWTKLEESQRARIGSSGGSADAPKFWNYGSNSRLFENDTSIFSLGTDEKVGDPTKIYNGSGKFAATEPVGGCCLPITPTEDRTDGITEPVDLARNNGNAPQENQVASEILPDKVPEGNDVSSTGITKDTTGHSGDVKAPTSEPHLGETRINSASESIPNDAGPPTQNKKNGSTTKKTLVNGLVDQSNANSGLESSGNDNPSYTNSSSAVPPASTQPVESAAAAVDVDSVEKGPGTTPEQPAKRRAPNVRRGQRRVLRSATREGRAT

SEQ ID NO: 64700 - protein, 500 aa, Zea Mays
MPGGKRRRARNPTAGGPQRSAGAGRRRPVPELPSFVSPASVAAAFSPASGGRSRGRCARRCGAYSDGESSHAVPFSYPSLRSCSAYPERDQAQALEVTIDTAPCADPAASVPMYSYGPAVLGETGLVLSADEEEACDRGLHLGLGFRDGGHDEMELKLKELTEEDVSFKTPKRKQEQRAKANPGFLLIGGVRIYTEDISSSESDRMSSSDVDLEPNSGDGERFENDDGDSDEEDRQGEERDSISDSESLGSESDEDLSTGDSSSVDNEVVADYMEGIGGSDELLSSKWITSMNLGDADTIEQMYTNDNDGFVKKGKEKLEGYALMTASEQYGMKRRNSLEQRKGKGMVCDRDLSSMQVMDQEDMFMVNNVWMPNRSRKGMKTGSSSSQLSQSWPKDDRKSKNYQSRPGEKKQHRKELIAKKRQQRALSRGVDLGQINSKLRKMVVDQVDMLCFHPMHSRDCSQAVLGTTRVTTTRADVTTANAQHPCGCCSRIAQRRPPP

SEQ ID NO: 64701 - protein, 241 aa, Zea Mays
MEDLLGSEIGKNDYDWLLTPPGTPRVPALEGAEKTPSSNILPKRTTTRSSSTTRASRLSISQTENGNSTIPTRPARSNSVSRSSIQSALMNGNNRTSVLNTSISSVTSRPTTPSRRSSTVGTPKHSAPAARPVPARSSTPVNTRPSTPAKTRPSTPTRTRPTAPNSSTDSAAAKTTFTHNARPSTPNSRSRIVPNSSSSATHVISRPSASLSATSRPGSSSACNSLISSSYWSFSFCWTDF

SEQ ID NO: 64702 - protein, 98 aa, Zea Mays
MAKNYRERRLKRVMKIDEGEDDFEADYQAFSKKYDEKDECHYKFMALLPFKNGLPNVSPPTKEKVGLHFAMKGDVSEDVAAEISMWEFYDNLLDNKEN

SEQ ID NO: 64703 - protein, 261 aa, Zea Mays
MPVLQQLSRHELVDADADGEVRCYPRVVVGPTFHRELGVGAETKAPGGEEEGVSMPEFRAMLRRALGLERAAAAPSGDRWDVRRRPRLLIISRRQSRRLLNERAMADMATSLGFDVRVGDPEASTDVARFARLVNSADVMVGVHGDGLTNMVFLPAGAVLVQVVPYGGLEWLARGMFRDPAAGMQVHYLEYVVRAGETTLSEEYGEDDPVIRDPAAVHRKGWDALKAVYLDKQDVRPHLGRLRNTLLQALKLLPHGRQSTD

SEQ ID NO: 64704 - protein, 306 aa, Zea Mays
MASSLLSSPAKPTITTTTKTTPAPRPARSAHVHVLSAARCLRLRLRASSQHPPPPPTPRSRRPDYVPNRIDDPNYVRIFDTTLRDGEQSPGATMTSAQKLVVARQLARLGVDIIEAGFPASSPDDLDAVRSIAIEVGNPAPGPAGEEDAVHVPVICGLSRCNRKDIDAAWEAVRHARRPRIHTFIATSDIHMQHKLRKTPDQVVAIAREMVAYARSLGCTDVEFSPEDAGRSNREFLYHILGEVIKAGATTLNIPDTVGYNLPYEFGKLIADIKANTPGIEKAIISTHCQNDLGLATANTLAEHGS

SEQ ID NO: 64705 - protein, 623 aa, Zea Mays
MRVAAPLAQPHTARRKGSTVSTLPRPELEPLKISLSYLSPSSSRPPHPGSTPCKSAGRSKRGRGGKQIGWRQPVAGSAGTMGGEAEGGERRLGRVLSFGIPDTALGLVMGYVEDPWDRDAISLVCRHWCRVDALSRKHVTVAMAYSTTPERLFGRFPCLESLKLKAKPRAAMFNLISDDWGGSASPWIRQLSATFHSLKKLHLRRMIVSNDDINTLVRAKAHMLVSLKLDRCSGFSTPSIALIARSCRKLETLFLEESMIDEKENDEWIRELATSNSVLETLNFFQTDLRASPEYLTLLVRNCQRLKTLKISECFMPDLVSLFRTAQTLQEFAGGSFEDQGQPVAEDHCQIVQRCPNLETLEVRDVIGDRGLQVVAETCKKLQRLRVERGDDDQGGLEDEQGRISQVGVMAIAQGCPELTYWAIYVSDITNAALEAVGTCSRNLNDFRLVLLDREAHITELPLDNGVRALLRGCTKLRRFAFYVRPGVLSDVGLGYVGEFSKSIRYMLLGNVGESDNGIIQLSKGCPSLQKLELRGCLFSEHALAMAALELKSLRYLWVQGFRSSPTGTDLMAMVRPFWNIEYILPDQDEPCPEYKKQILAYYSLAGRRTDCPPSVTPLYPAV

SEQ ID NO: 64706 - protein, 84 aa, Zea Mays
MVASRHALAARAGAGAGTAGRLASRWVAVLRNNWRSAEGEGTKHEGGGGGGGTTGERIKLAFHALDKGLHGPALSNEGEDGLDM

SEQ ID NO: 64707 - protein, 455 aa, Zea Mays
MADTVTGSSRRSQDDTATLIPHSGNLGGSSRKGVKAARFKDDDEVVEITIVQRDSMAIEDVRVVDDGGSGHGGGFDGLSLVSPSSSRSGKLASKFRQVKNGLKMNNSSNKAPQTQLGKNVRKRLDRSKSGAAVALKGLQFVTAKVGHDGWAAVEKRFNQLQVDGVLLRSRFGKCIGNFSGPIEFVSAYSYLNNTNTSIALDCAGMDGSDEFAMQVFDSLARKRGITKQVLTKDELKDFWDQLSDQGFDNRLRTFFDMVDKNADGRITAEEVKEIISLSASANKLSKLKERADEYTALIMEELDRDNLGYIELEDLEALLLQSPSQAAARSTTHSSKLSKALSMKLASNKGTGPFYHYWQEFMYFLEENWKRIWVMTLWLSICICLFIWKFIQYRNRAVFHIMGYCVTTAKGAAETLKFNMALVLFPVCRNTITWIRSKTKIGAVVPFNDNINFHK

SEQ ID NO: 64708 - protein, 287 aa, Zea Mays
MMMHGNGHGHGRVHPASSSSDFSGEMNQSAVSDPSSSPLYSFHFEKPVPPPPPAGTYVVQVPKDKVFRVPPPENARLFDHYTRRARRRRRGSCSCACLLVGAAVALAAALAGVLACLVLGPKPPAYAVQALAVSGLVNASSSPAALSPGFDATVRADNRNGRLGVRYEGGRGRVSVSYGGALLADGAWPALYQAPRNVTVVVARARGSGVRLSRSVRGQLAAAERLRSVPFDMDVDVPVRLQLGVVRTWAVPLRARCTVAVDRLAADARVVSNSCDVKVRLLSWWRN

SEQ ID NO: 64709 - protein, 2397 aa, Zea Mays
MDLAGMKRRELQALCKRHGLPAGGTNADLVGRLDAVLSGPAVVEEEVAGVPARKGCLKQTGGGATEAKKVTFGAEVGKARRLRSRVIWSPVVAKTRGKSARAGTDSAAEDGISADVGADVPVRRSRRNSFNPAEAEEAGEAVAVDRKPKRKNQENDEGVAVIAQARVTRRSNLEWSATVLPPAVEKKRGRQNAAESDVQKSALVEVTARTTRSRSIVPVVVPPTVVENKRRKTGDPQTTVELTMLSDVPRSDFPATRSLRNKIVHVNNSVVDETHTTRQLENKMRPSTRRHQQVASSPEDKGQKIPATSKSPLLRWSRRNYSEANSANSVNIKLAKDSSTAQPLAHHNSHSEDLEKQPAVKEPIKRSTRKSIALAALEKEKDVIEGKNPEAHVRRSTRKSVVQVKDTKSIVEETQYANSEDVAKQPATKGPARGLRRKSVITELHEKEKSLIAEKNMETDEAILTRKPVIPVKNIKAVGEGIQIGKGKDVDKQFVVKQPTRRSSRKSVLPDMLENNSGLLAPKMNAEMNVRRSTRKSVLPDMHNEKQDHHKMARNENLQSGKYQDGEKQQKVKDSIRQSRRSIATVLLEGQNNDEGKKFKNPTRRTTHKSHALNAVEEVSMDHIEVGEEGLKLRKRSRFLLEISSSANVSWKHQNAQISNEKDNTEGSQQASNCTTSKRRSSKKRRTTAPEEVMPFKVANDDIVIMEETKDTLEYNNESSSKVQEICQVNAAREEFSSGPLLVTVAPSDEICTVQSVAVVIPGSESGDDANQSSDKSKQPQEHSVTQTVDDHLSETRSGKLDQSTCITGLVSDNCVVSEDKTLMSEDREEQSPVSGEQRVSLEANANEPEEKNLANVTSTDLHTKSLQHDIDRIAKETDKDVLSLVFPIEEHEEKYGVSPIAVEKCVCREASACESARKPLTVIFSNNLHTKHLQHDCDVLIKETGEEVLAQENCNDQPVPAQTDQEIKLNDELADPDVLAQENCNDQPVPAQTDLEIKLHDELADPDHEEQSPVSGERRVSLEANANEPEEKNLANVISIDLHTKSLQHDNGRIAEETDKDVLSFVFPIEEHEEKYAVSPIAVEKSFRQEASAIESAGKPLTVIFSNDLHTKHLQHDCDVLIKETGEEVLAQENCNDQPVPAQTDLEIKLNDELADPDVLAQENCNDQPVPANEPEEKNLANVISTDLHTKTLQHDNDRIAEETDKDHEEQSNVFGERRVSLEANANEPEEKNLANVISTDLHTKTLQHDNDRIAEETDKDHEEQSNVSGERRVSLEANANEPEEKNLANVISTDLHTKTLQHDNDRIAEETDKDVSSLVFPIEEHEEKYAVSPIAVEKSVSREASACESAGKPLTVIFSNDLHTKHLQHDCDVLIKETGEDVLAQENCNDQPVPAQTDLEMKLNDELADPEVLAQENCNDQPVLAQTDLETKLNDELADLAMESGCSITERNEGLVAHNLDQEGFLEATPECKQECGLPEETVISSKETGSLLCADQSPIGLESLFSQESIVESVGHCALASATTHTENGFDDSKDCHNKSALENVHVPEPCSHNDTKGGIFKNVDCMHTSQRDDRMEGVPEANTDEEHVLSAFLLDANHLNVVINSEEVVCEGEDSKELLHSEDCKASSEKTDVNDGNVYGISDAVVRCALHAPADDNYEIFLGPNTDVPRQVYNDGCSDVKEDRFASKPWTIDIIEDASVKERSNLKDWQLDSKLEGTEIVESGLYFNKDIGNILHSGSIGEITPSGSGLSKDSSVDYRGEVLDGFSMEASLERSSTRGEQNGCRLDAIENPSITLATSGYKHEGALSEEAVYTKKNYAGTCLSNPRELIMELQSHFSKENINESDPHDSLVFPTAENSADEQLVKVHHGSNLSQLGLTDLLDGPIGCSNTDVLCQCDNHKNQSNEDKVEEVEAVSAAKYIESEVVLLPSQERSNLNNEQLNTKLESPNIMGSCLNCDNDVCNTSDNGSVFVIGKRTPSASGLPEDYPKDSDLQQPVLDSFSVVSSFQDNISGKKTVSGVAGSEILSLSLATPDYKHEDGFSEEAVCRTKNYTGTSSVDPRHLDMEGHSIYSEGGTEKSNLQDNLAFLSAESGKDEPIICHVEKLVDAHASSDTYQGPCQDLGRHEEQESCMSIPMQAKESGGVLRSSHTKGSVTAAQIDLAGDAHLIVSDNAAAKQVFSEEKEETKSISSSDIDILHEKSYSSGHDDHAACAAETQFYHPQKASISDGLHLGPSSLQVESLDALDSDILYVNTGVLEQHHKEGYYEPSVYQITSGICTMSEAEPFEVLETGKDVKTPSKLDEQLNPGLDGDEAEKHSLDCGTDTSPVMSKRTLSSPGSGPCQQYVNESTTSTQSTDNHPNDLPAPRSPEQSACFQNDNDSGSAFVKAAGEEV

SEQ ID NO: 64710 - protein, 209 aa, Zea Mays
MHWSWNRCLHGISRSAPPPATSSRHMGQVVVFLVERPNWLVTWYPVHCASQQGPNKGIGKKKAGLARRKQRSASKRLQAHLGSRRTSSSGGDGVPGSRPHAGARRGICLPLLVASPKAPGLVPSLLAPHRKKKYYWIRVRAHPSSSQMQYLVSLISVEMICISHYLRAWFIRVGTTVTFFCVLDFSLTKLILFESSCFICSEKIIEPIH

SEQ ID NO: 64711 - protein, 103 aa, Zea Mays
MVASRHALAARAGAGAGTAGRLASRWVAVLRNNWRSAEGEGTKHEGGGGGGGTTGERPLLPTRAMTLPAGMDNENPWRIGLSWREGYANFCLIEGLKVWCGID

SEQ ID NO: 64712 - protein, 80 aa, Zea Mays
MALLAYEEPEKSPMFHLLSPEHRQNVAEGLNRAVLAHANLPAYSSLERVVQQATVVRQYLQQEVGKDSYPPFSLKAFLSK

SEQ ID NO: 64713 - protein, 187 aa, Zea Mays
MKEASNILHNCSSRSLVIIDELGRGTSTHDGVAIAYSTLHYLLKEKKCIVIFVTHYPKILDIQREFEGSVGAYHVSYLATRKLLEVTDKQVETSPEANDLGEIIFLYKLVAGASDRSFGLNVALLAQLPSRCIKRASVMAAKLQEELSPREEIKLRRTTDAQTVDGPSESSAEVGNCTEDDMMQRSI

SEQ ID NO: 64714 - protein, 98 aa, Zea Mays
MEDRLIELEAMQKVLLEGVEAYDKLQNDLVTAKERLMKILQSSDRKSTLLEMVERNELNISILTLLDENIASAKTSNQDEAAAFMEDVRSSLVKYITI

SEQ ID NO: 64715 - protein, 1195 aa, Zea Mays
MASPPEREVAALESCFRALSAADAVPAVVDCVLASSASSSPSQLFHALLRSFPPSQREQGLQAQSDRHAAICHAAALRHLLAQLDSPPKVREALRLLLWRVFLPLLQDIIEPTHPAHFDLVIEMMCNAVSDTGCWDLLGATIVSFCIRSSVVAMGLSAADANSILYQSIMEADFPAETLSCLLPLSNSSSVLASLLVDMLERRRTIPTSQEGAADLAALVQNLTWDLAKLVLKMFTHAQEYRSCATRVLLQPVLISLTDVSSVTVSFGAVQHKLSRFGFLECIWNSCISLFPLGPGERLDAYRILSVYFSTLKSGHQAAVLGVGIVQEFDLKNVSEFWDELRRGLVDKDSLVRKQAFYVLTISLSIFTSSSGNDSCQHFSSRSPAALPAQIKANAGETKRERWANKEAKSLGVGEMDQSGENCSNGQDRWKVFLLLYEMLQEYGTHLVEAAWTHHVVRLFECTLQNDYLNHTSCGAFHAQMESWERILYWMAVLWERGFSHENPQVRCLVMQSFLDIAWERYKVCTHIIPRGFVLGPLIRGLNDVVHHKDFGIGGAYSSKTIKDAQRFFRTYTHNLARCDRIHLVWSLASAAKQDSFGRAGLMTLASCVASCTRQSETNDVPCAISGKAVTKCDGCVPTEVRPTDLLDVLWILSERSKQHFNPKYRLKVCEQVIQVATSLINATEIPLNQLLHFIATIPREFTDYIGPLRVVVQKWFFQKEECSPGDTLLSKLIDFSATFVSQKRNEGSNVFDDEDVDAWEAEARRWARTLLLVTEEEEHLKRIFRFLEAYGYKLSEQCPSGDFIPIKFFIIVLSFIEELELRQRKLVCRSNTILRGSDTLNGLVLDDLNKMFTESLLLILENMVAFSKLSCSIFWLDVDNKDLPPSIKGKLGGPSQRRLATSITSSVLQGIWSMRCVSSVASWCNPYNSDDSVSSAFSVLWDFYLNVTHHSTIANEIGAELHLAAYEALAYVLAVLSTASSTQFLDFVEAKQTDQAHKFSLDILVTTFLDNINHLLTEGTLTRSRRAVLMTWKWLCMDSLLSISSCYSDNESQMKRLEPLFSDSTLRCIFLDIIESLENTGENSVLSILRCVRSVLRLLHLNEGNTIFSSLGISYEMMMQLAKSSWILHLNCNKRRVAPIAALLSAVLHPAIFCNLEMHQTNEKGPGPLKWWHSTKILKLNSLKTMKQDLRFPC

SEQ ID NO: 64716 - protein, 58 aa, Zea Mays
MRARSLEFESWQSFWVELVSASTLTTTYKNPLYVLWGYLKCLQPEKHVLVSVYIRCSS

SEQ ID NO: 64717 - protein, 172 aa, Zea Mays
MAGVRLVGVRPSPGRLERWVGSLPDAGSRGGRPTLPIRGVRSYFIRSIPPLGRVERGVRKARTSRPAMGGDLYALDFDGVLCDSCGESSLSAIKAAKVRWPSLFEQVDAAMEEWIVEQMYTLRPVVETGYENLLLVRLLVEIQIHSVRKSSVIFARLQMGLASKKYWRTGQN

SEQ ID NO: 64718 - protein, 69 aa, Zea Mays
MRSRRGTEYVRTHRIIGCPNICRPRSTVVQRRGSTPVTNSLDTDDPRAKGLLVDDPRAPVNSSDPFLHT

SEQ ID NO: 64719 - protein, 103 aa, Zea Mays
MMENLVEDISKEFPAAPQRVKMVFAVHMPTLPALRKEYGELLISCGIVGEALEIFKDLELWDNLIYCYRLLGKVADAVSLINARLSVTPNDPRLWHSVYLSAQ

SEQ ID NO: 64720 - protein, 60 aa, Zea Mays
MTRRSSSTPPRVPASDVLTWRQSLSSRRSAWTTRRHRGDSRGVEKRKGRGEERKEVATIR

SEQ ID NO: 64721 - protein, 852 aa, Zea Mays
MTVILRGQIFLNARALSRIAQGSQIADTNSIVSSQTVSVKSSSLQCLVIILKSLADWEQLRRDSSKQGSIVESHEEDASRRLTTDEMKNQEDGRNQFERAKAHKSTMEAAISEFNRKPSKGIEYLLSNKLVENKASSVAQFLKSNPSLDKVMIGEYLGQHEEFPLAVMHSYVDSMKFIGLKFDAAIRAFLKGFRLPGEAQKIDRIMEKFAERYCADNPELFKNADTAYVLAYAVIMLNTDAHNPMVWPKMSKSDFVRMNTASDAEECVPNELLEEIYDSIVKEEIKMKDDSHDTSKSTKRPETEERGRLVNILNLALPRLKSASDTKAESEKIIKQTQALFKNQGQKKGVFHVAQQVELVRPMLEAVGWPLLATFSVTMEEGDSKPRVVSCMEGFRAGIHLTRVLGMDTMRYAFLTSLVRFTFLHAPKEMRSKNVEALRTLLGLADTDMDALQDTWNAVLECVSRLEYITSNPSISATVMLGSNQISRDSVVQSLKELAGKPAEQIFVNSVKLPSDSIVEFFTALCGVSAEELKQTPARVFSLQKLVEISYYNMARIRLVWARIWSVLAQHFIAAGSHNEEKVAMYAIDSLRQLGMKYLERAELNNFTFQSDILKPFVILMRNTHNSKIRGLIVDCIVQLIKSKVGSIKSGWRCVFMIFTAAADDEDESIVESAFENVEQVILEHFDQVVGDCFMDCVNCLIGFANNKCTPRISLKAIALLRICEDRLAEGFIPGGAIKPIDVVPEANFDVTEHYWFPMLAGLSDLTLDSRPEVRHCALEVLFDLLNERGHKFSSPFWESIFHRVLFPIFDHVRHAGRDGLSSSGDDWLRDTSIHSLQLICNLFNTFYKFAA

SEQ ID NO: 64722 - protein, 557 aa, Zea Mays
MLLKETMGFDPLISILKIRRGSAFNFTQQKTVNLLAALNTVELLLMVGPSGEAGKDANKNANQTALAQKNILDHLLLLGVESQWAPVALRCMRNPNGQALLASTIAPHPNQGDIHEPASDMPFGSVLLQALVSSDVNGDMEACCRASSVLSHIIKDNLQSKDRVLQIQLETSTASLGRTEPVLHRIVTCLSIAASMEGENDQNNQLEEPYIQPFILRLLIIWLVDCSNAVNCLLESAVHLNFIIELASNKRYAACVRGLAAVVLGACILYNASREKGRDAFAVADAISQKIGLTTYFLRFDELRKSLAHPLSEQHHRKELSRSSANSMSDFQEIEEDETNKGDQHPVLSEIFDSQFVNLLTKLEADIRENIMDIFSRTKTATAVLPTELEQKNGEVDEEYIKRLKSFVEKQCNEMQDLLARNAMLAEELLRTGGGTTTDTSQKPSSGRERVQIEALRQELEGAKRQIGALKSEKSQIEAEANNQRNLSVKLESDLKSLSEAYNSIEQANYRLDAEEQTKVEKLSTRLAELGEDVDTLLQGIGDDTAIPDDDDEDDEE

SEQ ID NO: 64723 - protein, 290 aa, Zea Mays
MAMAGAAAAAAGRCLLLSRPSPLRLRLLHAALSTAAPTLGPTSTPAPPPRHELLLERLRLRHLKDASSPGAPRPTSRSSERSSQQGKGKRVEAAESFEELGLGEEVMSALGEMGISKPTEIQCVGVPAVLAGTSVVLGSHTGSGKTLAYLLPLVQLLRRDEAMLGMSMKPRRPRAVVLCPTRELTEQVYRVAKSISHHARFRSTMVSGGTRLRPQEDSLNMPVDMVVGTPGRILDHIKDGNMVYGDIKYLVLDEADTMFDQGFGPDIRKFLAPLKNRAAKPDDQGCAKVD

SEQ ID NO: 64724 - protein, 659 aa, Zea Mays
MASGAARKRRRKSSPPAAAAAARDGRKLLVGEVVEVLSCDQGLRGSWHKAIVIGILENARAVRYTDFIDENGSPLVENVQVSDAIDGKSSMPEELIRGNIRPMCPHQALQVSHASYGLCVDALIESSYWEGVIADHAEGSMERKVLFPDEGDECIIEVDQLRLTQDWDEATGEWKPRGIWSFLQILLSHEERDGLPVSIRQIWFDLRSKPSFKTDAKMWMCGTEDFWERSLADVIAELWSLCDKPTLDGYQVEAVQKDTVETTVLDRLDPFQALSEYISCYRNNRKNALIKKEWAKQHLKSSGWTFLDDRPKNKFYISPDGKRFPSFLGACQACLAAKEANGYQYDHTENLHLDSMSLVHKNACYNQTHMDLALVKNKSNDKWITSPSRSWELVQLDAEFSPQIVSLLASYQDGTTVLQRTIDRTLSVKLKKHLLALGWSIKFKKDEIQENGHHKHTTRYRYESPYGKTYVSIIQVICSLIVGGVKQDDRPSYRTAAKGAHLTVSTGLARLNKRKRRDKTDALEKYIDYMKTDKQNSRRRKLLRSNAQKFLKSAGWNFWLKKKSRNKLELRYGAPHGKSYSSLVAACKGYLENGYQEDSDADIKIANHGSADGSMRPSKLIALSGGLKDSSKIQDLSLSASREDSFVFVGREKYCGTKG

SEQ ID NO: 64725 - protein, 288 aa, Zea Mays
MATHPASPTAGAGGDRSPSGPPPVRLSAAQAVAAIQPTSPRYFFSSLAAASAAASSPHRRIGIAVDLSDESAFAVKWAVQNYLRPGDAVVLLHVRPTSVLYGADWGSIPVSVDDDPDVDIAEGAVRAAAAEEEPEEAKKKREEEFDSFTSTKAQDLAQPLVGAQIPFKIHIVKDHDMKERLCLEAERLGLSAMIMGSRGFGASRRVGKGRLGSVSDYCVHHCVCPVVVVRYPDDAFGDELRTVPENEPVYHAAPEAQKETEGSAGRLGDEGWRKQRPSRHVVSQPALA

SEQ ID NO: 64726 - protein, 400 aa, Zea Mays
MRRTLEKAGPAFIKWGQWAATRPDLFPSDLCVELAKLHSAAPAHGFAYSKAAIEKAFGRQLSEIFESFEENPVASGSIAQIHRATLKHQHPGKHVAVKVRHPNVGESIKRDFLLINLVAKASDMVPGLSWLRLDESVRQFAVFMMSQVDLSREAAHLSRFIYNFRRWRHVSFPKPLYPFVHPSVLVETFENGESVSRFMEEIEGNARMKKDLAHIGTYAFLKMLLEDNFIHADMHPGNILVRLNENKLARRRFFRAKPHIVFLDVGMTAELTRSDRDNLQQFFKAVATRDGRTAAKCTLQLSKNQSCPNPVAFTEELDKTFTFWGTPEGDVFHPVECMHELLDTVRRHKVNIDGNICTVMVTILVLEGWQRKLDPGFDIMQTLKTLLLEKDIKQPIDFFS

SEQ ID NO: 64727 - protein, 1190 aa, Zea Mays
MASWKNTCSYSYTPVSNAVAMLALALLVLAAPAASAVPDASASVHLEALLAFKKAVTADPNGTLTSWTVGSGGGGGGGRYPQHCNWTGVACDGAGHVTSIELVDTGLRGTLTPFLGNISTLQLLDLTSNRFGGGIPPQLGRLDGLEGLVLGANNLTGAIPPELGGLGSLQLLDLSNNTLRGGIPRRLCNCSAMAGLSVFNNDLTGAVPDCIGDLTNLNELVLSLNSLDGELPPSFARLTRLETLDLSGNQFSGPIPPGIGNFSRLNIVHMFENRFSGAIPPEIGRCKNLTTLNVYSNRLTGAIPSELGELASLKVLLLYGNALSSEIPRSLGRCASLVSLQLSMNQLTGSIPAELGELRSLRKLMLHANRLTGEVPASLMDLVNLTYLSFSYNSLSGPLPANIGSLQNLQVLVIQNNSLSGPIPASIANCTSLYNASMGFNEFSGPLPAGLGQLQNLHFLSLADNDKLSGDIPEDLFDCSNLRTLTLAGNSFTGSLSPRVGRLSELSLLQLQGNALSGAIPEEMGNLTKLIALQLGGNGFVGRVPKSISNLSSLQKLTLQQNRLDGALPDEIFGLRQLTVLSVASNRFVGPIPDAVSNLRSLSFLDMSNNALNGTVPAAVGSLDHLLTLDLSHNRLAGAIPSALIAKLSALQMYLNLSNNGFTGPIPTEIGALTMVQSIDLSNNRLSGGVPSTLAGCKNLYSLDLSANNLTGALPAGLFPHLDVLTSLNISGNELDGDIPSNIGALKNIQTLDASRNAFTGALPSALANLTSLRSLNLSWNQFEGPVPDSGVFSNLSMSSLQGNAGLCGWKLLAPCRHGGKKGFSRTGLAVLVVLLVLAVLLLLVLVTILFLGYRRYKKKGGSTGANSFAEDFVVPELRKFTCSELDAATSSFDEGNVIGSSNLSTVYKGVLVEPDGKVVAVKRLNLAQFPAKSDKCFLTELATLSRLRHKNLARVVGYACEPGKIKAVVLEFMDNGDLDGAIHGPGRDAQRWTVPERLRACVSVAHGLAYLHTGYDFPIVHCDVKPSNVLLDSDWEARVSDFGTARMLGVHLTDAAAQSATSSAFRGTIGYMAPEFAYMRTVSAKVDVFSFGVLMMELFTKRRPTGMIEEEGVPLTLQQYVDNAISRGLDGVLDVLDPDLKVVTEGDLSTVADVLSLALSCAASDPADRPDMDSVLSALLKMSKVCGRD

SEQ ID NO: 64728 - protein, 111 aa, Zea Mays
MYPPFWLPRFFADMWVLFPKEEEYIESFKKAGFKDVKLKKDRTEVVPWCLKAWPHHGLLCHRRQERAWRLSLGARPQVGGSQQASESDHLPRFLVGTICASHYVLCLFTCG

SEQ ID NO: 64729 - protein, 312 aa, Zea Mays
MQLKGLQVDEIYSLDLDALNDLQPIYGLIVLYKWRPPEKDERPVIKDAIPNLFFANQIINNACATQAILSVLLNSPGITLSDELKKLKEFAKDLPPELKGLAIVNCESIRMINNSLARSEVSEEQKRPSNGDDVYHFISYVPVDGVLYELDGLKEGPICLEKCPGGVGDAGWLRLAQPVIKGHIDLFSQNDVRCSVMAILKNRKEMCTVELKELKRKRESLLQQTGYPSAIRHVPSVEQSLAEVSAQIEAVTEKMIMEEEKVKTWKTENLRRKHNYVPFLFNFLKILEEKQQLNPLIEKAKAKQKSHCPSPR

SEQ ID NO: 64730 - protein, 509 aa, Zea Mays
MAYPAAPHTSAAFLASFATPLPARRASPPTRRRAVSVAAIATTTTCVFADAPRGIKEEQADSGAQAAAAAAARRDVSPDTVASIILGGGAGTRLFPLTRTRAKPAVPVGGCYRLIDIPMSNCINSKINKIYVLTQFNSQSLNRHIARTYNFGEGVGFSGGSVEVLAATQTAGESGKKWFQGTADAVRQFLWLFEDARLKCIENILILSGDHLYRMDYMDFVQKHVDSGADISVACVPMDESRASDFGLMKADRNGHITDFLEKPKGADLESMQVDMGLFGLSPEFASTYKYMASMGIYVFKADVLRKLLRGHYPTANDFGLEVIPMAAKDYDVQAYLFDGYWEDIGTIKSFFEANLALTDQSPNFYFYDPVKPIFTSPRFLPPTKVLNSIVSHGCFLTECSVEHSVIGIRSRLEPGVQLKDTMMMGADYYQTEAERLSELSVGKVPVGVGENTKIRNCIIDKNARIGKNVVIMNSENVQEADRPAEGYYIRSGITVVLKNAVILNGTKI

SEQ ID NO: 64731 - protein, 159 aa, Zea Mays
MSKAAAAILKEFYLKLRNRSASADGTPITARQLESLVRLAEARARVDLRDEVTEEDAQDVVDIMKESLYDKYVDEHGFVDFTRSGGMSQPKQAKKFLNALNKESELQQKDCFSRTELYTIADKISLQVPDLDTLVEKMNIAGYLIQKRSGMYQLVTAPY

SEQ ID NO: 64732 - protein, 668 aa, Zea Mays
MARKGNQSKSGPNHASPKWKNTTDGDALSTPERGAADSENPSSHVQGRSKGPEGSSEKKGRGSKRNSTNNGISSSGKKQQMDTGCDINSSEEKEIPVRGTKNRRGSQKPSRRGFGRSFFIEQTTSSGLAGNVLEKTRCIACMAASIIRASMIYLVEEGKRFIEKRMPTINTYMAFVNKGHAYVLSKIAYVYPIVRAWMLNAGRVMLLLFTVWLDCNVRGFDSLLRLGTNSLLAVLWCSTLSTFAMIGIKKMLIFMAIAASAFAFIGLGFAILLISVLAVVILWFYGSFWTTTCVMILGGVLFFLKRERITLLVACLYSMYCARCYVGWLGLLLGLNLSFFSSDILVQFLRDNADNKKFNGSSRYSERSSGRQGNIFEEFQPSANSTYQARYARASDRDPGDPSTSGPEKELTSEDEVARLLNCTDHYSALGFRRYENIDVSSLKREYKKKAMLVHPDKNMGNDKAADAFKKLQNAYEILLDSLKRKTYDDELRREDLLNYFRQSVSQKDCKEFHQAKDGDGWVEQSFQPVLFGMLQKPDLPHAYVCAESYIFDVTEWFNCQGMRCPANTHKATFHVNANMAKQSSGKASTSTQRAGKAPSGVNMDGGGLNEEEFFEWFQNAVNSGMFETTFGAQGDPTSPGNGSNAKSSGSSSSNNNSRKKKKGKKQW

SEQ ID NO: 64733 - protein, 1719 aa, Zea Mays
MDPAAGGGRGRDRAGFERACRLPNTVHSEVLPSLPLPTLPRELGFDALRDDEPLAAPDRPDTIMQAANIARVLADTDVSHLGFTAADNVDVDPIRCSWLWREVLKHNPDAFKVKAPSPSSQGPFGGPGYQNQEHEKHFEHFTPNTSKARNESAFPQDEIDSHREHFYNELTSDSIASKKPKIRKRENNNSVSSSAPSIPNTQDVITTFCEVVEDFCGKTEIPDDGDGGDWLSIPLGDVKVLVNEITSVRSKRILHEVPMDTVTRLLDVIDRQIRYSQGLSIDVKENSDVVDAEPLVFSALEASHAALAIMTHHDMPKQLYREELIERIIDFSRHQITDCMAASNPTFRALYKPAENVANDGDDDEDDLENGQVSKRRRTATNLSMRKSSNKLSASVYSAVQKLCLILGFLKELLTTVRLSDGCILQLAKTCFTTFLVDNMQLLQLKAIGVICTVFSSYTQHRSYLVDEILHLLRKLQFSKNAVRTYHLADEDQKQIQMITALLVHLVQFSAIVPNSLKGTVDWTTIVDASGDADYYPIKCHEAATEACCRFWTDVLQRFTAAKSQDMSETKGIIDNLVQDFLMILNLPEYPAAASILEVLCVLLLQNAGLKSKDTNVRCFAIDLLGGIASRLKHDSVICSEEKLWILQDLTDAGSDGSKILKNKCCVCLGGRGINIACNECGRCFHSDCMGAASQDNLERDSVCPLCFCKQQLNVLQTYCQSQIKENGKKTAASTSKKSAKPAEVPAVDIIQQILLSYLQESGPQDDGNLFTRWFYLCIWNKENQHSQEEIIYYLARLKSKEILRDSGNGLAISRDSAKKICLALGQKNSFCRGFDKILALLLASLRENSPVIRAKALRAVSSIVEADPEVLGDKRVQSAVEGRFCDSAISVREAALELVGRHIASHPDVGLKYIEKVAERIKDTGVSVRKRAIKIIRDLCASNPNTDTTHAFVEIISRVNDEESSVQDLVCKTFYELWFEEPTGSHKHLVADGSSVPMEIAKKTEQIVDMLRKMTNHQPLITIIKRNLTLDFLPQSTKAAGINSYMVASIQKRCELICKRLLERILQVEEGAAKEMEIHMLPYIVALQAFCIVDPTLCIPVTDPSKFVVTLQPYLNIQVDSKSAAQLLESIIFVIDAVLPLIRKPTQNVVEELEKDLKHMIVRHSYLTVVHACIKCLCALSESAGRGPGLVENLVNIFYKHLSGANSDSQTLGYILIAKPEFMLQKDMLKLIETALSSEIQGLQNLYEYLRDAESQLTAESTVKPPVRCEINGRSKVPVAAGAGDTNICGGIIQLYWSSILERCLDTNDQVRQSALKIVEVVLRQGLVHPITCVPHLIALEMDPLEGNSKLAHHLLMNMNEKYPLFFESRLGDGLQMSFKFFESIVSNHKMAANIKSNPIAFVKPGISRIYRLIRSNRNSRNKFVHSIVRKFESDSRSRSTVSFLVYCAEVLASLPFTCSDEPLYLIYDINRIIHLKAGGVESNLKRWTSMSQSQNTVDMPTLPGERHVVMQEPGGYYDNVGYAHERVNANPCSTSDVDMAKVQVDVDMAKVQGDCLDAIALQLLLKLKRHLKVVYSLDDARCQSFSLKEPPKSGETFSRQNIPFNVSSTNISLPSCLQDVASVYQDFKTVLHEDSMDFAVFIPSVQIRKRPTPRNTTNPTPRSTTRVRRTAASSVTKARGGARGDDSDDSDDDDWTGGPRVLDFSGGGRVTRQRVQV

SEQ ID NO: 64734 - protein, 1724 aa, Zea Mays
MTPKAPRITRELKPDWRSRGIFSTALLHQSSRLQRALSGDSYITGLLSDLEKALQSGVLIIKLHYAIDFLDLVSRYYPHEVSRAASLVLSGAVSNRSFQPYESHIPYLLHFLVDYNLYGMGHIHVKNFKFRPPLPVDFHPKSSLRRKAQSDNLEINSPTVWISSTVSHSSILGSSAPSHHLGGTNLSFAIRQSSSMLEADSRVEVPPSGILNEKYKMYTSLSQTTEDTKMVQSLVAVWEELERLRLLEETKYADLGRPLREEVLKDFLHGIKYESALSVLFSQEGPHHKVSTIEESERLERCLKSLTDIIGTVTFSQDNYCGNIDVGNSADVQNDKPDASLCSGSLEQNMQIISPERNSEYPVSSSVHQRTLSQLSDKGEKHLDAEALGLLSWLASSQAAEESTDDELTNEVILSPLFANKSIEVAVESAQLDFDSASQQECQDILDSVDPIRAVEEPNIHTSYLDSVKSNSAASLGNSIPQLDGSSDENPKVSQEYDRSKVTRKSVVSASYTSTKKPSKSASKYSGTEHLWGSLPLSSRKKRQHGDADDSCSAMSPQKDLSASKKSTIDKDYHDTIGSTDSESSSFLGVHDSVCHSVRDLMRRRRSFRREQLEFGCSGAATCTMDKESETVNSGGLEFHDFTSDIPNLALTRMAFVQKPPLKDDACSGLESPSDCEQRGSEKSGLADLLPFFNQNMEENKQNESFQDMESTGDVLGVPTHFQNDGSALYLLTHALSPPSAGAVGHWLTQQSSSSIFSGYTNYDGVAADKEEAHSSTLSRNSPTRFTKENSANKMHGDVMGSALSYKESKHLDEWHDFSQISAGNEKDRLTPLSQIGFRDPASIGGGQQLTILSVEVLTESRGELRPDPRFDAINAVSLAIEDDADNTVDVHVFIRGNNVKSHRRNLDGIAGCNINVFPEEKDVLNNLISAICSIDPDILVGWEIQLGSLGFLAERAAYLGIGLLKRISRTPHELNHPPKIPVDNSSQVLSETSSADDIIDDVSENDWSHTHASGIHVGGRIVLNLWRLMRAEVKLNNYSLEAVADEVLRRKIPLIPSRILNRWFATGPGRGRHRCIEYISNRARINLEIMNQMDLVNRTSELARVFGIDFFSVLSRGSQYRVESMLLRLAHTQNYLAISPGNQQVASQPAMECLPLVMEPESAFYPDPVVVLDFQSLYPSMIIAYNLCYSTCLGKVFPSKSDVLGVSSYSADPHTLVDLKNQLLLTPNGVLYVQPEIRKGVLPRLLEEILSTRIMVKQAMKKLSPSQQVLHRIFNARQLALKLIANVTYGYTAAGFSGRMPCAELADSIVQCGRRTLETAISFVNQHPLWKARVVYGDTDSMFVLLKGRSREEAFRIGKEIASSITAMNPDPVTLKFEKVYQPCFLLTKKRYVGYSYESPEQNEPVFDAKGIETVRRDTCPAVAKILERSIRIMFEEQDLTKVRTYLERQWTHILSGKVSILDFIFAKEVRLGTYSARASTLPPAAIVATKAMLSDPRAEPRYAERVPYVVIHGEPGARLADMVIDPYGLLEVGSPYRLNEQYYITKQIIPALQRVFGLLGADLNKWFNEMPRPIRSTLAKRQFAAAHGSFSRDGSFIRLGLNNKTSAKGGRIDTYYMSSHCSICGDMIQGSESFCNNCLKSEAVVATVVAGRTSKLEREIQHLAAICGHCGGADWIVESGVKCISLACPVFYERRKVQRELVVVSESAGEAGYYPFCCAELF

SEQ ID NO: 64735 - protein, 585 aa, Zea Mays
MVMHGGSMEELLPASAGSVIEDSLEKEQNDTSEEEGKYLAVSKEGAENEVLQFQLADDEIREDKDNQTEARKGNTANTLQCDLLDSALGLEEKHGDEDASKSQTSNSDRIGFFIPVMSFMGHNGEEGINSTPTKGHISEVDPSEVSGTTSPKLPSNSEEVHVAEEKLDSSTETPASKVGDAESSEVSQSTGHPSTVEDIQVHQVSKHPGPSDEVEPNQLRGSVGDLPEGSASSATTKIHQSGDTETRESIHTRMGLEDTSDRNILQAQLAESALEPAEPEESLAIEEVLVTTSNEADKESAAVIEAVPALCETTGPKEAAATEKAVKEVDNIVKSLDEFTFEEGESKEMQKKQPQDYVSVDIVDNRLLPHLPHGFSQNSEQYKVEQSPQIICEQGSTHPGQYDEDTSLSLTDIHMGVSFQNLLIQRHHLDFYSPINVIFEAYAAKFDSSSGSFAQRNSKLLKETVNMQPEQADYYVVRNHIVVLWCSSPCTNADEYHAIVVAADFGDIVFNQFLDKVCRLRQVVVDVAPHGVEVTLGMALAAFRAARGVAAKHEAKLFLDWHLENLVYAIAASLTDLSMALWGSV

SEQ ID NO: 64736 - protein, 448 aa, Zea Mays
MLCSLVPVVTPVNGILDSLVPASPVSAVDDLPAELHCRLCKKVMRDAVLTSKCCFDSFCDRCIRDYIITESKCICGVKTLADDLIPNQTLRSTISNMLGTQTISGGSGTTRHRSSSGSNPDPKIQSHTASTREVKQSRDHQLPAASALDDVLQVATEGALVNQPREKLVPSAKILGKDGGNFAQVSAEKTVANAEALKVKDGTESTSKATTVSGAREHNVTRTDQPKKWKKAVLTKNFQPNNVGYGYNVPFDPAYCNPFINGYPWATEPYMYSSMGVPYPGYPMDPYCVNSFTCIPSQALAMQGYATSYQRPETEPMHRGGTAAAPSKRPERSDRPKDTRHQPQSREHERQLGSSHVSESRTRNRTRSSSEGRDRGHSDRASVDHHEDHSTRKRTRDSSPKYGDRQSDRRSSHGSRSMMTPEEDASDDECNFKRRWGRRSSGGVDTRH

SEQ ID NO: 64737 - protein, 766 aa, Zea Mays
MEKPSEKPTDKLMEEPADQIIEKSIELPTQRITETPTDEPAEKINVAPTEEPAGKITETASENTAEGSIKNATEETPERAVEELIEEADESISVSSTVLKEEENTSLVEGSSGDPEEDHLESAATNLQPRSDTCIAREELLNQKDLVKLQAVIRGHLVRKQASESLQCLLAIIKIQGLIRAHQAQHSPGKIQETIVHSSGEKLLRNGFALKLMDNTPTSKSIRIKCDPSESDVTWGWMERWTALIPPITVVHLPEHKENSELMGETVTEQVTEHAQCDEDIVPLDSDLSFPKLVADDVKETVETSDFSALEAPASVPDESPKMEMKHDPESELIETTNADADHVTDQKAENDVDEPFMSLDQQYAQADDASRNPCPLPGKFEPSNEDSGDAYNSEQTLEMEGKRFVARKPCNPAFAAAQLKFEELSTNSTVSRSSSPPHLDGVSKPRMHTPSSQEDYTPKQDGTGIQESSAGHDTKMRIAASECGTEISISSTLDSPDRSEGDGGEIVLEIGALENRNYVTGKADKDSSIVHPGVKDAPEAEAQPQKEVEENGHVPALETEAQPQKEPHTEPEVADLHGQLEKSVTSYATPEGTPMSRTTTIPESHGTPSSEVSVNTKRSRSNKPKSHASKRSLASPGSDSVGRSSTDKFSKESRHAKRESSSSKAAKSDQGDQEPRVSNSNSNPLPSYMQFTESARAKASSPKMSPDVQDSNAARKRHSLPMTNGKHDSSPRMQRSSSSQAPQGVKSSGPSPHSASGGADKRWHI

SEQ ID NO: 64738 - protein, 703 aa, Zea Mays
MLTYPILNDRSIDQWTVTELKDELERRYLPVSGSKDELLKRLFEAMQDEILDGEGKTTVVTSPPEELKGGETPGSIDVSVNQASIEQHVHKGASEVAKQGVGLVISVTEAYDESTFATSEVTQEAVVGTAEVSQRSLDAVAEVESCLVDAAATDEPDGNGQGSASSGDTIVKEGSPRSEGHGNTIEKTPEDGTNKKIAVDDEPSDLTGGDIKLGLDVHSKILKLEDEPAPPHDMLHNHEDSDVVAVAEPEDDTSKKMISDDVPTGLMHTNVELGAKVDCKIEQEEVSTLSDAAALHSYPKEHIVAVAKGLALPRRMLMSGYTSNIDLDRKEESPDINSCEKLNLNRSSGDESMDEDVMERKHADSYIKPEDLRGKTKVTSEHVFKDVSLLDTRAEGSPAHSKEVVTEEKLSTPTEKRKLEDQEVIENNEPIKRQYLWNEDAVNISDQQASKITSTGTQKEVICPAPERSFGRPNTVARRNSPKERIGEVLLHVQNIPPAKTSATTSLRIDRFVRPFTLKAVKELLGKTGSICSFWMDEIKTHCYVTYSSVEEAVATRNAVYDLQWPSNNNNYLIAEFVDPEEVKLKLETPPSQIPPISLSTATAQQTATFQQAMANQTLVPPHVPATSRGLLPTPARFAKVPPTSDPGPARESLPPPPLSLEPARTLDELFKKTQTYPRIYYMPLSEEEVSAKRAAHDKGRRG

SEQ ID NO: 64739 - protein, 400 aa, Zea Mays
MWEPSALDFKSGLEGLLKEKPTKAIFIGTRIGDPNAVGQEQFSPSSPGWPPFMRVNPILDWSYRDVWSFLITCKVKYCSLYDQGYTSIGSIHDTVPNALLSDSSSEKSFRPAYMLTDGRLERAGRTKKINPKVEMNSAASNGINDTEGGRMISRAASIIVVGDEILFGTTEDNLGAALCKKLHAIGWRVSHVAVVRNEIDSVAEEVERCKSTDDMVFIFGGLGPLHSDVSLAGVAKAFGVRLAPDEEFEDYLSQLMGNNYTGDRNEMAQLPEGITELLHHKTLPLPLIKCRNVIALAATNMDELDTEWDCLLGTQESGLMPSKPFVSKHLSTTLSDVQIASVLAKLCLEFSDVYIGCHRISRAGPLVVNLTGKDNQRVDAAAEKLTSSFEGQFSQLNSCK

SEQ ID NO: 64740 - protein, 51 aa, Zea Mays
MTASKKRLWREETVNGRCHNARLEVRGGERAGGHERTLQAAVRLLTEKGKR

SEQ ID NO: 64741 - protein, 449 aa, Zea Mays
MGLAQTKIKGKACGICKNSETETLHLRNICFDWSKDDLAEKLKPFKLENLDRINLIEHPDRKGKNRGYAFLDFRTHVDAVEAFVKLQKIDLYLGTDSRANISFSNTLSQDDEIMEKVKSVFLDGVPPHWDEDKVREIFGKFGEIDSIQLARNMFTAARKDFGFIGFTARQSALDCIKMVNKDGVGEGSGKVPIKASLQRPRHAFKKYSRQGSSSLLGVRRGFVDKSSSGRGHHSDRYRHFSPVRRSYSDNHSRRHSIDVEERHTSVRGYRAYYRRDSPVHAPSYKYGRTHLETRISEEYTEGRYTSKYPKHRHTMHGTMERDANRRIKYGHSYQERAHRTCPGCKLCGQNYNYPNGEEFSAISGCQEAYYQTDHDLIPSTSQVASHCEGSCCKGQQLKPKSYSVMRDYDYINQESTPSSSDHARTRSNLPAPPHHWHVKHSNEHRRYVS

SEQ ID NO: 64742 - protein, 426 aa, Zea Mays
MFYSHTILARKSPLGTVWIAAHLERKIKKPQIDGIDIPTYAESIMFPEVPIALRLSGHLLLGLVRIYSWKVQYLFQDCNRMLTTMRTSFASVQVDLPIDADCAPFESITLPSTLNLDALNLDDAISLMDTPDNHQKTLDQITLPEGEYVMIELDEDARVEQSGPAPSLHMGPTAIEDETSPPFHDGFGANNDPNEEAPIDRPIGNSPVNSNIANLTDGALDPPEKMREAPHEFPHLKLTESILGNDDPMDLDHDSSPFVQNKAITPPVIDETTSAGRQVPGRSISNLRAPNTFDAFADDAPLNFDIQLPEFRLEPSPRPVQENKDNRRPKAQVSNRNRKRGMKFDYKIVLSNDCMRKQIDGAELDELICKRRKLPQTALDVWRFSRTNRQGSFLLEPLLHVIFKKPMRETSLVSVALMLSVAMWLV

SEQ ID NO: 64743 - protein, 1030 aa, Zea Mays
MSSGSAVTGGGAEEAAAVPLGQKLIVHVAENGHTLEFQCGGDTLVEAIQHSIQLHCEIPPADQLLLCGNISLDGANALATYKLPRDDREVFLYNKARLLADSRPPAPESLYIPEPNIPPPPRPQGSPPSDASADPALKALVSYETRFRYHFQVANAVYQSSLAKFELCRRLLREGQVQERALDTAGSNLEHTFRKLSQRYSEFLRCFTQQHRSHVEMLANFERDVQKLRAVRLHPALQSEGRHCLMDLLKENDLRKLADECFCSHKKFEVKVSQLKANFLELKKRVEGLFHAMSSGGCKDVEKLIKEHQGVIGDQKIIMQALSKDVDTSKKLVDDCSSCQLSASLRPHDAVSAVGRIYEVHEKDNLPSIRDFDQRLTKLLEKCKDKKNEMNTLVHVCMQRVKSSQISIKGMMSELVAFQEVMGHQEDFDNLKIVSGLGHAYRACVAEVARRKSYFKLYTGLAGKYAETLAIECQNEKTRREDFHRTWSRYIPDDVMCSMGLFDSPSQCDVKVAPFDLDLLPIDVDDVEKLAPQSILGSFLKSERSQLAKPLLSNSTSGNLNKSEQHSLSADDKMDFQDFLGGYDTIDIAGTSKLEVENARLKAELASAIAILCGAGYGYESIDEGQIDAVLKKAREKTAEALAAKDEFAYQLQSLLTAKQEKCLAYEKRIQDLEERLTNQYMQGHMVSGSKGMSDSLLSAFKSNECNLDLSEGRQPQIRDESSVAMDEVSSTSEQPSKQTEGGDENMTDISGALNLQLIDSAACTNLDAFMTELPRDNEHKIVNINKEGHMLTQLTMADTSDVPIEDPLSNLNSRTDDHHALELRDKELLVSELQNTLDQKSKQLGETEIKLSAMMDEVNSLKKELEQTRGLLDESQMNCAHLENCLHEAREEARTNKCSADRRAVEYDALRSSALRIHGLFERLNNCITAPGVTGFAESLHSLAASLASSVKKDEADTTVQFQQCIKILADKVYLLTRQSAELLERYSAMQAVHGGITKELDEKKELIKNLYNKLQQEKQQREDIIWSV

SEQ ID NO: 64744 - protein, 109 aa, Zea Mays
MDYRPYVSIDGKTTPIVFALVSSACNTDFSWGFCASTGDGHPPAEHHRRSGSRRRSGGQRVEARLGPLDRASTINIRSVDTDSVGNRGIVVRCGRGSRIGVGRLGLKHI

SEQ ID NO: 64745 - protein, 148 aa, Zea Mays
MAAGAGARAKAAGALALALVLALAGANSEGDALSALRRSLRDPGGVLQSWDPTLVNPCTWFHVTCDRDNRVTRLDLGNLNLSGHLVPELGKLEHLQYLELYKNSIQGTIPSELGNLKNLISLDLYKNNISGTIPPSLGKLKSLVFLLW

SEQ ID NO: 64746 - protein, 108 aa, Zea Mays
MKAAAVHSVPPPSAVTLVSVVARRALVPAALRGNARRGAALVASAAPDGQMRRSPGPAVAKLTDVMSRPVQVATPGQRLSEVDDAFFAARQYSGLLPVVDDDGRWSQL

SEQ ID NO: 64747 - protein, 341 aa, Zea Mays
MPLFSMLRIYCAGIWNNVMVMEVPEISPMSEYLSTHDVILSVDGLKITRTDDWIKILNQGTTAKSRDPEFLEGSHRYVATSSTKGYCVPDSWIDASKNLWQIRDKLPCPDELIAFEKVICNVSTILTEKTSIGSDQKEVEGKYCLIAKDVVKLRRCGNGWHMTEDDESSCACFEDEHCLVPVLNPGFSWIEVSYARPYSLRCLQKGGNLLSSHTANSNFGQSPCEGSFVYVGDLSSAARSVRLSRYRPRWALLLFIADIPYILENGLSSLLHASAALAVINCLPVYFLDGEAILETTLSYVAWFTPRLQRRILKVCSVVWTGLLVITFSSICYSTVLHYGV

SEQ ID NO: 64748 - protein, 741 aa, Zea Mays
MVRRANYLVDVAAGTVNVSTDRPVFVAGSERPPQKVMQTAVVGSLGELTYRLDLPGFPGNGWAFSYLAEIEEFLVPETRKFKLYIPGLADVSKPTVDIGENAPGKYRLYEPGFPNISLPFVLSLALRKTNDSSKGPILNALEIYKYMHMELGSPDGPVMATLSLALASSSSSLADVAMEGGDPCLPSPWSWVKCNSEAQPRVVSINLSGKNLTGSIPPQVADLPCLAEIGFANNMLTGPIPDLSGSSNLSIIHLENNQLTGTVPSYFGSLPKLSELYLENNRLSGPIPKALLSRSIIFNYSGNVYLGTAGKQKKKHVIIIISALLGASLLLAAALCCYMLTRKAMNSSSSPQAQEKALPAEQNKLQKYPSTQQLQSIATETAHPYSLCELEEATNKFASRIGSGGFGIVYYGKLSDGKEIAVKVPSNDSYQGKKQFSNEVVLLSRIHHRNLVAFLGYCHEDGRNILVYEFMHNGTLKEQLHRRDKHISWIKRLEIAEDAAKGIEYLHTGCTPSIIHRDIKTSNILLDKHMRAKVSDFGLSKLLAAEGKDSHASTNVRGTMGYLDPQYYVSQQLTEKSDMYSFGIILLELISGCPPISTIAFGDNFRNIGPWAKFYYESGDIEAIIDPSISTAAEYQDVQSVWKIAEAAVRCIDAEPRKRPCMPEVVKEIQDALALERAAAETTTSDRALACPFSPAAASVRSGGTMRSHDMVMDNLLLLDDDDDSTFSGSTVTKLKYPELR

SEQ ID NO: 64749 - protein, 73 aa, Zea Mays
MILFCLELLLPLHNLMIIFQMRPKCSCSSTTFSTSFASLVFASQILAFGPNLLHRFAILLYDNIILFKILPNI

SEQ ID NO: 64750 - protein, 2359 aa, Zea Mays
MEAVGAAETRHGEWSVTRLRSAAHGTAYIESLSLGVGPRGGLGEQGDSVSCLLVLTSTSLVERRPENYEVEILSSILYELLKLFSLELLAIQDMISILSTNTLPPPNTNTHKREHMAVIVRPLSAVSALVRFVEEPQIFAFEFNDGCPIHVYASTSRDNLLATVLDVLETQRQCAIPVLPRLTMSGHRIDPPCGVAHLEMPYHGSVDMESASMHTKHLAAIAKEAVVSSDTVPGAKIRLWRRIREFNACVPYTGVPVNIEVPEVVVLALISLLPTIPHSLPADAPPLLPPSPKAAATIMGFVACLRRLLTSRSVASHVMSFPVAVGRIMGLLRNGSEGVAAEAAGLVAMLIGGGPGDSSILMDARGESHATYMHAKSVLFSQPMYVPILVNRLRPISVSPLLSLSVVEVLEAMLCEPHGETTQHATFVELLRQVAGLRRRLFALFAHPAESVRETISVIMRTIAEEDAIAAEFMRDAALKDGALLRHLLNAFFLPAGEQRDVSRQLVALWADSYQPALDLLSRILPPGLVAYLHTRSDEESQSQYDEAPLSRRQRRILQQRRVRGSKSMSVQEQGVPPNGVEDGEPFRHTSAGTYGVADVHQRHVGPYSSTHSPLPGISIDPSCAVTVPHGFVPEALSENNHQIGEPQLDSHVYSVDSNANGDLVSSSHSDFSVPAQVVVENTPVGSGRLLCNWYGFWRAFSLDHNRADLIWNERTRQELREALQAEVHNLDVEKARTNDIVPGSSVTEDAGGSDNLPRMSWNYAEFLVSYPSLSKEVCVGQYYLRLLLEIGSNYRAHNFPLRDPVAFFRALYHQFLCDADIGLTVDGAVPDELGSSDDWCDIGRLDGFGGGGGSSVRELCSRAMTIVYEQHYKVIGAFDGTPHITVLLDRTDDRVLRHRLLLLLKVLMNDLSNVEACVLVGGCVLAVDLLTVAHETSERTAIPLQSNLIAATAFMEPSKEWMYIDKDGTQVGPLEKDAIRRLWSKKSIDWTTKCWASGMSDWKGLRDIRELRWALSVRVPVLTPTQIGDAALSILHSMTSARSDLDDAGEIVTPTPRVKRILSSPRCLPHVAQVMLTGEPSIVEAAASLLMAIVTRNPKAMIRLYITGAFYFALAYPGSNLLSIAHLFSATHTHQAFHGGEEAALSSSLPLAKRSVLGGLLPESLLYVLERSGPSAFAGAMVSDSDTPEIIWTHKMRAENLICQVLQHLGEFPQKLAQHCHSLYDYAPMPPVTYPNLKDEMWCHRYYLRNLCDEIRFPNWPIVEHVEFLQSLLVMWREELTRRPMDLSEEEVCKILEISLDDLVLGENGSIKQSSDLSLANSGNKIENIDEEKLKRQYRKLAIKYHPDKNPEGREKFVAVQKAYERLQASMQGLQGPQVWRLLLLLKAQRILYKRYGDVLGPFKYAGYPMLLNAVTVDKDDSNFLSFDRTPLLIAASELIWLTCASSSLNGEELIRDGGIPLLATLLSRCMCVVQPTTPANEPAARIVTNIMHTFSVLSQFESGRVEILKFGGLADGIVHCTELEFVPSAVDAALLTAANVLVSSELQNALLRAGFLWYVLPLLLQYDSTAEENETCEAHGVGARVQIAKNLHAVHATQALSKLCGLSGDDILYPDNKPAYNALKALLTPKLADMLRNHPPKELLSNLNSNLESPEIIWNSSTRGELLKFVDQQRASQGPDGSYDLTESHSFTYEALSKELNVGNVYLRVYNNQPDFEISDQEEFCIALLKFIVELVLQWNSINLETIHQHGSVTEASMSGNDEVSDSTIEGKMDNSSGKQSTDGDSEVIINLQSGLTSLQNLLTSNPGLAAVFASKERLIPLFECLALHVPSESTSPQICLSVLSLLTKHASCLEAMVAERMSLILLFQILHCNPPCRDGALAVLYSLASTPELAWAAAKHGGVVYILELMLPLQEEIPVQQRAVAASLLGKLVGQPMHGPRVAITLARFLPDGLVSAIKDGPGEAVVSSLELTTETPELVWTPAMAASLSAQLATMASDLYQEQMKGRVVDWDVPEQASGQHVMKDEPQVGGIYVRLFLKDPKFPLRNPKRFLEGLLDQYVSSVAATHHEAIATDPELPLLLSAALVSLLRVHPVLADHVGYLGYVPKLVAAMAYEGQRETMASGQASSGSQAEPGEHDNSSHSEATVQTPQERVRLSCLRVLHQLASSTTCAEAMASTSAGTPQVIPLLMKAIGWQGGSILALETLKRVVGAGNRARDALVAQGLKVGLVEVLLGILDWRAGGRQGLRNKMKWNESEASIGRVLAVEVLHAFATEGAHCARVREVLNSSDVWSAYKDQKHDLFLPSSAQSSAAGVAGLIESSSRFTYALAAPPSSSLSPPSAPANPSGRQYYQHS

SEQ ID NO: 64751 - protein, 58 aa, Zea Mays
MPLPFSFSYLTCGTKTKTGYIGNENERDKYGNRKPIRSGRVKAEIGREPVFLFDKIIP

SEQ ID NO: 64752 - protein, 183 aa, Zea Mays
MTVTDLFNFVIDQSISDEGVDDYLEKAQQKILENGGAVPNDDEITPTVMVQTLDYVKQCEADIVNMSIMQRSSSGYEPTADKLYDQPLLGFVRTKNTHTEKEQGQPARNLVEVEEDESESCSSSDEDDSWHEDDPKVGPEERKAARKENKKKVKEEKREARKTKIPKAEKKKRKKMAKAKCKR

SEQ ID NO: 64753 - protein, 217 aa, Zea Mays
MYLHSVLTCRSGSALMLALIYSEILKTVRTYGLLDFDAEIFFPNDLNSLPRGYDKQKSKLVDEPHIMTSKSLLVERGPGTLGDNQARSYGNTSAIEMAAAKAAQHRLMRGVWTNARFGDMRRALAACERLILLHHDPHELRDYAALLYHCGYYEDCLHYLSLYQTAKSGKSPTNRLEILEDEAVNTLKARLMLILAEDGWSRCRPVARYWTKNSEPW

SEQ ID NO: 64754 - protein, 1070 aa, Zea Mays
MKFGLTARLKVRDVYDKAKIFQSLQFKDWLENEKQRLSRLRDRASETGRRKELRECVEKLQLLNTPEETERMINEAPEVHVDPQMDPSYESAEEPDYKKAVDWTMHRNGPDLLFPGRKGTKLNSVENHTQNSLDASGHISSLPTEDVDHRLGAGSNINLNNMAPEPASLGVLSNDTEPEKVWHYKDPNGNVQGPFTLLQLSNWASFFPRDLRIWLTFESEENSLLLTEVLPKQQKDFIQPSTVTTSDKSIWAGSGQDRINSNANNSSSPSLSAECYDPTKYLKPLGGTSPSRSLKDSHALHEVQNQVNDSSTILSSAGSYVPTSSHDERVSRDRVDEWNSSQDNGGIWNPTMNHSRKSNAQQHPDGFTGKDQMLTESKCSSHMVSVLTPQQSERDPATSLSTTSRPECKTMCRQEGSSWSSATNAGVHDLQLTIALTKPETCSPTNPVEDRDSSSASAVSCQSGAPACIPQPDPTSTCNSSKIEATMDLHKTCQPDTSNESFGRLPEPQSGSLFSLKTLNLESEHPSSTPKLEGKETSMNQSGSTSVAHENLATKTRVRPPTSKIDSLQPLKERSCPTERDSITQLEHLFEENVVKRNNEVVNPVSDAEGIAVSDVLESLTEQDCEKYSTHGADCEKYSTHGAAPLQNLVPASAEEEQPQCSSPIALSPWGEPSYYQGEAVDSALWGVQDGNDMWSMPSPTPGLQPSSADGKNASCIIEEARADHGDGAFVETLPRQGDEKTEHANSSVSGSGVPEQVKPKASTASGPSLDGSTKALGWQLLGSSLEGSAKASGWKPPALSIEGIANASGSQALYPTQGSTKSSGCQRSSSSPDGSRKASGWQQSSTSPVGSGKAHGWQRSGSFTQGGTKAAGWQPSGSSTDRSAKVDGWQRTSSSPEGNRKASGWHSSGRESSKITYGASENRKSFSSHQATTPTGRHSLARRQGSSDKGAAGWEESLGNTWEASKRQQRNSDKNAGCGEALGSNRTWHPSSGNPSRSSQGNHQHDRHSHGSDSRRGSSNYPRRSDHRHDHGSGGSSRPSSRGQPQRGVCKYYENGHCWKGSKCQYLHR

SEQ ID NO: 64755 - protein, 93 aa, Zea Mays
MVGIGHNFQLNATGWKWKLSTCLGGDGVSQIRNKSKLSLFPGFDLRIGWKAEYVLPEIHGAVGTGEPAFSMNYGRLHASIDRVEAIVTQSDQY

SEQ ID NO: 64756 - protein, 99 aa, Zea Mays
MCLALRLLLQPSWVRFQRRKRGNGAPPRAIFHTSRPLRRRTTTSTLLSYASLGSLWSMSMTKTFTSRQLWNKSRTLNRQADVLARSQPFPGRLELRGCY

SEQ ID NO: 64757 - protein, 282 aa, Zea Mays
MRKITGANIRIFGNEQIPRCAQRNDEMVQVTGSFQSIQDALLHITGRIRDVILPKPHPSGGMPPYPPVGNIPVHQSRQEQPPPHLHPSGGMPPYPMHPFRPDAPMGHFEMGDHRPPPVHSMEYMGADRMPYLYGVEQGGPRPFLEQPSPRTCPPEAPRTNSEVPRNMSDAVPATDFRKGPVAIENQVATPTGTTEVIIPCNYIGFVCGNNGSEIEEIEKMSGASITVHDPKAGDANSKVVICGDPRRNKEGTEPDSCLHILWSVSNIIDDLITVQYHRRLCS

SEQ ID NO: 64758 - protein, 187 aa, Zea Mays
MEAAWVLTNIAASDYTLLVAECGAVPRLVELLGSLNANIRHQAIWCLGNIAADLPSCRGILFDHGALTPLLSQFREGMKIPVLRTAMWALSNLCFGKLPAEVQVKPILEIISQLIHSADEKILADACWTVYYICGDKGDAVQDVLDAGVCPQLVNLLMHASANVLLPVIMALARISAGDDKQVEVAL

SEQ ID NO: 64759 - protein, 992 aa, Zea Mays
MVATTRRALFLSCFHGGSEMSPRLSLRPRYPSMPRRPKGVAAAGGGGNGDLEAAVGTGDDEEEKVAVFSVSGMTCAACAGSVEKAVKRLPGIHDAAVDVLWGRAQENKITEAIEDVGFEAKLIDEEVKEKNILLCRLHIKGMACKYCTSTVEFALQASPGVQRASVALATEEAEIRYDRRIISASQLIQAVEETGFEALLVTAGEDQSRIDLKMDGVLDERLIMILKSSIQALPGVENVKFNSELHKVTVSYNPDHTGPRDLIEVIKAATFGHVNASIYLEADGRDQHRYGEIKQYRQSFLWSLIFTIPVFLTSMVFMYIPWLKDGLEKKVVNMMSIGELLRWILSTPVQFVIGRKFYTGAYKAMCRGSPNMDVLIALGTNTAYLYSVYSVLRAATSGNYMSTDFFETSSMLISFILLGKYLEILAKGKTSEAIAKLMDLAPETATLLVYDYEGNVVGEKEIDSRLIQKNDVIKVVPGGKVASDGFVIWGQSHVNESMITGESQPVAKRKGDTVIGGTVNENGVLHVRATFVGSESALAQIVRLVESAQMAKAPVQKFADHISRVFVPLVILLSMVTWLAWFVAGRLHSYPQSWIPRFMDSFQLALQFGISVMVIACPCALGLATPTAVMVATGVGASHGVLIKGGQALESAQKVDCIVFDKTGTLTIGKPVVVDTRLLKNMVLREFYDYAAAAEVNSEHPLAKAIVEHAKKLRPEGNHMWPEAREFISVTGQGVKAEVSGKSVIVGNKGLMLSSGIGIPLEASEILVEEEGKARTGIIVAVDREVAGVISVSDPTKPNALQVISYLKSMNVESIMVTGDNWGTANAIGREVGIEKIIAEAKPEQKAERVKELQLSGRTVAMVGDGINDSPALVSADVGLAIGAGTDVAIEAADIVLMKSNLEDVVTAIDLSRKAFFRIRMNYVWALGYNVVGIPIAAGVLFPSTGFRLPPWVAGAAMAASSVSVVCWSLLLRYYKAPKIAGTAKEIGITTL

SEQ ID NO: 64760 - protein, 953 aa, Zea Mays
MAIHRSNLSRRFKISRIWHQSEQYRAKSFASSSPTSETTPLKVLTGLLRDAYSLKCLRELHAHLAVAGAIQDTFVVTGLVERYVYFGKAASAALLFAETYRSRPAVYSLNLAVRCFSDHGFHRELLHLYRELCCFGSDNFTFPPVIRACTAVSCLRLGREMHCRVLRTGHGGNVGVQTALLDLYAKAGQIDVSRRVFDCMVLRDLISWNAMVSGYSLNECFREAVEMLQEMQQGGMRPNASTFVGIVGMCGSVGDRDVGDSLHAFALKGGVINDESLTSALITMYAAFDDLSSSRMVFDLHPVKDLVSFNSMISAYMQHHIWKEAFEIFRLMHCVAVRPNLVTVVSVLPSCSDFFGINHGESVHGMIIKLGLAEHVSVASALVSMYSKLGKLDSSLLLFCCCVAPDATTIMNVISGCRYTKDLHMAKSIHAYAVRNKFESYHSVMNALLAMYADCRDISTSHTLFQKMEVRMLISWNTMISGFAEIGDSDTCLILFCQMFHEEVQFDLVTLIGLISSFSVPGDAIVGESVHSLAIKSGCNSDVSLTNALITMYANCGIVEAGQQLFDSCCSRNTITYNALMSGYRKNNISAKILPLFYQMVENDEKPNLVTLLNLLPVCQSQLQGKCIHSYAVRNFTRLETPLFTSAMGMYSRFNNIEYCSKIFSLIGARNLIVWNAFLSACVQCKQADMVVDCFKHMLFLNVRPDAVTMLALISACSQLGNAYFAACIMAVILQKGFSTNILVLNALIDTHSRCGSISLARELFDSSVEKDSVTWGAMINAYSMHGNGEAALDLFSMMIDSGVDPDDITFVSILSACAHNGLVEQGRTLFKSLQADYGITPRMEHYACMVDLLGRTGHLDEAYDVVRSMPFRPSDNLLESLLGACRFHGNYKIGESIGKLLIKSEYGKSRSYVMLSNIYASAGKWSDCEQLRLDMEAKGLRKNVGVSSIGMT

SEQ ID NO: 64761 - protein, 247 aa, Zea Mays
MPHMFCKTLMASDTSMHVGFSVLRRSAEDCFPPLDYSQQRSSQELVAKDLHGTEWRFRHIYRGQPHRHLLTTGWSAFVNKKLVSRDAVLFLRGDNGELRLGVRRAAQLKNGSAFPALYNQCSNLGSLPNVAHAVATKSVFHIYYNPRWLLQYRISPFFYRWGDSMHILAYTCPWPADHPKANEYYPDPRLVAYVVPYAPILSCTDAAKNSLRRKVEILKLKPHWSKAYFYLWDEVIELPVCHFAGVV

SEQ ID NO: 64762 - protein, 386 aa, Zea Mays
MQSTAAMRSGGGGNKRSLLLLLSAWWLLLGSLVAQLPAARGGSGHVVTRMPGFDGPLPFHLETGYVEVDEQLGVQLFYYFVRSEKDDPGEDPLLLWLSGGPGCSGLSGLAYEIGGHSAKLFCMLPQRLVWPFHFDARGYRGGFPTLLYRPETWTKVSNIIFMDSPVGTGFSYATSDEGLKSSDTQAVRQLAIFLRKWLEEHPEFLPNPLYIGGDSYGGMIVPALALQIHTSTELGENPSFNLKGYVTGNPVTDSQFDTDGVVPFLHGMGLIPYEFYENAREMCGGKYSDAASVACAEVTRAIANITSAVNREHVLEPACPDDDDDELFGPKTTMAETDGGTSRRLMLQSADYFLPAGFKCRRASYVLSRVWANDETVQESLGVRKV

SEQ ID NO: 64763 - protein, 433 aa, Zea Mays
MVLVVLEPESPSYARWRDLLLIHRRYALDEHVLFDPTGVAPTAAWVRLDSIVLTWIVGTISVDLHSLLRNLPHARAVWLAIEGQFMGNAEARALRLDAAFRTFIQGDLSVSAYYRKMKTMADSLGDLGCPVEDRILVLNVLRGLGNRYTHLRSLIMRQRPFPTFLQVRDDLALEEITLGAQAVSISGMGSSSSSTALAAFTPTRPPTPSQSALGPRPLGPSMGGGGGGGRRRRDGRGGGARGNAPTPGPQQGAPWPTFHHPWSGHISMWPFQGPGSEARLPAAMFAGAQPGFAFASSSPWTSTPAASSWPTLPATPPSGLVGWDAAALAAFQTPTLTPPMGPEWIADTGATYHTTPTLVYSPLFALLPLSLRPSWWRMTCVFLLHLWVPPALPALFAFPMFLSLLLWSTIFFLFVGLLLIILVLSSLTLLVLL

SEQ ID NO: 64764 - protein, 136 aa, Zea Mays
MAPAKTDDPLSQLLAKIEEGNKETHRRMEAIQGAVGNMEAAVKVVMTEHGDLQKWKPEVEAKVTEISDALKAIQIQMGKMEKKPLGFGSRQEEEGEDGFLKPPPSDSSNLEFRREEGRTQFSHGGAGGSSGVQASS

SEQ ID NO: 64765 - protein, 688 aa, Zea Mays
MKNPDFTADKALAKDFLSNFVGPHGDPKYLNILQDVANRKIRAVQIELDDLFHHKDVDEEFLQRVTENTRRYVGIFAEAMDEIMPEPTEAYTVDEDRDILMTQRVDEGVDGGADGTDPLQRMPPDIKRFFEVYIKTFSKATPLTIRQVKASNIGQLVKISGIVTRCSDVKPLMQVAVYTCEECGFEIYQEVTARVFMPLIECPSQRCKLNKAKGNLILQLRASKFLKFQEVKLQELAEHVPKGHIPRSLTVHLRGELTRKVAPGDVVEMSGIFLPMPYYGFRAMRAGLVADTYLEAMSVTHFKKKYEEYDLKGDEQEQIDRLAEDGDIYSKLARSLAPEIFGHEDVKKALLLLLVGAPHRKLADGMKIRGDLHICMMGDPGVAKSQLLKHIINVAPRGVYTTGRGSSGVGLTAAVQKDPVTNEFVLEGGALVLADMGICAIDEFDKMEESDRTAIHEVMEQQTVSIAKAGITTSLNARTAILAAANPAWGRYDMRRTPAENINLPPALLSRFDLLWLILDRADMETDLEMARHIVHVHQNLESPALGFTPLEPSVLRAYISAARRVIPSVPRELEEYIATAYSSIRQEEAKSNAPTSYTTIRTLLSILRISIALARLRFSETVAQSDVDEALRLMQMSKYSLYSDDRQRSGLDAISDIYSILRDEAARTSSMDVRYAHALNLISRKLI

SEQ ID NO: 64766 - protein, 93 aa, Zea Mays
MALDSFNTAVVSPVYYVMFTILTIVANMIMYKDWASQTATQIATQLCGFVTIVAGTFLLHKTRDMGNPPPPPPDQMCLQEAGECAPRSMTSSS

SEQ ID NO: 64767 - protein, 683 aa, Zea Mays
MDDLEHVILLASDSPAAAAASPSIRAEALAFCARARDESPPSSLLRLCLSGIASSPHAQVHFWCLQSLHDALLRRRLVLPDDLALLRSSLLSLAVSSHAGSPPFLRNKLAQLVALLIRLEYPHVYPSYFIDLLPPAPPQPGPTDMFARVLISLDDDLLSQEYPRNSGEAADAMRVKDSMRAQCVSQIASHWHAAAVTLRTADPAAAAVALDAARRCISWIDVGLVANDVFVPLFFDIAMSPGSASPLAAAAVGCLSGVASKRMDSRAKVGLLRSLLAAQQGLGSPDNGLKMAPLVIAYAAEALECHSRLGPSDADGAAALEMLEEVLPAVFAAAESGNDEDVDSGSVLEFLSGYVSTMKAPSEKQLGHLGRILEVVRVQMSFDPVYRGHLDVLDKIGKEEEDLMAEQRKDLIVLFRSICRVAPAAAQLFISGLIVTALSSAEASVEDVEVALTLFFRLGEAVGEEEIRTGAGLIGQLVPMLLTARFSCHTHRLVALVYLETVTRYMKFMQEHVQYVPHLLGVFLDNRGIHHQNAHVSRRAGYLFMRAVKSLKAKLVPYLDTILQAVGLLIGIEEVSPEKQAQFLTALLNPLCHQVESLVMDAKARGLEESSPMAISLQQIIVALNMVSKGFNERLVMVNRPAIGIMFKKTLDVVLQVLVSFPSVRPLRSKVISFLHRMIEILG

SEQ ID NO: 64768 - protein, 301 aa, Zea Mays
MVAAGDTLLGLYEKERLGLLQYADDESKEERYWETLDADLRYWTRSLRPVQWYPGHIAKTEKELKEQLRLMDVVIEIRDARIPLSTSHPKMDSWLGNRKRIIVLNRKDMISTEDMNAWATYFGNQGIKVVFSNGQLGMGTMKLGRMAKSVASVANTKRKEKGLLPRPVRAGIVGYPNVGKSSLINRLLKRRMCPAAPRPGVTRELKWVRFGTDLELLDSPGILPMRISDQTSAIKLAICDDIGERSYDFADVAAILVQMLIRHPAVGSEAFRRRYKIDVDSECGKTYALTDPLFFIQKMLF

SEQ ID NO: 64769 - protein, 212 aa, Zea Mays
MMLMAYLSYMLAELLDLSGILTVFFCGIVMSHYTWQNVTESSRVTTKHAFATLSFIFETFLFLYVGMDALDIEKWKIVGQTYRHTLSLFLSLHCSTRRSFFWICIFYHVQPGKVYRFEQHHFSLGAGFKSCFCFPTILSIKFDQKTPNGKISFRQQVIVWWAGLMRGVVSIVLAYNKVNLVFGLSGLSFGLELCYCFCFLYPFQNIGHFLLS

SEQ ID NO: 64770 - protein, 424 aa, Zea Mays
MVPDVVSSRDSSESRLHRQGIYKASDVTLSPSAQIGANSVVGSVTSIAGHCKVLNSVIGQGCKIGKNVLINGSFIWDNVIIEDGCKVSNSLVCDGVHLRAGAVVEPGCVLSFKVEVGKNVVVPAHSKVSLLPQPSNEDSDEELEYADTNSGIADSPPFSSMRSNGDQATVPSEEDELGTSETGTCGVVGYIWTSVDSGIMEEWRQSIAPIPKEKLEELQHAVPDDDRSEDESNNPTLPDKDDSSDSLVEDDDHISKFEKEVEETFQRALGGGVNRDNLILEINGLRLAYSLQHADCAGAVFYSVMKSALLAAQSSNDTLLKTTADALGKWKDLLRNYTKTVDEEMEILLKFEEMCQETTKDFSPLFPKILPYLYDTEVVSEDAILRWAEEKEHADESDKVFVKQSEAFIQWLKEAEEEDDEEEE

SEQ ID NO: 64771 - protein, 64 aa, Zea Mays
MTVSTADIPVLHSAEVAHLYPQVVLPICHGVDRTPYTSTKEARQGSTTRTLQRSTSFRKTRYSF

SEQ ID NO: 64772 - protein, 255 aa, Zea Mays
MGEIGMDQLGLAEAAAAVKEEGILDDDEETSPIEQVRLTVPTTDDSSLPVWMFRMWSIGLLSCALMSFLNQFFSYRTEPLVVTQFTVQYPMQFLSLYAIFQHSALLDLDNDTAFFGVFDGHGGKVVAKFCAKYLHREVLRSEAYAAGDLGAAVHRAYFRMDEMMRGQRGWRELQALGDKINQFSGIIEGLIWSPKASDSNDRHDDWAFEEGPHSDFTGPNCGSTACVALIRNKQLVVANAGDSRCVISRNGIQFV

SEQ ID NO: 64773 - protein, 503 aa, Zea Mays
MKWLCRFLKGPKPGEPSRRRPQVAAGEGEGALWHQRPARPKIDPPRNENEELVDRAIAEPLAEAVKPPREKTHRGEDSNDDEDLTRAVQDSLNMNPYTPYNPYPPSQAQPIGHRVCGGCKHEIGRGHYLSCMGIYWHPQCFRCRSCGHLIRETEFTLLGTDSYHKLCYKELHHPKCDVCLQFVRPRVLGKPERSALQTVINCIPTNGSGLIEYRAHPFWGQKYCPSHERDRTPRCCSCEKMEVQPRNTKYMSLGDGRGLCMECLGSAVMDTSECQPLYHSIRDYYEGMDMRLDQQIPVLLVERQALNEAMEGESKGPHHMPETRGLCLSEERTVSSILRRPRIGGNRLLGMRTRPQKLTRRCEVTAILVLYGLPRLLTGSILAHELMHGWLRLKGYRNLNAEVEEGICQVMSYLWLESEILPSSSRHAQPSSSSSSSSYPATSSEKGGISHTGKKLGEFFMHQIANDTSTAYGDGFRTAYAAVNKYGLRQTLSHIRLTGGFPV

SEQ ID NO: 64774 - protein, 321 aa, Zea Mays
MGNTCIGPSAPSDRHSFFNTVSLAVLWRPPAAADRAEPSPTAEPSSSTPCSPPSRAPNPVTISDSEHPPHSTSTALGPAAPPNPNGKPKPKPKVKRVQSAGLLAGSVLKRDSERLKDVYTLGKKLGQGQFGTTYQCVEKATGKHFACKSIAKRKLVTDEDVEDVRREIQIMHHLAGHPNVVSIVGAYEDAVAVHLVMELCAGGELFDRIIQRGHYSEKAAAQLARVIIGVVEACHSLGVMHRDLKPENFLFVNQKEDAPLKAIDFGLSIFFKPALICFAGRGEDLLGQSCKVLDRLFWLFSSLNAVTCKSPACWREKRVRG

SEQ ID NO: 64775 - protein, 212 aa, Zea Mays
MIIYCYSHVLAFPVIHKGLDYLHKGCSLPIVHRDVKTNNILLGQNLQAKIADFGLSKTYLSDTQTHISVTPAGTAGYMDPEYYQTGRLSESSDVFSFGVVLLEVATGESPTLPGQGHINQRVKQKIATGNVGSIADSRLGSAYDISSMWKVIDTAVMCTADSTAQRPTMATVVIQLKESLALEETREKGSSNRVSRGSDVEAMASTLGPFAR

SEQ ID NO: 64776 - protein, 50 aa, Zea Mays
MGKRRGDAQTEKLLHYRSRYYAPPPSCCHCHSLESIIFLARLNSRTKGSD

SEQ ID NO: 64777 - protein, 1505 aa, Zea Mays
MGTPVNIIVGSHVWVEDPNLAWIDGEVISIKNNEVHVQTSNGKKVTTDRSKVFPKDMEAPPGGVDDMTRLSYLHEPGVLQNLATRYELNEIYTYTGSILIAVNPFQRLPHLYDTHMMEQYKGADFGELSPHVFAIADVAYRAMINEGKSNSILVSGESGAGKTETTKMLMRYLAHLGGRSGVEGRTVEQQVLEFVEIQFDKTGRISGAAIRTYLLERSRVCQINSPERNYHCFYFLCAAPPEYTQRYKLSDPRSFHYLNQSSCIEVDGINDAEEYLATRRAMDIVGINEEEQEGIFRVVAAVLHLGNINFAKGTEIDSSVIKDDKSRFHLNIAAELLKCDCQNLEKALITRVIVTPEEVITRTLDPASAVASRDALAKIIYSRLFDWIVEKINVSIGQDPNSKQLIGVLDIYGFESFKVNSFEQLCINYTNEKLQQHFNQHVFKMEQEEYTREEINWSYIEFVDNQDVLDLIEKKGGLIALLDEACMFPRSTHETFAQKLYTTFKNNKRFAKPKLSRTDFTVVHYAGDVTYQADYFLDKNKDYVVAEHQDLLNASSCLFVAGLFPPLPQETAKSSKFSSIGSRFKLQLQSLMETLSSTEPHYIRCVKPNNLLKPAIFENTNVIQQLRCGGVLEAIRISCAGYPTRKTFYEFVNRFGVLAPEVLEGSNDDKIACQKILEKMGLENYQIGKTKVFLRAGQMADLDARRAEVLGRAARIIQRQIRTYIARKQFAELKRSATQLQSFVRGTLARKLYECMRQEAAAVKIQKNMRRHKARESYLQLQAAAITLQTGLRAMSARKEFRFRKETKAAVHIQAQWRRHRDYSHYKNLQGAALTYQCAWRQRLARRELRKLKMAARETGALKEAKDKLEKRVEELTWRLGLEKRLRTDLEEAKAQEIAKLQETLHDMQLQVEESKAMVVKEREAARKAIEEAPPVIKETPVLVEDTEKINSLTTEVEQLKALLLTERQATEAAKREHAESELRNEELIKKFESAEKKIEQLQETVHRLEEKATNMESENKVLRQQAVAISPTSKSLAAYPKSPFQLKTPENGNALNGEVKSSPDITPILPNPKELEAEEKPQKSLNEKQQENQDLLIKCVSQDLGFSSGKPIAACLIYRCLLHWRSFEVERTGVFDRIIQTIGSAIESQDNNDKLAYWLSNSSTLLLLLQRTLKTTGAAGFTPQRRRSSAASFGRVFSGMRASPQSAGRAFMGSRLIGGLGDLRQVEAKYPALLFKQQLTAFLEKIYGMIRDNLKKEISPLLGLCIQAPRTSRASLIKGSRSQANALAQQTLIAHWQSIVKILTNYLNVLKANYVPSVLISKVFTQIFSFINVQLFNSLLLRRECCSFSNGEYVKAGLAELEQWCIYATEEYAGSSWEELKHIRQAVGFLVIHQKPKKTLKEITNDLCPVLSIQQLYRISTMYWDDKYGTHTVSSDVISSMRVMMTEDSNNAVSSSFLLDDDSSIPFSVDDISKSMTEIEVTDVDMPPLIRENSGFTFLHQRKD

SEQ ID NO: 64778 - protein, 758 aa, Zea Mays
MTFLISRALADPNVDVRGRMINAGILIIDRHGKENVPLLFPIFESYLNKRASDEETYDLVREGVVIFTGALAKHLSKDDPKVHSVIEKLLDVLNTPSEAVQRAVSDCLSPLMVSKQEEGQTLVSRLLDRMMKCEKYGERRGAAFGLAGVVKGFGISSLKKYGIAATLQKNLEDRMSAKSREGALLGFECLCEKLGKLFEPYVIQMLPFLLVSFSDQVLAVREAAECAARAMMSQLTGPGVKLVLPSLLKGLEDKAWRTKQSSVQLLGAMAYCAPQQLSQCLPKIVPKLTEVLTDTHPKVQASGQTALQEVGSVIKNPEISALVPILLSALMDPNAHTKHSLDILLQTTFINSIDAPSLALLVPIVHRGLRERGVETKKKAAQIVGNMSSLVTEPKDMIPYISLLLPEVKKVLVDPIPEVRAVAARALGSLISGMGEEIFPDLVPWLLDTLKSDNSNVERSGAAQGLSEVLAALGQDYFDHILPDIIRNCSHQKASVRDGHLTLFRYLPRSLGGVFQNYLQAVLPAILDGLADENESVRDAALSAGHVFVEHYATTSLPLLLPAIEDGIFSDNWRIRQSSVELLGDLLFKVAGTSGKAILEGGSDDEGASTEAQGRAIIEVLGREKRNEVLAAIYMVRSDVSLTVRQAALHVWKTIVANTPRTLKEIMPVLMDTLISSLASSSSERRQVAGRSLGELVRKLGERVLPSIIPILSQGLKDPSASRRQGVCIGLSEVMGSAGKHQLLSFMDELIPTIRTAL

SEQ ID NO: 64779 - protein, 83 aa, Zea Mays
MEPVDLIRRVKEIEQEAYGEHGMATDEDPKQTAAVDLSKRLKDLRAGNDGSSQKALEEWRKRKMERARQRAIEKNGTSSVKTK

SEQ ID NO: 64780 - protein, 359 aa, Zea Mays
MGKYEMGRTLGEGHFGKVRLARDAGTGRSFAIKILDRQRILAMKIDEQIKREIATLKLLKHPNVVRLYEPENVLVDAKGNIKVSDFGLSALPQNQRKDGLLHTTCGSPNYIAPEVLLNKGYDGSVSDVWSCGVILYVMLTGSLPFDDQNMVVLYQKILKGNAHIPKWLSQGAQDLLRKILDPNPITRVDVDGIRAHDWFKQGYAPSAPFNDDEEDINVDEEDSLNMTENGIQDKIAINQINAFQLIGMSSCLDLSGFFEKEDASERKIRFASNYPPAYLFEKIESIVRKMGFQVHKSNGKVFEINESLYVVELKKSSGDCSLYRKLCETLSEDLGTCKSQQFLKQDSIRQEIGRHNSSF

SEQ ID NO: 64781 - protein, 63 aa, Zea Mays
MIVQRAPTVCIGRTPGCTTPQWQPALHNPTPVIGTPYASRAQRLFLLTPLSLATGEFLLASSW

SEQ ID NO: 64782 - protein, 433 aa, Zea Mays
MMKACSHFIELWKQKHETGQWIEVEPEAISTRSEFPPFNASGIVLMGDNMKQNLESGSINGEPNGEDGAKADQKSSQQMGSHAAYPPWAMHPASGAVLYPPYPMQGMPFYPGVNPYYPPYPPVDDPSSGGGNSHGHKSHRKGKRSGKKPSVVVIKNVNVTSKKCGSSESESQSSSEVESADSDNSHSKSRERKHKSSCSKEGRRTTFDPGDEYNKDETSNGHGVEQGNWSAFQNFLLRAEEKTRSSDADLFAGEKEPPSRRKQNVNTADPIILVERDGGNVCEQNKIGFDSANGRTRVIRVMSNDELVMSGEGRIYMDCEMKEIEAGGGRYRRGTGDDYMVYGQGCQIDRHCLLDPLAEAQYKNPVQQDNNRNGVTDESFMIPLRSSSQDNIGAESRTTMDIDVELPSSIHKASDKKAGHQLFYEPDELVPER

SEQ ID NO: 64783 - protein, 355 aa, Zea Mays
MALDAPVERRDEVQIAMGNGNGVAPSQPSRPAGRPTAAAAAAPYADRRLRLNPNADHKPEDYSDVRGEYAPAVYSALERHLPPSLIDADRDVKLHFMRDILARYWPQGERNKVQRHREYRQRILHLYKPLHEELYNMHPSVFFLPTFLEAVRSNTEECFRSIMTEPIPGVYSFAMLQPTFCEMLLEEVENFEKWVHAMKFKIMRPNTMNKYGAVLDDFGLEAMLNQFMEQFIAPISKVLYPEVGGGTLDSHHAFIVEYGKDRDVELGFHVDDSEVTLNVCLGKQFFGGELYFRGIRCENHVNSETQHEVTSHFTSTTFLSTHAWKCMTTHIFLVGLYSTMVDTGMVLELLHLVSE

SEQ ID NO: 64784 - protein, 1144 aa, Zea Mays
MLIERYNTAAGEGTALCGIFSDIHRAWATVDNSFFIWRFDKWDGHCQEHNVDEQAICAVGLARAKPGIFIEAIQYLLVLATPVELILVGVCCSASADGTDPYAELSLQPLPEYMIATDGVTMTCITCTDKGQIFVAGRDGHIYELQYTTGSGWRKRCRKVCLTTGIGSLLSRWVLPNAFKFSTVDPIVDMVMDEERNTIYARTEGMKLQLFDLGVNGDGPLTKITEEKNIVDPRDGPYGGRRSNAPRAARSPRPSIVCISPVSSVESKWLHAVAVLSDGKRLFLTTSGGSGSSVGLNSGLQRPTCLKIVATRPSPPLGVGGGLTFGAVSVAGRALPEDLALKVESAFYSAGALVMSDSSATAMSSLLAVQKDSAAQLSLPSTFGTASRTSRALRETVSALPVEGRMLCASDVLPLPDAAYMMQSLYADVECFTCFRKPSEKACIKLWAKGDLPTQHILPRRRVVVFNTMGLMELIFNRPVDILRKLFDGNTLRSQIEEFFNRFGAGEAAAMCLMLAAKLLYAEDSLISNAVSEKAAEAFEDPGLVGMPQINGTTALSNTRTQAGGFSMGQVVQEAEPLFSGAYEGLCLCSSRLLYPIWELPIMSIRGPSGNNKREDGVIVCRLSAGAMKILESKIHSLETFLRSRRNKRRGLYGYVAGLGDSGSILYKTGPIIGPGGHSNGRSPYNSQIRDMNPVDKSASNKKPRLLYTSAELAAMEVRAMECLRRLLRRSGEALFLLQLICQHNVARLAQTLGNDLCKKFVQLTFHQLVCSEDGDQLAMRLISALMEYYIGPEGRGTVEEISTKLREGCPSYFNESDYKYYLAVECLERASMTNNADERDILARDAFNLLTKIPDSADLSAICKRFENLRFYEAVVRLPLQKAQALDSNADIINGQIDPRHHDTIMLQREQCYRIVMDALCTLKGVGHSRMQSADKSSALATAADPASRSKYIKQIIQLSVQWPDTVFHEHLYRTLIELGLENELLEYGGSDLVSFLQSAGRKHQEEVRAVSSVTPGAAKMHDLGAPISTSQTKYLELLARYYVRKGEHIAAARMLLILAERQCSNSEEAPALDKRYEYLRDAVLQAKSAGIAADLSKNPVDSSTVDLLEGKLVVLRFQIQIKEELELMRLLRLLRIRQKNYH

SEQ ID NO: 64785 - protein, 637 aa, Zea Mays
MIRCKDIVSDNCNITCQLNEASIDSSDHTSNSTGQLTQSIQDAAGSMESDKDQCDANKTDLTISQECTGLEGMNLDESGPDKMDSSHSGIVVHENQLSEQNNDEPAAYNEGYIITHQSTSDMLTLAIPSGTETQPVNDTQMADNPYSCESLLDDQSSGYCTQNSVHEPHLYWTGAVEGSAVSYTPQTLPGALQSQLMPCNKLSEPKDYVPTEQNALSQHLRGMRRRSLFNEKAGISNKGVDKTSDHHPVNSTTPKCKTISGDNSKPLRTPPCALPGPAGSSPAPFEQNIINDDFTQTTDVATAEASSQGSPKKKRHKFDNGDGTSCKRCSCKKSKCLKLYCECFAAGVYCSEPCSCIGCQNNQSHMETVLSTRQQIESRNPLAFAPKVIHTSEPGMDLGDFSNKTPASARHKRGCNCKKSSCLKKYCECFQGGVGCSVSCRCEGCKNAFGKREGASVLGIGEPKQGLEEKYVCVKEEKSEIDKQLVVYQTTDAAPAENVLTTPSMVECRPLACLPPASSKKSSKKPRSSTKLTGHPSRPCNLQAPPKTDVVLSPFENYAEMVLGDSTSDILKGNSSPHTSVKVVSPNKKRISPPRMGIGLSPICRSGRKLILKSIPSFPSLGGDVNNEDPKAKLPAP

SEQ ID NO: 64786 - protein, 180 aa, Zea Mays
MDFIPHVLIVCHFFCLWNFHGQIASSKQLVAIGLFRFVLHETCSSPSSSLPPSKLCSTTYGKELDKVTGQKRRGVINYDTSLCLVYPYISTLKCLLIHLNKASHIYSPQRRPTSIRPHQLQCYHPAPAPQKLPVGPSPLLYMHTADNLEGNVHMILNKPIVPKDKQNELFRFLIDFSFSV

SEQ ID NO: 64787 - protein, 566 aa, Zea Mays
MDVSSFFSPKGNEPGSLWQHIDNLSFSNVFFFAPGLYCAIFRGVLQIGFVTQDDVLFAHLTVKETLTYAALLRLPRTMTQQQKKERAMDIIHELGLERCQDTMIGGSFVRGVSGGERKRVCIGNEILINPSLLFLDEPTSGLDSTTALRIVQLLHDIAEDGKTVITTIHQPSSRLFHKFDKLILLGKGSLLYFGKASEAMPYFQSIGCAPLIAMNPAEFLLDLANGNTTDVSVPSELDDKVHMENHNLENNNSKIDYRPSAQDVHEYLVDAYETRVAFKEKKKLLAPLPISDDLKATITSSKREWGTSWWQQYSILFCRGIKERRHDYLSWMRITQVIATSVILGLLWWHSDPSTLKGLEDQAGLLFFIAVFWGFFPVFTAIFTFPQERAMLNKERAVDMYKLSAYFLARTTSDLPLDLFLPIIFMVIVYFMAGLKATATHFFLSMLTVFLSIIAAQGLGLAIGATLLDIKKATTLASVTVMTFMLAGGFFVKSVPPFISWLRYLSFNYHTYRLLLKVQYDPVPDILTTTRHMDSGGTEVAALVAMVIGYRVLAYLSLRRAKALGS

SEQ ID NO: 64788 - protein, 316 aa, Zea Mays
MQEGSSWRIATRRARSSARARTESSSRPSTPRDMKPNNLLIGADGQLKLADFGLARMFGSPRRNFTHQVFARWYRAPELLFGSKHYGSGVDIWAAGCIFAELLTRRAFLQGSSDIDQLGKIFAALGTPKSSQWPDMVYLPDYVEYQYVAAPPLRTLLPMASDDALDLLSRMLTYDPKARISAQQALEHRYFSSLPAPTRPSQLLRSRWKGDQGNNKMPDLNLQHGPLVLSPPRKLRRVIAHEWMEGMHRADKVDEHPSGMRHTDDMPSQKSSRIPMSVDVGALFGTRPAPRPTLNSADKSRLKRKLDMDPEFGFAE

SEQ ID NO: 64789 - protein, 1122 aa, Zea Mays
MPDNTGLEIGLKGSKGAPMPGTEGRVAKDLKKAPASLEESNASRDEDPGGGPALTGKKRKDRRGSADDNRNVTRRVLRSDAMKLRAEAEAPCGAGVEVSKTDSLERKHCDTTVEAEACKSSVLMEVACNGGEANGLVNLDASDVSEESTRCSDNNMGMPGVPATDFSQDGGLAQGSIAESDDKTVKSDEVSAVTHSEQNDSQAGINSYNADEAQDNKVRHGPCQDEVIDSAITNGANTSTDLTKTSPTSGSESVKQDDSKQENNLVHTEGVILHSGDPKVENHSQIEDTCTETEISLTGNGRCAADNHTDRTGYTKQEERGSPVNETNDISAHDIVFTRRGRKSCEAKQGTCEEESRFEKRVTRSATVRQREVSGSLCKTTTNETALGSRGRKGDIIAHYTRKVSSAVSPKGHHAELGECNTSMENQTVKQKVVDRRDSGATKNDNDANDTKNKESEKTEINLKTQPPVGSVSIVNKTTVGAVSVVGQSISGSAITERNDTDHTDSDGVKYENMTLVQKLLLSVGAKIVASKKRVLEAGPDKTTGRSPIALPSMKKTRNTSSDPEIDQPDKSSGEKLIGNNCDLGNKRVLRERQHQNQTYLSSRSSNQSNQNAIKQTQDQSDDDDISSDTSYRRTRSGRRRGAARLAVPKQEDSSDSEEVVVVKKNRRKRKKSVHKHRAGSKLKHTSGSPPKTGRLGRPPLVKSECGCLPLQPGKGKMNVPEGTGALREEKQKISDQIKAMLLDAGWTIDLRPRNGRNYMDSVYIHPSGKGSYWSVTKAYYVFRADMESEQKESSKDHILSKKSVGSPGKRQVSSSSGCTLTDDILSKLKRVVVNKRTTKVEIQRLRQKKEKKNTTNSTRLHLGNERKKRGGCALLVRGSNKESGSTTDGFVPYEWKRTIFSWLIDLNVLSVNTKLNCLDESHSKVLLEGFVTRDGINCSCCSEVISVPEFVTHAGSEVNKPYRNILVDGLDIDLLHCLINAWNMQSDAERQDFFPVSIEGDDPNDDTCGICGDGGNLICCDGCPSTFHMSCLGLEALPTDYWCCSNCSCKFCHEHSSDDAEDTADVDSSLHTCSQCEEQYHGACSPDIDSIATNLSSQTGNLFCQQSCRLVTLVRLLFFFP

SEQ ID NO: 64790 - protein, 780 aa, Zea Mays
MTLSLAYQSLGVVYGDLSTSPLYVYKAAFAEDIQHTESNEEILGVLSFVFWTLTLVPLLKYVCVVLRADDHGEGGTFALYSLLCRHARAALLPPGRTAAWDEDQFSDGAGGGTNKATAQNGNAVTLGGGAAASVRRLLERHKVLQRVLLVLALVGTCMVIGDGVLTPAISVFSAVSGLELSMAKEHHKYVELPIACIILVCLFALQHYGTHRVGFIFAPVVITWLLCITLIGVYNIIHWEPTVYRALSPYYMYKFLRKTQRGGWMSLGGILLCVTGSEAMFADLGHFNQLSIQIAFTCMVYPALILAYMGQAAYLCKHHIMESDYRIGFYVSVPEKIRWPIMAIGILAAVVGSQAVITGTFSMIKQCASLGCFPRVKIIHTSAKVHGQIYIPEINWIMMILCLAVTIGFRNTKHLGNASGLAIITVMLVTTCLMSLVIVLCWHKSIFLAIGFILFFGTIEALYFSAALIKFREGAWVPIVLALIFILIMCVWHYGTIKKYEFDVQSKVSINWLLGLSPNLGIVRVRGIGLIHTELETGIPAIFSHFVTNLPAFHQVLIFMCIKNVPIPHVRPEERFLVGRIGPKQYRIYRCIVRYGYQDFHKDDVEFEKELVCSVAEFIRSGSSKLNGTAEEVDEEEEQRMAVVRSNSVRMLEEEATVQNTVGVGPSSRASREIQSPSPAPATGVGPKNKKRVRFVLPAASPKPDAGAQEELQELSDAREAGMAFILGRSHVKAKSGSGFLRRLVINFCYDFLRRNSRGPRYAVTVPHASTLEVGMVYFI

SEQ ID NO: 64791 - protein, 248 aa, Zea Mays
MHKWWRSPGPALLAAALAIVVAALRPATEHAAAKGRPPLRFGPGGAFKVALFADLHYGEDAWTDWGPAQDAASDRVMAAVLDAENPDLVVYLGDLVTANNLPVPNASLYWDRAVSAARGRGVPWATVFGNHDDMAFEWPPEWFSPDGVPPLRWPPGPGSGCGFRGTPRTDLMAAETGANRLLSYSSSGPRELWPGVSNYVLQVLSRGRRARGDGHDHDPALLMYFLDSGGGSYTEVVSSAQLRRPSLR

SEQ ID NO: 64792 - protein, 426 aa, Zea Mays
MRRGGGGGGTVWAGGGRGTEGGYRYRRGGISFKSGWDVVNLCLVLFAILCGLLGRGGDGDSSSSATSAYASAKDDRHRLASSAAPAAEPVTVAATTTSSGDWEQEGYDSMSAIYASLSRTTNHAHASGIRRMKSSSSYPELRLGSDGVWALASPDSAWRFYDDAELYRARRPERQERTWDVDPHGRAAAAEVKTIPVDTFVERGRASQSQSQSQPRRTRRRSVERLPEMAEERPLQQQSGGARAPPRLRRWNSEVVDVMLEQEAAPARSRRWDSEVVGAMPEQDAAVAPARLRRWNSESLDSILEQEARVAAARSTRWGSEVMDAMPEQEAAVAPARLRRWNSESLDSILEQEARVAPARSTRWGSEVMDAMPEQEAAVAPARSRRWDSESLDSILEQEARVAAARSRRWDSEVVDVMPEQEAAWM

SEQ ID NO: 64793 - protein, 517 aa, Zea Mays
MITVAAPEAQPQVAAAAAVAAPEETVFRSKLPDIDIPTHLPLHDYCFSRAAEAAGAPCLIAAATGRTYTYAETRLLCRKAAACLHGLGVAQGDRVMLLLQNSVEFVLAFFGASFLGAVTTAANPFCTPQEIHKQFSASGAKVVVTHSAYVAKLRHGAFPRIGTVSGGGVDGNALLTVLTIDGDAADTPEGCLAFWELLTSGDVALCVLPLFHIFSLNSVLLCAMRAGAAVMLMPKFEMGAMLEGIQRWRVTVAAVVPPLVLALAKNPALEKYDLSSIRIVLSGAAPLGKDLVDALRARVPQAVFGQGYGMTEAGPVLSMCPAFAKEPAPAKPGSCGTVVRNAELKVVDPDTGLSLGRNLPGEICIRGPQIMKGYLNDPEATARTIDVHGWLHTGDIGYVDDDDEVFIVDRVKELIKFKGFQVPPAELEALLVAHPSIADAAVVPQKDEAAGEVPVAFVVRAADADIAEDAIKEFISKQVVFYKRLHKVYFTPSIPKSASGKILRRELRAKLAAAATA

SEQ ID NO: 64794 - protein, 2350 aa, Zea Mays
MDFASRHAAAEAATSSAASASAPAAVAEEPEYLARYIVVKHSWRGRYRRVLCIASSCVVTLDPTTLNLTNSYDVGSKFDHAEALTATDEFTLAVRTDARGKFKPMRFSSPLRPGILTELHRLRPVQDSFDFPVLHLRRRTHEWAPFKLKVTPVGVELLEASGYMRWCLEFRDMNSPAIILLGNSYGSKTTEGGGFVLCPLYGRKSKAFMAASGTTNTAIISHLTKTAKLKIGLSLSVDNSQSMKADEFIAKRAMEAVGAAETRHGEWSVTRLRSAAHGTAYIESLSLGVGPRGGLGEQGDSVSCLLVLTSTSLVERRPENYEAVIVRPLSAVSALVRFVEEPQIFAFEFNDGCPIHVYASTSRDNLLATVLDVLETQRQCAIPVLPRLTMSGHRIDPPCGVAHLEMPYHGSVDMESASMHTKHLAAIAKEAVVSSDTVPGAKIRLWRRIREFNACVPYTGVPVNIEVPEVVVLALISLLPTIPHSLPADAPPLLPPSPKAAATIMGFVACLRRLLTSRSVASHVMSFPVAVGRIMGLLRNGSEGVAAEAAGLVAMLIGGGPGDSSILMDARGESHATYMHAKSVLFSQPMYVPILVNRLRPISVSPLLSLSVVEVLEAMLCEPHGETTQHATFVELLRQVAGLRRRLFALFAHPAESVRETISVIMRTIAEEDAIAAEFMRDAALKDGALLRHLLNAFFLPAGEQRDVSRQLVALWADSYQPALDLLSRILPPGLVAYLHTRSDEESQSQYDEAPLSRRQRRILQQRRVRGSKSMSVQEQGVPPNGVEDGEPFRHTSAGTYGVADVHQRHVGPYSSTHSPLPGISIDPSCAVTVPHGFVPEALSENNHQIGEPQLDSHVYSVDSNANGDLVSSSHSDFSVPAQVVVENTPVGSGRLLCNWYGFWRAFSLDHNRADLIWNERTRQELREALQAEVHNLDVEKARTNDIVPGSSVTEDAGGSDNLPRMSWNYAEFLVSYPSLSKEVCVGQYYLRLLLEIGSNYRAHNFPLRDPVAFFRALYHQFLCDADIGLTVDGAVPDELGSSDDWCDIGRLDGFGGGGGSSVRELCSRAMTIVYEQHYKVIGAFDGTPHITVLLDRTDDRVLRHRLLLLLKVLMNDLSNVEACVLVGGCVLAVDLLTVAHETSERTAIPLQSNLIAATAFMEPSKEWMYIDKDGTQVGPLEKDAIRRLWSKKSIDWTTKCWASGMSDWKGLRDIRELRWALSVRVPVLTPTQIGDAALSILHSMTSARSDLDDAGEIVTPTPRVKRILSSPRCLPHVAQVMLTGEPSIVEAAASLLMAIVTRNPKAMIRLYITGAFYFALAYPGSNLLSIAHLFSATHTHQAFHGGEEAALSSSLPLAKRSVLGGLLPESLLYVLERSGPSAFAGAMVSDSDTPEIIWTHKMRAENLICQVLQHLGEFPQKLAQHCHSLYDYAPMPPVTYPNLKDEMWCHRYYLRNLCDEIRFPNWPIVEHVEFLQSLLVMWREELTRRPMDLSEEEVCKILEISLDDLVLGENGSIKQSSDLSLANSGNKIENIDEEKLKRQYRKLAIKYHPDKNPEGREKFVAVQKAYERLQASMQGLQGPQVWRLLLLLKAQRILYKRYGDVLGPFKYAGYPMLLNAVTVDKDDSNFLSFDRTPLLIAASELIWLTCASSSLNGEELIRDGGIPLLATLLSRCMCVVQPTTPANEPAARIVTNIMHTFSVLSQFESGRVEILKFGGLADGIVHCTELEFVPSAVDAALLTAANVLVSSELQNALLRAGFLWYVLPLLLQYDSTAEENETCEAHGVGARVQIAKNLHAVHATQALSKLCGLSGDDILYPDNKPAYNALKALLTPKLADMLRNHPPKELLSNLNSNLESPEIIWNSSTRGELLKFVDQQRASQGPDGSYDLTESHSFTYEALSKELNVGNVYLRVYNNQPDFEISDQEEFCIALLKFIVELVLQWNSINLETIHQHGSVTEASMSGNDEVSDSTIEGKMDNSSGKQSTDGDSEVIINLQSGLTSLQNLLTSNPGLAAVFASKERLIPLFECLALHVPSESTSPQICLSVLSLLTKHASCLEAMVAERMSLILLFQILHCNPPCRDGALAVLYSLASTPELAWAAAKHGGVVYILELMLPLQEEIPVQQRAVAASLLGKLVGQPMHGPRVAITLARFLPDGLVSAIKDGPGEAVVSSLELTTETPELVWTPAMAASLSAQLATMASDLYQEQMKGRVVDWDVPEQASGQHVMKDEPQVGGIYVRLFLKDPKFPLRNPKRFLEGLLDHLLQLWLMRDKGKLWHLGRLPVDRRQNLVNMTIHLTLRPLCRLHKNVSALVVCVFCISLRLAQPVQKLWHQQVQELLRSYHCL

SEQ ID NO: 64795 - protein, 150 aa, Zea Mays
MVGLVGGSTARAEHVVANAGGEAEYVRRMHRHAPTEHQCTSTLVKHIKAPVHLVWELVRRFDQPQRYKPFVRNCVVRGDQLEVGSLRDVNVKTGLPATTSTERLEQLDDDLHILGVKFVGGDHRLQVRAAAARLLRPCKNALFHAPSLLS

SEQ ID NO: 64796 - protein, 859 aa, Zea Mays
MFLLILMLGGGYRSSQILYLWICPMLQKFGTCCPSHEWKNFLERVGCKNEEVLREDEQLEEKLCLWVSYRGQTLTRTVRGMMYYRKALELQAFLDMANNDDLMKGYRAMEVMSEDSPLKTQCKAIADMKFTYVVSCQLYGIQKRSNEPCAHDILRLMTEYPSLRVAYIDEVEAPSKDRIKKIEKVYYSVLVKASVTKPNEPGQSLDQVIYKIKLPGNAILGEGKPENQNHAIIFTRGECLQTIDMNQEHYMEEALKMRNLLQEFEKKHGVRHPSILGVREHIFTGSVSSLAWFMSNQETSFVTIGQRVLANPLRVRFHYGHPDVFDRLFHVTRGGVSKASKIINLSEDIFAGFNSTLREGNVTHHEYMQVGKGRDVGLNQISLFEAKIANGNGEQTLSRDIYRLGHRFDFFRMLSCYYTTIGFYFSTMITVWTVYVFLYGRLYLVLSGLDEALATGKRFVHNTPLQVALASESFVQLGFLMALPMMMEIGLERGFRTALSDFILMQLQLASVFFTFSLGTKTHYYGRTLLHGGAEYRATGRGFVVFHAKFAENYRLYSRSHFVKGLELMILLVVYEIFGQSYRGAITYIFITVSMWFMVGTWLFAPFLFNPSGFEWQKIVDDWTDWHKWISNRGGIGVAPEKSWESWWEKEQEPLRYSGKRGTIVEILLALRFFIYQYGLVYHLNITKKITKDNQSVLVYCFSWVVIFVVLLVMKTVSVGRRRFSAEFQLVFRLIKGLIFITFTAIVVILIAIPGMTVLDIFVCILAFMPTGWGLLLIAQAIRPVIQKIGLWGSIKALARGYEILMGLLLFTPIAFLAWFPFVSEFQTRMLFNQAFSRGLQISRILGGHKKDRGTRSKE

SEQ ID NO: 64797 - protein, 150 aa, Zea Mays
MPPPAPPRPCLHAPPRRRSLARVPAPDPTPPCGPRAHSTPDARACGHPMWTWKVRSTTMEGEIHGHGRRVPFHTWRPWHARAPFPASIDCYFEDGQRRGLQTIPTLLPCVASCYLQHICSWLPVLDLEFSTATSTAVDAEARGLGFCRCW

SEQ ID NO: 64798 - protein, 173 aa, Zea Mays
MQRQAGGRGCFGREREETGSKRAETDLYRHSRTGTDEAAGREMDDERRRRTKREEADGEWRRWAVLVASVWIQALTGTNFDFSAYSSALKSALGVSQEALNYLATASDLGKALGWSSGLALLHMPLHAVLLASAALGLAAYAAQYYCLVFVSPAALAAVPYPLGGSCVMEAWS

SEQ ID NO: 64799 - protein, 461 aa, Zea Mays
MQLAYLHFIYLFIYLLCLCIYKGGYHILASSSCGLASPGRRGLVHIYSFLVRPPFLSWSSPLTITSPPPSPRRRAAIDDWILHSCSQGKDDPRQEEEEEEEEEEEEEEEEEEEDSAAMTGGGEEQGRSLFGVSLTNRPRWQQFMICSSGFFFGYLVNGICEEYVYNRLQFSYGWYFTFVQGFVYLALIRLQGFTVKQMVNPWRTYVRLSAVLMGSNGLTKGSLAFLNYPAQIMFKSTKVLPVMVMGAFIPGLRRKYAFQEYVSAVMLVVGLILFTLADAQTSPNFSMAGVAMVSGALVMDAFLGNLQEAIFKMNPDTTQMEMLFCSTVVGLPFLAVPMVLTGELVTAWTSCSQHLYVYAVLVLEAMATFVGQVSVLSLIALFGAATTAMVTTARKAVTLLLSYLIFTKPLTEQHATGLLLITMGIVIKLLPENKERRPRRLPKNDDDDKPRESREAGEETA

SEQ ID NO: 64800 - protein, 282 aa, Zea Mays
MRRPWRHSGPGSAVAARHGAADLCLREVGDLLPRRFARRAAGSEDLVMRLQIHRKLDRHTGCVNTVGFNEVGDTLISGSDDQKVMLWDWDTGTVKLEFHSGHGGNVFQARFMPCSDDRTIVTCAADGEVRLAKIQDAGDVSTTLLGEHEGRAHNLAIEPGSPYIFYSCGEEGFVQHFDLRTNTASKLFLCRNSTKSVYSSLVHLNALAIDPRNPNLFVVGGSDAYARVYDIRKCKWDGSSDFSHASDCYCPPHLVDNKSVGITGIAFSHLRLEQLKGANQQC

SEQ ID NO: 64801 - protein, 374 aa, Zea Mays
MWRGSKWKCLMVRWDDDVDFRQPNRISPWEIELTSSVSGSHMSAPNAKRLKPCLPHVNPDYLVPNGSGRPDFAESAQFHKVLQGQELLGYRTHDNAAVATSQPCEATNMQYIDERSCSNDASNIIPGVPRIGVRTPLGSPRFSYRCSGFGESPRFQKVLQGQEVFHPYRGTLVDASLSNSGFHQQDGSHVPTQASKWHAQLHGCAFRGQQAPAVPSQSSSPPSVLMFQRGDPKMSPFEFGHFHVNKKEDRRAMFVHAGGIGGTEQTTMLQAHHVSGGTGNRDVTVEKSHPAVAAASDNREVSKNSCKIFGISLTEKVPAMKEKGCGDINTNYPSPFLSLKQQVPKSLGNSCATVHEQRPVVARVIDVSTVDMMI

SEQ ID NO: 64802 - protein, 338 aa, Zea Mays
MLDELAQKELQKINMYKAPRDKLACILNCCKVINNLLLNASIVSNETPPGADEFLPVLIYVTIKLHSNLLYIQRYRRQTRLVSEAQYFFTNILSAESFIWNIDGESLSMNELDFQRRMDSARERMLGLSADSEYQDNQANPDVQDRTSQSLGANRNSDASLSLKDHVQGSGQDMRRDSDVTVSGKQAEQVQSISELEKKGTAELLNEDDLNKKFQEYPFLFARAGDLTIADVESLLNSYKHLVLRYVALAQGMGVSPETTLTQNGQTSDLVVSEEPEILNSVVKDNENSAIINKNVDDVISLNHHSEAVDTEASEQMNQRTAVDSSDDLEALGRPENA

SEQ ID NO: 64803 - protein, 403 aa, Zea Mays
MEELLLKKKTINTGDSLEIHSQKVEKLKVLATSLANSSSKAEKRILDHRRQKEEALNFRAKKENEVIAVEKDLTAEISELEKQKDELEAQLKKVNISLNAAICRLKQTREERDQFHEANNQMIFTLQAKNDLSKSIDSCNMEASVVKTWVNFLEDTWQLQLSYNEQKETKTNDELERCTSSFLKLTKHHLSYFKEVLSPSIERIRTYVDNLAVLNSREESIEHEGDDEISVQTSPQKSLEEEYLETEKKIVIAFSIVDRMKKMFYSEQAANSRQDDAEVRTLFSEIEKLKEVFESVERPTLDIEVRKAKDPMKDKSGSNRSAKDKSESSHSPVQVPSSPKDVPVESPKSPVKPEQTMDPDSEFAKLELEFGKVNRDHEEIGGWDFDELEEELRADLSKSTNPK

SEQ ID NO: 64804 - protein, 825 aa, Zea Mays
MQAVSQEPPPVPDFGQNFCPPIYPFGNQLLDFAAGVPLFSLYCLQTTPSPSPPKFASKTVITCQSIMVTLQEQSCLRIASFLADGVVPNRGAILPESSINSLTFSLKEFDLSVPLDTDEIARCSGTKNTNPQSSFSGARLHVEDLYFCQSPSTKCPLLNLDRDPACFLLWEYQPVDASQMKWATWSSHLSLSLETSSTSNGQRAVSDSNLWKCIELDDIRFEVAMVTADGGPLLDVPPPEGVVRIGVAFQQFKSNTSVEQLFFVLGFYTYFGQVAERISKVSNANKSESVKSSADKSENKLPSDTAVSLTMNNLQLNFLESLSASDVHMPLVQFGGGDLFLKVSHRTLGGAFAVTTNLMWTTVSVNCLEGESAIVCEHGTAVTGEHSILVHGNGHPKMRAVFWVDHRSKHQVKEPQFLDINITHVMPYDIQDMECHSLNVSAKVSGVRLGGGISYTESLLHRFGILGPDGGPGEGLLRGLKDLSSGPLAKLFKSSHLTEKEDERSKIDDHNSKFDLGVPDDLDVSIELRNWLFALEGTEEVGYLFSPRGGDGISREEKCWHSTFRNLHISGKSSDRLKLGGRRKVSPEKAFPVERFTAGIEGLQAIKPRLRDQCTKKGPSNNHEMGRDFNSSSSVGDHGVDVEATMVIGEDEIEGAKWTMDNVKFSVKEPIEAVATKEELEHLVMLCRSEADAMGRITAGILRLLKLDKSLGQGTIEQLRNLGSGGMDNIFSPRRLSRQNSFGSIGTPRTPTMQAIADVMGSKTTLEATISSLQGEISESKAKCMALISQASSTEDQNRAEDIRQLSEKLESMQSLVTRLRTLII

SEQ ID NO: 64805 - protein, 85 aa, Zea Mays
MSQQKKLGRLWDLLEAEKMEPPPKCFSSEFWCRFYSCSNYLTSLTTPFLSHMHPSSHTHLRLFLVMILFEFCFYQMTCHSTSTMI

SEQ ID NO: 64806 - protein, 131 aa, Zea Mays
MEEFCVSYNFCASLANTASLPRPVPHGAVIPCPRSSPLHPPALSARCHYPRLARVYTHNHASLYLCVLRRRRMSRRSNGGLYSPIGSVCLRPVVALTARRRSKCRSVPSNRSSSFLCSPIGSTGGRGTPPV

SEQ ID NO: 64807 - protein, 1729 aa, Zea Mays
MEMVLRSQSPLCLRSGPVLIFRPTVAGGGGGTQSLLRTTRFARRRVIRCVVASPGCPNRKSRTASPNVKVAAYSNYAPRLLVESSSKKSEHHDSSRHREETIDTYNGLSGSDAAELTSNRDVEIEVDLQHISEEELPGKVSINASLGEMETVDEAEVEEDKFEVDTSGIVLRNVAVREVDPKDEHNAKDVFVVDSSGTAPDNAAVEEVVDEAEVEEDMVDVDILGLDLNNATIEEIDLMEEALLENFDVDSPGNASSGRTYGGVDELGELPSTSVDCIAINGKRRSLKPKPLPIVRFQEQEQIVLSIVDEEGLIASSCEEGQPVVDYDKQEENSTAFDEQKQLTDDFPEEGISIVHFPEPNNDIVGSSKFLEQKQELDGSYKQDRSTTGLHEQDQSVVSSHGQDKSIVGVPQQIQYNDQSIAGSHRQDQSIAGAPEQIQSVAGYIKPNQSIVGSCKQHELIIPEPKKIESIISYNEIDQSIVGSHKQDKSVVSVPEQIQSIVSHSKPNQSTVDSYRQAESIIGVPEKVQSITSYDKLDQSIVGSLKQDEPIISVPEKIQSIVHYTKPNQSIVGLPKQQQSIVHIVEPKQSIDGFPKQDLSIVGISNEFQTKQLATVGTHDGLLMKGVEAKETSQKTEGDTLQATFNVDNLSQKQEGLTKEADEITIIEKINDEDLVMIEEQKSIAMNEEQTIVTEEDIPMAKVEIGIDKAKFLHLLSEEESSWDENEVGIIEADEQYEVDETSMSTEQDIQESPNDDLDPQALWSMLQELAEKNYSLGNKLFTYPDVLKADSTIDLYFNRDLSAVANEPDVLIKGAFNGWKWRFFTEKLHKSELAGDWWCCKLYIPKQAYRMDFVFFNGHTVYENNNNNDFVIQIESTMDENLFEDFLAEEKQRELENLANEEAERRRQTDEQRRMEEERAADKADRVQAKVEVETKKNKLCNVLGLARAPVDNLWYIEPITTGQEATVRLYYNINSRPLVHSTEIWMHGGYNNWIDGLSFAERLVHHHDKDCDWWFVDVVVPERTYVLDWVFADGPPGSARNYDNNGGHDFHATLPNNMTEEEYWMEEEQRIYTRLQQERREREEAIKRKAERNAKMKAEMKEKTMRMFLVSQKHIVYTEPLEIHAGTTIDVLYNPSNTVLTGKPEVWFRCSFNRWMYPGGVLPPQKMVQAENGSHLKVTVYVPRDAYMMDFVFSESEEGGIYDNRNGLDYHIPVFGSIAKEPPMHIVHIAVEMAPIAKVGGLGDVVTSLSRAVQDLGHNVEVILPKYGCLNLSNVKNLHIHQSFSWGGSEIKVWRGLVEGLCVYFLEPQNGMFGVGYVYGRDDDRRFGFFCRSALEFLLQSGSSPNIIHCHDWSSAPVAWLHKENYAKSSLANARVVFTIHNLEFGAHHIGKAMRYCDKATTVSNTYSKEVSGHGAIVPHLGKFYGILNGIDPDIWDPYNDNFIPVHYTCENVVEGKRAAKRALQQKFGLQQIDVPVVGIVTRLTAQKGIHLIKHAIHRTLERNGQVVLLGSAPDSRIQADFVNLANKLHGVNHGQVRLSLTYDEPLSHLIYAGSDFILVPSIFEPCGLTQLVAMRYGTIPIVRKTGGLFDTVFDVDNDKERARDRGLEPNGFSFDGADSNGVDYALNSLVRCPELVPLPLQESHGAGLVVEPTCPRLHRALPFSVQIVIIQPTANVVCCLQVSDAAIQLLQVPGHCCTASLSLVSSIPRGAQCNFLSSVIMHRLSQ

SEQ ID NO: 64808 - protein, 54 aa, Zea Mays
MLCSKTEVELHLQKCLIEAPMHFRARSEMLPVVNKQTLILICDNQITILYLLSN

SEQ ID NO: 64809 - protein, 1937 aa, Zea Mays
MTRCSVGTELMPIGEEPSSLGFENTLAFTGQMGPVYAFSDALSPEQIRGIYNLGPSYMYSFLGDQNLLTNDDSRYKGILDAKDGISSKMIFGLNAQASNNRTLFNVSSALDGLDKSKFEATTMGGTKLCSRRLLQEIIYCVGGVSVFFPLLIHFDDAVVQNGEFATRDQLAGQVIELVASVLDGNIANQQQMHLLSGFSILGFLFQSVSPQLLNIKTLSASKYMFTILKTSNILLRDALSQFYLNPHIWAYATYQVQRELFLLKVSQHDIRALVSFLERSQDVACVEDILHMIIRALSQNSLVPSFLEQVNSLGGCYIFINLLKREFEPIRLLGLQLLGKLLVGVPSEKRGPKIFGLPVGRPRSIAEDIRKGATAAPQLFFYSISDRLFKFPLSDHLCASLFDVLLGGASPKQVLQKRSQSDALKDRSMAPFFVPQILVCIFKYIQSCRDASVRTKILSDLLDLLDSNPVNVESLMEYGWSSWLETSAKLDVLRNYKSNSVAKADGLETNELILVRNMYSLVLSYCIFSVKGGWHQLEDTTNFLLLKIEQGQLPNSSMLRDIFEDLIGSLLETSSEESVFNSQPCRDNILYLLNLSHELFVDQIGIKLLFPSPDMSAHLSSDDINSAVLEIMNTEGNGLLTSLPWSNILFNDGEKLTDDWWSFFDKIWTLLCYLNGKGQTRLTPKGLNTAGPSIGQRARGLVESLNIPAAEMAAVVVTGGISSALGGKTNKVADKAMMLRGERFPRIIFHLIIMYLCKAGLENASKCVQQFISLLPNIISEDDQCKNRLHFLIWSLLRVRSQYGQLDDGARFHVMSHLILETVIYGKSMLTTNIVGRDDSTEANNSKEAGFILNLVQKDRVLTAATDEAKYMKDAIADRMKLVQELHSKLDERSIQDVEQLQSFEDDVQFAKTAAIAADDSRKAAFQLAFDEDQQIVADKWIHILRALSDERGPWSAAPFPNNIVTYWKLDKTEDKWRRRLKLKRNYKFDECLCHPSSIKSSNDNAAPTVDPSANAKITEKMKHLLLKGVRGITGDISSESCEDSNDMIDPPQNVPPENHTVSDTSDSADSSDYPAIVQNRKESSSTSSDNDYIEVLSSVHCVLVTPKRKLAGQLTITRNALHFSFEFLVEGTGGSSVFDRFHDKKDSDSKNEMGGVEKLKGNLDGGRGNAAESSDTQIKNQSGKIKHHRRWKITRIKAVHWTRYLLQYTATEIFFDDANAPVFLNFSSQNDAKSVGSLLVSLRNDALFPKGTTRDKNSLISFVDRKVALEMSESARESWRRREISNFEYLMILNTLAGRSYNDLTQYPIFPWILADYSSEKLDFNKSSTFRDLSKPVGALDAKRFKAFEDRYLNFVDPDIPSFYYGSHYSSMGIVLYYLLRLEPFTALHRNLQGGKFDHADRLFQSIESTYSNCLSNTSDVKELIPEFFYMPEFLENSNSYHLGIKQDGEPLGDVGLPPWAKGSPEEFIHISREALESEYVSSNLHHWIDLIFGYKQRGKPAVEAANIFYYLTYEGAVDLENMDDMLQKSAIEDQIANFGQTPIQIFRKKHPRRGPPIPIVHPLYFAPQSITVTSVVPTIVTPLSVLFIGLLDSNVVMMNEGLILSVKLWLTTQLQSGGNFTFSGSLEPFFGIGSDVISPRKIGTSLAENVEFGRQCLATVQIRGDNYLILCGNWENSFQIISLSDGKIVQSIRQHKDVVSCVAVSSDGSVIATGSYDTTVMIWYAFQGRSNDKRYRNANYDLSTKDHVIIESPCHILCGHDDIITCLFVSTELDIVISGSKDGTCMFHTLREGTYVRSIRHPSGAGLSKMVTSQHGRLVIYSDSDLSLHMYSINGKHIASSESNCRLNCMELSCCGEFMVCAGDHGQIVLRSMHSLDVVWRYEGAGKTITSLVVTPEECFLAGTKDGSLIVFSIENPLLRKNAMQRHKAKPSIGG

SEQ ID NO: 64810 - protein, 213 aa, Zea Mays
MRLRSPDLEGPRNCSMSPGSPSQSAISFLLDAVWGRRKGNRDDRRRPFQEEDYPEDAAGFAAGGRGNGYRSRSSSSSNYYEGRRRTSNYQSSVSNNFAGAASTGVGADDNTKSSSSGYGGWDELLDNDTAAQETKRRSSFSAGTTDRSTKSQPSATGEEDADYTATPSTRTRMRRRRTPGTMGLGSTMYKQAPLVMRLLVAVFPFLGSWFRLL

SEQ ID NO: 64811 - protein, 144 aa, Zea Mays
MDETPTSSGQSEASSCEPNWWPPDFLEKIQSASIPRKHDVLGNQSSSSWKASQLLWSTGSYSGLIPNGFYSIIPDKKLKETFPTIPSLDDLQTLEADGLKADIIIVDTERDKKVFMLKQLSAALVKGLSSSPALVIKKIAGLAS

SEQ ID NO: 64812 - protein, 125 aa, Zea Mays
MDGGGSGNASGGSGGASTCCYYALLGIRKNASATDIRAAYRRLAMTCSHVPIYCRGRAEVAPGPVGQRPRRGRRGQSAVPADPGGILRSVGQGEEGHVRRRALRPPRRRRPGFLRLHAGDAGDDG

SEQ ID NO: 64813 - protein, 52 aa, Zea Mays
MAARCRSPSAATRPVAPWRLPGRSGRSSSGCATSWASPRSPTTATALLEATR

SEQ ID NO: 64814 - protein, 407 aa, Zea Mays
MSGWDEGAVFYSDQAQFPRGGPGGDPAADLTRHSALRKFKEFLRGFTGPTGDFPYRESLVHNRDHVTVAIEDLDAFDAELSDKIRKSPADYLPLFETAAAEVLASLRSKVAGETGEMEEPVTGDVQIFLSSKENCLSMRSVGADYMSKLVKIAGIAIAASRVKAKATHVTLICKNCRSVRTVPCRPGLGGAIVPRSCDHVPQPGEEPCPLDPWIAVPDKSKYVDLQTLKLQENPEDVPTGELPRNVLLSVDRHLVQTIVPGTRLTVVGIYSVYQASTTQKGAVGVKQPYIRVVGLEQSRDNNSNGPSNFTLDEEMEFKEFAQRPDAYAKLCSMIGPSIYGHSDVKKAIACLLFGGSKKRLPDGVRLRGDIHVLLLGDPSTAKSQRRLHLLQYIHLAKDRLQLVLQHL

SEQ ID NO: 64815 - protein, 258 aa, Zea Mays
MATARLPSRSFLSPAQQSYPRLPASVRLCLSHHEQPPTGPKRHRRAATSHPAFSAAARGRAKKIPIADTDEPAAGVRVTDRGISYRLDGAPFEFQYSYTEAPRARPVALREAPFMPFGPEATPRPWTGRKPLPKSRKELPEFDSFVLPAPGKKGVKPVQSPGPFLAGMEPRYQSVSREDILGEPLTKEEVSELVKGSLKSKRQLNMGRDGLTHNMLENIHSHWKRKRVCKIKCKGVCTIDMDNICHQLEGTSGASIGG

SEQ ID NO: 64816 - protein, 304 aa, Zea Mays
MFLLDMYSCLLLAGPIFYLLVLLDKWVLRWSLRRLAGDSPRCSIVITIKVWDALTGDELHSFEHKHIVRACAFSEDTHLLLTGGMEKTLRVYDINRPDAAPRELDKSPGSVRTAAWLHSDQTILSSCTDMGGVRLWDVRTGKIVQTLETKASITSAEVSQDGRFITTADGSSVKFWDANHFGLVKSYDMPCNVESASLEPKSGSKFVAGGEDLWVHVFDFFTGEEIACNKGHHGPVHCVRFAPGGESYASGSEDGTIRIWQLSPVNADDDEAANANGKANAAVNEVTTKLEGGFHIPKEGQAGG

SEQ ID NO: 64817 - protein, 59 aa, Zea Mays
MGMIRSTPSLVQDQDTRRTILRGPCRRGLYPLPADSSLKQANAVDKPTVSKWHNRLGHP

SEQ ID NO: 64818 - protein, 751 aa, Zea Mays
METLMVDRVHSSLRLFMYRNAIFLCERLCAQFPSETNVQLLATCYLHNNQPYAAYHVLKGKKLPESRYLFATSCFRMNLLREAEEILCPVNEPNMEVPSGATGHYLLGVIYRCTGRISAAAEQFTQALTLDPLLWAAYEELCILGIAEDTDECFSESTALRLQQEHTSTSTLVKSNFANENRVLSSSVSASFGDIIPKQIKQLHANNITEVSGYPHVRPTALHVQNSSTSNVSQFDTPSPAAAQTSIMPPPLFRNVHAYQNTISGDAPTKQKANGVSQPLRRKYMDEARLKKVSGRLFNSDAMPRRSQRLKDTTTNSNTSQIGGNGTDHLSGKLRVNSSTQSKLCSTAIRSVQVRKGKPRATENFDEGSRYEVIDEMWTDNMSGTSSSVSTADGRSFEQDRAERILLQDSKVALGIRELLGLFRTLGEGFRLSCLFKCQEALEVYRKLPESQFNTGWVLCQVGKAYFELVDYLEADHYFELAHRLSPCTLDGMDIYSTVLYHLNEEMRLSYLAQELISIDRLSPQAWCAVGNCFALRKDHETALKNFQRSVQLDSRFAYAHTLCGHEYSALEDYENSIKFYRCALQVDERHYNAWYGLGVVYLRQEKFEFAEHHFRRAFQINPRSSVLMCYLGMALHSLKRNEEALEMMEKAIAADKKNPLPKYQKSLILLGLMKYEEALDELERLKEIAPHESSMYALMGKIYKQLNILDKAVFCFGIALDLKPPAADLAIIKSAMEKVHLPDELMEDDL

SEQ ID NO: 64819 - protein, 520 aa, Zea Mays
MPWTRTEGARVCYVVVAPASGGVSCSGWGNMMKQIFGRRKASKTADKEFTGGRTFSQLSGSGVADLSGQPPILSSTGHAYGSGNRTGFQDSRINDNLFSSNFRPLPSFKDVPNTEKQNLLIKKLDVCCTLFDFTDASKNMKEKEIKTLMLLEIDEYVRTANVKFPEIVVEAITKMISVNLFRTLISPPREKKALQAFDLEEDEPLMDPAWPHLYHVYELLLTFVQSPQNDAKLAKRYIDYSFILRLLDLFDSEDARERDRLKMVLHRIYGKFMVYRPFIRKAINNIFYQFIYETEKHNGIAELLEIFGSIINGFALPLKEEHKLFLVRTLIPLHKPRCTTMYHQQLSYCITQFVEKDCKLADSVIRGLIKYWPITNSTKEVLFLGELEEVLDATQPGEFQKCMVPLSHQIARCSNSPHFQQNSKVILPIVFPALEKNINGHWNQVVRSLSLNVRKLFSDRDPQMFNECLRGYEEDKDREKEFRLKQELAWKRLDEIASAKVTSGEAVLVSPTLHRQPSVL

SEQ ID NO: 64820 - protein, 487 aa, Zea Mays
MMNSMNVPSKRSTLEKKLDKLILALFATLFTMCVIGAIGSGVFINEKYFYLGLRGHVEDQFNPQNKFVVTILTMFTLITLYSTIIPISLYVSIEMIKFIQCTKFINNDLHMYHAESNTPALARTSNLNEELGQVEYIFSDKTGTLTRNLMEFFKCSIGGEMYGTGITEIEKGGAERAGIKIDDDEGKRSANAVHEKGFNFDDARIMRGAWRNEPNLEACKEFFRCLAICHTVLPEGEETPEKISYQAASPDEAALVAAAKNFGFFFYRRTPTTVMVRESHVERMGSIQDVPYEILNVLEFNSTRKRQSVVCRFPNGRLVLYCKGADNVVYERLADGNHDMKKTSREHLEQFGSAGLRTLCLAYRDLSREQYESWNEKFVQAKSSLRDRDKKLDEVAELIEKDLILVGCTAIEDKLQEGVPTCIETLSAAGIKIWVLTGDKMETAINIAYACSLVNNDTKQFIISSETDTIREAEDRIDDEPKIRSTN

SEQ ID NO: 64821 - protein, 452 aa, Zea Mays
MAPPPPWLAALLFLLLPALLPAVGSVSGAAAAGIFRVRRKLPAGVGGDTGANISALRAHDGRRHGRLLAAADLPLGGLGLPTDTGLYFTEIKLGTPPKRYYVQVDTGSDILWVNCISCSKCPRKSGLGLDLTFYDPKASSSGSTVSCDQGFCAATYGGKLPGCTANVPCEYSVMYGDGSSTTGFFITDALQFDQVTGDGQTQPGNATITFGCGAQQGGDLGNSNQALDGILGFGQANTSMLSQLAAAGKAKKIFAHCLDTIKGGGIFAIGNVVQPKVKTTPLVADMPHYNVNLKSIDVGGTTLQLPAHVFETGEKKGTIIDSGTTLTYLPELVFKQVMDVVFSKHRDIAFHNLQDFLCFQYSGRMTYTVWDSKMVHYNQKMGRTLCLWEILCFQTSWLSMTWKIKSSGGLTITVRRALKLRTTRQAQPILSNHMTYPPDGNSTGTSPWFCCW

SEQ ID NO: 64822 - protein, 354 aa, Zea Mays
MTMERLLWASTQALGCGGKRDEAGLVGQLGEWLCRAALPPPRVCGAPGGPPVTVRRVRLRDGRHLAYEESGVPKEVARYRIIFSHGFAGSRLAGSCGGARRVHGGLRPRRLRRERPEPLPLRAERGAGHGGAGRRAGPGRQVLRRGRLPRLPRHVERAPLHPAQAGGRRHAGARGQLLVARAPRGPGGGGVRAAGARGPVGAARGAPRARAPPLVDGPALATHLHRRRQHHPPPQRARRRGPPRARRRRHAPAEAGGGHTAGRARVLPPRHGRHVRQVGVRPHGPAGAALPRAPVAGRRGRPRAGRPSAPRRRNPRVGQLPRAPRHRTLPVRRPWPRGHRSTDTLRFISRPGSV

SEQ ID NO: 64823 - protein, 250 aa, Zea Mays
MVLGNVAIVIGSGIVGSVLTGGEFGLPDFRDAISGAFKFLTKSAKPGKDGPSTSSPHTAELFSQVNHLREELQMLSKSNHVSIVTVDGRPGPGAYGITAVVIGGAIGYLFIRWKGWKLSDMMFVTKRGLSDACNVVGKQVDQVSESVNVAKKHLAGRIDRVDCSLDECQEITEATKEEVTIIHGDLSAFQKEMETVHLVVRSLETKLGRLAYTQDRTTRGIYDLCEFTKRLDQSPKADTRQVPVVAQISE

SEQ ID NO: 64824 - protein, 452 aa, Zea Mays
MLFACSATKIDNFRSYDTVSKDVIQRWTYPMVPDVVSSRDSSESRLHRQGIYKASDVTLSPSAQIGANSVVGSVTSIAGHCKVLNSVIGQGCKIGKNVLINGSFIWDNVIIEDGCKVSNSLVCDGVHLRAGAVVEPGCVLSFKVEVGKNVVVPAHSKVSLLPQPSNEDSDEELEYADTNSGIADSPPFSSMRSNGDQATVPSEEDELGTSETGTCGVVGYIWTSVDSGIMEEWRQSIAPIPKEKLEELQHAVPDDDRSEDESNNPTLPDKDDSSDSLVEDDDHISKFEKEVEETFQRALGGGVNRDNLILEINGLRLAYSLQHADCAGAVFYSVMKSALLAAQSNTLLKTTADALGKWKDLLRNYTKTVDEEMEILLKFEEMCQETTKDFSPLFPKILPYLYDTEVVSEDAILRWAEEKEHADESDKVFVKQSEAFIQWLKEAEEEDDEEEE

SEQ ID NO: 64825 - protein, 415 aa, Zea Mays
MEAAAAAPHLLHCGGFGRVAHLPALHRRGQFPRVRAVATEPKLSTSTSSSSRGRTRSRNDLSDTRFGEVSKEIQRVRKQMEQDEQLATLMRGLRGQNLRDEQFADDNVRLRLVEVESADNNEGLPLVYSPEIISAYWGKRPRAVATRVVQLLSVAGGFISHLVSDLINKKLKENEVARAIELREIVTSLGPAYIKLGQALSIRPDILSPAAMTELQKLCDKVPSFPDDIAMALLEEELGQPWQAIYSELSPSPIAAASLGQVYKGRLKETGELVAVKVQRPFVLETVTIDLFIIRNLGLVLRRFPQVSIDVVGLVDEWAARFFEELDYVNEGENGTYFADVMKEDLPQVVVPKTYHKYTSRKVLTTQWIEGEKLSQSTEDDVGSLVSVGVICYLKQVSLKSICLHLINTIHILHD

SEQ ID NO: 64826 - protein, 538 aa, Zea Mays
MSSVTRPQREADFARFPSSTPIVIDNGASTFRIGWAGEAEPRLSFRNVVQRPRHRSTGETVSIVGDTDPSLMKFFDCTRSAVRSPFDDDVVYQFEYMEYILDYGFDRLGVDSEVGHPILMTECECNPSFSRARMSELLFETYGVPSIAFGIDNAFSYKYNQKLGNCNEDGLAISCEHGTCHVVPDRPGAVVRSLPTEPKYHFTLNRASISWEKAEELKKEHCYIAPDYMAELQIFKNNKEEADEKMRYWQLPWVPPPKEEPPSEEELARKAALKEKAGQRLRDMAAAKRSQKIVELEKQLSYLEELMEQLDEAEEEEATAILGSSGYLSQQEIRSAILKASQSLRKAKGESNGNDEKTDASAVDKYPLVSVPDETLTPEQLKEKKKQILLKTTTEGKLRAKQKRAEEEALREKQEEKRRAENPELYLEELRARYSELSDKFEQRKRQKVNGSQTNGNHSSSAGVGRGERLNAAQKERMRLLASAAFDRGKGEDTFGMRDEDWLVYNKMSKDNDDDSNDDDESELVRISSKLQVPFDVP

SEQ ID NO: 64827 - protein, 492 aa, Zea Mays
MTGRPWAGAPPPPLPLAVAVGVAALLSCCCCCCCQGASATAAASFGDNFEITGAEDHVKTSADGQTWYLYLDNKTGVGFQTKQRYLFGWFSMKLKLVGNDSAGVVTAYYVRSSDVLRPGRGAPARRAGLRVPGQPQRGALHHPDQRVPQRRRRPGDAPLALVRPHRRLPHLRHPLEPQADRRVPTSMRPPTSTFDPAPLHWLVGMRHEAWHVGFGYDPVGAPANLVHAPVWGRTMHGVSPMPSPGRGRSMPIIPGPRHRTWIHCLPAPRAQAPVLSDPWHRQSAPPRIEIHTLPYPTIPHHEWSMTVLAGSSWTRWRSGCTRTTRPNRRAEEAAATASSRSPSPCTSFPASGTRTTGRRAAGWRRRTGPRRPSCRPTATSPPTPAPGRRRPRGSPRPRRRPRAPRPRGTAGGTSPPRGRWTPASAWTTPGWQGTSSSTTTATTASASRRRPRSASSGPPRPHRDHTILLDWFVHDDEMVFFLGFVSWCVKPG

SEQ ID NO: 64828 - protein, 73 aa, Zea Mays
MHLLIVLQEMYIIRHQLQESKGILHQACPRGTKESYIGGLILKDDGEGRQTCKNLKTQPQKHIHSSTPHLIQI

SEQ ID NO: 64829 - protein, 143 aa, Zea Mays
MCSREDTEKHVDVAIVFIGSKLQSSDISKDKQVDPALADTLKLSFTESEFSMAFPYVSTSDDEKLEESLLSGFTENCKSGFGRNRITYTDTCAVSGQDLKTYHNMDAINDLVVSGRTNPSGQTDVIVFCSGGFEKLGTTESEG

SEQ ID NO: 64830 - protein, 350 aa, Zea Mays
MVSEFGDDNFVIGNWELKEIISRDGRMKLSSQMFFASIDQRSERAAGESACTALVAVIADWFQANQNIMPIQSQFDSLIREGSLEWRNLCENETYRERFPDKHFDLETVLHAKIRPLTVSPSKSFIGFFQPEGDDDMSGFDFLNGAMSFDNIWDEIAQAAEFSSSDSPNLYIVSWNDHFFLLKVEHDAYYIIDTLGERLHEGCSQAYILKFDKNTTIHKVPGEKKSCSPDSSGPMKDSSGSESSTTDQDSGNDTEEEVLVSKGKESCKEYIKSFLAAIPIRELQADIKKGLMASTPLHHRLQIEFQYTQSSPKETASATQLLTMEAPFEFSWPEAPPTMEVTLTSAVSVV

SEQ ID NO: 64831 - protein, 646 aa, Zea Mays
MQRSRRALLRRTAAAQEQSAVAEAAANGRRRRLYGFSASLVVASWVAVLLLHSLVGHGDGQRDGGGSTVDLTVVEPTVNVGPINPVVQEEHGGDLEMPGDSCVNSDENAVLSEDTLVQADQLCSSDEVQNENTEAVTIDSQVELSGDQGGYLPQSGVDSGVQPGEKVESKDLPRPPRLSRVAPPDLDEFKTRAIAERGPGISSQPGNIIHRREPSGKLYNYAAASKGAKVLDFNKEAKGASNILDKDKDKYLRNPCSAEGKFVIIELSEETLVDTIAIANFEHYSSNPKEFELLSSLTYPTENWETLGRFTAANAKLAQNFTFLEPKWARYLKLNLVSHYGSEFYCTLSVLEVYGMDAVEKMLENLIPVENKKTEPDDKTKEPIEKIYLKDPAGGKEFSQETLDEDEFELEDDKPNGDSLKNGANDPVSEARTLQAGRIPGDTVLKVLMQKVQSLDVSFSVLERYLVELNSRYGQIFKDFDADIDSKDVLLEKIQSELKNLESSKDNIMNEVDGFLSWKLVASSQLNQLVLDNALLRLEFEIFRQKQTDMENRSLAVIFLSFVFACLALAKLSIGIMSRFCRFYNFEKFHNSMFSWLPGLCTWPQHWTALKGTIALVFSWKGVADNFSQQHSAAKSIPKILHNCVK

SEQ ID NO: 64832 - protein, 306 aa, Zea Mays
MRLNVGLLVPLMAQYSAPTWATLVAGFFMLLALSLSTYLIFEHLSAYNNPEEQKFVLGVILMVPCYAIESCISLINPSTSVYCGILRDGYEAFAMYCFGRYITACLGGEDKTIAFLKREGGSGSGQSLLHHTSEKGIIHHHFPVNYVLKPWRLGTRFYLIIKFGIFQYVIIKTLTATLSLLLESFGVYCDGEFNLRCGYPYFAAVLNFSQYWALYCLVAWYTATKDELAPIKPLAKFLSFKSIVFLTWWQGVVIAIMYALGLLRSPLAQSLELKSSIQDFIICIEDRWALLQLFTSMCSQPSPMHS

SEQ ID NO: 64833 - protein, 501 aa, Zea Mays
MAAAAAAVNGSLDRLDVHERKAQKSYWEEHSGELNLEAIMLDSRAAELDKEERPEVLSLLPSYEGKSILELGAGIGRFTGELAKTSGHVFAVDFVESVIKKNGSINDHYGNTSFMCADVTSTDLMIEANSIDLIFSNWLLMYLSDEEIDKLVERMVKWLKVGGYIFFRESCFHQTGDTERKFNPTHYREPRFYTKVFKECQTFNQDGTSFKLSLITFKCIGAYVNIKKDQNQICWLWKKVNSSEDGGFQSFLDNVQYKATGILRYERIFGDGYVSTGGAETTKEFVEKLNLKPGQKVLDVGCGIGGGDFYMAEKYGTHVVGIDLSINMIMFALERSIGCKCLVEFEVADCTTKTYPDHMFDVIYSRDTILHIQDKPSLFKSFFKWLKPGGKVLISDYCKSPGKPSEEFATYIKQRGYDLHDVEAYGQMLKNAGFSHVIAEDRTDQFLSVLQKELDKFEKNKDDFLSEFAQEDYDDIVNGWKAKLQRSSAGEQRWGLFVATK

SEQ ID NO: 64834 - protein, 342 aa, Zea Mays
MARSRTSGGGEYESGSDHDGALQKPLLPNSGSWYRMGMGSRQSSLNAAGTSSMAVLRESHVSAFLCTLIVALGPIQFGFTGGYSSPTQASIIRDLNLSISEFSVFGSLSNVGAMVGAIASGQMAEYVGRKGSLMIAAIPNVIGWLAISFAKDSSFLYMGRLLEGFGVGIISYVVPVYIAEISPQNMRGALGSVNQLSVTLGIMFAYLLGLFVPWRLLAVIGTLPCIVLIPGLFFIPESPRWLAKMNMMDDCETSLQVLRGFDADITAELNDIKRAVMSANKRATIRFQELNQKKYRTPLIIGIGLLVLQQLSGINGILFYASSIFKAAGKLCTCSLACDFHY

SEQ ID NO: 64835 - protein, 78 aa, Zea Mays
MVDFSAAPGAGHPHKSSRLSVLGDCLAKRKRERGRTYEWEPPSPCVRAAPVDTHHWRGSGSNVAIRGLIRPHRSCVRE

SEQ ID NO: 64836 - protein, 1324 aa, Zea Mays
MSPPFVFPSTLRDLELDTDGDRDEEPSLRPQNPVAVATLRAADLEEFVKGASFDLSDKELFCIEEQEVFDAIYSIVRDFNCLPPALKFNIVETLRSNLSVLLPSIDSLSRASMSSPSDATEITDRIASHRNALKIYSFFLISIVLTAEAGAESCTAAKATAHGRKKNHIYSWNWEAQRGRIMSLVANSLEANLSLLFGPGGTDERYLSFVSKCTFVLCENQNVLKDEDTRNGLCRIIGAIATKHQRISQISASVSHLIHKFDFTVPHLAEAVASAEKKFGDGSLAISLIREIGRADPKEYTRDSVGADNVGRFLVELADRLPKLMSTNIGVLIPHFGGESYKIRNALVGVLGKLAAKAFKDVEGDSNARLRSKQAMLEILIERCRDVSAYTRSRVLQVWSELCEENSISIGLWNEVASVASGRLEDKSAIVRKSALQLLITMLQHNPFGPQLRTATFEATLEKYKEKLQGMEPSNSDKDEAANDSSPGEVIMGQDESVSDSCLASSQDQNDRDATIVDITNLEQIRALVASLEAGLRFSKCITSLMPILVQLLASSSATDVENTILLLMRCRQFQIEGSEAALRKMLPLVSALWDYFCFNINGVRPVQSRGALSILCMAAKSSPSILGNHLQDIIDIGFGRWAKEEPLLARTACLALQRLSEEDKDKLISNNSRVFAALQGLVTSFSIPEKIWYGAADKAISTIYTLHPAPELFATETAKKSLSSVFSVLGTNDVSNGDEAQNGASLSSVSPSKLGRFLFVISHIALNHLVYIENSVRKIQKQKRKNEKSQPTTEDLQPDVSKSLEAQGINAELGLSATIDIAIESLAERAEKEIVCCSSEKNLIGHCGPFLSKLCRNLALLQKFPDLQASAMLALCRLMIIDAEFCEANLQILFTVAESAPSETVRSNCTIALGDLAVRFPNLLDPWTEYIYARLRDPSVSVRKNAVLVISHLILNDMMKVKGYINEMAVRIEDKDERISSLAKLFFHELSKKGSNPIYNLLPDILGRLCNQHLKEETFCNIMQFLINSIKKDKQMEALVDKLCNRFAGVNDVRQWEYISYCLSQLTFTEKGLKKLIDNFKMFEHALSEDSVMNHFRSVISKCKKFAKPELKICIEEFEEKLSKVHQEKKEQEETTKNAEAHRQRIDSLDEFLVTKEVSENSGNSAEDETSEVVDPSVDSSTEHMENTPECSVNTSAENSQTTAPLTESEGGGEEIQSAQPVSKGMSRLRAKKTRDPVVDPSVDRSTEYKGNTPEHSADTSTENSQTSVPLTGTEGGSEEIQSTQPVGKGVSRSRARKTRDPVVEDSAAPVRRATRSTRRQGS

SEQ ID NO: 64837 - protein, 146 aa, Zea Mays
MGRFGEQQARRGHTGLRPRRTRHGNLTRAEKQHGTVEHGPSASEQGNFARAGRKHQRDVAAGTHRKDRARRRDDTRGRTRRGELKGDKLGAAMDVTGNTQGTGARKLELQASRGAGGRELQQEGSGASSAGQREIPQRGSTACNGE

SEQ ID NO: 64838 - protein, 222 aa, Zea Mays
MTLEDFLVRAGVVREDMGQQTLVLQPLAQGLFSQGNAVALAPQTMQLGNGVLTGVVGQGLGGGMTVAVPTTPVVFNVMRKLEAGDLYRPLQLTMPIGTTLRVRTSRAERKVVERMKRRMIKNMESATNNSLNKHAYIIELEAEVAKLKDLNDELQKKQVLSSNRPTPKHKIRYLSRSFSHELRCHYVEMLKKQKDEVLERINNQHGPKAKKLCLHRTLTGPW

SEQ ID NO: 64839 - protein, 194 aa, Zea Mays
MREVADLILSFPDETPVVVLSAMGKTTNNLLLLTRIDACVPDSLSVEAGENAVSCGAPKASEIPKLAVIKDLHLRTVDELGLDKSIVSEKFLKYFWWCWNKLKEKTDDDIPMPAYFRFLALLAFKIFSAEQVDVAVLEVGLGGKFDATNVVKAPVVCGISSLGYDHMEILGDQILFLVINLVSINGLILLAKLG

SEQ ID NO: 64840 - protein, 474 aa, Zea Mays
MWKSLNEINPSLLPRVSDINDPNLSFLGDPKVHVIYYSSNEVTQDPILLDSNKIISSARSMSPALRFHADGEPPYMLQMVKKQCLTKEGTDRDVRHFELEDPSSAMAINYKIGDALEILPSQNPSAVDAFIERCNLDPDCYITIRVRSGDKVFKGSVEQMDRIKLRTFVALTMDVVSASPRRYFFEVMSFFATSEREKERLQYFASPEGRDDLYQYNQKESRTVLEVLEDFPSVQMPFEWLVQLTPPLKKRAFSISSSPLAHPNQIHLTVSVVAWVTPFKRTRRGLCSTWLAGLNPNKGNLIPCWIHQGSLPPPRPLVPLVLIGPGTGCAPFRAFVEERAAQAAAEPTAPVLFFFGCRNQENDFLYKDFWLTHAQDEGVLSSKRGGGFFVAFSRDQPQKVYVQHKIMEQSSRVWNLLLSDAVIYIAGSSTKMPADVTAALEEVICKEGGVKQADASKWLRDLERAGRLNIETWS

SEQ ID NO: 64841 - protein, 356 aa, Zea Mays
MLLLLFFSVLAAVAAFLLFKFATVVDGDLTLVSRGPPLRERVDGKVVWITGASRGIGEVINFLTAVLFFSEPYAFVSSLRNGEVLAMHFANLGAKLILSARNKDALARVKKNILSKNPDSRVEMLPMDLSAGEESLKEVVHVAESFFSNAGVDYMVHNAAFERPKRRALEESEEGLKATLNVNVFGTITLTRLLAPYMLDREMGHFVVMSSAAGKVPAPGQAIYSASKHALNGYFASLRSELCTKGIKVTVICPGPIETLQSSAAASSSQTHSAEKREKRVSVERCVELTIVAATHGLKEAWISYQPVLTVMYLVQYMPTIGYWLMDKVGAKRLDAAAKKGNTYSWSLIFSSKKSA

SEQ ID NO: 64842 - protein, 852 aa, Zea Mays
MLSRLRESMVNRTWALMIVDESHNIRCTKKLEEKYELALTIYFLLGDNRPFDIYHQINMLWPHMLGTDKFDYAKKYCLLHVARSYQGKMFKDFSKGTRLTELNVLLSQTVMIRRLKEHLLNELPPKRRQIIRLKLKAPDIRAATSSCGKRVNPNSCNGTLTIELPSKSNDDENTKEEEEDDCKKSPRSLTPQEIGIAKLSGFSEWFSNHFIMNGFDANHNLDPQSSCQKTIIFAHHLKVLDGIQVFISENEIRFVRIDGSTLQRERKEAVDSFRLDPEVKVAIIGITAGGVGLDFSSAQNVIFVELPKSASELLQNTLDESHWLQLNQSLFRVSSLMNGKKDAVREIEVDQVCQLEEIKDTEETQRKLHPLENHNADLTHVPKKLLESDDLSIDGFLGIEDLEFDLDFTIRTIPLEFEDENPGTSLKNNPTPTVLEDRSCIDVSLSPAAVFCSVLSSCKSIKSRKRLSGNSGSLSQAASVPDFPIQVESLRFEVSRHTGRIHLYSCVPGHDSRPKPLCENFLPEELNSPLCSPSDVKTRTLLLKKIPSFCNVFNAFIKEWLALRPIDQNKLLGKPLQLPLNLELCFLKDSINHSTEGILKGGSKRRAASLNDVSNPLPENAEWRQVVLRNGTCKERQYTQGWTIDDEPLCKLCQGLCNGRLAKSPEYFEDLFCSLACFQEYRLRTSGRALRQALFQIERGKCSQCKLDCCKLVKHIKLLPLGKREEYIRKVAPNIASRKKLLDKLVREPIDGNAWHADHIIPVYKGGGECKLENMRTLCVACHYEVTRTQHKELKEIRKKAKEHLKNALNKQKDKPSEATEELDDESLLIAVPGSAYSLGFPGNGSDEKAAE

SEQ ID NO: 64843 - protein, 793 aa, Zea Mays
MPFLANLNSPLPDRSNMNRSNQGIHMSENGAVGVSFEKNNYNAADEIHSSEILSGNKVSNNYFGSDAMSGNGDATYPAKSNAQQPSSCAPDVRKQSKASITVYQPDMSVYLTSDMVSSCEGSYVSAGEPLQRSLSSGRTIGKVTVVNKRPSYPSSKVVSAQKSQDKVSTSYQNDAHEKNPCNKNDQRSTPTCESSQSTSSNLLKSGTSKVEVLKKPSKFLKTSLVALINDNKRNKVLFPYEDIVKFFQYEARGVSPRGLFNCGNSCYANAVLQCLMCTKPLMIYLLLRLHSKDCCSKNWCLMCELEQYASTLRESGGPLSPSRILSNLRNIGCRLGGGTQEDAHEFLRHLVMSMQAACLDGLGGEKHVEPSLQETTLIQQMFGGRLKSKVKCLRCYHESERYENIMDLTLEIHGWVESLQDALTQFTAPEDLDGDNMYKCGRCSAYVKARKQLSVHEVPNILTVVLKRFQSGKYGKINKCVTFPDMLDMVPFVTGSGDNPPLYFLYAVVVHVDTENASFSGHYISYVKDMQGTWLRIDDSEVQVVSVNQVMSEGAYMLFYLRSFPRPPRIYIEKGLPVTSAKRHTSKSSKGSKHDRKQTELLFPANDQAYGVYDFRPDGEGYAQDQHAELRSRAFHHADDAFADSVSADFSEATSSEWSLFTSSDESSFTTESTRDSFSVVDYGDNAGLDPISSIFGPSYAPEHGAPGSFVSRTRFSPSSPQTRYFSESTGFVSDSSMPAHPHGIVHRGRYPDSRACASSAEPLASAAHQRSGYGRYPLSRDGFVQTSGFCQM

SEQ ID NO: 64844 - protein, 95 aa, Zea Mays
MGFLDGGVQTKDGKDMLLLGDLVLSNKLVVYDLEKEVIGWTDYNCSSSIKIEDDKTGSVYTVDAQNISAGWRFQWHNSLILLILIRTIWSCLVIA

SEQ ID NO: 64845 - protein, 155 aa, Zea Mays
MKEYYQKAAFAYSKGDRSYASYLAEEGKHYRELGRIEDEKASRNIFEARNKHITNTVTIDLHGQHVQHAMNLLKIHMMICICIPSVLLRVITGCGSEGTGKGKIKRSVIELAEKEHIEWREENSGTVALRLGGPREYRFLEHESDSDLVGNFNID

SEQ ID NO: 64846 - protein, 243 aa, Zea Mays
MLAAALSPLRWAISKAIETYYKWSVPLRKHGMVPDYSFSFAMSSCLIAMLPEGFYDRVDEGSIVLRKSKAVGFSSDGVVLRDRNESVRSDIVILATGFRGDQKLRDIFTANWCREIVAGSPDTAAPLYRECIHPRIPQLAIVGYSESLTNIYASERMSNWVAQFLAGGFQLPSVRCMEESVAEWAEYKNRYNGRYFRRSCVSTANIWLNDLLCRDMGCNPRRKKGFLAEWFQPYGPADYAGLC

SEQ ID NO: 64847 - protein, 59 aa, Zea Mays
MLVPNPLFLFFLFLFLVSHSDGRTTSARVFLVFCALASAASATAPCVLLLLGWLYMLRS

SEQ ID NO: 64848 - protein, 229 aa, Zea Mays
MVLAQLGGSISRALAQMSNATVIDEKVLNDCLNEISRALLQADVQFKMVRDMQANIKRIVNLEALAAGTNKRRIMQQAVFTELCNMLDPGKPSFTPKKGKPSVVMFVGLQGSGKTTTCSKYAYYHQKKGFKPALVCADTFRAGAFDQLKQNATKAKIPFYGSYMESDPVKIAVEGVERFKKENCDLIIVDTSGRHKQEAALFEEMRQVSEATGRSNKKSCYIHWNWRAH

SEQ ID NO: 64849 - protein, 155 aa, Zea Mays
MPMRLLTVGKKRSRGTQLLVEEYKEKLGHYCEFEDTLIRSNPKLTSDVKVQVEAEDTAMMQQLKSDDFVVVLDENGKDVISEQIADLIGDAGNTGSSRLTFCIGGPYGLGLQVRERADATIRLSSLVLNHQVALIVLMEQLYRAWTIIKGQKYHH

SEQ ID NO: 64850 - protein, 793 aa, Zea Mays
MDSDAGGSSSAPPPPSAAIGAGAGAGAETKGDERGRKQVMVVLVGPPGSGKSTFADAVVGGSTAGRHWVRVCQDTIGNGKAGTKIQCLKAASDALKEGKSVLVDRCNLEREQRADFVKLGGTLRADVHAVSLDLPAKVCISRAVSRKGHEGNLQGGKAALVVNRMLQKKETPLLTEGFSRIMCCNDDGDIKKAVDLYNGLGPSDSLPSGVFGQKSKRPVQVGIMKFLKKTDASVVETSSGPKQALTEIKPAQQNPLPKQENVEAGFACSMEVEKGLNDKMENEEHAKGSDYCDVGSRTLAFPSISTADFQFDLDRASDIIVDTAANFLQKFDNIRLVLVDLSEKSRILSLVKQKAAKKSIDSNRFFTYVGDITQLHTKGGLQCSVIGNAANWRLKPGGGGVNTAIYSAAGESLQHATKKCADALRPGTSVVVPLPSTSPLHQREGVTHVIHVLGPNMNPMRPDCLKNDYTRGSKILREAYTSLFENFASIVQSYMGKQNNESGAEKSASGRISPNDTKMKREDNHESERMKKHKLFQPIMTAKRQHECTKVNAPNCHDNAMTSSAAPSQTRQVDNKRNDVVTSKTWGSWAQSLYELAMNPEKYKNSDSILETSDEYVVLKDLYPKAKRHVLVIARMDGLDSLADVKKEHLPLLRRMHSAGVKWAHKFLEEDAALEFRLGYHSVPSMRQLHLHIISQDFNSASLKNKKHWNSFTTSFFRDSVDVIEEIEQNGSTTTSSDEKVLAMELRCHRCRSAHPNIPKLKSHIAICKSPFPSHLLQKNRLLLSSTMHMDRT

SEQ ID NO: 64851 - protein, 102 aa, Zea Mays
MKKGICLLYPSSVSFHPDTGQAGPLLPKTLESGAGVLSLSDSLLRGRRRRRRQRRKSNHQAAEREATRGRSPGGLSRVQRRSTESRFVSQDMNNGTLVFNGS

SEQ ID NO: 64852 - protein, 168 aa, Zea Mays
MATQQQHAGPASGSASASSSSSGLHLPASPSAFGDTTHTKVFVGGLAWETNSGRLRRFYERFGDILEAVVITDRHSGRSKGYGFVTFREAESARKACEDPTPVIDGRRANCNLASLGRAQHPVHPGRPSSAGSYFGVPVPRAFYLGGYGHHRPFPLGYYQGFPVPQYR

SEQ ID NO: 64853 - protein, 55 aa, Zea Mays
MGYPSLAIFIPCFTTEFLGNTCYCFMWFWGWRYTLFMITLLLSDYYLLFMIRSLC

SEQ ID NO: 64854 - protein, 315 aa, Zea Mays
MEDEEMEKKVQQYLQRKGFRLTELALQEERNRLSTSAISDVALARSDNDPARYYDGYSRLRTWAYSSLDQYKHELLRVLYPVFIHSFMDLVAEGHMQEARSFFHTFREDHEVMHSRDLQKLEGVLSPSHLEEMELARSFRKNKFKIKLCEYSYELLLQYLQKTQALVVLGVINEHITFEVSPGQPSLISDDADVVALIGTSKDLAKQINQKEVHWGLLEDSVEERMEKALAESDKIEAESKDADAEDNKKRNAEGGKQGASLKKAKKDKLVGATGKSVRTETSMVSVAPRVKPELTLPATLPSRMSLTGTFRSHM

SEQ ID NO: 64855 - protein, 138 aa, Zea Mays
MGVNFRKRLFTMINNLPSIYEVVTGTAKKESKEKTPKSSNKTNKSGSKPSRQVEPNSRVPKMPPPKDEESEGEEGEPQEDHESALCGACGLGYDDFWICCDLCETWFHGKCVKITPNKAEHIKQYKCPSCTGSKRAKA

SEQ ID NO: 64856 - protein, 119 aa, Zea Mays
MGMIRSTPPLVQDQDTRRTILRGPCHRGLYPLSTDSSLKQANAVDKPTVSKWHNRLGHPSLPMVTKVIDNNNLSCSSVSNKKSVCDACQQAKSHQLPYSRSVSSTSFPLELVHSDVWGP

SEQ ID NO: 64857 - protein, 321 aa, Zea Mays
MPALYFISRAVSNISSVPKEIYDDLSQKDVESLSGRTLSSANTIGPASAGGAKANSSWKLKSVVTLALTLLTSSQAILIVWSKRAGKYEYSVTTANFSVEALKCLLSLAALFRTWNCHGVTDDNRLTTSFDEVGVYPIPAVLYMVKNLLQYYIFVYVDAPAYQILKNLNIISTGVLYRIILKKKLSEIQWAAFVLLCAGCTTAQLNPSSDHVLQTPIQGWMMAIVMALLSGFAGVYTEAIIKKRPSRNINVQNFWLYIFGVIFNLVAICVQDYDAVMNKGFFHGYSFITVLMILNHALSGIAVSMVMKYADNIVKACGTSM

SEQ ID NO: 64858 - protein, 327 aa, Zea Mays
MATAAAATASSSLLAPAASSTAPASSNALLFPSSVPSLRAYPRLLLAFRRPAAAAIADPQGAVLEEEAEVDQQGQYDDDDGYEGGRGPAFTAPTRPRTGKAALLLKRDRTRSKRFLEIQKLRESKKDYDVPTAISLMKQMSSAKFVESAEAHFRMNLDPKYNDQQLRATVNLPKGTGQSVKIAVLTQGEKIDEARAAGADIVGGEDLIEQIKGGFMEFDKLIASPDMMPKVAGLGKILGPRGLMPNPKAGTVSSNITQAIEEFKKGKVEYRVDKSGIVHIPFGKVDFPEEDLIANFIALLRGTSHLVLRGYTGKRRTCAHPWDLLSS

SEQ ID NO: 64859 - protein, 143 aa, Zea Mays
MVPRRWGASSHGSSARISPRSRARRSRRPRPTGPSSMACTSASSAPAAPPPARPTGGTQRSTSAQPRCSTPTGEQGFSRDAGLAMEAIHSLSASKSSYPMVKYTDCGVSPQDLHHVFTKFAHPQSGGNRGFNGSGLGLAICKR

SEQ ID NO: 64860 - protein, 110 aa, Zea Mays
MKRSHRFLDKLPVVHWHLLTDKSIDPTYLVVMTATAAVGAATLLQRVIQIRTKPTPPNPRRPSSVQAFHSSTSCAGHQSRAIRKAVAQSAVHRFSAFKLLKRFSRVSSKN

SEQ ID NO: 64861 - protein, 117 aa, Zea Mays
MIRVSVHRTDWEGGYFPLTLHFSEDYPSKPPKCKFPQGFFHPNVYPSGTVCLSILNEDSGWRPAITVKQILVGIQDLLDQPNPADPAQTDGYHLFIQDPTEYKRRVKLQAKQYPALV

SEQ ID NO: 64862 - protein, 160 aa, Zea Mays
MSQISLWPSKCSTLTTLIYLAKKKDLLVMSMFNHLTCLLMVKEGVIDREEFKKIMALMRSFNRQGSTHKDGLRIGLKVGKPVENGGVVEYFFGSDGNEPLHFDKFSKILKELHDEVVCFFHTLIQHDELSIKVDPDLTWKKNTFMYYLNNFFHSTCLVQW

SEQ ID NO: 64863 - protein, 310 aa, Zea Mays
MSLYLCSMEMLHIVYICLMQGAGKTSLLKAMLGQVKERNSTVLECIHVDLHGKGISNGLCYIDSTTVNLQELPLEVGRFKEELLLGLHDISRKTDLVIAVHNLAHRIPQYQRSNTSQPQPALSLLLDEAKALSIPWILAITNKFSVSAHEQNRLISSAMEAYQVSPEMTKVVNSSPFLMPSARNSLQQIRSATGKLKKDPANRSGYLPVNFGLSSFQRKDIVMHVEGVSSLRQLVHQVVLNNEETAFEELARERLLKELASEKAASLQVKQKPRKRDGSVTAAAVGASLGAGLGIVMAVIMGAASALRKP

SEQ ID NO: 64864 - protein, 321 aa, Zea Mays
MTWDEFETTGTPPSPRSEHAAACFAERYLLIFGGGSHSTCFSDLHLLDTQTMEWSRPKQQGVTPESRAGHAGVTIGEYWFITGGGNSRKGVSDTLVLNLSTYEWSVLTNLEARAPPVSEGSSLVMHTINGENFLVSFGGYSGRYSNQAYALKASLKPSVPSQQINESDTNGFSPLSVAENSSRKVIFEIEELKDEKPGNRADNSKTLGQVVMVEQNEIENRLNQEHLQSLRLKQELTGLENRNAELTEELHLVQDQLSIEQTRASKFENEISDIQQRLQKMDTLEKEIESLRYELDSTVSEEESSSGNELHRSRGFWRWNG

SEQ ID NO: 64865 - protein, 217 aa, Zea Mays
MAMVMTDADAATATATADAATATATATADAATATVDADSVTATAAEKPKHAEKPDYAPYNGASTADGGTGARVRRGGGVVDSVVARWRREDMLDKSPLALHAAAAVFAFVALVLVASNQHGDWMQFDRYQEYKYLLSIASLALLYSLAQAARHAHRMRGGVDPISSASGRLLDFVGDQASHCFQLLVCSYKCCADTGISLSQQKSDVFFDLVEIPAQ

SEQ ID NO: 64866 - protein, 607 aa, Zea Mays
MKYVLVTGGVVSGLGKGVTASSIGVVLKACGLRVTSIKIDPYLNTDAGTMSPFEHGEVFVLDDGGEVDLDLGNYERFLDIKLTRDNNITTGKIYQSVIDKERRGDYLGKTVQVVPHITDEIQDWIQRVAMNPVDDTEEPADVCVIELGGTIGDIESMPFIEALGQFSYRVGPGNFCLVHVSLVPVLNVVGEQKTKPTQHSVRGLRGLGLMPDILACRSTQPLEEHVKVKLAQFCHVPIPNIINLHDVTNIWHIPLLLRKAHEAILKVLDLQCASKVAREPQLSEWTERVSRCDRLKSPVRIAMVGKYTGLSDSYLSVIKALLHASVALDRKLVVDWVPSCDLEDSTAKETPDAYEKAWESLKGADGVLVPGGFGDRGVQGKILAAKYARENNVPYLGICLGMQIAVIEFARSVMKLHGANSTEFDPTTKTPCVVFMPEGSKTHMGATMRLGSRRTFFQATNCKSAKLYGNACYVDERHRHRYEVNPDMVPEFEKAGLSFVGRDESGERMEIIELPTHRFFVGAQFHPEFKSRPGKPSPLFLGLVAASSGQLDHLLQRGLTSSAGRDICGKGGAQKPKACQNGHVMKPLNGLVHGHYSATRCNGVIPI

SEQ ID NO: 64867 - protein, 859 aa, Zea Mays
MCVAEGVFIHSLSLSPAPVRYPVSRLEAALQRPAAMATRAGRLPTTPAPALLLLLAFPFLLQGVLPSRAGDTVAAGRPLSGGQSLVSKRGKFRLGFFRPDNSSQRWYLGIWYNQLSVHTTVWVANRGTPISDPESSQLSISKDGNMVVLDHSRSSTAVWSTNVTTGVSSTSTVGVIRDNGNLVLADASNTSAVLWQSFDHSGDTWLPGGKLGRNKRTGEVTRLVAWKGRDDPTPSLFALELDPRGSSQYLLNWNDSERYWTSGNWTGTAFAAVPEMTSTGASPVSDYTFGYVDGANESYFTYDVADESVVTRFQVDVTGQIQFLTWVAAAAQWVLFWSEPKRQCDVYAVCGPFGLCTENALPSCTCPRGFRERDLAEWMQDDHTAGCARNTALQPCGAGAAARDGQKRRRDDDRFYTMPDVRLPSDARSAAAASAHDCELACLRNCSCTAYSYSGGCSLWYGDLINLQDTTSAGSGTGGGSISIRLAASEFSSNGNTKKLVIGLVVAGSSFVAAVTAIVLATVLVLRNRRIKSLRTVQGSLVAFTYRDLQLVTNNFSEKLGGGAFGSVFKGVLPDATLVAVKKLEGVRQGEKQFRAEVSTIGTIQHVNLIRLLGFCSEGSRRLLVYEHMPSGSLDRHLFDRDQQPGVLSWDARYQIALGVARGLDYLHEKCRDCIIHCDIKPENILLDDAFVPRVADFGLAKLMGRDFSRVLTTMRGTVGYLAPEWIAGTAVTTKADVFSYGMMLFEIISGRRNVGQRADGTVDFFPSTAVNRLLDGDVRSAVDSQLGGNADVAEVERACKVACWCVQDAESLRPSMGMVVQVLEGLVDVNAPPVPRSLMVLADPSKYAVEFFSGLPST

SEQ ID NO: 64868 - protein, 84 aa, Zea Mays
MLAFKPIPRGSLRQIVGAKDTVSSSHHGGAPVDRSGHPGPGPGPDPSSVWQWRHGYPIVWGRSRLVGSNSCASHDYIGQSISEC

SEQ ID NO: 64869 - protein, 597 aa, Zea Mays
MGSFLWKQPSYLFILIILHLVAHEARTLSSDGEALLAFKKAVTNSDGVFLNWREQDADPCNWKGVRCDSHSKRVIDLILAYHRLVGPIPPEIGKLNQLQTLSLQGNSLYGSLPPELGNCTKLQQLYLQGNYLSGYIPSEFGDLVELEALDLSSNTLSGSVPHSLDKLSKLTLFNVSMNFLTGAIPSSGSLVNFNETSFVGNLGLCGKQINLVCKDALQSSSNGLQSPSPDDMINKRNGKNSTRLVISAVATVGALLLVALMCFWGCFLYKNFGKKDMRGFRVELCGDFSGSSVVMFHGDLPYSSKDILKKLETIDEENIIGAGGFGTVYKLAMDDGNVFALKRIVKTNEGLDRFFDRELEILGSVKHRYLVNLRGYCNSPSSKLLIYDYLQGGSLDEVLHEKSEQLDWDARINIILGAAKGLSYLHHDCSPRIIHRDIKSSNILLDGSFEARVSDFGLAKLLEDEESHITTIVAGTFGYLAPEYMQFGRATEKTDVYSFGVLVLEILSGKRPTDASFIEKGLNIVGWLNFLASENREREIVDLNCEGVQTETLDALLSLAKQCVSSSPEERPTMHRVVHMLESDVITPCPSDFYDSE

SEQ ID NO: 64870 - protein, 526 aa, Zea Mays
MRDPFDAPVDLINPDHNGGNKLSRTGAVSAGDYGLQNGPKSFAPNSDTLVRHQVQVASLHKDLVLEDPNTRIMDPETKELYFRSQSQGDEILLLRKKIAEASLKELRLLGEKHILERRLTDLRMAVDEKQEEAISGALQQLNQKKTHLEDNMRLANELKVEEEELYFFTSSLLSMLAEYNIRPPQINASIITTVTKRLYQQMHLKLRSLNDNLGDMTQPGNIYNPNLQQVTLSRNEPSPSYNLDSNRNTLQQYAQGPSDRHMDQMYHGSNFQQDTGGTTPSNYFEGDRRVDGDSQLYQPDGDALPGIEGFQIAGEPRPGFQLTACGFPTNGTTLCNFQWVRHLENGTRQSIEGATMYDYVVTADDVGTFLAVDCTPMDDNGRQGDLVTEFANNGNKITCDPEMQSHIDAYISNGRAEFEVFVLAYSPEEWELATLVLTRPNYQIKFKKTGEAIIDEKYSQSLQMKIPNGRTTQFVLVTAGATLPFNTQGISEPNNEDYDVRLRDLIVLVMRTFQKKALDAKRKVNT

SEQ ID NO: 64871 - protein, 403 aa, Zea Mays
MFCIPFNAYFGGIMNFIVYLANCSTCIPIRFLGNNSLTGGLPSSIGPSIKYLDFSYNYLSGNLPSWASHNLQLNLVANYFVINKSKDSVLPAGLECLQRNTSCFLGSPQSSSFTVDCGSSRSVFASDNSMYQPDDANLGVASYYISSPPRWGVSNVGRFMDTSNGSYIVNSSRRFQNTLDSKLFQTARMSASTLRYYGFGLENGDYTVTLQFGEFDFEDLQTWKSVGRRVFDIYLQGERKEQNFNIKKAAKEAGEASTSYTAVKKQYTVPVTKNILEIHLFWAGKGTCCIPNQGDYGPTISALSATLNTKKKGNKIGVIIGVVIGATVLGLAILATLCVWRHKRRKVSLEQQELYNIVRIPNVFCYTYGELRTATENFSSANLLGEGGYGSVYKVCSFVVHNA

SEQ ID NO: 64872 - protein, 205 aa, Zea Mays
MGLLCSHALKVFTLQNVDTIPEKYVLKRWTKDARRSMYTLAQDDSTQQECTEAELAYRNRAMQYAYNLIIKSQELEESRKIFWDSLETGEKALEVFFEMRNMRTQAAKDADKNVKKKKKTSKGTNPKKAKQAPGVSSTGPELIVHTNEHQFQSSQDAQGNATIGRPYYYQQAFPNAPIQPNQMYMHTNMHTMPLCTPQESCLSFH

SEQ ID NO: 64873 - protein, 445 aa, Zea Mays
MLGRTRDQIRTTEQVKATIGTCQALKLDALVIIGGVTSNTDAAQLAETFAQLKCPTKVVGVPVTLNGDLKNQFVETTVGFDTICKVNSQLISNACIDALSAEKYYYFIRMMGRKASHVALECALQSHPNMVILGEEVSVSKLTIFDITKQICDAVQARAEKDKYHGVVLIPEGLVESIPELYALLQEIHGLHNKGVSVENISSHLSPWASALFEFLPPFIRKQLLLHPGSDDSAQLSQIEIEKLLAQLVETEMDKRLKEGTYNGKKFNAICHFFGYQARGALPSKFDCDYGYVLGHVCYHIVAAGLNGYMATVTNLKSPVNKWKCGAAPITSMMTVKRWSRGAATSQIGKPAVHMASVDLKGKAYELLRQNSSSFMMEDIYRNPGPLQFEGSGADTKPISLCVEDQDYMGRIKKLQEYLEKVKSIVKPGCSQDVLKAAVFSEKIC

SEQ ID NO: 64874 - protein, 172 aa, Zea Mays
MQTRRLLLDPAIHEEFTRLKNLVEEKEKKIKELQDNVAAVNFTPSSKLGKMLMAKCRTLQEENEEIGTMASEGKIHELGMKIAVLKSQNNELRNQFDVLYKHMDGVTNDVERSNELVSILQEELEAKDLELTRLKEVLAQKGATQDAPVETSDDAGNGQEADSDTLQVKAES

SEQ ID NO: 64875 - protein, 71 aa, Zea Mays
MKFVSFSESAASLNFMLVESSYSSTGDASPTFMHGNFAVISGKSISFKALINSAEDSPGALCFSTKSCGLL

SEQ ID NO: 64876 - protein, 59 aa, Zea Mays
MFHHSFIPHTLKPSMLASFCIHIKQMFKNSSTSSSSTPYMAFVFLCLALHMKLLLHLDP

SEQ ID NO: 64877 - protein, 546 aa, Zea Mays
MPSSYAAAAAGSSSRKPNRTSSAAAPTLRPPAPSPSPAPAPLAVPCYQELTCERKCQRLRNCGRHACKRRCCAGDCPPCSETCDKKLRCGNHKCLSPCHRGACSPCPLMKTISCACGKTCFEVPCGTEKNQKPPKCSKKCNIPRLCRHKLECRPHKCHYGACPPCKLICGEEFPCGHTCKERCHGPISPPNSEFTLKPTKKKMGKHIECTPGTPCPPCKEVVLVSCFGQHLGQERTMPCCKWRPFPCENLCGNPLLCGNHYCTKSCHVLEVPLNHPEGDRTTSISKVNALAMPCEQCNLPCQRVREPPCSHPCPLPCHLNDCPSCKVLVKRPCHCGAMVHAFECVFYNNLNAKDQIKIRSCGGPCHRKLPNCPHLCSEVCHPGVCPSVDQCMKKVNTRCACSTLKQEWRCQDVLKEYRKSGRDPKEVPKSQFGVGLLACGEDCKKKLKAPDSELHLRKSQENKIPAVEVVNAPKRRKRRDRGQEVKISKFQEVKTFVLRALLIILLSIIVAAGLYLLWKGIFWLSDWMNEMEEQRASQRYPRGAML

SEQ ID NO: 64878 - protein, 74 aa, Zea Mays
MITSPLLPPGKQPCDPTPPPFCFWRMTCVRGTIIGYKRPQQCPTLDRGRMPCSPQPFDCVVCWLLDIIPVYMSA

SEQ ID NO: 64879 - protein, 241 aa, Zea Mays
MPLGTSPVVAEAEAWTWENAAAGAAAGFATVAALHPLDVVRTRFQVSGGRGWSEVPPYRNTAHAVYTITRSEGLRGLYAGFYPAVLGSTVSWGLYFFFYNRAKQRYLQRKNDQLHPVHHLISAAEAGALVSLFTNPIWLVKTRLQLQTAKHHTSQYSGFSDALKTILREEGFLALYRGIGPGLLLVTHGAIQFTAYEELRKAMIFFKSAQSRADDAGGGESLVVTDQMCVWVLNIDFSMVQ

SEQ ID NO: 64880 - protein, 143 aa, Zea Mays
MASLTELSFNWTGFINAMISNISFTYMSIYSKKAMFEGPQLMQHGFSDAIAKVGLTKFVSDLFLVGLFYHLYNQIATNTLERVAPLTHAVGNVLKRVFAIGFSIIVFGNKISTQTGIGTSIAIAGVAMYSYIKAKIEEEKRSA

SEQ ID NO: 64881 - protein, 825 aa, Zea Mays
MQKHSGLRSLEGFRSLVGSTSTAMKVANPRPSPDTGGISYGSFANLKITAEKLVKEQASVKTDLEMAHVKLRRATEQINIIEGKLQQALNENAKLKVKQTEDSKLWQGLDSKLSSTKTLCDQLTETLQQLASQTEQGRQEMLQIKQEKEEMDRSYKGQLYSNDTTIKEKDSLIKQLEGSLDDNKSRLIYLDSRLQCMEQELKLKDDVCISLKGNLASSESEKNSLELMNKGHILEIKKLCQDNKDLNELFSSFMVKVTELDKEHASMSSHVSRLISSFERFYEMAQEEKMLMARSSKDKFEHLQSQYVDLTSENNALKTEIEELKSRLIELQRTQEIVMVQHVEECQVAEDKIRRLESEAEVSASNINQLEKLASELQGRIQKLLEDSTFAENHKQELLQKILKLESDNQELLGQMQSIMEEKSNNAESLHGEITKRDQQVDTLENQINQLRSVLDEKEQLYLCSVQKEKTLEEQKLQVEALLSATECKLSDAKKQYDLMLEGEKIELSKHLKELSLKNDQAINEIRKKYELEKIEITNAEKEKAEKLIREIENKCNEKISQNKHDSQRYLICLKEEHGTTVARIQQDNEHKESTLRAYHKEELQRIQSQAENEMRERLSLLRKEHEVQIKSLRMHHEEECQRMQEELELQKSKEEKQRALLQLQWKVMGESQRVDQEVNSKKEYSVSSIRRSDPYGRKEQEVQLVSPETNRKDVNLPGILQSPISNMLRKVEKVSQDIPKHRKVTHHEYEVETANGRITKRRKTRSTVMFGEPNSQKPLHNTTDKDVKKLKKVPTRSRAHPANIGELFSEGSLNPYADDPYAFD

SEQ ID NO: 64882 - protein, 336 aa, Zea Mays
MSMKMIDEAHARKGKIKAFTSYCGGLPSPAAANNPLAYKFSWNPAGALRSGKNPAVYKFLGETIHVDGHNLYESAKRLRLRELPAFALEHLPNRNSLIYGDLYGISKEASTIYRATLRYEGFSEIMVTLSKTGFFDAANHPLLQDTSRPTYKGFLDELLNNISTINTDLDIEASGGYDDDLIARLLKLGCCKNKEIAVKTVKTIKFLGLHEETQIPKGCSSPFDVICQRMEQRMAYGHNEQDMVLLHHEVEVEYPDGQPAEKHQATLLEFGKVENGRSTTAMALTVGIPAAIGALLLLKNKVQTKGVIRPLQPEIYVPALEILESSGIKLVEKVET

SEQ ID NO: 64883 - protein, 152 aa, Zea Mays
MWQILLYVAWLSCVYCYQTWLPVENSEVRKDGIKGTYRVDVDIPANDWINVTKFYDVLIFNTGHWWDRYKFPKDTPLVFYKGGKPIEPPLDMHNGLKVVLKSIASYIEREVPRKTLKLWRTQSPRHFYGGYAFQSCELFIPLHKSCAAQFLV

SEQ ID NO: 64884 - protein, 517 aa, Zea Mays
MRDEKPPPAAAAAAPAPPRVTHRARIVRPQPQNPVFKRCGTLVERRGQSRGPPPDRAGAGGVAAPARPSGGEGAGMVLGGGMAAAAVGGDDAVVMQLGGAEGEETVVTVNCPDQTGLGCDLCRTILEFGLRITRAADVSTDGHWCFVVFWVVPRSSSIKVRWASLKNRLMSMCPSSYSIPFFYRDVSQPEPGPLQFYLLKLMSPDRKGLLHDVTHILSDLELIIHRVKVSTTPDGRVVDLFFITDGMELLHRKERQEETCSALTATLGPSISCEVVPAEGFQQGFSSLPPEIAEELFRAELADTDSEVCSSPLSAELRKVRTTATVNFDNSLSPAHTLVQIVCADQKGLIYDILRTMKDCNIQIFYGRFRSDKKGSASKGSSGCREVDLFVKQVDGKKVTDPAKQDALRSRLRSETLHPLRVMVVGRGPDTELLVANPVEASGKGRPRVFYDATLALKALGICIFSAEIGRQAASERHWEVYRFLLDDSKEFPLASSLANRNCVVDRARKTLMGCYN

SEQ ID NO: 64885 - protein, 432 aa, Zea Mays
MASDRIMVDTLTEDNGGDARSSSSEEMPSDQQSHPGDSLAEWRSSEQVENGTPSTSPAYSDNDDDDCGPRPSDLYGKFTWRIDNFSQINKRELRSNSFDVGGFKWYILIYPQGCDVCNHLSLFLCVANHDKLLPGWSHFAQFTIAVINRDPKKSKYSDTLHRFWKKEHDWGWKKFMELSKLHDGFIVEDVLTIKAQVQVIREKTDRPFRCLDGHYRRELIRVYLSNVEQVCRRFIDERRSKLSRLIEDKLGWSSFSGFWLAMDPSVRRHMTREKTETILKVIVKQFFIEKEVTSTLVIDSLYSGLKALEYQSKNKKAIPKLTETDARSTPMVLIDQDMFVLADDVIFLLERAALDTLPHQHLPTKDDKSSQNRTKDGNSGQEFSKDSIERDDRRLIELGWKTLELFSLAHIFRRTRHPSLVDFVLAMRRRRL

SEQ ID NO: 64886 - protein, 391 aa, Zea Mays
MMKNTLKMQEACSMEKEGEEDQKIDMLPFNLPNLKKGNMSENLWNNPNQLSEEMVLSMKDIFLNLSTSSKMSPEEPFSNSSSSAEHLSGSTLTTLSDSSVIASVQPSPSMYLNHDDGNFDPYNVNGKEAQRDIGSYSSVAEVSWMYIGNEQLEYASGALRKFRFLVEQLSKVDTSCMNCDERLAFWINLYNALIMHAYLAYGVPENDIKLFALMQKACYTICGQPVSAAEIEFVILKVKTPVHRPQLSLMLALHKFKTSENLKKYSIDGTEPRVLFALCCGMFSSPAVRIFSAENVRAELQESMRDYIRASVGVNDKGELMVPKLLQSYAKGIVEDSLLADWICRHLTLDQLAAVQDTSSSHTQRLLGVRSFSVIPFDSRFRYLFLFDNSR

SEQ ID NO: 64887 - protein, 1990 aa, Zea Mays
MCDCEKLENALIKREINTPEGVITTTVGPNSATISRDGLAKQIYSRLFDWLVNRINASIGQDPNSNKLIGVLDIYGFESFKTNSFEQLCINFTNEKLQQHFNQNVFKMEQEEYTREQINWSYIEFVDNQDVLDLIERKPGGIIALLDEACMFPKSTHETLSQKLYEKFKNHKRFTKPKLSRTAFTIQHYAGDVTYQSDQFLDKNKDYVVAEHQELLNASKCSFVSGLFPQATEENTKSSKSSIATRFKIQLHELMETLSSTEPHYIRCIKPNSVLKPGIFENTNVLQQLRCSGVLEAIRISCAGYPTRKLFHDFLHRFRVLAPEILKEKNDEKVSCQKVLDKMGLQGYQIGRTKVFLRAGQMADLDARRTEMRNNAAKGVQSQFRTHVAREQFLVLRDTSIYLQSFVRARLACKQHEFLRQQAAALRIQKNARWYFAWKTYYQLRLSAITLQAGLRSMAARNEFTFRKKNKASVHIQSQWRCHRDYSNYMNLKRAALTYQCAWRRRVARKELRKLKLAARDTQALKVAKEKLEERVEELTSRLDREKKLRADLEKSKADEVSKLKEALHEMEQRVEEVKAMQEQESAKKAVEEALAQEREKISLLTTEIEGLKVLLVAEREENDKMKKAHANALETNEELNKEVSDADEKIKQFSDTVRRLEGTVSEHEGLLLTERQQNEAANAALAESQARNEALVSKLEDAVKQNDLLHEADQRFQEATKNLESSLTFEKQRHEANLIELAEAREKIEELQREVGDTDEKFTLLQTSIQSVEERLREKDALLTTERLESEATKKSLNESEDRNQDLLLKIEIAQKDIAHFQETVRRHEENMAALETSLRSERQQNDAIMKQLAESQGEIGELQRKLEDADARNGLLQDSLQRHEENMAALETSLRSERQQNDAIMKQLAESQGEIGELQRKLEDADARNGLLQDSLQRHEENMAALETSLRSERQQNDAIMKQLAESQGEIGELQRKLEDADARNGLLQDSLQRLEDDATTREALMETERKETEMTKKTLTEALDQIEELVKEVECANHSVHQLQDSMQRMEQTAVAREATLLAEHQEKDATSKALAEAQGRIEGLLKEIYSANRKNDQLQSTIERLEEGATTTDALYLAERKGHDQTKKSLSEAQETNKELLKKIEKAEKNIDQLLENVERLEKDAITRESLLLTTKQSYGDTAKLLLESQEKNQELVHKVEDSDSKIVLLEDSVKRFNHFSYRLEESTADKDSLLAIERHENSETKKELVGSQKKIAELLTEVQDTRANVAELEDLIRRLEQDVTAKEALLLTEKEAHDATRKTLTEAQEESGELLKKIHDNDKHILQLQFTIQRLEETTVANENLLLREREQNDITTKAHNESQEKYEELLSKFVDVDRKIDLLQGTIERLGENTTKDSLLLSERHEKDAIKKALTEAQEKNEELLMKVEDANEKIEQLQTTIDMLEDNVAAKDVSLEAAMKENDAIRRSLTEAQERNDELLKKISDSEYRIHLLQDTIQKLQVDAISRLSSFVMEKQESDASKRAVTEAHERNEDLLKRNEDLLKRNDDLIKKIEDSSKIVTQLQEALQRLEGKACNLEAENQVLRQQATSTPPTSAKSPASRAKISRIHRSPENGHNLNGDIRQTEMKPSTGTSEAITSAANVPDLGDQKDFEHGEKLQRIPKQKYQPSHHQQPQDDQQWLLACIPQHLGFSGSKPVAALLIYQCLLHWKSFEAMKTGVFDSILHAINSATEAQNDMRTLAYWLSNLSTLTVLLQRSFKTTRTAISTPQRRRFSSERIFHGNQTSNAGLAYLSGQSVVGSAGLPQVEAKYPALLFKQQLVDLIEKVYGMISDSVKKELNPLLELCIQDPRTSHSSIAKGNLNGMGQQNQLTYWLGIVKILTSYLDVLRVNHVPSILVHKLFTQIFSLIDVQLFNRLLLRRECCSFSNGEYVRAGLTELKHWSDNATREFAGSAWEALRHIRQAVDFLCKKFPLYISWAASIHP

SEQ ID NO: 64888 - protein, 282 aa, Zea Mays
MELEADGNSKLLNFNGGASQTRSIVQLNGERSSRILFVGNIDSNVEDSELKFMFEQYGDMQTLNASCKHHGFVMVSYYDIRSAENAMRALQSKPLRCRKLDIRYSSPKDYPLDKDINLSMVIVNLEASITNDDLHQIFGVFGEIKEIHPTSDNDHYKSIEFFDVRAAEAAQYALNRSEISGNKNKLEPSCLGGTERLMQQMSRALEHEQFGACKLGSPNSPSTCFGTHQRCFWQLLMKVTGELMILSTCQLTLRHFMGKGGRNSTVRKWPHLLMLESKENQL

SEQ ID NO: 64889 - protein, 98 aa, Zea Mays
MRYYIYEKNMLMLWIMSGIKIFLQASFEMSHQQALAQVTAQAVHSQYNMINHADYTISFSSTTTPALVTAQHANFSGNLTSAQEKPALPSHTVWPEGS

SEQ ID NO: 64890 - protein, 268 aa, Zea Mays
MTIEDSRKLLPADLYPSWVVFSSQQKLKWLNQELTKIWPFVNDAASELIKTSVEPVLEQYRPIIIASLKFSKLTLGTVAPQFTGISIIENTKESGIVMELEMNWDANPSIILAVKTRLGVALPIQVKDIGFTGVFRLIFKPLIEELPCFGAVCFSLRQKKKLDFRLKVIGGEISAVPGISDALEDTIKNAIEDSITWPVRKVIPIIPGDYSDLELKPVGTLEVKLVQARDLTNKDLIGKSDPFAIVYVRPLPDKMKRSKTIVSLVAYL

SEQ ID NO: 64891 - protein, 92 aa, Zea Mays
MVAYTFSGDKATPFFGTATALVFPVQAFGGSCFSSGFYLQLSFLKMKSQLLKAEMKSLMKEQRQKVQYIYYRDYEGDQQPMLSLDQVITRER

SEQ ID NO: 64892 - protein, 397 aa, Zea Mays
MDDPRWRRCGGPRGSVPKLVDPEQGVDAGAGRACASTTRTRGGGGGEGVREARSGGRAGEEGQLVLATEVSSRREGDGTGDGGVRVGSEEDAGATQRAPSRSSCGAVQLPRGHAIPTSERHNPHDAGALAPGVRVLGDGVGRGEPHRGADMGEFCPSPQGDSALAAPPLTLSSPSPATAVRPSYGSCDRRYVKLVFDNLHGSISVDPLALQFVDTEEFQRLRDLKQLGLTYLVYPGAVHTRFEHSLGVYSLAGKAINNLKTYQGEELGIDHVDMQTVKLAGLLHDIGHGPFSHLFEHEFLPRVDPGSSWSHEDMSVLLLDSIVDKHAIDIENGYLKMVKEMITASAKPTSTKSANEKHFLYDIVANGRNGIDVDKFDYVGRDCRACGLGCNFQYWRL

SEQ ID NO: 64893 - protein, 335 aa, Zea Mays
MCHCYVCDCPAPCALWDKHCHATDKDRKWKRLREISKNKSQPNPKRRIPQHFKRSVTTGPSSSQYSANMTGFTGRFPASGTANQIQQVDISVMVAQDMVRGISLPSAPSPTPRTKNRSYGSKGGHVSAKTFQSNPSQFCVRAPMGSHGHRYRPPSYPQPPPNTVVGTGVPLSRCASLNAEAQGTQRPQVPPAGTISKESLANLARRLGLPYYNTNQPLGQQSTSTSQFLHMHPHEMLPAQGAQNTTWQAYVKKSVATTSQIVPSSEHNSSIHAPGSTVLPSGSVQIQQPLRQFKSGTVLSSGAAQIHQQPLRQLDSQSSVTPSETVPSTLYLPQP

SEQ ID NO: 64894 - protein, 603 aa, Zea Mays
MFDAGSPRPAPHKSNSTSAPSHGYPGSTAPAPVRLPPPKGKGEGNFAHAPNHPNQYHSTSYSPGSALPPAHPPDIPAFRKPKILAPAPSQSLLPPPTNSCLPPSPPAASMNNGLSNVNGPSLHPLAADVGNYRERKGRHVIIIIILSSVCAFILCAGAALVLYFKLRNHIHLTEASLVPTKPTGPVSAMVGNRLESRPISASPSFSSSLVAYKGSAKTFNLVEMERATLGFDESRIIGEGGFGRVYEGILEDGERVAIKVLKRDDQQGTREFLAEVEMLSRLHHRNLVKLIGICTEGHSRCLVYELVPNGSVESHLHDKGAAQFDWNARLKIALGAARALAYLHEDSSPRVIHRDFKSSNILLEHDFTPKVSDFGLARTALGEGNEHISTRVMGTFGYLAPEYAMTGHLLVKSDVYSYGVVLLELLTGRKPVDMLRPPGQENLVAWAGSLLTSRDGLESIIDHSLGRSIPFDSIAKVAAIASMCVQPEVDQRPFMGEVVQALKLVCNEGGEFNESTFSQDLHIQDVEVMSRASTDVDVDPTLSAELFTSSARYDAIDAPGSFRRYSSSGPLRVGRTGLNKERGLSTGSSSEHVGLQRFRIDGE

SEQ ID NO: 64895 - protein, 448 aa, Zea Mays
MLAIFYNNLGCILHRQRSYHTSIWCFSKALKYTLSLRSEKPMKLSTLSQDKSCLISYNCGVQHLMCGKPLLAASCFREAMPLFYKRPLFWLRFSECSLLALEKGLLCAKGASSCNDEIEVIVVGSGQWRQLIVNHVSLRSNLGCAGVTSGEHKKLVSLGFARQCLLNALLLLNATEQENWVTTSNAEDYIQGTLQGYKNSGQKNTTSTDSKTPSAPTLANVNGEQKGTSLNATLQSSLAFYNEICRKENLKMRQAILGNLAFVELCLENPLKALSYAKSVMQVKDCSRMYIFLSHVYAAEALCTLNRPTDAAEKLSVYIRDGNDIELPYNMENSEKALVEKDSDSEDLAAATVTKVATEESEYSEGLRPEEARGVLYINLAMTAAVQGKVEQANYMVSRGLAMLPNNPRAVLASVYIDLLQGKSQEAVVKLRHCRNVRFRPGSIAASS

SEQ ID NO: 64896 - protein, 81 aa, Zea Mays
MTSCRGHTQQILPLRCCIRAPASAAQREMTLNKPSNRPPTAAVFRFEPLVRAQRLSRIVQYSSVKKKKTGACSYLILIPVT

SEQ ID NO: 64897 - protein, 298 aa, Zea Mays
MILCLWSAESCKFMNEYNVPNSKTLVDFDFDENKIVGLTSSQICIWRRSEPRSIFQSGGASFNHGLCMSFADPEVVIGCEDGRAFVYDMYSRSCSRIYRLHSSPVTCLMITDDQLIVGGSTFGNVAIADQTSGQKLGVLKSDHGPLAIRSLSSCTNSHMIFAGSSAGYAHCWDLRTLRPLWEKRVSPNVIYSTRHLPGDTATLAVGGIDGVLRVICQRTGDIIRSLVVDADLPAEATSRSRQQIEKKRVRRIDPDAQLDGIPRRLRPQITSLSVGMKKIVTTHGENYIRVWKFRMKSS

SEQ ID NO: 64898 - protein, 206 aa, Zea Mays
MAGRREGEHQASPWRSGTPAAEEDSGAFPSAIIFFALVGATATTAAVGQLRRTVSWFYTQLSRSEPYVFWEDIPRRPNRHRCGEAWERYHQRMRDRTEDQRERVERIRHMQDVFKKERSKCRDYRNWDSHNPNYYQHHQRDDWYWNAEAFYANQRTNFRAMTREAMTYTMSHHYSVLGLDRSRSEPFSDAEIKRVTKETVARSLFT

SEQ ID NO: 64899 - protein, 697 aa, Zea Mays
MSSRVGLRLLDGSGRTAWSSNTTGASTSSVAQLLGSGNLVVREKSSNAVFQWQSFDHPQNTLLAGMRFGKNLKTGMEWSLTSWRAQDDPATGDYRRVMDTKGLPDIVTWHGNAKKYRAGPWNGRWFSGVPEMDSGYKLFSVQMVDGPDEVTYVLNTTAGIPFTRVVLDEVGKVRVLMWLPTSRVWKEYPWLPRDACDEYTSCGAFGLCNVDAAPTPSCSCAVGFSPVNASEWSRREASGGCQRDVPLECAAGNGTAVTDRFAPVHGVKLPDTDNATVDMGATLEQCKARCLANCSCVAYAPADIRGGGDGSGCVMWKDNIVDVRYIENGQDLFLRLAKSESATGERVRLAKILVPVMAFVLALTAAGMYLAWNCKLRAKRRNRDNLRKAILGYSTAPNELGDENVELPFVSLGEIAAATNNFSEDNMLGQGGFGKVYKGTLGQNVQVAIKRLGQCSGQGVEEFRNEAVLIAKLQHRNLVRLLGCCIDGDEKLLVYEYLPNRSLDSIIFDAASKHLLDWPTRFKIIRGVCRGLLYLHQDSRLTIIHRDLKTSNILLDADMSPKISDFGMARIFGGNQHEANTNRVVGTYGYMSPEYAMDGVFSVKSDTYSFGVIVLEIISGLKISLTHCNGFPNLLAYAWSLWIDDRAMDLVDSSLEKSSSCSEALRCIQIGLLCVQDNPNSRPLMSSVVTMLENENV

SEQ ID NO: 64900 - protein, 249 aa, Zea Mays
MRRHGWQLPYHPLQVVAVSVFLALAFAFYVFFAPFVGRKVFQYVVMGLYTPLVLCVFFLYIWCAAANPADPGVFKSKKYLSLYGSGKHKHLKESRKTSSDARLQIEGTREKQEHEVAASSERSITQYKDNNPSCLSSTLSPSLLLFYPLSFVFSCCQPHESSSEQQATEEGMFFCSLCEVQVLKYSKHCRVCDKCVDGFDHHCRWLNNCIGRRNYRRFFILMSTAVILVSMVCAIWASLSYNQQLEYWC

SEQ ID NO: 64901 - protein, 139 aa, Zea Mays
MSSQLIEEHRSGAEVHVGHELCERKSREFMVELGLPDGLLPLPSLDEVGYNRPDPHLRLHRQAGVVRQGGDGVRGARADARPRRGEEQGAPHLGHRLPARARGGGGGPQGGGRGRRRRRRQLICSSFRRRRPCVGCSIR

SEQ ID NO: 64902 - protein, 89 aa, Zea Mays
MGAVQVKALPTQGTRSRLARAQPRTRTADPGGFTSRPRASSSNGRTFELARGPARAGFAEKQPWPDHLANRPYRRSIQYKDCLTPYPDA

SEQ ID NO: 64903 - protein, 467 aa, Zea Mays
MGLSVLFPCCLLHSIIPTYQQGLIAMAYLYLPVLIFQFMVCFCQSVDRLTPAKPLLHGDVLISNGGVFALGFFSLKNSTSSSYVGIWYNNIPERTYVWIANRDNPITTNAPGKLVFTNSSDLVLLDSTGHTIWMTKNNITAGEGGTAAILLDSGNFVVQSQNGTDIWESFHYPTDTMVPDVSFSLSSSDVAKRLVAWKGPDDPSSSNFSMGGDSSSDLQIVTWNGTRPYWRRAAWGGEVTFGTFEGNTSFMVYETIVDTGDGYYMKLTVSEGSPSIRLTLDYTGMLTFRRWNVNTSSWAVFGQFPRCRRKEELKCGGGDKFLTLPSMKTPDKFLYIKNRSFDQCTAECSNNCSCTAYAYANLQNVDTTHDTTRCLVWMGELIDAEKLSNTFGENLYFRVPTSPVSKKKSTVLKIVPVATGTFLLLITCIWLVCKSRGKHQRRNSQNNLLCLNPSSELGTEKSRSSIS

SEQ ID NO: 64904 - protein, 253 aa, Zea Mays
MDRRKIEADLFGGKLHGVAATNALELGIDVGHIDATLHLGFPGSIASLWQQAGRSGRRAKQSLAIYVAFEGPLDQYFMKFPHKLFGRSIEHCQVDSHNLKVLEQHLPCAAYEHPLCVQYDECYFGSSLDSVMTTLKDKGYIINNRAGPFSSSMWNYIGPEKSPSQAVSIRAIEQDRYKVIDKLNSRLLEEIEESKAFFQVYEGAVYMHQGANYLVEELDLASRTAFCRKADLKYYTKTRDYTDINVLGGEFYM

SEQ ID NO: 64905 - protein, 432 aa, Zea Mays
MATGLALAAAPHVASVTGSGTVEEQAAGVGILLQISMLVLSFVLGHILRRRKFYYIPEASGSLLIGMIVGGLANISNTQKSIRRWFNFREDFFLLFLLPPIIFQSGFSLAPKPFFSNFDAIITFAILGTFIASIVTGLLVYLGGLLYIVYRLPLVECMMFGALVSATDPVTVLSIFQELGTDTNLYALVFGESVLNDAVAISLYRSMASMRTHHSGKNFFLVILRFLENFVGSMSSGIGVGLISALLFKYAALGVENLHNLESCLFVLFPYFSYMLAEGIGLSGIISILFTGIVMKRYTFSNLSDDSQRFTARFFHLLSSLAEAFVFIYMGFDIAIERQSWSHIGFIFFSIIFILVARAANVFSCAYILNLARPPHCQIPRQYQQALWYSGLRGAMAFALALQSVHDLPDGHGETIFTATTSIVVLTVGCWV

SEQ ID NO: 64906 - protein, 214 aa, Zea Mays
MVGTSPAGQSYSEEIRPGCACVAVPRVLLREDVTEPKTGIKFPTLLKDNSNLTTEVLVGMGFRSMRIMRVKDLNLYAFGLYIQPDSVCKKLGPKYACIPDAELKDHPDFYEDLLRENIDMTVRLVVSYNGLSIGTVRDAFEKSLAFRLKKGTKIDFRQTSDGQLITEIDGKQIGTVHSKYLCRTFFDMYIGDPPVSVETKHGIAQNVAGLMRRC

SEQ ID NO: 64907 - protein, 723 aa, Zea Mays
MDMLMDREVIRNEALLLLTYLTRDAEEIQKIVVFEGVFEKIFSIIREEGYSDGGVVVQMLLKETMGFDPLISILKIRRGSAFNFTQQKTVNLLGALNTVELLLMGGPSGEAGKDANKNANQTALAQKNILDHLLLLGVESQWAPVVLRCMALRCIGNLVLRNPQNLDSLARKQVGEEPHVQPALNAIFSIILRTSVAQEFVAADYVFKCFCERNPNGQALLASTIVPHPNQGNMHEPAIDMPFGSVLLQALVSSDVNGDMEACCRASSVLSHIVKDNMQSKDRVLQIQLETLTPSLGRTEPVLHRIVTCLSIAASTEGENNQNNQPEEPYIQPVILRLLIIWLVDCSNAVNCLLESAVHLNYIIELASSKRYTACVRGLAAVVLGACILYNASHEKGRDAFAVADAISQKIGLTTYFLRFDELRRSLAHPLPEQHHRKELSRSSANSMSDFQEIEEDETNKDDQHPVLSEIFDSQFVNFLSKLEADIRENIMDIFSRTKTATALLPTELEQKNGEVDGEYIKRLKSFVEKQCNEMQDLLARNAMLAEELVRTGGGTTTDTSQRPNNGRERVQIEALRQELEGARRQIEALETDKSQIEAEANNQRNLAVKLESDLKSLSEAYNSIEQANYRLDAEVKTLRQGGSVPYPDVEAIKAQAKEEAEKDSEAELNDLLVCLGQEQTKVEKLSTRLAELGEDVDALLQGIGDDTAIPDDDDDDDEDSEE

SEQ ID NO: 64908 - protein, 158 aa, Zea Mays
MPVVIPASARPTSTNLLCRCPPAHRHPSPVAATDDLPRPPPGGFCKRARKGSCRRARRGARTRRRPRGCWRTKSCSADNHESENTASTESCGGRGGAVLGLLFTGKTEGWMDASNAAASLYAWLGRFRGARAHLSDTDVSDDDEALDTSDDSVDDGNE

SEQ ID NO: 64909 - protein, 1840 aa, Zea Mays
MDAGGDEDGAGKAALESTAEAATLPPASTVAVPSPVPASAPGAATGTSGSGEKPVKRMMKTPYQLEVLEKTYAVEQYPSEAMRLELSAKIGLSDRQLQMWFCHRRLKDRKPPSKRQRREEESALVPVMPPPPVLPAPVMPLASSDLVVGAPGPYDEPLHPLHSRRGAGRGRSSAVPRISMPDIGRRYYEPPPIMIAPPIPSMQLTQYELRVINSVESQLGEPLREDGPALGVNFDPLPPGAFGAPIVPEQQKQPVRSYDAEIFSWHDQKLLKASAFLPNMESPFVPNSFTGKRKSPVGNSAIVQPHVGSRAVHEYQFLPEQPSDTYERATRSHYYDTPVEVSNARIPSITSGSQLLHGSEEAAPSYAFQGHTSGSSLLPPSSRPQVFPAAPTDYEMTQSNSNLSSVPVEGQFDISQVAAFENPPVSSEIIAYHDEDTSRVERKRKHSEEAKIAKEVEAHERRIRKELEKQDMLNKKREEQRRKEMERLDRERRKEEERLLRERQREEERFQREQRREHERMEKFLQKQSRRAEKQRQKEELRKEKEAARQKAANERATARRIAREYMELVEDERLESMELAAQNKGLPSMLYLDSDTLQQLDSFRGMLSQFPPTTVRMKLPFSIKPWTGSEDNVGNLLMVWKFLITFTDVLGLCPVTLDEFVQSLHDYDSRLLGELHIALLRSIIKDIEDVARTPSIALGVNPGGGHPQIVEGAYAWGFNIRSWQRHLNLLTWPEILRQFALSAGFGPQLKKRTVEDSYYRNDNEGHDGENVILTIRNGTAAVNAAAKMKERGYTNRRRSRHRLTPGTVKFAAFHVLSLEGSNGLTILEVAEKIQKSGLRDLTTSKTPEASIAAALSRDTKLFERTAPSTYCVKSPYRKDPADSEAVLSAARERIRAFQNVLSDSEAEKEVDEAERDDDSDCDDGDDDPDGDDVNTEVEDDKDPLLAVKSQDEVPSTTTVIGIKANLDGVGNALNSSSSFTKSAKGAPLPSLGRSNAADTSNDLPLGVSSANHEVVPDDSENTQIDESNQAEPWVRALAEGDYCDLSVEERLNALVALVGVATEGNSIRAVLEERLELANALKKQMWAEAQLDKRRFKEEFTSRVQYNSDMGLKPDIYQENNVTEITSTPACDAYRENDEHVGTINNCEMLDQHNQGNAGSLPYERNGVCQEILATPDTSYVQQYAYADKRRSQLKSYIGHRAEQLYVYRSLPLGQDRRRNRYWQFTTSASPNDPGSGRIFFESKDGYWRVIDSEEAFDSLLAALDTRGTREAQLHSMLQVIEPTFKEAIKRNVSIELSAGRYPKNGATDMIRANYHSEVGSSSSTPSATSDSITAYSDSFKVELGRNDFEKTAISKRADIFLKWMWREFYNQELTCAMKYGKKRCSELLHSCNCCYQIYLAEERHCSSCHKTFKSIYNFSDHTTQCEEKQRTEPFWNMQNTDYSVPIGMVLLKLQLVSIEAYIPSEALQPFWTDVYRKSWSVKLYTTKSIAEIFQLLTVLEGAIRPDCLSSDFETSECLNSQVGSASVLPWVPDTTSAVMLRMLDLDSAILYVQNQKMDRDDGGFMKFPSRYTVAKSKQETTPETAGLDLYDGRWLPGSGRRGRGRGSRGGSRGGRGRSRGGRIPRGVSSSSRIEFKGGIVASDKAPRKNVRRGRGRGRGRRRGRRTVRPRQPSVGRARSIPKENLLGSFSMLSSSKAATIEESPRSSGADEWGLETRTTYTECDENSSGSQSEDNEENGQPMDDDYEDQVPDYSIGYSTGSRHHVMMSMMDHDSDEEDEDAEGDENVEEDADLAVDDADVEMDEDDEIGDDGEDGGVGGEMNADEDPDATSYSSDYSD

SEQ ID NO: 64910 - protein, 184 aa, Zea Mays
MATPSSSLCSSFASLRTASIGHPRDITSSTPRLVEHLLILAKRLKFTIKISFPGAIAIQALPEIAQKITWLENEDTLLDSSGEKIIYEMMRPERTLLYLVPGRLARNPGSTHLITEKHMSSKKVSKRKHARIIDKKIAKKKSEAVEYQKLLPIGSRNRDRHNESLAKRRSKLSTSAKSSSGTSA

SEQ ID NO: 64911 - protein, 222 aa, Zea Mays
MAAENEEKETACAGYKHGPPWVFKGSALYQLHLVKASTARAFVPRDLRLVEAFGYTLGGMFLARYHDSPAGEFDELVVIAGIVWNPPTSCAWAARVLVNSVEACRHGRKEVGLPSHVATFSSKNEAASLGDRPLARPNSFLNMLGIGSTAFEQGNGREIEVSESKGGSSTRHLCNISLPFTAGSHKDHQWAGPAIRMSLPSFSGRTVDHPDLLKYSCQVECR

SEQ ID NO: 64912 - protein, 1148 aa, Zea Mays
MAGTPQFQSPHFPPPSPPLGPTFVPPAMNSGGRGGKRRGPPPLAPSGAAAKRVNPSPGTPHVPPPASAAAAVEEDMMDEDVFLDESILAEDEAALLMLQRDEALASRLARWKRPAIPTDLAAGCSRTVAFQQLEIDYVIGESHKELLPSSSGSAAILRIFGVTREGHSLCCQVHGFEPYFYIGCPSGMGPDDISRFHQTLEGRMKESNRSSNVPRFVKRVELVQKQTIMHYQTQQSQPFLKIVVALPTMVASCRGILERGITIEGLGSKSFLTYESNILFALRFMIDCNIVGGNWIELPAGKYRKAACIMSYCQLELDCLYSDLVSHAAEGEYSKMAPFRILSFDIECAGRKGHFPEPTHDPVIQVEFIIHVSDTRYHLVSIQIANLVTHQGEDQPFVRNVMTLKSCSPIVGVEVMSFDAERDILLAWRDFIREVDPDIIIGYNICKFDMPYLIERAEVLKIAEFPILGRIRNSRVRVRDTTFSSRQYGVRESKDVTIEGRVQFDLLQAMQRDYKLSSYSLNSVSAHFLGEQKEDVHHSIISDLQNGNPETRRRLAVYCLKDAYLPQRLLDKLMYIYNYVEMARVTGVPISFLLSRGQSIKVLSQLLRKAKQKNLVIPNIKGQGSGQDTFEGATVLEARAGFYEKPIATLDFASLYPSIMMAYNLCYCTLVPPEEARKLNLPPEFVNKTPSGEIFVKPELQKGILPEILEELLAARKRAKADLKEAKDPLERAVLDGRQLALKISANSVYGFTGATVGQLPCLEISSSVTSYGRQMIEHTKKLVEDKFTTVGGYEHTAEVIYGDTDSVMVQFGVSTVEDAMKLGREAADYISGTFTKPIKLEFEKVYFPYLLISKKRYAGLYWTNPEKFDKMDAKGIETVRRDNCLLVKNLVTECLHKILVDRDVPGAVQYVKNTISDLLMNRVDLSLLVITKGLTKTGEDYAVKAAHVELAERMRKRDPATAPTVGDRVPYVIIKAAKGAKAYEKSEDPIYVLDNNIPIDPQYYLENQISKPLLRIFEPILKNASKELLHGSHTRSVSISTPSNSGIMKFAKKQLTCLGCKAVISGASQTLCSHCKGREAELYCKTVANVSDLEMLFGRLWTQCQECQGSLHQDVLCTSRDCPIFYRRRKAQKDMTEARLQLDRWDF

SEQ ID NO: 64913 - protein, 262 aa, Zea Mays
MPPPSSSRYSPGRLLAARPASATTVGRWARLSCSLSMNGCAPGAGDRGAVCVRETRALPAAPAPHDAVGRLRAAVDALWSNAAPPAAPSGIIRIEVPITQRVDAVEWLHAQTTLPRCFFSARAPLPDAPALAGNGNGNGSVHRQQPVSVAGVGSAVFFRGTEPFSLADWRAIKRFLPRDCPLVRAYGAIRFDATSDASVEWEDYGSFYFVVPQVEFNELEESSVLATTIAWDDSLSWTWHNAVEELQSTLRKVLRVPRRPVF

SEQ ID NO: 64914 - protein, 149 aa, Zea Mays
MDLGLSVAGRTGSGGGRGGWRGSGGGASAAAWTRLVSSGVEDELVAASGGGGGGGGGRAGARAGGLPLGHFLEACFLCRKPLPSNRDIFIGDIPFCTEDCRREQIEMDEEMERKESKPKNVAPRGAPSPKDVDSPPRPPKARAGSILAG

SEQ ID NO: 64915 - protein, 135 aa, Zea Mays
MYRIIEVRTSPQYKYICDHFYLNCKLFSIPVNFSTRISFEHFFHYIYGGGQGGDRAFKPHRTVAAEARRSHLCLADRLLPSCECLFTCRNLRKRREASAVKLCVEAVSWSAASTASWKGTISASSPTQCPWHSLH

SEQ ID NO: 64916 - protein, 246 aa, Zea Mays
MDASSVSPCDLDREFALQIAQLLATPPLQSAQEYYGELIRSKKLDGIRVSYSGKHGKGVYANRDFGEDDLVLKDQMLVGAQDSLNKIDCVVCSYCFHFIGSIEYQIGRRLYLQSLGGSGDGTTERHCHGSDVGSSTGCSGASNGNSNAVPQEVLLSLMDGNTLLPLTDQFCLPPVVACPGGCEGELYCSQSCADSDWDSYHSLLCAGSKTEPLRKSALQKFVGHANETNDIFLVAAKVSGRSMHTI

SEQ ID NO: 64917 - protein, 1142 aa, Zea Mays
MAFVNKKNKNANMKLHNVKSHLWVFVNALIDNPAFDSQTKETLTTRQGSFGSKCELSSDFLKKVEKSSVIDNVLSWADFKLSKELKKTDGSKKSRISGIPKLEDANEAGGKDSHKCTLILTEGDSAKALAMSGIAVVGRDYYGVFPLRGKLLNVREANHKQIMDNAEIQNIKQILGLQHGKQYDSTKGLRYGHLMIMTDQDHDGSHIKGLLINFIHSFWPSLLKVPSFLVEFITPIIKATRGQTTKSFYTLPEYEEWRNNLGASASSWTIKYYKGLGTSTAKEGRKYFEDITEHKKDFLWVDDQDGNHIELAFSKKRIADRKQWLTNFQPGTYIDQRDKHVKYSDFINKELILFSMADLQRSIPSMVDGLKPGQRKILFCSFKRNFVKEAKVAQFSGYVSEHSAYHHGEQSLAGTIIGMAQNFVGSNNINLMYPSGQFGTRAQGGKDAASPRYIFTKLSHITRSIFPKDDDILLNYLNEDGQSIEPTWYMPILPMVLVNGSEGIGTGWSTYIPNYNPRDILANLRRLLNGESTVPMHPWYRGFKGSIEKTVNTKVAGSTYTVTGIIEVLDNTTLRITELPIRRWTQDYKDYLESLAPDTKNKDKVPFIEDVTCQGDNEDVYIQFTLSEKNMNIAMEEGLVKKFKLTTTIGTSNMHLFDSDGKIRKYDTPEQILEEFCHLRLEFYCKRKEALLKSIKLDLKKLENKVRFIRCVVDNEIIVNNRKRADLFLELRQKNFDPFPKKKKRAEPAAVGALEEEENEESPEAAGAEPSDYEYLLSMSIGTLTLEKIQELNAEKQKLVDDVEELENMSPKSLWLKDLDAFEKELDVLDQMDLAEELQREKRINAGKKGGSKAAPKKPRKKAASKKLDSDTEDDDFEPAVAKRGAQPKKTSSKANDSASEDGDYVAAENQKKQSKKASAHVDEEVDMPSLKDRLAAFNISDSSPDHSAMETEVTELTEQQNENKATEGASKRGGRKKASSSLATIPSDVDEEVLEVQAQKKGRGRKPAAVVKPKAPAAARKRAPAQGKVTQKKIDEMLKATEDNNTSASSPEKKVRKMRSSPFNKKSGSILQRGSTASASSGTTVEASPPSGSSAEPVGAAQPRRTARATKKPIYISDSDPEDEVELIDDSDFDADGDSDE

SEQ ID NO: 64918 - protein, 735 aa, Zea Mays
MTTSAADDGSSLAPTITEGETTADAGAGAGVECVEGKEMKVGAAAPVEEPDKEAAREEDPGDDDDYEEEEEEEEEEEEEEEEEEEEVEEETETANGKEAELMEPLAALKPGEEVKPEKLEGEKEELDEEPEASEEDPEEVEELKEEGDGIAEEGLVDGSEANDDKDADQLSSGSDSGGSRSRGMQNSELAGGLEIFVDDLPQDCVKEDIAMAFSQSGEVKSVRIIKNSSTGKNQDIAFVCYTSIEAAKKVLAEFKEGIEVKGKMVRVSACQDNNTLYLGNICKGWTRDQVLNTLKSIGIQECEISFPSYKGGSRGFAFLKFTSHYYARAALRRLMKSDAIFGTDRSAKVSFYRTPTKSSKRLIQSGPRPCHLDEKIHPGRVRSPSRSHGIILIEGHDKLTMVSTEQPPNPVLPSSMGRFKLSTLQMPIQGGAQPSRNPRVDEKHEEMSMIYAQAKIVYLEHVPLSWDENKVKEYCEEYGEILKADVFQISKNMENETISFVEFSSRKGALACVTGINKANIVDGSFKLCAYLAWPKSASKVNSAAPSNAATATEKDKTHTEKILVDIDLQHKFQKGDKSKLTSQTKEAIMKKKKSSKLPNDNDTKLTSQGAAEVPQTSKSSEGKRKVGKNKHASVYQKPLKKAINNRNVDESQLTHRSAAVLQTSNTSKGKRKASENRSLYLNEKALKKARGNSNLGGSSRSKSYASDLEPHAGFISPAIRDNGSDAYNRQSYVL

SEQ ID NO: 64919 - protein, 53 aa, Zea Mays
MPRLKLVVAEVPRFAAAALERPAGARATPPTSRTAVVRNSLSTSLVSLSRFPD

SEQ ID NO: 64920 - protein, 580 aa, Zea Mays
MAASIIRASMIYLVEEGKRFIEKRMPTINTYMAFVNKGHAYVLSKIAYVYPIVRAWMLNAGRVMLLLFTVWLDCNVRGFDSLLRLGTNSLLAVLWCSTLSTFAMIGIKKMLIFMAIAASAFAFIGLGFAILLISVLAVVILWFYGSFWTTTCVMILGGVLFFLKRERITLLVACLYSMYCARCYVGWLGLLLGLNLSFFSSDILVQFLRDNADNKKFNGSSRYSERSSGRQGNIFEEFQPSANSTYQARYARASDRDPGDPSTSGPEKELTSEDEVARLLNCTDHYSALGFRRYENIDVSSLKREYKKKAMLVHPDKNMGNDKAADAFKKLQNAYEILLDSLKRKTYDDELRREDLLNYFRQSVSQKNGRNSTFQHGFSPSEGVDEGPYGLSRRIACKKCSDFHLWIYTGRAKSQARWCQDCKEFHQAKDGDGWVEQSFQPVLFGMLQKPDLPHAYVCAESYIFDVTEWFNCQGMRCPANTHKATFHVNANMAKQSSGKASTSTQRAGKAPSGVNMDGGGLNEEEFFEWFQNAVNSGMFETTFGAQGDPTSPGNGSNAKSSGSSSSNNNSRKKKKGKKQW

SEQ ID NO: 64921 - protein, 313 aa, Zea Mays
MTRLLVILFAGATLVVATTAHEHHGEAPTCAGGSEHVLAEFRPGEVTVDGHNEDWESVEASEFALLPALDPDDDKAYSGGKIAVKAVHDGVNVFFLLQVDGAYAYTKGESNKCPSVALMFQVGEKATFYNMGGCKDMPGSCTSKSCRGHEVDIMHFSIGNAIPGRLYGGNHIDNAAGNGNDRFGHLVDVYAWNPHCRYLDGVGPKENNSNAQNDWHGAWWHSSLTFHSGFVDDDNPYGQQDEKGTYYFEFSRPLRTMDQFQQDAQFTIGRPSNMSVALWYPDDGKAWSNSDHYSASCNCGSHLHVHLCGLPIF

SEQ ID NO: 64922 - protein, 128 aa, Zea Mays
MLLYNGKTRKFQVRDCLKQNEELRSHLEKLRLEQVSLLKVSNIATQSDGQTENSISNPPQMVIENISLKLIKEQSRSEGLSAEIMKLSAELRKAVHAQNNLARLYRPVLRDIESNLMKMKQETYATIQ

SEQ ID NO: 64923 - protein, 436 aa, Zea Mays
MDLRRLAVFAAALAAGWWSRGAEASIHTYDREPFREVGNAFLLSGGSEGIVADGADPAAPASSFIKFVNVTFWRTPEAAESHAKMAHSTGLVQAILFEVVDRDNIGGSAYGGQRSICCTPDLAKLEGCKQGEVIRRPSSDDPDWPFVLDTHFSANHLSVKLEDEPVRITKTGMYNLFFISCDPKLRGLTMSGKTIWKNPGGYLPGRMAPLMKFYVLMSLAYLLVMIVWFSQYVRFWRDILPIQNWITLIIALGLFEMTLWYFEYLNFNSSGVRPVGITTWVVTVGAIRKTVSRLLILSISMGYGVVRPTLGGLTSKVLLLGLTYFLASELLDIAENVGTINDISGKARLFLVLPDAFLDAFLILWIFTSLSRTLEKLQARRSSVKLDIYRKFTNALAVSVIASVAWIGYELYPIESIRKTRKILHLMIYIYNCHLR

SEQ ID NO: 64924 - protein, 73 aa, Zea Mays
MTGWHTSAQRDRCPIRGAATTAMLPSRISRCGRGHEAARCECRAMLEATATWGWILARCGPEPRPKLRGGAPS

SEQ ID NO: 64925 - protein, 82 aa, Zea Mays
MATPLIAGLAVAAAALAGRYSIQAWNAYKARPVVPRMRKFYEGGFQPTMTRREAALILGVRSVTALLPSFRLYLRVWLVLCL

SEQ ID NO: 64926 - protein, 143 aa, Zea Mays
MTAASPTEFVVGRWQASPPVLLVTHKLRTLVRVVAAHPCEASLLSTGNCHLRLTLEDPTARIHAYVHKNDLVGFFGGGFLTAEVIVKKMNMVLGIPEPQGSVEVAPSTRNPPWIWCCLMSYYMDKNDPWVSRKYRIYSTAIRD

SEQ ID NO: 64927 - protein, 78 aa, Zea Mays
MAVRPLARNVMDSYHRRPEDVRLHERPPHGLRQAKVRSSHARPVAPPKAASYLISFMTSSLVHAACTHPRKRAIAFYA

SEQ ID NO: 64928 - protein, 64 aa, Zea Mays
MVPTGSSSTDEEVARKKIESKLFWPPPKPLRRPSSPAPGYRLLLPLQADATAQALLVYANPALD

SEQ ID NO: 64929 - protein, 58 aa, Zea Mays
MLIPSTELSTRKTRSKLPRLPLRISPQPQLLKASPGFMHNRIYICYFTTFNVCRTVMC

SEQ ID NO: 64930 - protein, 879 aa, Zea Mays
MDAGEMEDVRAAAAAEEVISSRGGSVLGKKTILKSDHFPGCQNKRLSPQIDGAPNYRQAGSLRVHGVAMPTMEGIANVLNHIGAHKKGKQTRILWHSLREEPVIYINGRPFVLRDVEKPFSNLEYTGINRERVEQMEFRLKEDILQEASRYGNKILVTDELPSGQMVDQWESVVYDTVKTPLEVYEELQHQGYLVDYERVPITDEKAPKEGDFDNLVRRISQVDIETEIVFNCQMGRGRTTTGMVIATLVYLNRIGASGIPRTGSIGKVFYAGNDVDDYMPSSEEAILRGEYAVIRSLVRVLEGGVEGKRQVDKVIDKCDSMQNLREAIATYRNNILRQPDEMKREASLSFFVEYLERYYFLICFAVYVHSVSSAHQTTLSVEVSFSDWMRARPELYSILRRLLRRDPMGALGYSSSKPPLTKIVESANGRPQDMDVVAAMRNGEVLGRLTVLKSDHCPGSHSLNLPERVEGAPNFREIPGFPVYGVANPTVDGIRAVIQCISTSKGGRPVLWHNMREEPVIYINGKPYVLREVERPCKNMLEYTGIDRDRVERMEARLKEDILREAERYGGAIMVIHETDDGEIFDTWENVDNEAVLTPLEVYKNLVSEGLPIKYARVPITDGKAPKSSDFDTIAFNVTAASKGTAFVFNCQMGRGRTTTGTVIACLLKLRIDHGRPIRIPVCQYDHEDDAIYSTGGDATDHNGHLNSESWKPRTLTKLNSGFGINDILLLRKITRLFDNGIECRQTLDTVIDRCSALQNIRQAVLNYTRVINQQHVEPRVRRVALNRGAEYLERYLKLIAFSAYLGSEAFDGFCGQGQTKISFKGWLQQRPEIQTMKWSIRLRPGRFFTVPHEQKATYPPPQEKVKQCEFPGCTSCY

SEQ ID NO: 64931 - protein, 430 aa, Zea Mays
MSDTGLEAYRFSISWSRLIPRGRGAINPKGLEYYNNLINELVKRGIEIHVTLSHLDYPQILEDEYHGWLSPRMVDDFEAYADVCFREFGDRVRHWTTMDEPNVNSIAAYDNGAFPPGRCSPPFGFGTNCTAGGNSSVEPYVVTHNCILAHAAVAALYTRSYRAEQQGVVGINIYTFWNYPFSPAPADVQATQRSLDFMIGWMVNPLVYGDYPQVMKRIVGSRLPRFTKRQSEMVRGTADFIGINHYTSVYVSDRPNDAAADTTGPRDYNADLSATFRFSRDDPATGQFVPINMPSDPQGLQCMLEYLSQTYNNIPVYVQENGYGALFNDSIHDHERAEYLSAYMGSALAALRNGANVKGYFVWSFLDVFELLAGYYSRYGLYHVDFQDPELPRTPKLSALWYSKFLKNEIDIIENVVSDTDDARSHAAEQ

SEQ ID NO: 64932 - protein, 925 aa, Zea Mays
MTAPPNASMGPLSLGGCGALLSTPQPNSWHCRGFSIPERSVFMLPLRRGLSRKRGWVLDSRSNGAVARDEVGAGSSELRHIEKELTFSPTFTDYVKIMESVKLDRSKNLHGADGQSLRRRFAGDGRQRNRRSGDARNKSFERNQGPQRDLAKDENQKDVTGFVDKRATGHVKSSNRRQGEVEDYAQRRIIRGGTRGNGDNGQFSSPVKAKDTRGSMSVHRLVTNKQTQSVAGNDLQGRATYTPSRTSALPNSSIPSKNAKVQMRKYDYTMTSSRIDLKYPRETFPNTEVNADSNVQRNQQRVETLGRNFVVRRFGEIGTDSKKSTVSKIYGSTQAMPEHDSHSSDNLESDERRTVQLHRGANVKMGKFVSRDAETTDFDDRAAFKTFEVFTDVRNRPRILRMEMEERIQKLASRIVQMLGRYGNWKCVLQVVEWLQSHERFKSYKSRYIYTTVLDVLGKAKRPFEALNVFYTMQNQLSSYPDMAAYHCIAVTLGQAGLIKELFDVIDCMCSPPRKKFKLSPLQNWDPRLEPDLIVYNAVLNACVQQKQWEGAFWVLQQLKEKNICPTNSTYGLVMEVMLVCGKYNLVYEFFNKVDKSSIPGALNYKVLVNALWREGKIDEAVMAVKDMESRGIVGSASLYYDLARCLCSGGRCKEALLQVEKICKVANKPLVVTYTGLIQTCIDNGGMEDAKYIFNHMCNYCSPNSVTCNIMMKSYIKHGMLEDAKDLLHDILNCRIRSKADSNQVATADKFTFNTFMEACAAAKRWNDFEYAFREMLLNGYHFDERRHLRMVLDAFRHGKEQLLDDLWHYLCRHSRVPPSPVIMERFCLKLMQGDTLAAISCVSSFHEGKICNVSSMSWLNLLSRNADRLKEEHVTKLAHELNSLISLRSSSDSISLSLYQKIISSCTAFLSGATVVEKAPSGQ

SEQ ID NO: 64933 - protein, 346 aa, Zea Mays
MKGTAVPRTRASPRRRIWISVVVVFVAITVLWAYLYPPQDYTYPVRDWFPSEPTRELTDAETAARVVFRQILSTPPFISRNPKIAFMFLTPGKLPFEKLWELFFKGHDGRYTIYVHASREKHEHVSPIFIGRDIHSEKVGWGMITMVDAERRLLAKALEDIDNQHFVLLSDSFHDPGPHGVYRYSKNMLPEVRESEFRKGSQWFSMKRQHAMVVIADSLYYSKFRLYCRPGMEEGRNCYADEHYLPTLFHMMDPAGIANWSVTYVDWSEGKWHPRSFRAKDVTYERLKNMTSIDVSYHITSDDKKDLLQRPCMWNGLKRPCYLFARKFYPEALDNLVNLFSNYTIF

SEQ ID NO: 64934 - protein, 688 aa, Zea Mays
MSQTNWEADKMLDVYIYDYFVKRNLQATAKAFQAEGKVSSDPVAIDAPGGFLFEWWSVFWDIFIARTNEKHSDVAASYIETQLIKAREQQHQQPPQQQQQQQQIQMQQMLLHRAAQQQQQQQRRDGSLLNGTASGFSGNDPLIRQNPANANSMAAKMYEERLKLPPQRDSLDEASIKLQQRYGENVGQVIDPNQALLKAAAAGQSSGQILHGTASGLSGTPQQVQARSPQQPPTAEQNIRTEINPVLTPRAAGTEGSLIGIQGSNQAGNNLTLKGWPLTGLDHFRSGILQQKPFMQSPQQFQQLQFLTPQQQQQLLLHAQQNLSSSMSSDVDTRRLRMLLNNRNVVLGQDGQTNSGGDVIPNIGSPGQSGGSRNDIDILIKKKFALLQQQQQQQSHSQQQQLQQPALSGQQSQSSNQLLHQHGKPGVGSLPIDGNLPNSFGFPEQGSKKRKKPVSSSGRANSSGTANTAGPSPSSAPSTPSTHTPGDAMSIPQLQYNGGPSKPLMMFGSDGTGSLTSPANPLGDVERLLEDGSLDENVESFLSQDDMDPRETMGRCMDSSKGLGFTEVAKARASTNKVVCCHFSLDGKLLATGGHDKKVVLWFTDVLKRKSALEEHSSLITDVRFSPGMTRLATSSFDKTVRVWDADNIIRYALLQVIQHLSCHLIFIRTKKTSFVRVIVMVKCGVGA

SEQ ID NO: 64935 - protein, 1031 aa, Zea Mays
MKTYNRIWRCLHLGQNCSNLFELQNKKSSGPVTKAWEFKPKPAEAESSQCSQPSQCFDGRLIEWLGLEKFGLNDSQLNAVSDCVSLMDSNSSSIKLLWGPPGTGKTKTISSILWAMLIKGRRTLACAPTNTAVLEIAARIVSLTVKSSDGTVFLNDIVLFGNKKKMKIDNDYYLSKVYLNFRAERLLPCFKSNTGWRHCLCVLIDLLVNSVTKYQLNNEDKTFKQHLKDDYNKLSRNLHSYITILYNDHPRNLETGQSFQCMLEVRELLKILHTLINAGNGGDIWSDELLRSTIEEEVNPELWPSQLACIRTNSCNKSKFVAARSLCLQELIYLCKNMELPNCYSAQDVRLYLLSRTRLIICTVCSSFKLYNIPMRNSSPSLHQLLNKPKILIPLELLIIDEAAQLKECETLIPLQLPGIRHAVLIGDEYQLPSLVKSKISDSANFGRSVFERLSSLGYSKHLLNIQYRMHPDISRFPVGTFYDGKLSDGPNVSHKDYNKMFLAGKLFRPYSFINIDGSHETNEMHGRSLKNSLEVDAVVMIVQSLLKETLSTRSKLSIGVVCPYNAQVRAIQEKVGKPCRKYDYFSVKVKSVDGFQGAEEDIIIISTVRSNGAGTVGFLSNLQRTNVALTRAKHCLWIVGNGTTLFNSNSVWQKIVKDTRDRGCFFNATDEKELLNAIFKPAVEYPHADNLAKHEQHGQNISDLSATDTIQQLACQFTPGSDLPPKFSITLNVGYTTRKFSSSSTLLNSSPLQLTATAVPNAEPASHGSSATGAVELPVTEDGRLVDGKISFQNTVRSTLIRIDHDPRLAFDFLAVATTREQAAPLTREQFKKHDRMVESPAPVTAEGSECCIRLNEQEQVAPPTKLQSKKRGRNVKDPAAATTGALKCSIGLDEIATRQQAAPPTPEQSKKRGRKSEPLPQVITEGLRRSSRLSEKGKHHQVAPSQEQAKKHGRKGATLSPVTTEALRRSSRLNEKGTHQQIALSIPEQAKKCGRKAKRLPRVTIEGLKRSKRMSRNNSEELADVDCNP

SEQ ID NO: 64936 - protein, 125 aa, Zea Mays
MAAPPGGAGIVWQTPANPPESHDYIIRNGRRYVRPYYFEFISHVKNRWAGKTIVDLFTDEFKGRSRDYYVHAVKCGRLQVDGQMVHTDYIVKSSQKISHFLHRSVALINFEIITPTKQVFDNFTS

SEQ ID NO: 64937 - protein, 259 aa, Zea Mays
MDPEDSSDFEEEDDEEEDDDLMIFILPALYLASTGIGTLDQTSMVSDGTAIETPSQVSKFNDAERICKVLEDDRGQGYDKLRVEPHVLLELSRYLRSNDLLKNTRGVSVEEKIGMFIYMLSRNASFQKLSDRFKYSTETIHRHIKACFDAVTPMTGEFVRPPSIQAHRKISSDTRYGPYFENCIGAIDGIHVPMTISDSEAAPYRNRQESLSQNNMDLKSQEESSTWLMGVMRTRHLFLLLLVKFLTMLKSKMRAISNQ

SEQ ID NO: 64938 - protein, 524 aa, Zea Mays
MRNNSRLQQLGIPALVSMCGNINSISRNKKPNNRDNEDSESEYDPSHDDSIEGDLFDHDDHNKGSKDTNRRTIHMAPGGIKPRTKRVYAEQHTTRNTRSKKSIAQPDTSLTRSDIYVPPPSLSHLTQVGEVARSIENHRKTSVEANGPTQVDNTHMANREDGFDQFDDNMTNQGEGITQPGGKGVNQHRERGLNMGLGLQRMNRARRGKLPIVITEGRIRPVAPIVAAKFATECNIAVRNHVLVLKSWKEYEKHPGLFKLFTAKLSAKFDINTEDALVKNACFQMMRNALRQQRYKLKKQYFDPFPLHLVRKTSPIKSTSDEQWNDLVEHWKGPKNMATCEHNKGNRGKVKFHQTTGSRSYMVHVENLGDKYMDQEPDALDLFKECHYSKKKQGYTSTVQLAITQMEDKRSTPGEGEQPMSTTQVVADVLAENTKKNRFLQNVGIQNARPRSSVQNIEAQLEVERKANAELQSLVSIQRERMDVLLKQVHEAELVRIREQEEMKKKQDAMDAQLELMLSQIQPS

SEQ ID NO: 64939 - protein, 391 aa, Zea Mays
MSSKKVPYHKHREAEEARKKREEDEAARVYAEFVESFKGDSSSGAKFIRGGVIDPNAKLKTDSEGGKSKDGGSVPKKGSRYVPSFLPPSFAKEPEKKKEGERPKEKEKGKPRVIDRFLEEIKLEQEQREKRHQDRDHRREGRHGDSSMSSSRFDELPDEFDPTGRFPGSFDDGDPQTTNLYVGNLSPKVDENFLLRTFGRFGPIASVKIMWPRTEEERRRQRNCGFVAFMNRTDGQAAKDEMQGVIVYDYELKIGWGKSVALPSQALPAPPPGHMAIRNKEGGTATVILSGPGGPAVASIKPQTSELVLTPNVPDIVVAPPDDGHLRHVIDTMALHVLDGGCAFEQAVMERGRGNPLFDFLFNLKSKEHTYYVWRLYSFAQVLVAVYSTKF

SEQ ID NO: 64940 - protein, 518 aa, Zea Mays
MAGRGASPAAAAAVQVRCAGCRGVLAVAPGMTEFICPKCRMAQRLPPELMPPSPPKASPTPPPSGPTPPPPPPPSLPPPPPPPPQPVPHPLTRRSAPRAQGVDPTKIQLPCARCKAVLNVPHGLDRFRCPQCGVDLAVDLSKLRHFLASAGPGFFPPPLPPPPPPQPPVPMPHLPFLPMMPRLPLPMLPMLSPAELPEEINEVAVDVERDEDESGTFGETFIDYRPPKLSFGFPHPDPVVETSSLSAVQPPEPTYKLTIMKELDETNALSSLQIETIVYACQRHHHHLPTGARAGFFIGDGAGVGKGRTVAGLIWENWQQGRHKALWISIGSDLKYDARRDLDDVGAKCVEDGVVFVTYSSLIASSENRSRLQQLVQWCGSEFDGLLVFDECHKAKNLIPEAGSQPTRTGKAVLEIQDMLPQARVVYCSATGASEPRNLGYMVRLGLWGDGTSFENFNQFLGALEKGGVGALELVAMDMKARGMYVCRTLSYKGANFDILESLLEERMMDIFVSMIAH

SEQ ID NO: 64941 - protein, 732 aa, Zea Mays
MSNVVALKLMDGALIGRRYESSAAAVDSTDQLAEKHEYQAEVNRLMDLIVHSLYSNKEVFLRELVSNASDALDKLRYLSVTDPELLKDGPQLDIRIQSDKDNGVITITDSGIGMTKQELIDSLGTIASSGTAKFLKALKESQEAGMDNNLIGQFGVGFYSTFLVSEKVVVSTKSPKSDKQYVWEGQADSGSYTIREEKDPEKLIPRGTRLTLYLKHDDKGFAHPERIQKLLKNYSQFVSFPIYTWQEKGFTKEVEVDEDPAEAKKGDDDIKTEPKKKTKTVVEKYWDWELSNETQPIWLRNPKEVSTEEYNEFYKKTFNEYLNPLASSHFTTEGEVEFRSILYVPATRKDDITDNRKTKNIRLYVKRVFISDDFDGELGVVDSNDLPLNVSREILQESRIVRIMRKRLVRKAFDMVLGISCSENRDDYERFWENYGKILKLGAMEDKENHKRIAPLLRFFSSQSNDELISLDEYVENMKPEQKDIYFIAADSLSSAKNTPFLERLTEKEYEVLLFVDPMDEMAIQNLSSYKDKKFVDISREDLDLGDSNEEREEIKQQFSQTCDWIKNRLGDKVARVDISNRLRSSPCVLVAAKFGWSANMERLMRAQTMGDTTTLDFMRSRKVFEINPEHEIIKALNAACRNNPDDPEALKALDVLFETAMISSGLSPDNPAELSGKIYEMITTAIAGKWSSQSQAQPDNTTLQHAAPGRSDEPLEGEVVEPEPVEADQHK

SEQ ID NO: 64942 - protein, 444 aa, Zea Mays
MASSPPDVDLGKLSYEIFSLLESKFLFGGGSVPGTPARAAAPGPGEDRGRVRVLAIDGCGPGPGDALLAAAALARLEAALRARAGDPGARVADFFDAAAGAGAGGVLAAMLFVRGDDGRARYTAADALAFVAASLGRGGGWGSGGGGGVRGKWAALFRRGGRRGAPSPPLRRVFGDATLRDTVAPLLVPCYDLATAAPFLFSRADAVGSGSLDFRLRDVCAATCAAAGGAAPAVRSVDGRTAIAAASGGVAAMGNPAAAAITHVLHNKREFPLAAGVDDLLVVSIGSGSSFASAAAASAPSTGWRTPVPPRSPSPAEMVRLTSEGVADMVDQAVAMAFGHTCGRNYVRIQASCVGTALRSLDAKKAVALADGMLAQRNVEAELFRGRRLSAKSNREKLDAFAAELVKEQERRDRHRAVPGIAGLVPALAPAIGDRVDPRTSWSK

SEQ ID NO: 64943 - protein, 173 aa, Zea Mays
MPVVKINRRHLDEDPQCAVCKDKFEVGAEAREMPCKHLYHTDCIIPWLVQHNSCPVCRHPLPSQRSGSSTSSARVPSAYYNETACPPAVARADFDPVPSAYYNETATDPPAVTRADFDPAPGNYGSESQESHVPFSFLWPFGPSSSYQYEENVDEPAVYDPNQIAYSAWHYDH

SEQ ID NO: 64944 - protein, 671 aa, Zea Mays
MAPILFFIILLIIIFLCLKNCSHAHNGPEETSAMSVWSAITLSADSHSHGSDHRTPRPVHCQSEPMSTQRVRAGRGAPPRPAPESGLPPRTTRGSKTRDDSRVGPVHTPGNGRPSLPASSDPFVRSPRAIIYIIYAPANRSGPLPTPAFSLAARRLLTPPHFRSLSPNLCKTSRQIPSRRRDMVGSVGNGLADLDAGAISMNGVGKALYPAKAAAAAAAETLPVELEPPEAVVAPTGEEAANGKREIVMGRNVHTSCFAVKEPDADDEETGEREATMASILALYRRSLVERTKHHLGYPYNLDFDYGALAQLQHFSINNLGDPFIESNYGVHSRQFEVGVLDWFASLWELEKDEYWGYITNCGTEGNLHGILVGREVFPKGILYASRESHYSVFKAARMYRMDCVKVDTLMSGEIDCADFQRKLLQNRDKPAIINVNIGTTVKGAVDDLDLVIKTLEENGFKGRFYIHCDGALFGLMIPFVKKAPQVTFKKPIGSVSVSGHKFVGCPMPCGVQITRLEYINALSSNVEYLASRDATIMGSRNGHAPIFLWYTLNRKGYRGFQKEVQKCLRNAHYLKDRLKEAGIGAMLNELSSTVVFERPKDEVFVRRWQLACEGNICHVVVMPSVNIDKLDYFLNELVEKRATWYQDGISQPPCIARVVGFENCLCGRHK

SEQ ID NO: 64945 - protein, 393 aa, Zea Mays
MAVAVPNAPGRLFLLQSTPFPNPSSSASAARAQSFRVPPLRLSLFRRMAGRSLTVIAGASGGSERDLSASAVSVEALDSVASDSDLETKEPSVSTMLTSFENSFDKYGALSTPLYQTATFKQPSATDYGTYDYTRSGNPTRDVLQSLMAKLEKADQAFCFTSGMAALAAVTHLLQAGQEIVAGEDIYGGSDRLLSQVVPRNGIVVKRVDTTKISDVVSAIGPSTRLVWLESPTNPRQQITDIKTISEIAHSHGALVLVDNSIMSPVLSRPIELGADIVMHSATKFIAGHSDLMAGILAVKGESLAKEVGFLQNAEGSGLAPFDCWLCLRGIKTMALRVEKQQANAQKIAEFLASHPRVKQVNYAGLPDHPGRALHYSQEDCPDQLCLLHFSPA

SEQ ID NO: 64946 - protein, 417 aa, Zea Mays
MRHLEEDDEIDDELDQIMALMMGQYKKRKNGQRKKRRGSVFGHKVHDRSRQEHDRKLFQDYFAENPTYPEKFFRRRFRMSSSLFKRIAKAVEKHDEYFVQDRNAAGVLGFSCLQKVTAAFRQLAYGVPADYVDEYLRIGESTAIESLRKFVKAVCEVFGPQYLRAPNEDDTARLLSIAEQRGFPGMLGSIDCMHWKWKNCPTAYQGTYCGHVKEPTIILEAVASHDLWIWHAFFGLPGSLNDINVLHRSHLFDRLVEGKAPAVNYTINGHKYDMGYYLADGIYPNWSAFVKSIKAPANEKDQNFTAAQESLRKDVERAFGVLQARFAIVRGPARFWDVATLRNIMKACIIMHNMIIEDERDAGRLEPPYEKSDAETNGWVSHVGTSNLSAFIDKHKDIAHSFFLWLHDPCTSTAKGC

SEQ ID NO: 64947 - protein, 406 aa, Zea Mays
MGADDEAAAAMEAQEREAEIEKAMRARVADFKKQADSLTLEGVRRALEKDLDLKIYSLDAHKKFIKQCVDKVFAESADENANDDALEDSDAKDDHLSKEGTDVAKPMPVSNKMSSNADVVTSSKTGKDPEEEKNQTSSSDISEDMIKEAIEKRASYFRKNSDTLTLQGVRRTLEEDLKLQKKALDAYKNFITTGLDKILQEPANGTKKKSKNGSSKDTDKTSKGSKRVHEESDSSELNDRKSDMDNSDVDSRPRKKRAEKAKVTKKQKIVTNERKLSTPKAKKVAKQDLGSSTEEQGGNSAEEDNSHSSAEEDNKRKRQQTPAYGKQAEHLKSIIKSCGMTIPPTVYRRVKQAAENKREACLIKELQDILEKEGLSKNPSEKARTLASASSRAQTMNVGLPVKSKK

SEQ ID NO: 64948 - protein, 414 aa, Zea Mays
MAAATAPPPAAVATTLSGLMRCQNIRSSRPRAFYARCASSNASAEAAESRKGGHGGTRLEEAVPVGEGRSRVDAWISARLGGGGVSRARVQASIRAGLVAVNGRPVSKVSHTVKGGDLVSCTVSELQPLRAEAEDIPLDIVYEDDHVLVVNKPAHMVVHPAPGNAKGTLVNAILHHCKISTFTCLARSSAGDECPDSTDEDTDVFHVDQFAAEDVSSEVRNALVRPGIVHRLDKGTSGLLVVAKDEHSHARLAEQFKLHTIRRVYISLTCGAPNPNSGRIEASIARDPNNRIRMTAIAGSGHRYARNAASRYKVREVFAGGGSALVEWRLETGRTHQIRAHAKYIGIPLLGDETYGGTQSMALSLLRPRSPSKYHSGLSNLLSKVDRPCLHAASLGWKTNNKQEDRWDLVRRFM

SEQ ID NO: 64949 - protein, 661 aa, Zea Mays
MSRQVTLQKYFLLLCRPSMAEIVKMGRPQAKVGSRSVASSTALPTVGDSVISNTPNLVPEEYNRTVFASEAGHVAADKLPNGAVEVHSLPKDASAFDMLPSAEGTDVEAPSMSANAQGSSTPDANEDDIEKYANLEEGNTESLISPGQVSASGKDIQSEYTEVVSHVDEGSIEKTNDFQLNGLPFEHNQNLNGDVSTATTQFDHLTLHEGPKLSDDNPAVIIPDHLQVSNADCAHLTFGSFVSGTLDSSLTTKPLESHGDAAAVPDDDSIDQSDGRIHDDEGKVTLATDVNEYVTSAANSNEENLDITSVQQSEVTRADFLDVTSNTEYNLTSTPDYATSSAPLQDSASQSLQENRQFQNISPFSSFMQMQNGLLPPAIPPLREFDPAFSLLLTHPPMMHGTMSSSMSNTTVSTQPQENANPVGLPNPQLTQSQQSTSIASGPPLPQHLLHPYAQPTLPLGYASMIGYPSLPPSYAYLPPAAFQQPYMNSGLFHQAAAAVPTSSVKYPLPQYKSNIALASLPQPGSLLSSYVGGFGTASNMPGNFPLNQSTAAATTTLGFDGTVPSHFKDGNQFISLQQNENPAMWMHGASSRGMPPLAASTMYGYQGQSHQAGLRQGQLPSQFGSALGQSQPGLGPEHRNPSDSNLSGAAQANQMWPNTY

SEQ ID NO: 64950 - protein, 94 aa, Zea Mays
MDALTRLHRSLVGGDDEDQPEDSILADTEDLCSLSPLQRIYAFAACLVAGLTLMILSFIVFARPIKFAVMFTFGNILAVGSLCYGPSKTAKDDV

SEQ ID NO: 64951 - protein, 174 aa, Zea Mays
MWAGTIPQSSSEIGQKRSRAARGAHCIGIRGSASRIGRATGARRLLIEAPPRSTEEGPRTPPRKDPRCQNPTSRPAPVSQRGSGGGAAAPRAPGIWRQRQRARPARCGPVRSGEERSPVARGRATPEEEESNRRSGRRSQTSAEEREGGSAGVGGERKKGEFVSIFIILAAALF

SEQ ID NO: 64952 - protein, 334 aa, Zea Mays
MASWSWTSVHCSSYPLPGPSARFTPSLVSATTPALRRTRARGQLQRCLCSQYAGERQPPPPPPPQPEPDSPQQLERLFSNLNQTTMKHEPGSVTSAVFLVAGTTVGAGILAIPAVTQEAGFLASAVICILCWSYMVVTGLLVAEVNVNTMCELGSGGVSLVSMAMRTLGTFGVRTSCLSYLFIHYALLVAYVARSSNIITNSLGIPIWESATLFSLAFGGVCYFGSQRLIGAVNGVLVVGILASFTSLVVVASGNLQWSSLLEANFAAAPQSIPIIALSFVYQNVVPVLCTNLEGDLSKVRYCGGYCHTPGSVPSMGWSNLGDTSRPCREQHCF

SEQ ID NO: 64953 - protein, 80 aa, Zea Mays
MPCALEVIDARLQSTSHIQCSRSFDQNIGRRFSKGHLIQKPVAICPENSDTSSTILLFRHDPDWKQAPFLSDTQEVNKGK

SEQ ID NO: 64954 - protein, 208 aa, Zea Mays
MARLLAARALALARPSGTPSALRFCPSRALSDEVEFVEIDLSEESPASSSGGEGEGDSATVQAQMGSRRLEDAIYGVLVRRAAPEWLPFVPGASYWVPPLPRPLGVASLLGAAVYTARGATAMTEEEAFSFTTVRGCPSAAYFVGGLSGFANQAVCMYSGLGWVALHRWSEFLVSLGSKVSRARNGKFLRPVKKSREDATQTDDDDES

SEQ ID NO: 64955 - protein, 50 aa, Zea Mays
MVLENVREMWTEIPKTGKGKKKALPVNKDRFISKMFLRGDSVIIVLRNPK

SEQ ID NO: 64956 - protein, 172 aa, Zea Mays
MALAAGEATDDAPLLNPRTNEFNRHKKDKAKDAERVLPDIRAVKPFAAQRQPVAAQSFPRSRAVVEDELGQTDPNLCVNHGEPVKPPSLSPPPEAKLVSSRGFGKRTTRQEGPTRQWCETEEHACGRLTRRTQSRPRTSLPHSGDGDPEVLPWRTREDREDVLGDPATPPNL

SEQ ID NO: 64957 - protein, 117 aa, Zea Mays
MEKLYDAGKARAIGQTKLHSFCQSTGVHLTAYSPLGSPGTTWMNGNVLKEPIIISIAEKLGKTSAQVALRWNIQMGHSVLPKSTNEERIKQNLDVYDWSIPDDLLAKFSEIKQVSVS

SEQ ID NO: 64958 - protein, 106 aa, Zea Mays
MVDRVWRTTGTVSTVAVGGGGAWGKCHGWGTASASTANREGRDACHGGGVVRASAGGERGPARRPREEGRRQAGPGGRRQRENREGGCRVERKVGEWRGWTESRTN

SEQ ID NO: 64959 - protein, 817 aa, Zea Mays
MKLILYGVPEEQLQEHQQSLVQYTEEHKEQIPDIVRHILSAGTDISEARKVSKKDANSSSNGDAYRESLSWLQWLMFKNEPAAMLDDLERSNAGERAVCGSVWGHNDVAYRCRTCESDPTCAICVPCFQNGNHKDHDYSIIYTGGGCCDCGDATAWKREGFCSKHKGAEQIKPLPVELACSVGPVLDVLLQFWKERICLLEPHHAKGSDGSSCKRIAEELTTSISSMLLEFCTRSENLLSFLSLRIREFPDMLDALIRSDRLLDKKVARKLHEFLLKLISDPAFKYEFAKVFIHYYPITFGEVIKGCNDSLLEDYPLMTTFSVQIFTVPTLTPRLVREVDLLGVLLGCLTDLFLSCIGEDGRLQTNKWGNLFDASIRLLDDTRYVLSHEEVSKHVAYGRPDLTRSWIKLLSLVQGMDPQKRVTSIHAEDENEHLSAPFVLGHYLGIVQNLLMRGSFSPPDQHESTDVTVCSTAIKGVESAENQRHAKVGRVSQESSVSDLSSRDSSLCCGLPSPAAWLVLQCLKAIESWLWLENDIALRSKLSSLDASSNDSHKLMALLEDPLTSLTGNSSNTNMCVMDVKINEGSQTDCTADYYEASSSPVQGQGQEAMPLVSNSTGKGKMHGSSNSTVVQLHPEDAITYTLTDGSILYAHPDSRIEELGILNTRGWPHVVFDVSSQETSFHIPLHRMLSLLLRKAMKKCFGEDGHSDVQSNEFFPQILRGCEPYGFASIVMEHPLRVRVFCAQVRAGMWRKNGDAAILSAEWYRSVQWFEQGLESDLFLLQCCAALSSPELFVRTIQERFGLSSYTDLGLAEQNE

SEQ ID NO: 64960 - protein, 440 aa, Zea Mays
MESRWRKAKMSLGLNLCVYVPRTLEGDDAASSPDTASSTAALVSPVASSSSAATSTNTTPTAASADQSSASGKVLMPTTPTPTSAGLRLSKSGSKSFKKTCAICLTTMKPGQGHALFTAECSHTFHFHCISANVKHGSSSCPVCRIKWKELPFRGPLPAELPQGNARINPVNGYQNGGHMNILRPLPRARSSGRLHHLATLLPDTDPSTFNDDEPLDLSSEEANDNHQGCLRTVEIKTYPEFTEVPENTSERNFTVLIHLKAPVAQHLQPSSNLGDGNGLSTARAPVDLITVLDVSGSMAGTKLALLKRAMGFVIQNLGSSDRLSVIAFSSSARRLFPLRRMTESGRQQSLLAVNSLTSNGGTNIAEALRKGSKVIEERQAKNPVCSIILLSDGQDTYTVSPTAGVHKGAPEYCALLPSTNGNQQRPLSKMHLLSALVDF

SEQ ID NO: 64961 - protein, 854 aa, Zea Mays
MSGGFFRGTSADQDTRFSNKQAKLLKTQKFAPELDHLVDTSKVKMDVMKPWIAKRVTELLGFEDEVLINFIYGLLEEKEADGKKIQIQLTGFMEKNTVKFMRELWTLLLSAQQNASGVPQQFLDEKEAEIQQKKAEDDRIAQEIQKKREMEENDSELDGDAGNSRSYGDPVGSALNSTNFNTEEEKNNDFKRSLRAKNRGSRRSRSISLSPRARQRSISPRNNSRSPPRRSHSIDRHHRSSWRSTSPRRSISPRRHSPRSTPSISRRRSPYSRRGSPSLSRYPSPFTRRRSPLRRKSPSSGPLRSLSPRHRRSPARVPRRSPSPASRRSPVRRRFSPGRRTSPSPVRRRPRSPSPGRRRPRSPSPGRRRPRSPSPRRRRPRSPSPGRRRPRSPSPGRRRLRSPSPGRRRPRSPSPGRRRPRSPSPGRRRPRSPSPGRRRPLSPEGRRSTSPYNSRSPNRSRQSLSKDTEKETNGTPSVKDRVVHSRGQEQKSDDNNRDGARIVGNNSPDSEHRLSKSLRPPNYEERNSTRDSSYKNSDKPIPSQGSTDTSGDEEHSRARENARKANSCRRKTKDLSAGLQPKKISAGDSSPRDKSPFILQQSGKVVQKKHPDQLSESSEDELAGRRTKHQTDSPDDSRRKQHSPTRIENDESYSKGGRNSEHVMRGLRDDSDDAIDTKKYLSKVNEDSQSDDGSPLKKTKKKTDGNRHIDSGSSGSEEPDKHRTHSEKRRHKKTHKHKKQYDDSSESDSEPDGKDAKRRRRKEEKRLRKEERRRRREERHRRRAERHASKRKLKNTDTVTMPSDSEKDRDSDSDGDVRKRVSNAGREESDQKKLEIELREKALESLRAKKAINN

SEQ ID NO: 64962 - protein, 596 aa, Zea Mays
MEALQPNIQAGIHTRNLPVKQLGGMIFGCKPDTIEECFKKQLFGLPAVHYSYVKNVKPGMPLFLFNYIDRRLHGIFEAASLGQMSIDPYAWSNEDLLKTPFPAQVRICIRTRYPPMLESRYKTVLGANYYDRHLFYFELDHTQTEALISLFKLLPLVNNQVPAAPRERSIAVSLPPTKRKAPVLPDPKKVKENSKDINPFSVLSNASDGAQENWVDFDSDVENASINENSHSDTDEKEFEEPVSDWEDLDDNALQYQFSPYSNSDEVSQNSSYKTVCQEVELAECIPPVVNPASEEKLTMLVHNEHKAAVCIGKIESEVNSIMDGVGLQPERHTILKKLKELFSMRQQGVSSQDCVESSPDQCVPEETLSCDPLDVTVEDKTSFQEHLGEFDELRQIIADLSKRAEALEKKQKGSDQDLLFLREVVKDSGRKVQQLEYLVDELQFRFDSSLSLPGSMHNTLAKPSIFLIGGYNGVTWLSSLDSFSPEKDTMVGLTPMSFARSYASAAALDGHIFAFGGGGGKSSWYNTVECYSSRNNEWIECPSLNRKKGSLAGISLNSKIYAIGGGDGNETFSEVEMFDPYLGKWLCGPSMLIPV

SEQ ID NO: 64963 - protein, 274 aa, Zea Mays
MMQQPPQPQPGMALPPPPQTGGGQPPQWGAIPPPMTQQYGAPPPQQPPAMWGQPPSQAHYGQAPPPQPYYAAPPVPAAPAAADEVRTLWIGDLQYWMDDNYVFGCFSNTGEVQNVKLIRDKNSGQLQGYGFVEFTSRAAAERVLQTYNGQMMPNVDLTFRLNWASAGEKRDDTPDYTIFVGDLAADVTDYLLQETFRVHYPSVKGAKVVTDKLTMRTKGYGFVKFGDPTEQARAMTEMNGMPCSSRPMRIGPAASRKNAGGVVQERGYQQALFV

SEQ ID NO: 64964 - protein, 232 aa, Zea Mays
MTLGSAAHKIPLEVAHTLVEIAEVARYAYHHRPGRPATHEGDPTAPPAGADSSGGTNEDAARLLEENAMLRARLADDLALLRELHGAPCVSKECPPDLYNRLMAAVNNVSFLAHLEKLQDESARQLNELTSGDMTEVEAADIPDKAGNGKKGLWVLVPCDTAGANLEEISGIDDENYVIVNEDDIVDGIAAFVARCILEDPKSKSLSPMQLQKGSSILHATMLHSNIAPLNS

SEQ ID NO: 64965 - protein, 180 aa, Zea Mays
MRVFAPPTRPIAILPASEPVSSPCCPRGLAVAASSTFLSSAPSAMWRATRRSPPFLRWLSSDAASSKAPRQRVAALWGNGDYGRLGLGSLESRWSPTVCPFFLARAADPPASLACGGAHTLFLTQNGRVFATGLNDFGQLGIGTSVTHMLEPVEISGFHERVVEVSAGNHHSCAVTGNRK

SEQ ID NO: 64966 - protein, 149 aa, Zea Mays
MNPKSLIAIQHITLLSFSLHGRLPQPPNPTLTGSPLGPSRRQPPSPRPQPPSPQPASPNPAVGHLQAPPRSTPPPAAAPRHRLACPLPDCPSPRRPAAPHHSTRPPPPAGRHQAPGTTAPGRHSCIGCFGVRLTDTASPDSTPTIPVPK

SEQ ID NO: 64967 - protein, 499 aa, Zea Mays
MPVLFLSSLVFALGHVIVAYRTSGRARRKLLIHRIDPESILAYKNAFSGCYKVPRSPTPYSGKLFTRSESETKRKSLIQDDRDLPISFLADSDSMFIACQGITIHYKVSDPAASLPSSPGFFSERDTHHDVISSSISPRRQRHESPPSASSNTRRVLNRSFSHQYHNTSLYAPLLVEPVASPTLLDDIPLMCIDDGNADGCLSHVGFDLEAGGQGKFAVVLVHGFGGGVFSWRHVSNLLARQLGCTVMAFDRPGWGLTSRPRRKDWEDKKLPNPYELESQVDLLISFCSEMGLHSVVLVGHDDGGLLALKAAEKLRTYGGDREVEVKGVVLIGVSLSREVIPAFARILLHTPLRKKHMVRPLLRTEIVQVINRRAWYDATKLTTEILNLYKAPLFVEGWDEALHEVGRLSFSTVLPSKRAADLLRSVEDLPVLVVAGSEDALVSLKSAQAMASKFVNSRIVIISGCGHLPHEECPKALLSALAPFISTLVPSEDLLQRL

SEQ ID NO: 64968 - protein, 274 aa, Zea Mays
MIILSLYISIGSRWSIIAAQLPGRTDNDIKNYWNTRLKKKLFGKQSRNKDQRQQHQFMRQLAGSAASDGMVKQEAAAGGDADAAAAGSSSVAVAATYNWHHHAMAMAMPVQPVPGSTTIMEGHRAEADEVDESIRKLLYKLGGAAGPSTALSSVPQCVRPMYEERSAASLMPPPPPPPSCPAVVDASSSASLDEGGGVLPALELDQSFHFGQVKLDGLESFFGMGGQSGMRWWSEASPLVCPSSTVAAASSSSHGMQMQQYCVVVDEPGKLGMN

SEQ ID NO: 64969 - protein, 149 aa, Zea Mays
MVIQCVCFSPLLPLLYERHSWCLEVMAGHLPERLLLFPLSIKWMPEPSPFPVQAFPHRYLARTCSSAAVRRSSELVPRHPLSTPATSPLPPSRSGARSVVRAVADSLDHPLPCSARTARGASPERTSPSTQHLCRDHPALPPVPEQTQD

SEQ ID NO: 64970 - protein, 148 aa, Zea Mays
MPPSFFSRSSGCAVDHVPYGRASSIHGCLPCVLPLFFSVGGVVWPGPTSPGAASQRGCTRARCSQRGSPSAMQSTPALRRAGPARPRPAPSLGRAVPTQAPVGAFGRGCILRAAAHRAVLPPAVFASPGSAVVQGSRRDSLVADFLVH

SEQ ID NO: 64971 - protein, 663 aa, Zea Mays
MPVPAELSPPSPHGAPRTRAGEQDDSTLPPTAAATATATRGGTGRKRRRGARDPRASWAWETEWDRAYLLACAAGLLVDPLFLYAVAVSAPLMCVFLDAWFAAAVTALRCAVDAMHASNLLLRLRGACSPRREDTDEEEAQPGRDGGVPGRGTRSKEGVFLDVLVILPVMQVVVWVATPAMIRAGSTTDVMIVLLTAFLLEYLPKIYHAVRVLRRMQGVSGYLFGTIWWGIALNLMAYFVAAHAVGACWYLLGAQRATKCLREQCAQAGSGCAPWALACAEPLYYGATASSVGAARLAWAGNATARGTCLDSADNYQYGAYQWTVMLVANPSRVERVLLPIFWGLMTLSTFGNLESTTEWLEIVFNIVTITGGLILVTMLIGNIKVFLNATTSKKQAMHTRLRSVELWMKRKDLPRSYRHRVRQYERQRWAATRGVDECRIVRDLPEGLRRDIKYHLCLGLVRQVPLFQHMDDLVLENICDRVKSLIFPKGEVIVREGDPVKRMLFIVRGHLQSSQVLRNGAESCCMLGPGNFSGDELLSWCLRRPFLERLPGSSSTLATLESTEAFGLDAADVKYVTQHFRYTFTNDKVRRSARYYSPGWRTWAAVAVQLAWRRYKHRKTLASLSFIRPRRPLSRCSSLGEEKLRLYTALLTSPKPNQDDLL

SEQ ID NO: 64972 - protein, 240 aa, Zea Mays
MGRGKVQLKRIENKINRQVTFSKRRSGLLKKAHEISVLCDAEVALIIFSTKGKLYEYSTDSCMDKILERYERYSYAEKVLISAEYETQGNWCHEYRKLKAKVETIQKCQKHLMGEDLETLNLKELQQLEQQLESSLKHIRTRKSQLMVESISALQRKEENKVLQKELAEKQKDQRQQVQRDQTQQQTSSSSTSFMLREAAPTTNVSIFPVAAGGRVVEGAAAQPQARVGLPPWMLSHLSC

SEQ ID NO: 64973 - protein, 1183 aa, Zea Mays
MDNRVVPTTFYIHNFVHEFARHVACDDIIIFDGTKMQKGCAKRQTFQYALLTCYRVQSTFSHSTLTRTRALHIMNSEAITFPREAFELLKHLRVLNLSGCCIEELPASIGCLKRLKYLDVSGVQIQTLPFPVSRLTNLEVLDLSKTCMKELPSFIGNLQNLKYLNMQGCDKLQNLPLSLGHLQRLEQLRLSCCRCIAMLPDSLCNLINLRILDLSRCTMLRHLPALFGNLVNLEDLSLSSCFNLKQLPESFGNLYFLRFLNLSSCYELQQFPESVTNLEKLEVLILRRCCRLRILPPSFAMIKYLRILDLAGCEALHVSTEMLTTNLEYLNLQRCLNLQTQPYYFENFNKLKFLNLSHCLPTVDCLESISYLFNLEYLDLSETSLDIPMSFARLQKLHTLNLTGCAPMHPSSNVHQTWPGILAKITSLKSVLTMDPVLAASLQGHTECSADYDYHSLTTTDELVIKEITGGSRGLRIAEQLNLQNRLEVCFLKLEWVPRSQSAQDQLLEYTDEEVLEKFQPNETLEHFMLVKYTGNVFPTWMMNKLTSLPYLVNLCLFHLHNCSALPPIGHLQNLRYLHIKDMPNLTNLEMGLSGGPVSLGKLTHLKLEALNLEELSILLSANNESPCFMFPNLEELSVLSCSKLVFKPSVPKCAKYVIKESNMVLSCWQPLGPFSSPPIEKVEISGCVMPSGWLQWLRSIQTLEKVVIDGEALSSFELQKIYAFQEASGSKISKETVSSSRTNMSRELTTEDGALKAIGIDNSTIKHIPRFNTTSELSVDTISSSKVSTPSKEIPSTLRRPDKSKMPALIPGDGSLNLSLKQVQKVTHNFSPLFELGEGGTWAVYRAVLSDNQVVIIRRAKKGHVQEAKHLMEVKLLTKINHWSLVRFLGFIDEKDECIRITEYVPNGTLREHLHDQRKRILNFNQRIVIALDVAIALTYLHLCSGDALICYNLRTSNILLTESYRAKVCCSELSKSGNIVLLKGTGGYIDPEYLETSELTAKSDVYSFGIILLEIISSHGPQDWDVLMNHRQSSVVQWALEKFYDDLMNEILDYRMEDRVDGDVVRDLLSLALSCVVSRGADRPSIVVVGERLWKIWQDHRRNVGEQHEYQGSWAEFIEQEGILRHHKCVLKRSWEPSTTQQDWSVYVRQIELVQEAYDTPWGEEIFSGSVSLDDITVYSR

SEQ ID NO: 64974 - protein, 61 aa, Zea Mays
MNTPQPSTIEDPQGNNQAHTLSHLSNMMDYGSHQVTPPPHDDFADRCLNSSGAATNNNLMS

SEQ ID NO: 64975 - protein, 675 aa, Zea Mays
MARFLNSYKQLSGPAKRRLRMGGPGTMPVEESSKMPMDKLGELEQLLFGESKHNSFVERGRLKLQPGDSEALRLFFTRMQAKNANFFNVIDLDDEGCTRNVFWADARSRAMCEYYSDVITLDTSYVASKYDMPLATFIGVNHHGQSVLMGCALLSDETAETYSWLLKSWIACMYGNLPKAIVTDYCRGIQSAVAEIIPGVRHRMCLFQIMRKAAERLGGLSEYRAINKAMHKAVYDSLTIDEFEEEWNTLITYSGLQSNDWLRSLYECRSSWVPVFIKDTFWAGMSTTQRNETITPFFDGYVDLKTTLKQFLVKYEMALQSKYEKEAQADFETFHKQRPPVSKFYMEEQLSKVYTHNMFKKFQDEIEAIMYCHVSLISVDGPVSTFNVKECIFFEDGKRTMSKIFAVTYKVDEKNISCICGGFQFSGILCRHSLSMLKFQLVREIPQHYILDRWKKDFRQLHVMRRPPSDLVPNNRMDRYDYLSIRCLQLVDSAVLSDKYRLALRLVRETEKFLLNSNTHDDTQPRIKSRVPKVNKPNIVTGQTMVGAATGNGNDGLKGPEATAVTQVPQSQKGGAEKGIVPTGYIGVPANLQQFVGNQTAFRPSIVYMVPSGVDPHAFGNVMMPVMYQQMFQVPPKPNETVQDTSANGKSKRPRGQKLTETSQQANGTPASASG

SEQ ID NO: 64976 - protein, 145 aa, Zea Mays
MHTRSPYLGDSDVEHRKGPSRCRQRFSVISSSISHCPARCLQDGAEEFFLKPVKPADMKKLKSHLLKRKQPNQKNKPQAQAVESPEQQLDPHPQPVHEPEEAAADRNGVNKRKAAAMEEGLTVVVTAPESTKPRRLSTSSLTVET

SEQ ID NO: 64977 - protein, 248 aa, Zea Mays
MDSAADSSSPRCHHGQYRQDAGELEDQTSTSKMPSSASELPCSLKREVRVLEKRLDDQFVMRRALEKALGYKPCAVHASSVNCIPEPTEELIKEIAVLELEVICLEKHLLTLYRKAFEQQLSPVNSACDAENNKQPARSFSGILSEASVLSFSTPRKHQPVQSSRMVLARKSTPTASTSEASSEKINIGRSHSSLLHRSVRVSPSANNLARALKPCHTSPLSFVEVQNDISEISLVPKYFNRFAAGLS

SEQ ID NO: 64978 - protein, 337 aa, Zea Mays
MLTVSREVALDVQSLATVLGSCLGNVTCQSLVLFEDLLVSTTLPPDDTLNLYTYAVLRLTPRALYSNASSWSYLRKGTSVSAGQTSSSSNGTTAGERYRSRSRDTSPGGQNQMNRNFRPLLREKLSKGKDGFVAADFTATEARCAVPSTPILWFQQADECMHLCIYQHKSLTILLLVPASSVINGEEGITHVKKAMLENASQKIVTVEQKLTRGWGGENAYHVSGYRYLLVDPERRVSRASPPGKVTTLAKDSLLALNMLRQEVDLEKSRYKRGDPCHDKDFEVCIRTKNNAWVIAKISQGRELYMALEKGGETLLYASTAVEKFSNRYCEGAFSTD

SEQ ID NO: 64979 - protein, 573 aa, Zea Mays
MGNIFLKENDFHIDKYTLHTGKNWRFDTSRSSQFHPSLDPAILEADAHRALLLLLDILRTAYAHRGSFLVGTINSLAAVVKIRPIYYDRVLPVLLDFDPGLETAKGAHSASLRYAVRAAFLGFLRSPHQAMIESKDILVRRLRVLSPGEAMEQNIRQAEKMSRNIERASRASKDESTSWEMPYGDINRKKPAVRSSDTFTTSDGIAKRARFDMSATSNLPVLGLSDYSDMQADNDASVGHSSDPAILNNEVSPVEKMIEMIGALLAEGERGAESLGILVSTVEADVMADIVIETMKHLPEASFHLATNNGVQQLNFKYSSGLVTQNLPANSDSTLFTAQSTPTADGVSISPSDAFVMTSVHDAKRDPRRDPRRLDPRRIVSSSAVNSIQVKMETNSVHQTDNLSNTLYSNSRKAENYSDYQGDLHKNEGEQQSASQPNQTIAKDKLELLDVVTEPEPTFEVEAPVDVRIHSSDVDEDIVKPMSSVVNSLDESDSMDLEVDPFLPAPKAPTPDDTNDDLPIITSQLELSEKGKISINKLAIGRILDDYKKNSFNARFSLLAHLIAVLLMITLWI

SEQ ID NO: 64980 - protein, 842 aa, Zea Mays
MCNWDARKALLDFDWASHDNTHCDDQSVWRCTDCHVLDCEDHKIASISNKEKSFDLHEIFKTLPGVRMEKNMQVARITPDERALELGIWSVPDDVLHKVLILLKPRDLVRVAATCHHLRTLAATVMPCMKLKLFPHQEAAVEWMLKREQNVHVLAHPLYKDFCTEDGFPFYINVISAEISTGDAPTINDFCGGLFCDEPGLGKTVTTLSLILKTHGTMAYPPQGVDVSWCMHKPDKKCGYYELSPSFSSNRNSSSVSKKLLGEDVIADCPSPDDSVCSTRSSRKRGRLLSPDPTKVMLHAAIENSPSSSNSKVQPMPAMHILKFTKNSRQVRKNPMDAYSDVSVGNKRKIDTTSEVSETWVQCDACRKWRRVSDGTVLDSTTVWFCTMNPDPTRQKCTAPEESWDFKRKITYLPGFYKKNSLPGNEENVSFFTNILKDYVTMINSETKKALLWLAKLSPTKLLEMEFVGLTRPVLDTRATTGKGAHPYYKIFQAFGLVRKIEKGMTRWYYPSMLDDLAFDSAALGAALENPLDSTRFYLSTATLIVVPANLIDHWTTQIQRHVSSDTLNVFVWGDHKKPSAHNLAWDYDIVITTFSRLSAEWGPQKRSPLKQIHWFRVILDEGHTLGSSLALTNKLQMAVALVASNRWILTGTPTPNTPTSQVAHLHLMLKFLHDETYGQNYQSWDSGIHRPFEAQMEEGRVRLVQLLQRTMISARKADLKTIPPCIKKITFLDFNEGHAKSYNELVVTIRRNILMADWNDPSHVESLLNPKQWKFRAATLKNVRLSCCVAGHIKVAEAGQDIQETMDELVQQGLDPSSDEYQLIRYSLLNGASCFRLWISL

SEQ ID NO: 64981 - protein, 796 aa, Zea Mays
MSIITAWPKKRSLRDIAALYNCEASLEKVEKFRSAEGLKSIGSKCFQAANISVILIDDGIAFDKMLDLESHKAFAPVVGRVLRIERLAETIINAESFSGSSWTLDSFTESYISKLNSVSNQIVALKSIAAYRSGLEINPNVSKTDAEDGLRKELTGPRPFRITNKNLIDYLFTCSLGIAVSLSLPVQIHTGFGDKDLDLRKCNPLHLRAVLEDERFAKCQIVLLHASYPFSKEASYLASVYSQVYLDFGLAIPKLSVHGMTSSLKELLELAPIKKVMFSTDGYAFPETYYLGAKRARDVVYRVLSAACEDGDLSIQEAIEAIEDIFRRNALNLYKLNVVNGSINHETAIVGKRVSLSSVEEDVLFVRIIWCDASGQHRCRVVPAGRFYEITRNKGVGLTFAAMGMTSFCDGPADGSNLTGVGEIRLVPDMPTLVRLPWSRHEEMVMADMQIRPGEGWEYCPRNTLRKVTKVLLDEFNVTMKAGFENEFFLRRKLVSNGVEMWIPYDNTNYCSTSAFDGASSILQEVYSSLKDSGIVVEQLHAEAGKGQFEIALKYILCTVAADKLIYARETIKSIARKHGLVATFLPKPDLDDFGSGSHVHLSLWENDQNVFMGSSKDNFHGMSKTGEQFLAGVYHHLPSILAFTAPHPNSYDRIQPDTWSGAYLCWGKENREAPLRTACPPGVPLDLVSNFEIKSFDGCANPHLGLAAIVAAGIDGLRRHLKLPEPIESNPSDHSSKLKRLPQNLQESVESLSADKVLHELIGDKLVTTAIAIRKAEINHFAKNPGALKDLIDRY

SEQ ID NO: 64982 - protein, 363 aa, Zea Mays
MKDSQDIQSTTELQSPVQGTNEVQSQQPNSMAADAPAGNSGSLSVASNDNKKVSREDIELVQNLIERCLQLYMNKGEVVRTLSTRARIEPGFTTLVWQKLEEENSEFFRAYYIRLKLKRQIILFNHLLQHQYNLMKYPAPPNIPLAPIQNGIHHMPVSNLPMGYPVLQQPIMPAPGQPHMDPMACGLSSGHVVNGIPAPGGYHPMRMNSGNDMVLDNGAPEAPHAGATGSAMSSEMAVSPSSAASSNHAPFTPSDIPGMTMDVSALDSAFGCDVGNPESLQLGPDGSSRDSIRSLGQLWNFSLSDLTADLTSLGADLDVLENYTGTPFLPSDSDILLDSPDQDDIVEYFADAINGSPSDEEKP

SEQ ID NO: 64983 - protein, 54 aa, Zea Mays
MMRCVRERSRSSSPSRLSGAKDILDPTIFIFYFVSLPLYNKYSDYCDIYLYTLC

SEQ ID NO: 64984 - protein, 222 aa, Zea Mays
MAMENTAPCGDFGKIVADLESENLVANVSAVNQASALIAGDIMNPDQSLRGPLLKGLLRALRHVKSPLVCAAAVWAISMFSGSLEEVSDAIVALSCFFKDLLDRRKIEKLILGGEAENQYKLSTDYYGVTAGDATQGKHQQPWLMEMEELLFVRIGLTRQAGGSYAIPSSSKSSASSSNAYLPEPLGNTDNLIFLVHSGDALLADFVEIMLSNLKKKVKELE

SEQ ID NO: 64985 - protein, 356 aa, Zea Mays
MGAPRHLLDVAMLCALFVSAASFTDPPDALGLLGLYHTLESPWQLSGWTFQGGDPCGEGGGSKHWRGVFCKGPSIVAINISGLGVGGWLGPDLLKFQSLKKLDMSFNNIAGEIPSTLPPNVEYLNLAANKFEGNIPSSLPWLRSLKYLNFSYNKLSGVIGDVFVNMDSLETMDLSFNAFNSDLPRSFSSLTSLRYLYLQHNEFTGSVILLAGLPLSSLNIENNHFSGYVPGTFQSIPELRIDGNQFQPGFKLASSSFTRKTPAAPPQSLPPPPLQSPSPSPSPLAAQQKPKRRPKSPKPSFGYSSLQNNSHHRKSHSRVTAAAMASATCTVFVLLVVGLVLRSRKSCSCSPKSTSN

SEQ ID NO: 64986 - protein, 266 aa, Zea Mays
MPPAIAWAMSAGRGLLASLTLRMLGSTTSHSTSPPTGDTGDDAISPKSTTGPVYNLTATNCWMRTKSCAIKFGSASFFDFKRLVFDNITIVDSHRGLGMQIRDGGNVNDVVFSNIKMRTRYYHPLWWGRAEPIYITTCPRHPDSKEGAISDIRFINISSVSENGVFLAGSKHGLLRNLKFKNIDLTYKRWTNYTGGLYDYRPGCQEMVKHKTGGMMLEHISGLEIDNVRMRWARGSLKGWNVNPILFRPSTIDNLSFHDWQSVDVQ

SEQ ID NO: 64987 - protein, 808 aa, Zea Mays
MEAAASSLSTLLSTLRVDGPWTPPGTWESAIPESGAARVTDLGGRLQPIYELASVTDDALIHLALHALYGVKSSLDEIEELSVLFSSNPADRTSNRVTNVWLRSSSTISVGSILKSLRSTGLVVFFLCKFVHFYLVQSREMNCASREVHEHEHPGDKDTEQHRPYSLVNQAFAAAVSKVLEGYFCSLNTLPASIRLRRSVGQSGIPSKTSDGMSCNSTAEVTLLEVYLHTEELRRHVKSLGNICFPKFAGATLCHDGLDTEASVEFENFPRGTDLLSYLYVYIRDADPVHYGLLKYLFIRSCEPYFNFIKSWIYRASVDDPYEEFLITQTENKGVQGVSSDITDEFTLFPLKQEYFISQKSTMKLLSSQSSSVYHGINWAVPIDECEKDDSLSCKHVPVHSQNAEHTAVLDGLELDYQYSQFSPFDRFMKRTSCSSEDMNSVEFLYTDHKRSVEKVSHGNAVNALHSESGPTKLSNGKNYEKFGNINQPWYTSIPYNLSLNPILKNAACYCTESDVQQKSKNQSLASFDFESVMDPCEVYCARSTSCLVEFVNGATIIQPSTHPCERLDCSPKLLQAQTRSQASLTSSGEMSTRDSLQKNVYGGAFWERSLLYNDKSKEKPAVDFSSQFDMPLDIVINKCIMEEVLLQYKYVSSFTMKLLEEGFDLCAHLLALRRYHFMEIADWADSFIALIYNKKWSFVKSEQKRSEIQGLMDFALQRSSCDSDPYKERLFIYIREPPVDSFDASACDLDLLDDILLGYKAEWPVNIVITEDTLKIYAEIFCYLLQVRFAVFSLTEVWRFLKVSFLH

SEQ ID NO: 64988 - protein, 183 aa, Zea Mays
MCPGSVESSSAAAAGKSVCVMDAAGPLGHALVDRLLRRGYTVHAATYARDGEEGAAAAALLGHLSCAADACRHRLKLFRADPFDYHAIADAVRGCAGVFCMFNTPDDQAQCDESTVETEVRAAHNVLEACAQTDAMERVVFTSSVTAVVWSGAGAGVGAHREEVADERSWSDLAFCRKFKTSK

SEQ ID NO: 64989 - protein, 1209 aa, Zea Mays
MGISFKLSKVGVRVHPAARSASAAVAEKPGAGGKEGSLSESTREDKRKDVNGIKILPACSKEILPDHEVSFTLSLYERGYLISKSAPMDPSQTSIQDGKTLHPYDRASEKLFSAIEAGRLPGDIFDEIPSKYYNGSVVCEIHDYRKHVSNQAPASSAELGSPIVNKVRLRMTFENVVKDITLLSDDSWSYRDFMEAEACILRALQPELCLDPTPKLDRLHQDPVPHKLSLGIGKKRRLRQNPEVVTSSHMSHGKKVCIDRLPESAKADEMGITSSNAAQQVGGNITIQNMSVSGGSQTLRPNNSSQDAARTLLPQSGLQQTLCYSAAGNDHMAGPPANFSGTSSCISSHQSLIGYSDSVAANSLLSVKREMQDASLQDPKRIKRTGGIDDVQQQQIRPQPLGGQEMQWKNHQLHPQLDVKGMQYASSLSGQRYPSSMMNNMQDPGSSLYFSHQQNLRYDAKQEQMDGSDKSKDTLQSMAPETSMLDQQQSQSQHLPQQSVARNNVPNMGQWQNTRFAAEKDFKKEDIIQRRKLAPSSRAPTGPVIQSPVSSKSGELSGSSMGGQFGSAVTSAVTGVQKDKFAANSGTAVGFPSVASSPSDSMHRIQQPAVASSKRKTNSVPKTQPPVSAVGSPASVSNMHALLNASSPSIGTTPMGDQAILDKFVKIDNISHRYQLFNKKKFDKISQKKTIINRNQNVAGCLNSCFHSEDYIDTTRPLCNSMISGTINTCKGRVINFVSTKDMYQGHSRPFPVDFNELSDETVRMQYGDIKDFDDPNSYGCVFILPTKHYADLFAGQLISLMLQDGHSKADDEVVRSTPFANISTPFGPLPNNVVSDVKQEGGVSQQLNAAAHANVAPGTQMQQLPVNRMLPSANGNQILAMQQGYMQGAAMPPRSQHLDQNLVQQPQHQQPQQQPLQQNAQAQVQQPSSLPLNQMQRPQVLPTSPLSQMLGPGSNLPMGSSQIGKNKAPPTSLQLQMLQAQPQQPMSRKVMMGLGSAMNMGNMVNNVVGLGGLGNVMGMGNVRPISSPMASMSGLGNNSNPMNMGMASNLAAAGLRPGMNPAAIAKVRMGLAQQRAAGMYPGMVGMPGSSSSILPSSAGLSMMGQPLNRGNLGPLQRAMMSSMGPPKMPGGNFQLNAQQQIHLQHQLQQLQQNPQQQLQQLQQQQQIQQLQQQQQQQLQQQQLQQQQQMGSPLGPPPSPQLSSGQQHS

SEQ ID NO: 64990 - protein, 259 aa, Zea Mays
MRAGRAFCKASLLNDKLYVVGGVSKGENGLIAPLRSAEVFDPATGAWAELPDMLFSKSQAMPTAIADLLKPVAAGVTSYGGKLHVPQSFYSWPFAVDVGGEVFDPETNSWEQMPAGMGEGWPARQAGTRLSAVVEGDLYALEPTTSSSGGCEIKMYDAQEDAWKVAVSQVRAGAFDESDSPCLLAAFLGKLHLVVKDMGSRISVVQMDSLMKPVDSPALSAATTCRTPDVSSEQTHVWKAIASKNIAAAELVSCQVLSI

SEQ ID NO: 64991 - protein, 1074 aa, Zea Mays
MPVNYYHCKVSYMCMAAVLDSKEQTHHVSVELLCVLAVINLTISPSKSVKAVAYHVLSRFSLFVLDLPASHSSEEQDISTSYHISKPALLLPKLLHHLWSKPSSSCFSFMKYIATKASPDSGQSDLEANYWTHQINAYLTALHREKHTLDVRSSKTTSVAISSLISSVASVLVMHPKLGTSAAESLAMLGTSDPRLGMPLFVVILFYSKILCSSGKFSAEISLSLLESLPSLAIHGFVLPLALQWISPMLKRDSNSVLYAMAVRLLCKIWAVTDWAFPNLQVVLDPENFSNFISDREISASIATSIRDVCKQNPDRGVDIILSVSFCIESRDSVVQALGLESLSYLCEADVVDFYTAWKVISKQVLDYYVEPAVAHSLCILLRCGAMDAEAYSVISGNLVRTLWRIGTSKKNNPDPLWDKARGTAFHSLSNYKVSLIQDAIPDFWKLNYEFFTNEHNLAVLKAMEHLQDEIIRYEHICLVSLLTDEPCSHRNRRRVTTDKRTAVHKFEKLLEVFPRAVFKGMLSHHQLPGAALLTLNFTPKDILNEGKPKDLPRVHSAFEQAFVEIAESMYVSRNIVVALLALQSWKSFVSNWMQAVVALLDTKDSSKLNKAMKAANDIFKELCISIKNGIDPVLRKTGPESYTERTNNPDNDSPTQSPSRFIVAELNTRDEQLRLRETSRTWPKELDDTYIETPILCDQVPVSTPQVVVNIALVIGALALIVPPTAHLVVSSVSDFLLKWLLQYEHEHKQWSAALSLGLIFNCFHPTDKKSRLQVINGFLEVISKTESCLVKGACGLALGYVCHGLLTRAHNAVDSEVEAITQLNERASVEDILHALVTLLIQLCPSSCYSLKKLSIYGISSMGGMEENIHSFSDDPWAVAGLVIGLGNSVVALYRLGAYEAVTEVKDVLISWIPNVDSNSALFDEIDSVSLCMGSCLALPSVVAFCQRVELLNDDLDALFNRYTSLASELLNLNKSGIIFQNLLMAICIGAGSFLSSILNDGVHAMEFNGVKGFLDTLRHIYTHPFPPLVHLGGMFGVVNAFGAGAGDLTGVFSKPMTSQIKHEVSFIHLNT

SEQ ID NO: 64992 - protein, 334 aa, Zea Mays
MTWCALNYRSFDVRRECLYREYFYLLPAEIIGIKDDYSSEEMQEHLSEFNKILKGFEGNHPFHNYTARAKYRKVLAGRHRRAKGASSALKSMSSDTGMAESSSEESTSPDHDEDLNISSIFDSGIPEDTRVNGILKLSEDRLQIQARWLHEPDESDRLNASHFRDIITCSCGDLQTSSGIQFVELTICGVSFMLHQIRKMVGTAVTVKRGLLPRDIIELSLAKFSRIVLPIAPSEVLVLKDNSFCTKSKGGRIVRPGIQSMNKSEATRKGVEEFYRAALLPEVAKFLDPSLPPWKEWLENLDRFSGIPGSQLDEVREAYRAWRDDYDRAKMARN

SEQ ID NO: 64993 - protein, 196 aa, Zea Mays
MSRLRALWQASFNATKRALVWSSDDLIPPSERCIFNFNSKDELKRWHLYSDSEYGESTWRIRRYGFCGMRSKKFDGFIDLDAYDTIAMKIKGDGRCYISTIYTENWVNSPGQQEDNSWQAFVYIPPQDRWEVLKIPLDRYLPTWRGNVIQAKLEMNPARIVGMSLSVNAEGGVPGAKTGPGDFRLDVAWIKALRAL

SEQ ID NO: 64994 - protein, 377 aa, Zea Mays
MRTTVKSKAPTSQPARVSNGYGSKNKMSTQRHAEGRVDTMRKEAFLNRERVVSRDNERMHERVVSRGNERMHGSAINGSNQASTSKTTIQKLTSRGSIANKQASTDLNDAALRKSSVAPKHHFSEVDRSKSLQSQKMQSAGQRLQHSSHGQRPHQSMQHRPQQSLQSRRPQQMTQDQKPQQSLQSQRTQQSLQNKRQQQSSHIQKLQSSHTQKSQSSQAHRPQSLSNRSQELRGQRPLSSQGQYLEQRRVQANDRVKQAERHIRPPSKSMPSRPVSSNGIRDDHAKRKQVVKRRFDDDDDEDDPLAMIRNMFGYDPSRYAGRDEDVSDMEADFATIEMEEKRSARIARQEDEEQLRLIEEEERREQERKRRKMARGR

SEQ ID NO: 64995 - protein, 147 aa, Zea Mays
MAAAPTSSGDSPPPAQPEYGSISSMVASSASSAAAAVADFTRWAETFGTEKADAAKAALTSATTLATSSASEAASASSKAASSAYAAASDLTLVAKEELEWFKTEYSAHEQIVFGKIKGPRSYLIQRVRHMFVSKEQVRIKSNMMVA

SEQ ID NO: 64996 - protein, 705 aa, Zea Mays
MDTEPFDEAELLALPPSPVASPPRRLKRLKKSSSQATATTATTTSPHVGSPPPPLSPPPPPLLAEATPGEETLAFPSRDTSPHPPTPPDADAPTPLPHPSPAPVSPPLQPTVTPDNDSDEEDDGLDPLFSGAAGVAQWDPLGAPAEGDGEGDDDDDGLGGGGLIEELRREQRSAKKRLDMDEADGEVASGAGARAEAKGKRSKRKRKEEAPTMESAREKKRSEKERRAQLDSIHAESQRLLRETRKASFKPTVQPVHKPISSVLEKIRLRKMEVLKKYRFFSLRSNTSIEDSDDNDAVPEPVVDLAEQLDVPQSKEVALDKDLRIDGAEKELGANGHSLDRCDSVQEDEDGLSCKEKYLYNCGTKASDEEFSDRLQENHENTQPSNNHNDSVDQSQLPPSSSPTESTDEISSEDEENNDKENMDPSAQNNDVHTLEHLQQAIGGNSRPDDAILKDFLDDEAEEEDDSDNDMTRFKDNEEDDGSDENEVFNDLIAAGYEEKEVDHEKRNELHQKWLQQQDAAETNNVDNNTLISPLEDDNSREVFSLIKKLNIAPKPKMRGKQSTSNHEMLMAGRNTIASKSSFLGRTASGSLASSHRSVYRSYVFGRDDSNSSSRSCISTSESNLDLTNSSQPKKAKFSSQPKPEGTRATPECNTSSGVSLFDVLRRTSEQSSQESCSTITESQAVHQFSAFKLSRRFSKVGSKN

SEQ ID NO: 64997 - protein, 499 aa, Zea Mays
MDALTYYLYLFLAFLPLLLLKLKRRDNNDGLRLPPSPWSLPVIGSLHHLLVGSPLPHRAMAHISHRLKAPLIYLKLGEVPVVVASSPDAAREILKTHDANFATRPWSPTMKVMMADGEGLAFARYGALWRQLRKISILELLSARRVQSFRGVREEEVGRLVAAIAEYSPRGEAVNLSQRIAELMNDTAVRAMIGDRFERRDEFLENVAEGVKISTGFSLGDLFPSSRLASLVGGTARRAAVNHRKMFKLMDYAIEKHEERRAAMTTDAEGVVKEDLVDVLLRIQKEGGLEDLFGAGSETSASTLQWAMSELVSNPRVMERAQAEVREKLQGKPTVTEDDLVDMRYMKLIIKETLRMHPVVPLLLPRECREPCRVMGYDVPKGTTVFVNVWAISRDPKHWEDAATFRPERFEAAGTVDFKGTDFEYTPFGAGRRMCPGMAFAQASMELVLAALLYHFDWKLPGGMLPSELDMAEEMGITARRKRDLYLHPVVVSVPPHVS

SEQ ID NO: 64998 - protein, 574 aa, Zea Mays
MGIIGSGHSCGVALMCAKSERPQGALAAARARKARALAAAHARKAWQRKARTRKAWQRKAWQRKARTRKAWQRKARARKAWQRKIVELADIARCIANTPLDEESALSQMVTCIEDLQEIVNCRKHESLTVQTFGTRIEKLHREKYLQLCDSVDMDKVDSASTIMDEEDNVVRSLRASPVHPIKDRTSIDDFEIIKPISRGAFGRVFLAKKRTTGDLFAIKVLRKADMIRKNAVESILAERDILITVRNPFVVRFFYSFTSRDNLYLVMEYLNGGDLYSLLRNLGCLDEDVVRVYLAEVLTDFGLSKVGLINNTYDLSRPVVSGASLYGDDEPQMNEFEQMDHRARRQNRSAVGTPDYLAPEILLGTGHGCSADWWSVGVILFELIVGIPPFNAEHPQTIFDNILNCKIPWPHVPEEMSFDAQDLIDKLLTEDPHQRLGANGASEVKQHPFFKDISWDTLARQKAAFVPSSDSAFDTSYFTSRYSWNPSDGNIYEAYEFEDSSDNGSLSGSSSCVSNRQDDMGEDSDGLNEFESSANVNYSFSNFSFKNLSQLASINYDMLTKGLKDDPPPRTET

SEQ ID NO: 64999 - protein, 500 aa, Zea Mays
MENRARFSFMGGKGGSLWKQMSFHLSGQRANCGGMLSIQDAYGFTAKKFIKDGFLEFLNKEIESIQYNEKDYEGLPFEFHGGFVGYLGYGLKVECDASSNKAKSSTPDACFVFADNTVVVDHSNGDVYILSLHDEFYSSNGDGICKNSTHTSWLVETEKKLLRLGGMPSGSPIIRKTHARSSSVHKQAGSPINGKTYVRSSSALKQSFVVEKSKDQYVRDVQNCLDYIRDGESYELCLTTQMKRRADCINALQLYLKLRKQNPAPYAAWLNFSSENLSICCSSPERFLRLDRAGVLEAKPIKGTIARGRTPEEDECLRLQLRYSEKDQAENLMIVDLLRNDLGKVCEPGSVHVPRLMDVESYRSVHTMVSTVCGTKKPDLSPVDCVKAAFPGGSMTGAPKVRSMEILDSLETSPRGVYSGSIGFFSYNHTFDLNIVIRTVILHDGEASVGAGGAIVALSSPEAEYDEMLLKAKAPTEVVEDLVQTIYSSDRSDSMQTTIS

SEQ ID NO: 65000 - protein, 131 aa, Zea Mays
MFGSVAYRLLLLLFRRRRCRCSLGEPVVASPGPTTPSSACEQGTPLSLVQGELLPWRLFFAGTSSARLQSWMSWPGAYFPLPPSTRDSMSPPHDTTHPLFFLPSSRRLASAPSTPPSMPGSSTRWLPEGVE

SEQ ID NO: 65001 - protein, 146 aa, Zea Mays
MFIYRPVHRYLGSVNSCRAASALSIPLIAAFPFMTHLSGSKLGLALYFATILKAALGITILTGTSLLQNYAVHQRGAANGVAATAMSFFKAIGPAGAGALFSWTQKRQDAAFFPGDHMLFFILNLVQCIGLVLTLKPFLAVPKHYK

SEQ ID NO: 65002 - protein, 602 aa, Zea Mays
MGFERVELRCPRELDPRPSWTLGDVLAELDALDATRRAAPPTPLKQPPDWANGGGEKAFVMRVDDDDEDDTEDEDDGTSGGKSRALVAKGARFSCNDLASSDSEDELDGQVAPYHLMEKRDLAKSILLELEHEHHLKVQEEVRSKLASLEVCHQNEIRRTISAFARLQKYAESRKEIDRRLDVHFQRRIAEVLDKHLSMVQRDHEQKSQIVERRIRDDAALEEAKRKEQAVKEEKLRQERAQQEAEARQKEAAKLAAEARKTAFEAAKKEAAEKEAAEKEAAKLRDAAASQPSPNSQNNTAGIKVFGDKYALEAESRRHALVQNQVPENIHHSKEFSKYDRQIAKSISKLMPTTDSVRTRASELVKALNGQDCPRPISCCLFANKIISIVKSRNTKDKTFGNLAFACGYVMLLVTNQVPDAMDYLLAEFNRVCIYTVPKHMHALNAQARNRDYYRLIGYQEENGQLESTESYLTYVVAYVKLYAAMIQTEIKGVRHPHGLAEGWKWLAMFLNSLPATTATACALHAFLKMAGFALHKKYGSQFMKILDVISRCFLPALKEQGNKMQAEAVNNLQNYLNDKIYLEEPEGQYLVQQLLSKELFM

SEQ ID NO: 65003 - protein, 169 aa, Zea Mays
MNSKEMCQEPCDELSEISSQEASNSSGLLAGAGRAPERAPAGAHAGPAHAAARRGGPLRLLRRRGVPAAVRLRPVPHRHPGARIDGSAPGAAAAARGRRRAEARAGAAEPHAIPRGRRGGDELRLARELQTSHRRRSCAGGERRPELGWRRRRACPGGARSDAQAVKCV

SEQ ID NO: 65004 - protein, 345 aa, Zea Mays
MVAVAVDGLIRGADAVPAAEREAVRAAAAEAAAKGGEGESGKEEVREYESDMRKLEELLSKLNPSAEEFVPQSRRRVDGGAPRLSADAPVFVSPAIDYYARHHQLPPPPLLQQQQPMHVLQFVGGVGGVGMGGGGGMDSSSDGSANGQPNRRRRNGFIQGRRRMMGARPRRADREDSVRRTVYVSDVDQHVTEQKLAEVFSTCGQVVDCRICGDPNSVLRFAFIEFADDVAAQAALALGGTVLGFYPVKVLPSKTAILPVNPKFLPHTDDEKEMVSRTVYCTNIDKKIAEDEVKQFFEGTCGEVSRLRLLGDYVHSTCIAFVEFVQGYRWSFYVDFFRGNSTFLV

SEQ ID NO: 65005 - protein, 193 aa, Zea Mays
MDTQQSVVAAAIQSRGMVAAAANHPVVAAGDVGSSPRATCGGFVALDVGALSSLAGDAGPPGTPTAPPRTPKVMRSLSRKGDRKPADPDANANANGTAGGGGSERPAACSVHVAAGELGDAPRQRAAGRPHAAGRHARKQVPAVRQAAAPWLDPRRVVLLFPTLSSVGTLILLYFTLSMSRADTSSGGASDAR

SEQ ID NO: 65006 - protein, 865 aa, Zea Mays
MPMPPPPRKDFPAFPFAPYPIQSEFMSFLYAALSSGPGALALLESPTGTGKTLSIICSALQWLLDHREAAVVAATALAHPSGASGSGGDDDEPDWLRDFKPAAAVKESTKKKAKPPAMRKTLVSRKPDGFGEEDGGDDEGEFLLEEYESDSEDVARRGVGKRAHCGSSSSSSSEDDDEMTPKVFFTSRTHSQLSQFVGELKRTEFAGRIRTVCLGSRKNLCINKDVLKMGSGNRINERCLELQKNKKSTKIKLEDDKRKVRPAKRSCGCPMLRSRSLLKEFSSEVSNQGALDIEDLAQIGKKIGTCPYYGSRDMVRSADLVVLPYQSLLLKSARESLGLNLKNSVVIIDEAHNLADSLSNMYNSKITSSQLKAVLSCLDEYLDRFYNVLGAGNRRYIQTLTVLTKSFIRVLINNQDGASTMSSMTINQFLFSLDIDNINIVKLCQFVKESNIIHKVCGYANKLSSIQNQFDLQLHDEGSSIACFQALVDFLRSLLNSNDDGRIIVAKQKLGGQPDEAYLKFVMLCAEKIFSEVTQDAYAVILAGGTLQPIEETRLRLCPSLPPTDIKFFTCNHIVPPESILPIAVTRGPSGKAFDFSYNSRSSPSMIEELGRFICNIITVVPEGVVMFFSSYDYERRVYDAWMTTGTISRISKKKHVFREPRNSADVEAVLNKYKEAIESCSNFSQDTGVNGALLLAVVGGKISEGINFSNGMGRCVIMVGLPYPSPSDVELIETIKHIESISSSFSVGDDKALSRKYDDECELQPGYDILRKCTRGGREYYENLCMKAVNQSIGRAIRHINDYAAMLLVDSRYAQTSSTKSFSCPADKLPQWIKARLSCAQNYGEVHRSLHQFFKFNKKNVEIL

SEQ ID NO: 65007 - protein, 511 aa, Zea Mays
MGVKELDSLMTLIAEKKRQMEQQESETNMQILLVFLHCLRKQKLEELNEIQSDLQYIKEDISAVERHRVELYRTKERYSMKLRMLLDEPTAQKMWPSPMDKASCRFPPNSRTPLGGSCPGTLQNKKLDPKAQRRVQAQFNELQEYYLQRRRTGAQARRQEERETVAMNREGYHAGLQDFQSVLTTFTRYSRLRVIAELRHGDLFHSANIVSSIEFDRDDELFATAGVSKRIKVFEFSTVVNEPSDVHCPVVEMATRSKLSCLSWNKYSKNIIASSDYEGIVTVWDVQTRQSVMEYEEHEKRAWSVDFSRTEPSMLVSGSDDCKVKVWCTKQEASVINIDMKANICSVKYNPGSSFYVAVGSADHHIHYFDLRNPSAPVHVFGGHKKAVSYVKFLSNNELASASTDSTLRLWDVKDNLPVRTFRGHKNEKNFVGLSVNNEYIACGSETNEVFVYHKAISKPAASHRFVSSNLDDADDDPGSYFISAVCWKSDSPTMLAANSQGTIKVHVLAP

SEQ ID NO: 65008 - protein, 146 aa, Zea Mays
MSWERDERNSRISAEISPSPAYITWCRSSPPINEPADLQFVTARGEENPSWPRREGENGSWPIFVAPSTGLLYCALALPLACGRVSEAAPSGILARVFGIARRCQCAAAKPVSTVGKAGHYSTLGEFSLVRSASASTSCSIISLGD

SEQ ID NO: 65009 - protein, 378 aa, Zea Mays
MAGRLPGAAASSPLPRALLLIAALVLFSISFLSLRSLRPAADPALASAADKYRPLLRLQSSSSVYHSPEAFTAGYADMERSFKVYIYPDGDPKTFYQTPRKLTGKYASEGYFFQNIRESRFRTDDPDQAHLFFVPISPHKMRGKGTSYENMTVIVKDYVEGLINKYPYWNRTLGADHFFVTCHDVGVRAFEGLPFMVKNSIRVVCSPSYNVDFIPHKDIALPQVLQPFALPEGGNDIENRTTLGFWAGHRNSKIRVILARVWENDTELAISNNRISRAIGELVYQKQFYRTKFCICPGGSQVNSARISDSIHYGCVPVILSDYYDLPFNDALDWRKFAVILRERDVYQLKNILKSISQEEFVSLHKSLVQLNSALTSY

SEQ ID NO: 65010 - protein, 1018 aa, Zea Mays
MTAEQEWSEVQVRALDGRSTVVKLPLGASVRDLKAALRTSFLPAQVSPSFHLFLKGAKLRLDAEIGSLAIGDGDFIVLVPFTRTPQQHFSVSTASQDQGHCPPKQPEVSSAANSAWQDIMDDLSAMPASPQSDAASKDFYSSCDPCSGRFTEDMKAGQISTSGSSRKRRKTCKENGNGSPQMVSSSEANGTAEKHNISKKSGVAKSAAMLCHDMQPLKPAEMVEHLKQGLGKEGQIVHIQEISSREASFTELPCNLSEAMREALKSIGISRLYSHQSQAITSSISGRHIVVATSTSSGKSLCYNIPVLECLSQDLMACALYIFPMKALAQDQLRTLIKLKNASHIDVDVKIYDGDTPREDRLWIRDNARLLITNPDMLHVSILPYHGQFQRILSNLRYIVIDEAHSYKGAFGCHTALIIRRLKRICSNVYGSCPTFIFCTATSANPCEHVMELANLDEVELIQNDGSPCGSKYFLLWNPSLPMTEGRSKASSVHRRSSSIVEVSYLFSEMVQHGLRCIAFCKSRKLCELVLAYTREILQETAKELVDSICVYRAGYIAEDRRKIEADLFGGKLHGVAATNALELGIDVGHIDATLHLGFPGSIASLWQQAGRSGRRAKQSLAIYVAFEGPLDQYFMKFPHKLFGRSIEHCQVDSHNLKVLEQHLPCAAYEHPLCVQYDECYFGSSLDSVMTTLKDKGYIINNRAGPFSSSMWNYIGPEKSPSQAVSIRAIEQDRYKVIDKLNSRLLEEIEESKAFFQVYEGAVYMHQGANYLVEELDLASRTAFCRKADLKYYTKTRDYTDINVLGGEFAYLPTSICRTNRVKTTAQANDCTVTTKWFGFYRISKSSNTISDSFELNLPPYSFTSQAVWVRIPHSVKMTVEESKLEFRGGSHAASHALLNIVPLHMMCSASDLGTECANPHESRGIPDRILLYDRHPGGIGIASQAQMLFEELLLAALEVVSTCNCTSAVGCPNCIQSLTCSEYNEVLDKEAAILILKGVIDYERSYFEAEDASQRSC

SEQ ID NO: 65011 - protein, 59 aa, Zea Mays
MHMYPPQSMCVGVSFHTNSLQHTWIVADPWACKHALKNSLIKHVNAKMRTTQDIHVWSE

SEQ ID NO: 65012 - protein, 306 aa, Zea Mays
MFNLYLSVAEEAKERFMYAYNSGVLSSQDRAGANRIEENALVWTIEQKSSEFTLFDLSELLEATKSFAEENRLGQGGFGPVYKGQLSDGQEIAVKRLASHSGQGFTEFRNEVELIAKLQHTNLDMDPKISDFGLARICSSNDAEGNTKRVVGTYGYMSPEYASEGIYSVKSDVFSFGVLLLEILSAKRNSGFHQYGDFLNLLGYTWHLWEIGRWLDLVEASISKEMHEAEARRYINIALMCVQENADDRPTMSDVVAALNSESVVLPEPKHPAYFNLRVSKSVESAVVVEACSLNEMTITQDPQGR

SEQ ID NO: 65013 - protein, 200 aa, Zea Mays
MEKHGDPFFLRHLAITEIWGLLALRLANDPVLPFDYQAYTSQLQEHIKTLSALTSNGHAVNLMNGCVNDLSGAAMEVLKEMKKLQQMDLYDEHARMRRRLLNDRLLLAERSFLQPEGLQGRGWFKHLLYSPPEDYESKLSFFPGIADAISRSANLSDKEQEVAMQHEVWKVCRAIQRAASVLRGEFSEQKPTNFSSLVTP

SEQ ID NO: 65014 - protein, 631 aa, Zea Mays
MPRRALRAQSPARETPSSIRPPTSSSSTRKASSPAPSLPLLPVCGNPEPTDCLLSLTECRVRVSLSVCACFHDSGKSLHTCYLPSSDDDRKDYLEIPWAELRSMVEPSFAERSLIYHKDYLSDATIVTSSAVNITEHVVLTVDGHSLPYDYLIIATGHALASPASRAERINEFQRDNGKIESSESVLIIGGGPTGVELAGEIVVDYPGKRVTLIHRGPRLLEFIGDKASKKCLDWLTSKKVDVLLQQSVDLGSLSDTEKVYKTSDGETVTADCHFVCIGKPLSSSWLHDTILKESLDSKGRVMVEKDLRVKGFNNIFAIGDITDIPTPASAAEAKQESVLETEETKQAVAAAAAAAGGVQAMAVTVVRDVETGLDTSTNDRDGDKPSWFTPKSNTGGASGGFYQPFNSNLAGAGASTGIQNFPGVRLRGLPFDCNDIDICKFFVGLDIVDCLLVNKNGRFTGEAFVVFPTAMQTESGLHHNRQNMGRRYVEVFRCKKLEYYRAIANEVSQGGYFESEYRRSSPPLRPPKKPAEDKGSMEYTEVLKLHGLPYSATTEDIIKFFLEYELTEENVHIAISSDGKATSEAFVEFPTAEVAKTAMCKDKMTIGTRYVELFPSTPEEASRARTRGKH

SEQ ID NO: 65015 - protein, 150 aa, Zea Mays
MGSSGGSSEHFLRQLSSSDGGSAPHHLLQREWECGGVTGSGSRRGSRKKTRARGHRRRGGGFCRAEEAAPGRKRVMVVVDQSSGAKHAMLWALTHVANKGDFLTLLHVLPPESGHSSRGAAEDASALANSLGALCKACKPEELNPDLPNN

SEQ ID NO: 65016 - protein, 368 aa, Zea Mays
MTQVTKLFALTGRMESHVGVLDQDSESFLKIDIPFSSVTNIVVSGDRSFYIEGASATLPVSIAKVTLDEKRTMATDFSIVWSSSEDVAQYESYFSLPEFVEFPNVINGQHAYAYFYAPYNNFFQGSSDEKPPLLVRTHGGPTDEARGVLDLSVQYWTSRGWAFVDVNYGGSSGYGREFRERLLAQWGVVDVNDCCSCAAFLVETGRVDGQRLCVTGESAGGFTTLACLAFRQTFKAGSSLYGIADLASLRAGMHKFEAYYIDNLVGNKQAYFERSPINFVENFSCPVILFQGLEDTVVSPDQATKIYKAIKDKGLPVALVEYEGEQHGFRKAENIKFTLEQEMVFLARLVGEFKVPDDITPIKIENFD

SEQ ID NO: 65017 - protein, 610 aa, Zea Mays
MSMDFGAPADDPKAFRNICRDRILKDLLKPDKDKETKSSWKVLIMDKFTVKIMAYACKMAEITDAGISLVEDLFKRREPMPSMDAIYFLQPLKENVIMLLSDMSGRCPLYRKAYIFFSSPIPKDLVTYIKNDSSVIPRIGALREMNLEFFTIDMQGFVTDHDTALIDLYGPSEQNSKKFNDTISTMATRIATTFASLKEFPCVRYRAPKGDASTTTKFDMVPKWLATAVWEIVSKYKSTIPEFPQKETCELLIVDRPIDQIAPVIHEWTYDAMCHDLLEMDGNKYIYEVSKMGSEPEKKESLLEDHDPLWLELRHAHIADASERLYEKMNNFVAKNKAAQLSRDGGEVSTRDLQKIVQALPQYSDQVEKLTLHIEIAGKMNRCIREYGLRDIGQLEQDLVFGDAGAKEVISILRSKQDMSPENKMRLLIIYAIVYPEKFEGDKGEKLMQLAKLPHDDMDIINCLGYLDGSNTKKSSRTGTFSLKFDAQKKKNAARTDKQDGEETWALSRFFPLIEAPDRGILPLRKPWLYALRVSGSAQLQDEAILPVHLPLTNTPRTNKHASRHQRIQALEGTWKRANRALDRMGTEPWCVASHELAVAPCVHLASANS

SEQ ID NO: 65018 - protein, 260 aa, Zea Mays
MSPLKEIVGSIQSQVAKIEDDMKVRAAEYNNVRSQLSAINRKQSGSLAVRDLSNLVKPEDMITSEHLVTLLAIVPKYSQKDWLSSYETLDTFVVPRSSKKLYEDNEYALYTVTLFAKVVDNFKVRAREKGFQIRDFEYSPEAQESRMQEMEKLLRDQEAMRTTLLQWCYASYSEVFSSWMHFCAVRVFVESILRYGLPPSFLSAVLAPSTKSEKKVRSILDELSGDAHSLYWKSEDDVGVAGLGGETEAHPYVSFTINFV

SEQ ID NO: 65019 - protein, 62 aa, Zea Mays
MRNTAEETGLDQPTSVNSMLPVGDIMRLTTRIMTDRTTDRASHKKKHHCLAHNLLPKTVIKS

SEQ ID NO: 65020 - protein, 88 aa, Zea Mays
MSAPANEKAYRRAMKCACLAAAAVLHEVRSLSVYHFMAHYLPPCHGLVWRGAWILAADRNCRVRRVQLGSGDWGTLSICVSETWCIIN

SEQ ID NO: 65021 - protein, 91 aa, Zea Mays
MTKISHSTRIKTLAAKPSLCAAVACSRPATTSTQELAVGEAARGAALSLPCRDLRPRRRHDLRDLQRGAGRAGGVEEVGASLRAAAHRALH

SEQ ID NO: 65022 - protein, 390 aa, Zea Mays
MSSTTTSPPPPAAGDHPRVLLRGFLSRETCKELEFVHRSCGAAGYRPSVISTSLPHLAATGCGHLLLPFVPVRERLRDAVESFFDCHFDLFIEFTGLISWCKGASIGWHSDDNKPYLRQRAFTAVCYLNNHGEDYKGGILQFQDGDPSCIVPVAGVTEGERLTLTLWFTRDRAYDEDPKLLNFLSQTSLSCEPTEQNSYIPVPASDNMYRFSCDQSGFDIRCARVHILGFSFHSSSGECNISASPAEDDPIELLGKQLRLGRGDDVFEKIFSNSLHALQVVQFYYWKKHELAARREQSVVSSGTVCCPVTHHSKGTELPLPCNHALAQTIFGSYNTEEIVQWNDFALAVAMWEKYSEELKKQLLTFLPYWLSNETIYVVDTSELQRAEPI

SEQ ID NO: 65023 - protein, 1240 aa, Zea Mays
MLAPLPRLTSALRGHYDADQAYLLRKSALQALTLPRPHDEWKFARKIVPGWDDASSEVRQAYKQFIGAVVELLSGEAVSEELYQVAQTVYTLFGGDDTEYVGAKKVLSKRNELESLVGYTVQDSVLKKLAQLAQKLDSLQRASAYESVHRIADDVNENDRIEFGADFDFKPLARFIVDVSLDAPLESAELGSGPFEKWQYDAWSTSTTSHSTAVRGSVSLRWLKDQCALITKSGGSMLSGDELAMTLCRVLLSNKAGDQIAGELLDLVGDTAFEIVQDLLLHRKELVDAIQHGLSILKSEKMTSGNQPKMPTYGTQVTVQTESERQLDKIRRKEERRSKRSADSGNNDIGVDDFSSLLLASERKEAFDDVIGSGEGSDSFTVTSLPQGTTRKHMKGYEEVKIPPTPTASLKPNEKLIDLAAKAGELELFSSADHPQFPLIKKDVSKAKSREVVEFFESGFGIHNAGMMRSDRSLMERLFGDGLLKVLVCTATLAWGVNLPAHTVVIKGTQLYDPKAGGWRDLGMLDVMQIFGRAGRPQFDKSGEGIIITTHDKLAYYLRLLTSQLPIESQFLGSLKDNLNAEVALGTVTNVREACTWLGYTYLFIRMKTNPLVYGITWEEVMGDPSMGAKQRTFIIDAARALDKAKMMRFDEKSGNFYCTELGRIASHFYLQYSSVETYNEMLRRHMSESELITMVAHSSEFENIVVREEEQDELEALARKACPLEIKGGPTDKHGKISILIQVYISRAPIDSSSLHSDAQYISQSLARIMRALFEICLRRGWSEMSSLLLQYCKAVDRKIWPHLHPLRQFDKDLSPQVLWKLEERNVDLDHLYEMEENEIGALIRFSHQGKLVKQYVGYFPYVNLSATVSPITRTVLKVDLHITPEFVWKDRYHGMSERWWIIVEDSENDTIYHSELFTLTKKMARGTPTKISFNVPIFEPHPPQYYIHAISDSWLHAETLFTVSFHNLTLPQTQITHTELLDLKPLPLSALGNKTYEDLYRFSHFNPIQTQAFHVLYHTDNNVLLGAPTGSGKTISAELAMLHLFSTQPDMKVVYIAPLKAIVRERMNDWRKRLVIQLGKKMVEMTGDFTPDLMALLSADIIISTPEKWDGISRNWHSRSYVMKVGLMILDEIHLLGADRGPILEVIVSRMRYISSQTERSIRFVGLSTALANARDLADWLGVTDDGLFNFKPSVRPVPLEVHIQGYPGKFYCPRMNSMNKPAYAAICTHSPNKPVLI

SEQ ID NO: 65024 - protein, 540 aa, Zea Mays
MDPAAAALGAVPAAGAPPPGAAAGDQQAAPRVERLSAGVQQQLNLEGMRARAVGLYKAISRILEDFDVIIRTNPSASPKWQDVLGQFSMVSMELFNIVEDIKNVSKVFVVYPRNVNAENATILPVMLSSKLLPEMEVEETTKREQLLSGITNLPVPTQIEKLKVRIDMIGSACETAEKVIAECRKSYGLGSRQGTNLGPTLDKAQAAKIQEQEGLLRAAVNYGLRVPGDQRHPQSLPIHLIEVLPLGDGAQNFGDSSGSYPKNMSTFAPNSVNSQGNQIQASGGQLLGRPAPSPGTTGTPNFENVSTPPMPYANSPRSGTNMMNTPSPQQHLTPQQQRQKLMQHSQPLHQPVRPSAAGMLAQSALPQLQDLQGQAQQKLQVPGQQQMQYNQALSQQFHNRQMQPGRMQPGMAQSQLNQGTQLRSHLGQFTGAANNAMFNAAQASSNSQMMANMHGSQSLMPQMQYGMAGGHPHRSHPQMLTDQMFGMGATNSSMMGMQQQQQGLYGNMQAGAQNVPQGMAGLQNQTQNPNFTQQRQQNQQ

SEQ ID NO: 65025 - protein, 149 aa, Zea Mays
MLVLGHLQQFAWCQLAVVVVCCSWSSLNAAPSGKAFLVRALSPSIAGCHPLSPPHCRTVVFLVQCSRSLSQTVLPSPNCLPLPPARACHASQPRHGHRHRYCACRWLKLVSPSPSLDLCPRQLAPDSISSSFHTSSRNPKRQVKTKLAA

SEQ ID NO: 65026 - protein, 63 aa, Zea Mays
MPMFQFPSWFCASYITVESFCSSRLPKLLSSGVQYASKEIYEKHVISYTVLSVIYGLTLEKIR

SEQ ID NO: 65027 - protein, 79 aa, Zea Mays
MMSARGTHKVPCVQFAFSDGTVLSESVEQAPDMRFYPNRTRCNLLGKTYRKRFTNKWLQEIHSTGDGCGCRILSRLTCG

SEQ ID NO: 65028 - protein, 423 aa, Zea Mays
MVQDGCFVEWRDMVADAARKGFAGGVSLEWNSYKILSEQMRHDWLENLQKRRSMPRPRGNRRAPKTPEQRRKIAEAIAAKWLDQEYRERVCSGIASYHGSSSATKTPRKPRPAGEPGVKKQTTRKKPMQAKPVILEDAHGKSAALKRKKSATPYKDPMAVEKLEMISKIRAQRTAQEIEKKEAIRRARTLIAEAEKAADALETAAAMNPFAQASLIEARKLVTEARISLECVDDEEPQETASNDVSGSSVLLNLHDHRHGLEMQNGSNLLKQENKPANGMEFPPSSVNGLAFHLDVSELSGTKQLYQRIENSMERAFLLPSASSKLKSANGDYGIIDLHVRQSMVDDTAKHKGITAETCPPGTLELEEDPPSPRSAEKAGTREDYPGGKPEEDAPSSEEKARMRWVRGRLVKVKTNGPGDLEI

SEQ ID NO: 65029 - protein, 193 aa, Zea Mays
MKILAIDAKNYHAWSHRQWVLQALGGWETELEYCDHLLKEDVFNNSAWNQRYFVITRSPFLGGLAAMRDSEVDYTIEAILANAQNESPWRYLKGLYKGENNLLVEDERISAVCFKVLKNDWTCVFALSLLLDLLCTGLQPSDELRSTLETIRSSHPETADDDPAAAVCCILQKCDPLRVNYWSWFKDTLSQIS

SEQ ID NO: 65030 - protein, 423 aa, Zea Mays
MERYSDMRPKAEVSYLGRGSRFSSRNQSSEERTNHSSDKPGSSTRFNPTKARIGGNQGRPRYVCDSFKSPSSKVSPAGSSKFPLSKFEERRRQPFVPGFDIAESSRRKADAKQLQGSKKIAAENDSSDNLRGESEGFTTEQVVKPEGSHVVGHSGVSAYTVGSLVQTASLGSRTHRQKHKEVNLGTPGASSSTLTNRSTIPGNSTMGVRPAYGHVNGGQIHGLKNLGCSSVPDAQPSGCPSESVISRRRFEFMRKRAFDQESSSRSVNLSLGHSTPTDIRRIRMNEQSLCQQIPRSSSRSHQESAGSVRTRRPSPHATRMSVPDGRADGVLSLHESSTKDVQPAQEHLSLEEVSTESSIRPFFVEFDNNIFSSSHLRRSSTRAERGRPSSLFEESPRQMFHSLMGERDRHRHITMEGITEVAF

SEQ ID NO: 65031 - protein, 63 aa, Zea Mays
MAPWWLSLSVVPLLCARLACAMSNSCLLSSPDVVAGPPHAREDHRRIIIVGLALPSHHRSPSR

SEQ ID NO: 65032 - protein, 120 aa, Zea Mays
MSLQGEEAVHFSVVDAKDCKQSAFEVGDKTYVICRSDDDLKTSAVKIHDKLTQTWLSPTILGEQPLLTKSQSVIPVSDEKILVIEKGVPLNESIWFLETPPLLSNNGKSRKQKLFLGARE

SEQ ID NO: 65033 - protein, 77 aa, Zea Mays
MMASVPSRVALSAASRLPNLHAVAVDKVDGASRMRAVHGVSVEVELWGIPRSMRADKYSSAFAMVLRLLPPHISSWS

SEQ ID NO: 65034 - protein, 647 aa, Zea Mays
MQEVSDPPETVRKAETKNITSIGKDVIFEQDPCSSYQLWGSMKFEEDGHLLSQAKRDLSHLDYRAQSADTKYVTELGSHACLKDPLPMGRDYHRQKLQFSTSDCSFEKASALEAASSSPDALGTMRTKIKSSTLSASPDYLSSYPTAAPCMRKCPGAVELDHGLGHSEHSNRRSDQFTLFSSRNGRSVEKCKEMVQYARGFHHADEINHVPFQWCFEDEGPSVSRGLQYGDEIPSLSRKKYNVAPSRSSQWHYGPQTALSSRRPDYGDEIPSLSLHYGYRDRTHLRSGNWCHDAEARIPSRYQQGTSHGNGHSRNCFSRINTNEQAKVITSKHTFAKPRMINRNCSDQHRINMKGNRWRNSEDLMDQVRGPRANKLNNASVSSTVKDITSPLIRRNQYNRSDFSVQYNQAKFFMIKSYSEDDIHKGIKYNVWASTPNGNNKLDAAYHEAQNLMDSGERCPVFLFFSVNTSGQFVGLAEMLGPVDFKKTMDFWEEDKWSGFFPIKWHIIKDIPNRLFKHIILENNDNRIVTFSRDTQEIGLPQGVQMLKIFKEQPQGTSILDDFDFYEEKANARRTQKRGNSESTYGARFSDDSKSIVCTFLFRAVMKHVFKNIIKHSFCYLIFIIELDAPLRKMCLPPLFTSLCRIA

SEQ ID NO: 65035 - protein, 62 aa, Zea Mays
MRAQRSVVPRRAEFSSARSRVPLLGYGHRHAQDLCILLCSSSAKKTLDTRTPPRPSLLFRPS

SEQ ID NO: 65036 - protein, 350 aa, Zea Mays
MWRLSSAAALLRRSLAATARLSVPCGSDNTDDDRVIQAFKRCCSTSASSGVSDASPCAAYVENLCRSGNLVDAVRVLRHLHDEQIHVGLHTFNMLLQHTAEANIFTLFAKVFRYLLLSELTPDSTSYMNVALALQKLDDCEMILKFVREILEITHSRDATVMNRIIFATAKYGHIDKSLVIFEELKKYETSLDVVTFNTVLDMLGKAGRVDQMLGEVKLMEKLRHFPDIVTYNTLINCMRRLGRLDLCKRFALEMVERGITPDLRTYTALIDSFGRSGHITEALEMFHEMKKSHQPSVYVYRALTSNLKKAGHFELAQKLTEDMNSSASELIGPEDFKPNNKGIRFRKNG

SEQ ID NO: 65037 - protein, 192 aa, Zea Mays
MLLSCAQELKHGVALWQEFYHANVCDRVVSEGGHYFIALGEIYRVAQILYLSLQRFKPWVLADPGMLSKMLSCLDSCTYAWTSGLETALKMVIDSSHIDSSLAKALMESIKNITKLEVPNLQKNIPNNEMQCRLTLLPSSLLPGLNLVIWNGGHYFVKVANLWANRISPDPPLLPSNPTSSMNNAATHSQSC

SEQ ID NO: 65038 - protein, 999 aa, Zea Mays
MDLSRFASGVGPSRVAPRAGLQIGAAENGFRACSLRRARHRGGGNGNLTAAASTLRGRGGLFYLAPTRRSHPSLRLFYLLPTRGSHLSLRARWRPRCQGNDSLAYVDGPLETAKGSGEVDDNVPTSSGSDDDRGLADVDGLREMLQRSRNELEVARVNSTMFEEKAQRISESAIAFKDRADGAQRDVCAAVATVQEIISKEADAKEAVQKATMALSMAEARLQLAAEALEANRGSVGPTEVSIEGMEQEALLSAQEEIKDCRAALSRCAEELSRVQDKKMELQKEVDRLTDLAGKAQMDASNAEEDVANIMVLAEQAVALEMEASQRVNDAEMVLLKAEKAIASIDTVVELPSPAEEQRSTEEDSVSEGYEYSSDVTDDVYVRDEVSSIERLMVGDLTVQGFEQLEPSREIYDEESSNKMSVEPQKEAESDSDKSKQGKKQEMERKEHTKEPLSAPKALVKRSSRFFSASFFSSKVDGEFTPTSVFRGLMKSVQKQAPKLVVGILLLGAGAFFLNRAEKSQLFQQQGIATSIGKVTSTTKPIVLEIRRIPQRVKKLIELLPHQEVNEEEASLFDILYLLLASVIFVPLFQKIPGGSPVLGYLAAGVLIGPYGLSIIRNVHETKAIAEFGVVFLLFNIGLELSVERLSSMKKYVFGLGSAQVLATTAAVGVIAHCFAALPGPAAIVVGSGLALSSTAVVLQVLQERGESTSRHGRATFSVLLFQDLAVVVLLILIPLISPNSSKGGVGFQAIAEAMGMAAVKAVAAITAIIAGGRLLLRPIYKQIAENQNAEIFSANTLLVIFGTSLLTARAGLSMALGAFLAGLLLAETEFSLQVESDIAPYRGLLLGLFFMTVGMSIDPKLLLSNFPAISVILSLLIIGKTLLVTFVGRVFGVSAIAAIRVGLLLAPGGEFAFVAFGEAVNQGLLSPQLTSLLFLVVGISMALTPWLAAGGQFLASKFEQHDVRSLLPVESETDDLQDHIIILGFGRVGSLHNSCQSG

SEQ ID NO: 65039 - protein, 380 aa, Zea Mays
MESRALLHARPAALPARAGLRLPPQLPRPRAVSFSPAAKPALRSPLLASRGPFLPRHDALLGNGFLKQRAVSVGGDVSFRAQAAAAAVPAPQPEESAKKFLGIDVKTLRKIVPLGLMFFCILFNYTILRDTKDVLVVTAKGSSAEIIPFLKTWVNLPMAIGFMLLYTKLSNVLSREALFYTVIFPFIAFFGAFAFVLYPLRNVIHPTALADKLLAALGPSFLGPVAILRIWSFCLFYVMAELWGSVVISVLFWGFANQVKGKAAIDVVCNPLGKSGGALIQQFMILTFGSLANSTPYLGGILLVIVLAWLGAASSLDKQFSSLAKEDLKKDKAAREKVEPSLLKAPAEGSDDVLAEQTNGSVTPQATGTESSPSNSSPIQ

SEQ ID NO: 65040 - protein, 104 aa, Zea Mays
MHEEIRQERMVRQQQAPMPPPPPPVPPRDNHREFMSHKPPTFASSPDPLRADDWLKSVEKILNITQCSDREKVFYASGHLNGPDADWWDSYIAAHDAANNITWA

SEQ ID NO: 65041 - protein, 145 aa, Zea Mays
MIPPATPSPCSRSTVRAPLHAPISSPAVQHALLPSRSLPSLDARAAPAPCHPLPCYPRAGAPLLCLSSSPSLHECSGAPSLSCRHVHHRVPVQHRPQLIPFSQFAPGRLDPEAHCPEGQLDQSGVESMPRRVVPPTSSHGRVPGC

SEQ ID NO: 65042 - protein, 358 aa, Zea Mays
MSLAGSALEAALLAVGRGLDAAGDHRLLYCKGDGRLVALEDRARDLPLPDGGVLPSVPHDVEVEQCRRDLERIRPFPSGSGPSSAAADGPFVCSFDKMAEYFNRKSCLSETVPLGSFNSLFSFTGSWKNDAATTKALAIDGYSLPLFRVKIRNSELTLLESVKRRIPNVWDPSALASFIENYGTHIIISVTVGGKDEVYIKQHSLSQLSELEFKNYAREIGRERFADVENKSNASSINYSEKDMTVIFRRRGGCDLVQSFSDWRGTVASAPDVIGITFLSIVSLVDDIPGKKHLARAVELYLTYLCWPSTSCWPQTDFGRSQTESSGYSFAAPWLITKNIPTSLGLLYYYWTSKMARS

SEQ ID NO: 65043 - protein, 323 aa, Zea Mays
MVHCGFMKNSGADMDIIDVKYIQKCKFVVASGIFDGYDIPHQPSNISRRSQKLFCFLMVVDEVSLDFIQKNTTVKIDSAGGKWVGIWRLLTVHRLPFDEPRRNGKIPKILTHRLFPQAWYSIWIDGKMELIVDPLLILERYLWRGKYTFAVAVHKHHRSIYEEGDAIKRRKRYARPLVDLQMKMYYYEGMEPWSPKKKMPGDVPEGAVLIREHTATTNLFSCLWFNEVNLFTPRDQISFGYVARRLGDALELFMFPNCEYNSLFVLHRHTREHSSKVEWAKTVDEIVEKGLRESRGGLGLWTPYPADLSSVELPAVRRTSPAG

SEQ ID NO: 65044 - protein, 312 aa, Zea Mays
MLLAILLILLQTGTTDLQILLTTEFSERRQILLWIAFFASFAVKVPMVPVHIWLPEAHVEAPTAGSVILAGILLKLGTYGFLRFSIPMFPEATLCFTPFIYTLSAIAIIYTSLTTLRQIDLKKIIAYSSVAHMNLVTIGMFSPNIPGIGGSILLMLSHGLVSSALFLCVGVLYDRHKTRLVRYYGGLVSTMPNFSTIFFFFTLANMSLPGTSSFIGEFLILVGAFQRNSLVATLAALGMILGAAYSLWLYNRVVSGNLKPDFLYKFSDLNGREVSIFLPFLVGVVRMGVHPKVFPDCMHTSVSNLVQHGKFH

SEQ ID NO: 65045 - protein, 194 aa, Zea Mays
MSSAGAVEMRWVDTYFPFTNPSFELEIYFQDDWLEVLGCGVTEQEILKRNGRRDHVAWAFGLGLERLAMVLFDIPDIRLFWSNDKRFTSQFSEGKLGVKFKPFSKFPPCYKDMSFWINGAFTENNLCEVVRGIAGDLVEEVKLIDNFTNKKGMTSHCYRIAYRSMERSLTDEEINNLQLNVREAVKDKLKVELR

SEQ ID NO: 65046 - protein, 655 aa, Zea Mays
MPSTPRWAVANGAGVILSVCDEEVARYETANLTAAAVPALLLPPPTTPLDEHLVAGLPPLEPYARLFHRYYAIATPSATQRLLFGLLEAPPSWAPDALDAAVQLVELLRAAEDYASGMRNWMHLHFLRAIGTAMSMRAGIAADTAAALLFRILSQPTLLFPPLRHAEGVDVHHEPLGGYVSSYKKQLEVPASEATIDATAQGIASLLCAHGPDVEWRICTIWEAAYGLLPLSSSAVDLPEIVVAAPLQPPTLSWNLYLPLLKVFEYLPRGSPSEACLMRIFVATVEAILRRAFPSETPEQSRKPRSQSKNLAVAELHTMIHSLFVESCASMDLASRLLFVVLTVCVSHQALPGGSKRPTGSDNHSLEEATEHSRLTNGRSRCKKRQGPVATFDSYVLAAVCALSCELQLFPCISKNGSHSNLKDSMKIIIPGKNNGINNELHSSISSAIIHTRRILAILEALFSLKPSSVGTSWSYSSNEIVAAAMVAAHVSELFRRSRPCLNSLSALMRCKRDAEISTRASSLYHLIDLHGKTVSSIVNKAEPLEAHLTLTPVKKVNQHRCEENNTNSSDSAKLENKNGSTHKKNGFSKPHLKCAEEVLNGNVASTSGKSIASLQVEASDLANFLTMDRNGGYRDVCRKHISSPRMEEGCGCTL

SEQ ID NO: 65047 - protein, 689 aa, Zea Mays
MEEALVLQAVSPLLRRYHSENSAQSELKVKIFTGNITEKHRMALESVALSVGFPRGAAEHVAAEDKDILLRTADLVIYYSCLEEQLFPSVLVEAMSLEKLVIAPDLGIIRKHIDDGVNGLLFPRKNVGMLAQVLLQAVSNGKVSISGQKIASAGKAHAKNLMASETIEGYAVLLENVVKFPTDALHPLTVDEIPLALKKEWKWHLFEDVKHLHHMNTSLSSYKILKKLEQEWHRNQMENSSLSTTKISDTFSAIAWEEQRANEVMDIKRKMEEDELKDRNDQPHGTWEEVYRNVKRVDRLKNELHERDDKELERTGQPLCIYEPFFGEGTWPFLHQSSLYRGVGLSSKGRRPGADDIDASSRLPLLNNVYYRDILGEFGAFFALANRIDRIHKNSWIGFQSWRGTARKANLSNNAEFAILEAVQSQKHGDSFYFWVRMDQDPRNHTYKDFWSFCDAINAGNCRLAVLEAFQRMYGVHLDHDLDSLLHMPNDGDTWSVMQSWVLPTRSFLEFVMFSRMFVDALDAQMYDKHHQTGHCILSLHKDRHCYSRVLELIVNVWAFHSARRMVYVNPQTGAMQEQHHLSGRRGQMSVQFFSYTTLKSMDEELAEEFDLDHPDRRWLWPQTGEVFWQGLYQRERIMRQQEKERRKQQSREKIQRIKNRARQKTLGKYIKPPPDDTGGSNDTTSVDL

SEQ ID NO: 65048 - protein, 205 aa, Zea Mays
MIRGKTYLTDYHKVVGGDPLLELLAVDWFKVNERFDSVALHPKSLVQSEAAKKLPFILVINLQVPAKPNYNLVMYYAAERPVNKDSLLGRFIDGTDAYRDARFKLIPSIVEGYWMVKRAVGTKACLLGKAVTCNYLRQDNFLEIDVDIGSSSVARSIIGLVLGYVTSIVVDLAILIEAKEEKELPEYILGTVRLNRVNPDSAVSI

SEQ ID NO: 65049 - protein, 262 aa, Zea Mays
MSHYTWHNVTESSRVTTKHTFATLSFIAEIFLFLYVGMDALDIEKWKLASSSPKKPIALSAIILGLVMVGRAAFVFPLSFLSNLSKKEARPKISFKQQVIIWWAGLMRGAVSIALAYNKFTASGHTEVRVNAIMITSTVIVVLFSTMVFGLLTKPLLSLLIPPRTGLNTSSLLSSQSMLDPLLTSMMGSDFDVGQINSPQYNLQFILTAPARSVHRLWRKFDDRFMRPVFGGRGFVPFVPGSPVERSVPESHLGTVTEAERS

SEQ ID NO: 65050 - protein, 1738 aa, Zea Mays
MGAPRELELSDEVEGEEDGTTDFVFRLAGDPIPLLPTDSNPLPLFDLLSPPARPLAVSDRHATVFLAHPSGFIAVRTKELIEASKEAREKGKSSTRCAQDCCVADVPLPGVSLIALSHDESVLAACTHTEIQFFSLASLLTHKDVVPSSSCSLERAVTVKDFKWLNHASAAYIVLSNGGLLCHGNLGEGLKDVMENVDAVDCCKEGNHIAVARGNKLTILSPDFTETCSMSLLFQLWSDGSDSKGTTIKVDSIGWVHGDSIVIGCVRLNEDDNEEGYLVQVIRTEESTFCESPGKTDVYTYNDFFHGIMDDVLPPGAGPNLLLGYLHRWGLMVASNKKSVDEHIALLKWPSAHDDEKTVTYLEMLEDKYSPRIDLQENGDDNVILGFGVENVSLFQKITVPVGPEQKEVAPQHILLCLTGEGKVAVYYLARISDPSDLPHATVSTNEDYGEKHISPATVSEKELTPSVAGSVYKSTLTEHGAEPSSAQTGSNQQESINVKNSSSASKEQETTDNSLFISSNKKPLDTKQVNVTGPPAALRSLALTGNTKPTIFSSFSTEGMNPTGGNAPNELASSLQPSSRSFGNNQTGKEGLDSVQSVGIFGGSQNSNKDGNVYGFKSSLFTSSGSVPAKIGERNEVGFGVPSLQTSYTADRKVFGAPVALSSVPSSSISPAKPSPIGYSSSGFRTANSEAPQSLRGSPPSQQSMGKSHNSRTQAPAEYSRNSKKGTGFDSEQDLSKKFYSINEMTKELDALLAYIEKDGGFRDACITIQQRPLSMFEDGLQNFLQLLQVFKGKVEEQCSKIEDLRNNMFQVSARQTYMKGIVSQSSDNQYWDIWNRQKLSPEFEVKRQNILRANQDLTNQLVELERHFNNLEMNRSSETGRVASNRRAVYSNKTSSSQTQLSSVYSALNSQLAAAEQLSECLSKQISVLNIGSPSRKQGMVTKKLFESIGLAHTTDATKFSGSTPKPVKRFPSVNEHSKGILGSSKGGEPETARRRRESLDMSLASLEPQKTTVKRITQQQRLKISSDLPFRSNKKIFDSQMAAISQEKSSDSSNSSIVESYVSRLRSLSEDVNDKLSGPQQNPLFKWVKESTGSSQTSEQKHFELPGQMKSTAQSSKLTPSSPPSFSYTRMGAQDSINPSSVPSFGTKHTVSKPNTLTFKTTISPKSNANTEPNILPSITAPKTSLSPLSVKTAGESGDLPTLTMKNRQDGQSMPSLGNIKGPGASLQNKGGIFRDLDKSSFNSEHSKPAALHEKTDQLSGVGDAVQNTVKDTSKMAPQPSAFLPAPVTQTNSYSLRPTVSSSATSGAKTSDVLSSSMQKVSPIVPGGTVSSSVPTPAKDSSTGLSQNASKPETLISKVTSTIVSASSTSVISVTESKPSVPPTTGASLPSTHVSAPQTAPTTSESVFTSTGKNVGPNTDTISTDEDDMEEEAPSASAELNLGALGGFGLGSQPSSSPQKSNPFGASFGTSGNKSSGTPFTLTTSPGQLFRPASLSIPSAQPAQPSQSTSSSSFSNSFSSGLTGFGQPAQIGSGQQSAFGKPAQIGAGQHAGFGQTAQIQSGFGQPAQIQSGFGQSAQIGTGQQSGFGKPAQIGAVQSGFGQPAQFAAQQTLGSVLGSFGQPPQLGGIGSGGFGGFSSASTSAGFSSLSSGNAGFAGAASGGGFSAPTASAGGGFAAAATGGGFAALASKSGGFVGAASSGGGFGGASQGGGFGSDSSPLPSRCKAKAMCLENPK

SEQ ID NO: 65051 - protein, 121 aa, Zea Mays
MDHRYSPMRVDWTNMWMVISYQENTIYLQGIRVQAVLDSYPSIFIDPVGLLPTRPCDHSISLIPGAQLFHIRPYRYPPTLKDEIETQVKEMLSQGVIRKSSSPFASPILLSKRKTTHGDSV

SEQ ID NO: 65052 - protein, 611 aa, Zea Mays
MEEVRIHSKISHKNVVKLIGYCIGKSTLMIVMEYMSTGNLNDILHCTEISIPLDVRLGIAIGCAEALSYMHSMHLSSGNLICHGDVKPANILLNDNLTAKITDFGVSRLLVGGITQYTTSVKGSIDYMDPIYIQEGRLTPRSDVYSFGLVLCELISRKRIRKGDINLILYVNKGSASGKGFREMSDAAIANEDNMKILKEMKKLATECVSLSIYRRPQMTDVVRRLRMLRKELKERHEYYSESILASHHSWRKNNKQEIIMPTYNSKMQIKKSLGFFKRSLSNSKIQSEPSDVRIFTQEELKEVTNNYSYLISGGTSGKVYRGTLEDNTVVAVRIFSEVLEGFEEAFVNGGMILSQISHRNIIKLVGYCLDADCPAFLYEYAAKGSLSDVLDGHEDFPLDLRAKIVVKIAEALEYLHSPATGIIRHGYVVPSKILVDNNFMPKLTGFSWARRLIQESNTTASDDVISSHQHPSSGFNNDPIHDHYVSLKLKTDVYQFGVLLLTLISRKSFVFYADHDGLVSQFLTACQEDGSGRAFFDDDVAVHGGDVVLLEEMGRLSLKCVCEEIEQRPTMREVAEHLRMITRSWKDFSGSYAGAEGNTPERPPSSDIGD

SEQ ID NO: 65053 - protein, 62 aa, Zea Mays
MGHGGQAAIPNTGEQFTCVPRSFQADFLANTSPSSRRRDQSRTQARAAMELQIPQRRWRRRF

SEQ ID NO: 65054 - protein, 401 aa, Zea Mays
MTNGTMSRQVQKAKNHHQLALAISLSVTCSTILVLLFVYWLSYCRWRLPFASADQDLEFELGHVKHFAFHDLQSATDNFNSKNILGQGGFGIVYKGCLRNGTLVAVKRLKDPDVTGEVQFQTEVELIGLAVHRNLLRLYGFCMTSKERLLVYPYMPNGSVADRLRDYRNGKPSLDWSKRMRIALGAARGLLYLHEQCNPKIIHRDVKAANILLDGNFEAIVGDFGLAKLLDRQESHVTTAVRGTIGHIAPEYLSTGQSSEKTDVYGFGILLLELITGPKTLSNGHGQSQKGMILDWVRELKEDKRPDKLVDRDLRDSFDILELECSVDVIIQCTQTNPMLRPKMSEILHALEANVTLAETSVELNREPLPYGVPRSFSVRHEDPHDSSSFIIEPIELSGPR

SEQ ID NO: 65055 - protein, 52 aa, Zea Mays
MPIKQSRSATLAGKRICKSTPPAERRICMSVVNREIAITVANPALWSPKSTR

SEQ ID NO: 65056 - protein, 314 aa, Zea Mays
MAMRAAARQAILSPPLGPRSPRPFLCGCSLSIAPRLEPCRAASSTTAPAAGKHLPPLFSVAPMMDWTDNHYRTLARLISRHAWLYTEMVVAETIVHQKDNLDRFLAFPEEQHPIVLQIGGSNLENLAKATELANDYSYDEINLNCGCPSGKVAGHGCFGARLMFDPEFVGDAMSTIAANCDVPVSVKCRIGVDDRDSYEELCEFVDKVISKSPTRHFIIHARKALLSGLSPAENRKIPPLKYEYYFALLRDFPEIKFTLNGGITNVSQVSASMRQGAHGVMVGRAAYNNPWNMLGHVDGEIYGKQTRYISRRQV

SEQ ID NO: 65057 - protein, 682 aa, Zea Mays
MARKHGWQLPAHTLQIVAITVFFLLVVAFYAFFVPFLGKQVVEYIAIGVYTPVALAVFILYIRCTSINPADPGIMSKFEDGLINIPTNGSGIEGMNLPQKVNNATGTNSPMSTCRSSLDGHSNQRGSSIGEANMNLGSQLPKKRSSCWLLGGLLCATFVKEDCRKTDDSEQQANGEEALFCTLCNAEVRKFSKHCRSCDKCVDGFDHHCRWLNNCVGRKNYFTFLALMAISLIWLAIEFGVGIAVIVLCFVDKNASRNIQDKLGNGLTRAPFAVIVGITTYDYVVAMRAMSEAAPEDEEGENIIYSPSNSATTGFSVGSSLGIHHKGAWCTPPRIFIDQDEVIPHLEPGMVPSTVDPDGAGYPERANRAKKAVKISARSLAKLDKNEVMKAAAKARASSSVLRPIDARHGHEADVISSGSASVRSSMSVDYSGTKESNSEMKLSPLHNSYPQSLASQDEYDTGTPTASSLSSLVNIHKLASHSQFSAAPRPAPPERPVPAMVRPPVPTTQITNPGIPRPAVPTTQTTNPMFQSATSYVRENRRASVVWDQEAGRYVSVPAQTRTGTGADLPARNPRFLANPSGEPSSHVRGVAPGNTSSSAMPSGQPSERLTYSGQSIFFGGPMLNTPSLGAQRNEAGARARPEGSRDPNAQQRDIRGEKARTGSLPVFAPGTVQRNPPFDK

SEQ ID NO: 65058 - protein, 325 aa, Zea Mays
MVTCHRVHLFDVVNQYRAIFNNDKSGNDENSEGGLLFSWAMQQVSNHLATLQVMLPSITEGGSLSNILEQCMYCAMGLGLVGLDFRGLLPPIFEDAVLNLFSKNMSMAVENFQVVLDSHRWVPMPSVGFVANGVVDDTSDDVTPPSVLMEHPPLAVFVNGVSAAMNELRPCTPLSLKVILAQEVVKGLHAVSDSLVRYKAMRMLRGNESALFLSLCQAFIEVVHPYCAACFGRCYPNGATLISECQGTLDAVRQLLTIPARSNSSSIERKQSGAIERKQSVESPGTAVTNNELSADGPGLEINDAATTTTPPVEDDVSTHPPASK

SEQ ID NO: 65059 - protein, 302 aa, Zea Mays
MALPSRARLLLLLCFVAAAALLVAPGEVSATAAAADAGGHGKRRGHSTHTRRLRPGKGAAAAKPYPANAARVEAIERQFARWVRSMGGHGHNSSSTAYSRALSRASLPARTLVVDKNPGAGNFTSIQAAVDSLPLINLARVVIRVNAGTYTEKVSISPMRAFVTVEGAGADKTVVQWGDTADTAGAWGRPMGTFGSATFAVNSMFFVAKNITFKNTAPVPRPGALGKQGVALRISADSAAFVGCNFLGAQDTLYDHLGRHYYRDCYIEGSVDFIFGNALSLYEVSSTHATQMHETKLSLRHL

SEQ ID NO: 65060 - protein, 136 aa, Zea Mays
MPSRSMSRLSVESASGSGGGGCREAEPVLCAPRPRRAQQQLVHVHPRGADLILGPPPFLLNERGGSVQLGGVRRRVAAGARGQPAGARPQLPAEPAPPRGGPAAGARLLRPPDPHQQLRSPADADDVVYQHQQQRQ

SEQ ID NO: 65061 - protein, 97 aa, Zea Mays
MSLSLSGEEDEDQRADTEAAGARAQHGKANQHCRHAGSGCGLHQGSSEAGQGAERRPRQLHLLRRRQAAGPVHQLEGAAAGARVAVRGHAWPAARPA

SEQ ID NO: 65062 - protein, 725 aa, Zea Mays
MFRKYFRWALTHPSTDLEDEKLKRHMKPDFLDMVPWYSGTSADLFKTAFDLMVSVTLFVGRFDMRMMQAAMKGPTGNTPNDDLLYDHFNEREDLWFDFVADTGDGGNSSYTVARLLAQPSIRTVIGGSMHTLPRGNLLIIGGDLAYPNPSSFTYERRFFRPFEYALQPPPWYRDEHIALDKPELPPGVSKMTEYDGPQCFIIPGNHDWFDGLHTFMRYICHKSWLGGWFLPQKKSYFALHLPKGWWIFGLDLSLHGDVDVYQFKFFADVCQNKVGENDSVIVVTHEPNWLLDWYWNETTGKNVSHLIQEYLKGRCKLRMAGDLHHFMRHSATRSEKNNFVQHLLVNGCGGAFLHPTHVFRNFERFSGTTYECKAAYPSYDESTGIALGNILKFRKKNWQFDIIGGFIYFILVFSMFPQCNLVRILNEETWSGRLKSFSGTIWSALLYIFEHSYVSSVGSLTLLTASYSFVPSKLSRRRRAIIGGLHVLAHLTAALLLMLLLELGIEICIRNHLLATSGYHTLYEWYRSMESEHFPDPTGLRARLEQWTLGLYPACIKYLMAAFDVPEVMAVTRINICKNGMMSLSRSVLIMYYTSVFIYFWIFSTPVVSLIFGSYLYICINWFHIHFDEAFSSLRIANYKSFTRFHVKKDGDLEIFTLAVDKVPKDWKLDPRWESEGRGPHQLSHDRKHPSKWRSASSTDPVRSVRVVDHFTIERTRTPDMEPSS

SEQ ID NO: 65063 - protein, 302 aa, Zea Mays
MRQCEAGCFMRETNRFFGPAHASSHGRERIGPPPPLCPSVHNLVARVSYSGKVKQIVGSTLRDLANDSMELVTNFESDKSPAEFAKFYKADELLGGHVIMLGANPSSQAAALEALRAYPGGLQVGGGINLENAMSYLNEGASHVIVTSYVFSDGKMNTERLRKLVELVGKQRLVLDLSCRKKDGRYTIVTDRWQKFSDVFVDEPTLEYLAAFADEFLVHGVDVEGKRLGIDEELVELLGHYSPIPVTYAGGVSTMDDLERIKKAGKSRVDVTIGSALDIFGGDLPYKDVVLWHRKQSMVGQV

SEQ ID NO: 65064 - protein, 299 aa, Zea Mays
MGHQAQHATDDTEELLAAHRELWCHALGYVKSMALKCALDLRIPDIIQRCGGSATLGQLLAASEVPASNLGYLRRVMRTLTAMRIFAVVGHGHGPDKADDPADDDATAVSYRLTPASRLLATSDDDDDASKNNLSIHPNISSHVRPKNVSLLFSMAEWMKDEQALSVSLYETVNRKCMWACVEDDAATRACFYESMDADTRLVMQAVIRKCPAVFDDGLTSLVDVGGARGTAAAAVVAAFPHIQKCTVMDLPHIVAEAPAGTGLCFHGGDMFEHIPSADAVMLKWIGFCTTGMTTSASR

SEQ ID NO: 65065 - protein, 440 aa, Zea Mays
MEAHASRGRRTLEEIRQKRAAERMQHALPIAASHVDSHGNQRAGAELLARVQELENGNTELVRENKMLLSKIDEKGVEKDALVNRLNDLERNVVPSLQKNLNDISLEKDAAVVAKEDALAQLRSMKKRLKEAEEEQYKAEEDSASLRAQLNTLQQQVMGHSYSGYTMGISTEESVAMEKEIQDLQAQLKQESLLRQQEQQKLAEESQLRQQEQEKLAKEQIHIASLEAEKQQLEDQITMLTKKATEDASEFAAHKAFSMQDREKLENQLHDMALMIERLEGSRQKLLMEIDSQSSEIEKLFEENSALSTSYQEAIAITVQWENQVRDCLKQNEELRSHLEKLRLEQASLLEVSNITTKSDGQIENSISNLPEMVTENISLKLIKEQSRSESLLAEIMKLSAELRKAVQAQNNLVRLYRPVLRDIESNLMKMKQETYATIQ

SEQ ID NO: 65066 - protein, 226 aa, Zea Mays
MASAVVVDAGDAPEPTVRNLLDQESLKWVFVGGKGGVGKTTCSSILSVLLAGVRSSVLVISTDPAHNLSDAFQQRFTKFPTLVRGFTNLYAMEIDPKVENDDLSNEGMEGFLSELTNAIPGVDEAMSFAEMLKLVQTMDYSVVVFDTAPTGHTLRLLQFPATLEKGLEKMMELKNRFGGLLNQASRLFGLGDELNEDAMLGKLEGMKDVIEQVNRQFKDPLSSQNC

SEQ ID NO: 65067 - protein, 68 aa, Zea Mays
MAAPLHGFLPLDLPPRSKDREEEEHVELKGKRGSRRCSSPSLLAEFLGETLGMDEILVSPCNYVLLEV

SEQ ID NO: 65068 - protein, 181 aa, Zea Mays
MTSTAPLARPSSPRRYPLCAPDPLTAHGLPYYTDLAMPILNPNPGVRGSSISTNNVDNAAPLPLPCTPSALPTSLTAHSLPDSRRTHVDLAMSIPNPEPRVQGSSISANDVDNAAPPPPSPCRLPLLAPNLVNRARIPRFSSHSRRFGNAEPLGSRLVNLYSVASHGHTHLVVDKMLNLLG

SEQ ID NO: 65069 - protein, 479 aa, Zea Mays
MAAMMMATSESKSPARALRRLAGAAVAAVLLRRTFSASKCKTEARMATARMKLLRNRREAQVRQMRRDIAALLRDKQEDTARIRVEHVIREQNFMAANEIIELFCELIVTRLPIIAKQKECPADLKEGICSLIFAAPRCSELPELGRIRDIFEKKYGKDFVSAAVDLRPDAAVNNLLIEKLSIKKPSGQIKLKVLKDIAKEHQIDWDTAESEQELLKPPEELIKGPSTFLEASNMPVKNILTPYTVQPDPVNFRCSDDEYDDRGTMQFKDAASAARAAAESAERATSAAKAAADFVNNNNNNHPFDEDEDCKASTHEFTHTLKRQSMSNSSRSSLKEDANAFDEQKPHEGKTYSARRFSGKNHVEYDKDGYPADLDLKTRRRNCRAARKVHSEIKFDDSEGLCSESEGENDVEIQSVERPLPPKSELFSENRHSEDEEHDQDFPELPKTNLHSRVHPNMPLDYETLTARFEALKSGKLP

SEQ ID NO: 65070 - protein, 187 aa, Zea Mays
MEPLLLQILRIGFFEILKLDVPAYAAVDENVRLAKVALRPGAGNMVNAILRKLVLLKETDSLPLPKIEGDDRAQARALSIIYSHPVWMVRRWIRFHGKDEALRLMNWNNSDPHFSLRVNTSKGYTRADLVKRLESLQVHYEESIMDEFVRIREGMQQVLKAGLLKDGICAVQDESAGKTANYRPKWV

SEQ ID NO: 65071 - protein, 227 aa, Zea Mays
MDPHQFAPSQQSALTMESAESTAAAAARASNGAARAVVEDDDEDDDVPEVAACISTMLDRGGSVESHRLFLARRTALEMLRDRGYAVPEEELARTLPEFRAWWEYRPELERLAFSTTLTSDPSSKGKIMSTTRESIKEIFRFKVDTFQITELLVNITKHVLKPKHEVLTAEGKAKLLKEYNVVDSQLPRMLENDAVARYYGLGKGTVVKVIYDSELTGNHVTYRCIT

SEQ ID NO: 65072 - protein, 199 aa, Zea Mays
MKDPFEAAVEEQDSPPDSPAPPEEEPGAAGLADDAEDYDGGPPPRQPSAPASHAASAAAKAKGRVQREQQEDDDDDEDQMEVDLDKLPSSTGDPDKLAKMNAILSQFTQQQMNRYESFRRSGFQKSNMKRLLASITGSQKISIPTSIVVSGIAKIFVARVVMSERKDSGPIRPCHIREAYRRLKLEGKIPRRSVPRLFR

SEQ ID NO: 65073 - protein, 293 aa, Zea Mays
MCCDFCKVPVFDYHRYCPRCSYDLCLDCCHDIRHSRANVARGEYTEGYVEDKGRDSFNRRARLEPSAESVNDKSLSWPIDINNIDIKSLFPTWRVNNDGSITCGPHEAGGCGSSKLVLRRIFKINWIAKLVKSSEEMVNGCKVHDLEDGCLSCSDGRRSEFTGQQNLGLSKCSNSDEIGRNCLYSPVLEDLKYEGIIHFRKHWKNAEPIIIREAFEPSLSSSWDPLSIWRGIQEIMDEEMDEDVIVKAVDCSNQSEISSSNSLSKATQMAAKEEMAHLLMLKLKEWPRPNGVS

SEQ ID NO: 65074 - protein, 268 aa, Zea Mays
MAMPGNCNVAMIPVVAYEGATAADYQWFVEGGFFLSYYLTDTEDDDYYDQCQACSYRAGHGQCRTIVSDNGFQCYCSDGVYSTTACGTKRANWKTTIVERYGNKCGKHDLSNSKTIFVVESKRELNQECSIYIGLRMNEHQERVREEAYTVGTCPSQWRCSGDGGDRHWHGEAAKPTAAEPHLEEEVENLCRYELPNESWEVNLPPEKVSPELPVPTLGINFARDGIQKKEWLSMVAAHSDAWLLSVAFYLGAQFGFNKNYRSRKSSR

SEQ ID NO: 65075 - protein, 171 aa, Zea Mays
MWRGYASDAEIQGCQDLELRQGRGDLLCVLGRQPTPPISSFPKAAPVSLHYFKKLTSDPDKGVELDGVLRAKLLEIGIVNGMDVYEWDPSTYKYISVKYDATTVTEARALNKERLQAEDGLRVDSSIPVIVFVGCLEEQKGSYILIATIPEFVGENVQIIVLGTRKKKMEA

SEQ ID NO: 65076 - protein, 84 aa, Zea Mays
MWHPDKHKGNSNATTKFQEINEAYKVLSDPAKRLEYDVSGCYEIDQYTLREYLTKFKGMILTCNGLGIDHSSKWARHLRELKPH

SEQ ID NO: 65077 - protein, 459 aa, Zea Mays
MRDGLLGVLVPMPSGRGRRREGGGAVQNQPPVDYPKSSESSPLKAERVVHMDGAQLIGRHDEATIFTLRQLAEATNNFRQDSLLGRGGFGCVYKATLSNGQVVAVKQLDLNGLQGNREFLVEVLMLNLLHHPNLVNLHGYCVDGDQRLLVYEYMPLGSLEDHLHDLAPNQQPLDWKTRMKIAAGAAAGLEYLHDKANPPVIYRDIKPSNILLGEGYHAKLSDFGLAKLGPVGDKTHVTTRVMGTHGYCAPEYALTGQLTVKSDIYSFGVVFLELITGRRPQDSDRPPEEQDLVAWARPLFKDQKKFRKMADPSLCGRFPKRGLFQALAIAAMCLQEKAKSRPPMREVAAALSYLASQAYDRNNNAAAHRNRAGPSTPRVLDDQIGQDTCTLANQQGAQMSMHVGTDHAMPEVKEASCSGSHRGGRGRVTPNGADRERALADANVWAEAWRRQEKASKMR

SEQ ID NO: 65078 - protein, 703 aa, Zea Mays
MLVTTVGMRTQWGKLMATLSEGGDDETPLQVKLNGVATIIGQIGLFFAVITFIVLSQGLFSKKYHEQMLLSWSGDDALELLEHFAIAVTIVVVAVPEGLPLAVTLSLAFAMKKMMNDKALVRHLAACETMGSATTICSDKTGTLTTNHMAVVKACICGNIKEVNGSQNASKLRSELPEIVIKTLLESIFNNTGGEVVINQDGKYQILGTPTETALLEFALSLGGDFKAKRDETKIVKVEPFNSTKKRMSVILELPGGGCRAHCKGASEIVLAACDKFVDETGGVHPLDKITADKLNGIIDSFAGEALRTLCLAYKDMEEGFSNADHIPLQGYTCIGIIGIKDPVRPGVKESVATCRAAGIMVRMVTGDNINTAKAIARECGILTEDGIAIEGPEFREKSLAELLELVPKIQVMARSSPLDKHTLVKHLRTTFNDVVAVTGDGTNDAPALHEADIGLAMGIAGTEVAKESADVIILDDNFSTIVTVAKWGRSVYINIQKFVQFQLTVNVVALLVNFSSACFTGNAPLTAVQLLWVNMIMDTLGALALATEPPNDDLMKREPVGRTGKFITNVMWRNILGQSFYQFFVMWYLQTQGKNFFGLEGSGTDIVLNTIIFNSFVFCQVFNEISSREMEKINVLKGMTRNYVFMAVLSSTVIFQFIMVQFLGEFANTTPLTIHQWLASVLLGLAGMPIAAAVKLIPVGSS

SEQ ID NO: 65079 - protein, 226 aa, Zea Mays
MGSGEEPSQMRRALVDSLAGAISGGISRTVTSPLDVIKIRFQVQLEPTTSWGILRRDVYGPSKYTGLLQATKDILREEGLPGFWRGNVPALFMYMPYTAIQFTVLHKLKTFASGSSRTEDHLDLSPYLSYVSGAIAGCTATIGSYPFDLLRTILASQGEPKVYPNMRSAFIDIIKTRGVQGLYSGLSPTLVEIIPYAGLQFGSYDTFKRSMMLGHFQRLHATHLML

SEQ ID NO: 65080 - protein, 70 aa, Zea Mays
MEICLGCGISADRRLGRSSVGVLIMSTSRHSTTRFRRDLAMLADNTHVNASVDIPNQCEGKGQTEFFFSL

SEQ ID NO: 65081 - protein, 299 aa, Zea Mays
MFCPMICREIVKNGTGSSKNHAIALPERVNPASLSLILDYCRFHQVTGRSNKERKSFDEKFVRIETERLCELTSAADSLQLKPLVDLTSRALARIIEGKTPEEIRDIFHLPDDLTEEEKLEPLKNVNDDPRIRLLNRLYAKKRKELQERQKLKDVQVQKEEKDERSLDELLCFINGDGGSGGGESSTKSKKKNKRRKDHAKNPAKADSESVNVEGAACVVPCKVDSSNVSRLPCQSPDMQDDVEYPFEDADLDDGLDPAMKEELDREVEDFARRLNSVWSESHIGGNGSVQRFPGFNHR

SEQ ID NO: 65082 - protein, 518 aa, Zea Mays
MAFRNMVCTPQVINLTSDSERGQAQGGNGSEISEQGAQHAVRVVGNAMNIGLSGVRSYYDMSINHHHQSVHNPPPNLGVDSGFVFASNMYNPCMSSTSMNRHVSHAQSFGSGNQVLPQNQVPGTMDESSRNDSIGESAREHIKRKNAAVAGSYHFVNGFASSSSSSHAPQNPMLGPWDPSFESTVSSNVAPFNPSEYHGHNNSWPSLEGSSITGSNGFNSMVVHPDSVQRGNYTFPPTHISHSWMSHATNGIADGVPQWEYANATANIQGRFAHSGATEIANVGFHEYQNGPSTICRGPVPYFHQHAMHGMQALDPTQMQVPYQQCHSNGFLHGGINYPGNRLQLGPRNPVLFTSSERAFGPPQHPFLANPVNHRNIRILPPEHATIMDFSRLYEVSNTVDEHRDMRLDIDSMTYEELLALEEQIGDVNTGLTKSHIVDKLRTSLYVPGISSMSDQPSKSSLENDACIICQVLLLHCILYLLTIKSQLSQTKNHHPPTCPRFDINIAAAGLVSPCNQP

SEQ ID NO: 65083 - protein, 265 aa, Zea Mays
MHFQTWRIGILFFAAGNCLNFMSFAYAAQSLLAALGSIQFVSNIAFAYFVLNKTISVKVMVATTFIVFGNIFLVSFGNHQSPVYTPEQLIAKYSNLVFVLYCMSLVFVVAFNHYLYRSGETIISNSSKNAGTYWRTMLPFSYAVVSGAIGSCSVLFAKSLSNMMRLTMNSRYEFHSWFTYSIVLLFLCTAGFWMGRLNEGLSLFDAILIVPMFQIAWTFFSICTGFVYFQEYQVFDTLRIIMVVLGMTFVFVGISLLAPDDTKGL

SEQ ID NO: 65084 - protein, 302 aa, Zea Mays
MRAKIQNQRSHLQQLDPSIREMAEQIASDPVFNQMAEQLQKSAQGAGEQGIPALDPQQYMETMQQVMQNPQFVSMAERLGNALMQDPAMSSMLENLTSPAHKEQLEERMARIKEDPSLKPILDEIENGGPSAMVKYWNDPEVLQKIGQAMGVNLPGDSSVSTVLSGPEETEEEGGDDDESIVHHTASVGDEEGLKKALEGGADKDEEDAEGRRALHFACGYGELKCAEILLEAGAAVDALDKNKNTPLHYAAGYGRKECVDLLLKYGAAVTLQNLDGKTPIEVAKLNSQDEVLKLLEKDAFL

SEQ ID NO: 65085 - protein, 923 aa, Zea Mays
MGTEVAAVVDLRALTQSDLVALAAASPYAVDSRRGRRRRRDSEFLSPPKIDRAVFNESAGSRKQTFSRRRVATNISHKLTPTTTGASSLSTPAAPTEEDPDNRLIVFYLQRLFARDDPSYPAPPTIPPRPQTLAAPAITAPAPPAPSLPPPSAAAADPDRVVLNPKGLVVDLVRLADLVDPYGEELRQRTAGLGSESELLGFMNALEGQWGSRRRRRKFVNAGMFGDHLPCGWKLLLGLKRKERVAWINCRRYVSPKGHQFATCKEVSSYLLSLLGYQEAKPTASQINNAGVHDLHVNSVGLHQQTISIEEKQIAVPVNSVALFNSSGDSHQQKLQKDEAPIEVNAKECRKCNLTFHDQSAYMQHQLSFHQRKAKRRRVSKSGELGTNIDGNYEKTQQKTSGEVSGNFGHSAANVRYEGLSPAELLDGRPSLMAVPCGSQEITILPQQGKEPCVLPQQGKEPSVLPQPGKEPSVLPQQGKEPSMLPQQGKEPSVLPQQGKEPSVLPQQGKEPSELPQQGKESSGDISVNQKDPLKEMNGFPEQEKGLVAGELVSAHHKDPLMDITDAFEMIKKHPAREPSSGHHLDTVDNSDDHKTHDEACDNVVTSLSIDAERKLGVCNSMNVHENISLKDPELSNADYSQKFNRSDETCDVHKEVSSTVNDPDERKCTDDSTRCTNMSCDLLHGKIVSSPEEHDFSNQLESNPLSVSRNEPDLNSIGTEVDGGNITCNAENPRSFKSEKSAELKIMDCEMTSFKDSEIKNDVRVRDVNLNSCLDSISSPISGGNNETSDTPDDAIRSSIIAQCFGTTSNDDTACKDGNFANQNDTCKGENFVNQKNVTMYQSNLTMEPIPRAQINVDCFTSSCSMTPEIKDYGNRGEDRAKEALVNSQNMTSNETGFDAEAYNSDIFNGTITESSLAQPFL

SEQ ID NO: 65086 - protein, 449 aa, Zea Mays
MVAASSTVVEVAVAAAAAAASALPQEQQAQPRPRPMHAGGANGRHHAYSRKDKSLGLLCSNFVVLYNREDVESVGLDEAAKRLGVERRRIYDIVNVLESVGKILSRKAKNRYTWIGFGGIPMALLELKERALRDKSGLASQQTEQQSAATISDDEDDDTLGKEVANIENEKLSQTVNNPSDKPGAPRCRLRSDHRKEKSLGLLTQNFVKLFLTMEVDTISLDEAAKLLLGEGHEETNMRTKVRRLYDIANVLSSLNLIEKIQQGDSRKPAFRWLGRATTPDTENGVTVVVPPPGKTKSNKRAFGTELTNIDMHRSNLDSKVQKKAKLAKSGGDVLINCKLDSGGDVLINCKLDVRNRLGQGKQSGIVYGPFHPAGARKHELAGGNNPGQREMAEDWKSLSAPFRPQYKNQALSDLFAHYVDAWKTWYSEFAQGSNIMQQHFGHFGNHFL

SEQ ID NO: 65087 - protein, 951 aa, Zea Mays
MPFVLRSGETWIKNNGSDFFLDFSTHDVRNIKLKGNGDAGKGTAKALLERIADLEEDAQRSLMHRFNIAADLADQARDAGLLGIVGLFVWIRFMATRQLTWNKNYNVKPREISKAQDRFTDDLENMYKAYPQYREILRMIMAAVGRGGEGDVGQRIRDEILVIQRNNDCKGGMMEEWHQKLHNNTSPDDVVICQALIDYIKSDFDISVYWDTLNKNGITKERLLSYDRAIHSEPNFRSEQKAGLLRDLGNYMRSLKAVHSGADLESAIASCMGYKSEGEGFMVGVQINPVKGLPSGFPELLEFVLEHVEDKSAEPLLEGLLEARVELRPLLLDSRERMKDLIFLDIALDSTFRTAIERSYEELNDAAPEKIMYFISLVLENLALSIDDNEDILYCLKGWNQALEMAKQKDDQWALYAKAFLDRNRLALASKGEQYHNMMQPSAEYLGSLLSIDQWAVNIFTEEIIRGGSAATLSALLNRFDPVLRNVAHLGSWQVISPVEVSGYVVVVDELLAVQNKSYDKPTILVAKSVKGEEEIPDGVVGVITPDMPDVLSHVSVRARNSKVLFATCFDHTTLSELEGYDQKLFSFKPTSADITYREITESELQQSSSPNAEVGHAVPSISLAKKKFLGKYAISAEEFSEEMVGAKSRNIAYLKGKVPSWVGVPTSVAIPFGTFEKVLSDGLNKEVAQSIEKLKIRLAQEDFSALGEIRKVVLNLTAPMQLVNELKERMLGSGMPWPGDEGDKRWEQAWMAIKKVWASKWNERAYFSTRKVKLDHEYLSMAVLVQEVVNADYAFVIHTTNPSSGDSSEIYAEVVKGLGETLVGAYPGRAMSFVCKKDDLDSPKLLGYPSKPIGLFIRQSIIFRSDSNGEDLEGYAGAGLYDSVPMDEEDEVVLDYTTDPLIVDRGFRSSILSSIARAGHAIEELYGSPQDVEGVVKDGKIYVVQTRPQM

SEQ ID NO: 65088 - protein, 542 aa, Zea Mays
MKKWHGGFVIVSLFIILMLRYVILDRLLAEKSLQYVFQQNRTAELHWLDVPNPPAIQNPQISSEVISTRLLASNLSITRNLSDTELQSLHSWNHLKHLLTHAHILPDGVEAIKEAGVAWRELNTALAYDDSVVSVNGSIQQKDKGKQCPYSVRRMNATRLGDRFALKLPCGLIQGSSITIIGTPGGLLANFKIELTGAAVPGEPDPPIVLHYNVRLLGDKLTEDPVIVQNTWTIADDWGSENRCPSPDSDAKDSAKVDDLEKCSSIVGEDQKEILPSKLHSHVLTMPPARKKKAESRKYFPFRQGYLAVAILRIGAHGIHMTVDGKHITSFAFREDLEPGFVGEVRIAGDIKLLSVIASGLPTTEYFEHVTDLEILKAPPVAMDKSVDLFIGVFSTANNFKRRMAVRRTWMQYDAVRSGKVAVRFFVGLHKNEVVNEELWNEARTYGDIQLMPFVDYYSLILWKTIAICIYGTNVLSAKYVMKTDDDAFVRVDEILSSLDRTNISHALLYGRVNSDSQPHRDPYSKWYITPEVTCVKLYILE

SEQ ID NO: 65089 - protein, 286 aa, Zea Mays
MPSIPKNASSVPHAHPSPPSIAPELAPTGRSHAQGWKSSNPNNKTNRLHAPSYPPPRAQGPEVSRTPRQTGTKNYTHHAPPPFPQELLDSTGNHISPTLPSIPPLPEPKAPSAHPIWTLPPPPPNSDCNSLSCPEPLTDPPAGAPCACVLPIRVGIRLSVDLYSFFPLVSDFAEEVASGVNMAQRQVRVMGANVAGDQPDKTMVLVDLVPVQVKFDNATAFSAFESLWSKKVSLKPSVFGNYEILYVVYPGLPPSPPSGQGVGDGAFGNNRNARAVKPLGVDLFDS

SEQ ID NO: 65090 - protein, 250 aa, Zea Mays
MHCFIRRDKKNSTFSLYLSLTQALTDKGKFLLAARRFRQGAHTEYIISYDYDDLHPRSSSYVGKLRSDFLGTKFIIYDSQAPYDGAKPSRTRSTRRFASKQISPQVSGGNFEVGQVTYRFNFMKSRGPRRMQCNIQCPVGQGSASDPSKEKTPSPSSLDLKNKAPRWHDHLQCWCLNFHGRVTVASVKNFQLVATAGSGGPWGVGDEETVILQFGKIEDDAFTMDYRQPLSAFQAFAICLTSFGTKLACE

SEQ ID NO: 65091 - protein, 211 aa, Zea Mays
MNPSPLHLAIFHSHPSIFSAATTFPPCLLLPRAAARRPFLPPCSTAASMELGSSLHGAPHPFPLHGALPFLSCPRRGHPFSHGRAAALHAPPMASRPSSSSMGAGLHLLAWTLAKLPWSRRSPAMVRPPLFPGPPSSFPWRPFPPAPPAPRPALASGLTNLAMALLVEDPLQGAIVASPGPCSPASSCCSWCLSLPARCPQRPTARTPFPP

SEQ ID NO: 65092 - protein, 110 aa, Zea Mays
MKVGYGSAEELKNNGCQETYESPRKVEAKIEKMKYEHLTREAALAKKELLEEEYKKKFDEAKKELSLENDLAGIGLESDLYAKAIPKTIPNSRNPGFFQNPKDRGGNENG

SEQ ID NO: 65093 - protein, 404 aa, Zea Mays
MKFGDPISALYYLDPAGTTPSHVMMDRNSIWFCQGPAAKKLNIDLPETEIVETHRNHSARITCLRLFPLIDTPLFRSDTQKNEKALVTSSTDRTIRLCWKGYSRCYKGHSAPVTALADRLLMDGESKLLASGGEDCTIRLWSMSTRAKNHPLIATFHGHEKALSFLSVAWHKSSLLVSCSKDSKVKVWDTVSPSSGSSSCVGSAHLNSNGPPIAMKCHESLCYIAAGAEVTAIDLRTMKKASVLALQNHRILSCEMMPSEWLICTGTKDRALLWDIRKAQELPNTVAEMQSSGPVTLLHLDQYKVVTGVPSDGQVHVWETRTGHSLNTLGCGEPSRLGVRSRVSAMAVDGCRIAMAGSSPEGCMLHYRDFATASAPVVSLPGKEKEVSRFWRPQEFDDSEEEEY

SEQ ID NO: 65094 - protein, 50 aa, Zea Mays
MLNQQALPSLLSCSPRVCSSIFLVVSVELTNAPARRYRQVPRSRVVLSSS

SEQ ID NO: 65095 - protein, 850 aa, Zea Mays
MTRRGSSSGRRRRRDQEDEDDLPSDDTSDTDFVADSGDAVENDDSDEEFAPDKDTPPAPAVPEAALPPPVPIRIKNQARNRREKRRRGKKARRDAPPLPWEEWQVANDSWLDERNAADGGVEATDATVAAVPTADPAPEVVLRLLRFQKEWLAWALAQEASVTRGGILADEMGMGKTIQAISLVLTARRLRPPDHHSAASSSNSSVGRTKPQVGCTLVVCPVVAVIQWTEEIERHTASGSVRVLIYHGAKRVTQSFDFNSYDFVITTYSTIEADYRKHIMPPKTRCQYCNKLFYPNKMKVHLMYHCGPNAKRTEAQAKQQSKRKWDSSKEKVKEKRRVHKKGDEVNKDFQELADELGRQLRGQSPLHSVRWERVILDEAHFIKDRRCNTARAVFALESECKWALSGTPLQNRVGELYSLIRFLQIFPYSYYFCKDCSCEILDTSMKKQCDCGHSSVRHFCWWNKYISTPIQYGSTSFEGKRAMTLLKEKVLKGIVLRRTKKGRAADLALPPKIVTLRRDSFDKNEMEFYEALYTQSVTQFDAYVDAGTLMNNYAHIFDLLTRLRQAVDHPYLVAYSKTAGHPEGMKNEGNESMESQCGICHNLAEDVVVTSCDHAFCKTCLIDYSAALGNVSCPSCSIPLTVDLTAQNSVGKVTRSVKGRKCSGILSRLPSLVDFKTSTKIDALREEIRNMIEHDGSAKGIVFSQFTSFLDLIQFSLERSGIKCVQLNGAMNITEKGRAIDTFTHDADCRVFLMSLKAGGVALNLTVASHVFLMDPWWNPAVENQAQDRIHRIGQFKPIKSTRFVIKDTVEERILQLQQKKQLVFEGTVGDSPDAMSKLTEADLKFLFQI

SEQ ID NO: 65096 - protein, 512 aa, Zea Mays
MSPACATPAAARPLNTVPTRRSPPSAARPPSAIPARRSAGCCFCASSSSSASSPSTWDWTRWSRHFDEVDQAESYASLLQFQLEEAVENEDFAEAAKLKRDIIAATGNDAVAHVMAELKSAIEEQRYQDASRLTRLAGTSLVGWWVGYAKGIDDSIGRIVRISPGVGRYVAKSYSPRQLVTASSGTPLFEIFLVREDDKTYTMKVVHLRPTKGTLGASSISSAITESPATVETPESSAISDSITEEANIDTPVKGNGDAEEKEQDVGSSKDTSVDGFKSLLNFFKSRIPEFKVQVINVDVSEETELAANSSEESVQDDVKSTPEGSLEEPTTEELEQEEDVPEEDMDEESKSTKVKLFISGVVHNKEDAGTKSYVRVPAEINNMEKDSFDLYIPGNGSGHDLPETKAAKQKVADMAAKLASELMPSDVAKALWGTTKSSSKINKEVQELLRLTLSKARVKLTDDTFFNRIIMDTNSMDPFNVHMDQKLCSSVGSSATGIVPMTLSFSSMSKQ

SEQ ID NO: 65097 - protein, 294 aa, Zea Mays
MFYYCALTIFGRLLIKVAQQGRMVEIYGKEASGKTTLALHVIKEAQKNGGYCAYIDAENAFNPSFAESIGVDSERLLIAQPDSAENSLSIVNTLVGGSVAVVVVDSVAALIPKCEIEGEIYTNCGDIQSHLMTRALRKIQYTLCRSETLIIFVNQVRTKRTSSNPGIYKEVPCGGNALGFYAAVRMRTSRRELRYSEDEATGVGISVQIIKNKLAPANLKKEAGIDITFGKGICHESEILETASSVGVILKDGCGYWINNEFLAGKVEAEKFLRENAAVADEICNTVRNEFLQR

SEQ ID NO: 65098 - protein, 394 aa, Zea Mays
MAKPRRGRSASRSSSGSSSRSLSHSVSSGSVSSRSRSRSRSFSSSSSQSRSRSPPQAKRSSPGARKGRSPSPPPKKGSPSKKVRSPSPPLKKASPPRKVSPPAESAVLCIDHLSRNVNEAHLKEIFGNFGEVVNVELSMDRMVNLPRGYGYIEFKKRADAEKALLHMDGGQIDGNIVKLRFTLQPRQRAASPVKAPPPPPKRDALQIEKGVSSAEKDAQQRPKESSPRRKPASPLRKRSPNRRAESPRRPPDPSPRRRPDSPPIRRRPDPSPVRRGDTPRRRPPSPVRRRSPSPPPRRHRSPMRLSPRRGRGSPSPRRRSPGPLRRRSPPPRRLRSPPRRPPPPRRFSRSPPRRPLRSRSRSISPRRGRGPPLRRGRSDSSYSRSPTPPPRKAS

SEQ ID NO: 65099 - protein, 150 aa, Zea Mays
MRLLQAEELFRKVLEVGSKNKAARLLGLDVGSKYVGVAISDEKNRVAMPLSVLCRTKTNINLMADDFKTLAIQVSLAGELCKTGKLDDLPYAYWDENFTSKCVEALLHPLNLKDLDDAKTMTDKFAAVCILQGYLDNMNRKLRSTDKSEA

SEQ ID NO: 65100 - protein, 117 aa, Zea Mays
MHPEWQDLAREEVLRVFGGASCRVLDYDGLSRLKIVTMVLYEVLRLYTPLPALHRRTYKPMELGGVRGRTPTSSGRRGSQRESPGRRPPGTRLHRSSRSAGDLGPASVRPSRCWRPR

SEQ ID NO: 65101 - protein, 73 aa, Zea Mays
MKTLTCGVLPMSRRAPQGTPDVDRTGVLLYEASGTQRHRNKSVDTLINKCLHLSCTRSSTECVATVAHHMVAS

SEQ ID NO: 65102 - protein, 495 aa, Zea Mays
MRRVSLKQVSYLVLDEADRMLDMGFEPQIRKIVKEIPHRRQTLMYTATWPKEVRRIADDLLVHPLQVTIGNVDELVANSAITQHIEVITPSEKQRRLEQILRSQVSGSKILIFCTTKRMCDQLARTLTRQFGASAIHGDKSQSEREKVLNHFRSGRSPILVATDVAARGLDIKDIRVVINYDFPTGVEDYVHRIGRTGRAGATGVAYTFFCDQDSKYAADLIKILEGANQQVPRDLEDMASRGGGRGKKRNRWASRSERGGPRSELDSRYSGRDGLASSGRSESGRGSHGRDDYGSRGRYDSGETDGRSRRSARGRSRSRSPSPKRSHHHEARRSRSRSRSRSCRNFRASRSKSHSPVASSRHEKAAVISGSTQPNLGYAEHKSPPRSHSGDDHVNHPDQKDDHMGDGKMERVDLDRSPSPQYDKSAPYSPAYNGKASDSMSPNVQPKADAKYVKPSGKPEPASPLRHSKGRDDDEGIIDDDGEIAEGEMMMKVS

SEQ ID NO: 65103 - protein, 683 aa, Zea Mays
MAGLSGGGGGWGGYDDDDWGLSAEQLDQMERDAIRQLAERKASASAASTAPIPASPLGATSPLPSRATVPAAAVSSPLGGNHPATRASLEARFGKVEALSPSRNAVNNSQGSSPKISVHLFLHSSGMIAARFPYSQLLVDAFRKIPKASWNAKERVWMFPPSSLAIVEEVPRSVPGLTVEVHKLDPLVQRALAAALRSKDLRGLYDRIPPHLESKLMPFQREGIRFVLQHGGRALIADEMGLGKTLQAIAVASCLRDAWPVLVISPSSLRLHWASAIQSWLNIPVEDILVVLPHTGGSHKAGFRVAYSNSKGDFHLDGVFNVISYDVVPKIQSTLLDLDFKIVIADESHFMKNGQAKRTVASLPVLQKAQYVVLLSGTPALSRPIELFTQIQALYPTVYKSVSEYGNIYCKGGFFGLYQGASNHEELHNLMKATVMIRRLKKDVLSQLPVKRRQQVFLDLSEKDVKNVRALFIELETLKVKIESSDSKEMIDSLRFAYQNIVNKEGCKFLIFAHHQPMIDAIEKHLLKKKVKCIKIDGKTPLTTRQTLVTDFQNNDDVKAAVLSIKAGGYGITLTAASTVIFAELSWTPGDIIQAEDRAHRIGQVSSVNVYYLLSNGTIDDLMWDVVQGKLENLGQMLDGQEKTLEVSQRDCRPSPSKKQKTLVGFLKRPSASTSAEEGMPST

SEQ ID NO: 65104 - protein, 213 aa, Zea Mays
MSLVAYDASSDEEDAGEPAAAAAPHPAPIGPQPRPPSPTAVSPAPRPTPTLTPPPPAASQDAVSHRQPWPPPHMHVESGWDSADLRPISWPSFTIVVHDSAVLMLWPKGVHVVATFYHRGVHELVQPLSARVTDGQRYRPMKVDGAPKWMVIQYHGAATCLPGVQPSVSTGAVVELLLLSAASAAMVGMKIVDVGIDSGANRVQLAGKLKISK

SEQ ID NO: 65105 - protein, 148 aa, Zea Mays
MLSRFCAAIYYMTTNPETTSSFNIALVYEMVGSSEEDEACSGGDTEATEPGQQEHSSRLADRELKEMLLKKYSGCLSRLRSEFLKKRKKGKLPKDARSALMDWWNTHYRWPYPTVTMHASWQTRSSSIARWNGRSVTSISRRCRRRTR

SEQ ID NO: 65106 - protein, 140 aa, Zea Mays
METKHHMAGEGKERSDLRRRRPSPPSCIASNALSRPSRRPWPPCRRRRLSIPSEFRVHAPLRPWHHATSRGPYYRLHSRGRSATRTGRFACRRCCDSRDTCLHQQHVPNRLSVPGHRDTSFPKSLRWQQLCLPCSKYIAL

SEQ ID NO: 65107 - protein, 280 aa, Zea Mays
MSMTWICDTITEFGFGHGSSLIICVGILTGYTDTLHKMITQFSGNFSYCWPYILGVAGIFMILTMGAVLVTEGCRKIKLQYYGFKLASGAGNESSPVTEVEPYIPFNINPTGMQPLLTTSYLLAFPSIMASIFASPFWENLREILNPKTSTGGSPWVYYLTYAFLVFIFNIFDIANLPKEISDYLNKMCARVPRIKPGRATVDYLTKIQTSTRFWGGLLLSLLATSSLLLDRYLRQINEGLSIGFTSVLIIVGSIIELRRSYQAYNVMPALSKVLRRYGA

SEQ ID NO: 65108 - protein, 704 aa, Zea Mays
MAASDCMLGKIGYGTASEALACKLPLVFVRRDYFNEEPFLRNLLEHYQNSIEMVRSDFLAGHWKPYLLRALTLQPCYNGPINGGEVVSQILQDTAIGNKCISDKASGARRLQDAMVSGYVLQRVPGRDAGIPDWYSVSETKTGGGPTSQNVATKESAALCIEDIEILHGDLQGLTDTVDFLKSLSELNGNDLKSPKKQDLERTAASVLFDWETEIYVARAPGRLDVMGGIADYSGSLVLQMPLREACHVAVQRNHPSKQKLWKHTKARQLVNGGLVPVIQIVSFGSDLSNRAPTFDMDLSDFMDDGKPISYEKARELFCQDPSQKWAAYVAGTILVLMTELGAQFTDSISILVSSAVPEGKGVSSSASVEVATMSAIAAAYGLNIIPRDLALLCQKVENHVVGAPCGVMDQMASACGEANKLLAMVCQPAEVKELVSIPTHIRFWGLDSGIRHSVGGGDYGSVRVGTYMGRKMIKCTASDLVSESLTSGSPAQSDCYKENGVGVLKSEAALEYLCNLPPHRYEAVYAKDIPEVISGEAFSEKYGDHDDTVTVIDPKRSYSVKAPTRHPIYENFRVEAFKTLLEAGNTDEQLSALGELMYQCHNSYSACGLGSDGTDRLVNLVREVQHRRTSEGGSPSLFGAKITGGGSGGTVCVVGKNCARSSEEIAEIQHRYKAETGYLPILFDGSSPGAGKFGYLKIRRRCP

SEQ ID NO: 65109 - protein, 77 aa, Zea Mays
MSILSQAKSSKGTVYWMAPEVAKAKPHGPPADIWSLGCTVLEMLTGEVPYPDMEWYSGPKIAVVLVKMIPLFSREIS

SEQ ID NO: 65110 - protein, 237 aa, Zea Mays
MGQNMLQPQVLCLCSIILTLFFTLLQPTAAQITAPWEVDALKAIRGSLIDPHGNLSSWNRGDPCMGNWSHVICYNATGSDGYFHVKELQLLSLNLSGILAPELGQLSQMKIMDFMWNSIGGTIPKEVGNITSLELMLLNGNQLNGSLPEEIGFLPNLNRIQIDQNHISGLIPKSFANLNKTKHFHMNNNSLSGQIPPELSRLPSLVHLLLDNNNLSGYIPPELSKLPNVLIMYVEFF

SEQ ID NO: 65111 - protein, 56 aa, Zea Mays
MWAPDATTTLWTPAPTQPTTALLSIQPYPRSYQPTTPRKKVRASTRIHTLAPEIWS

SEQ ID NO: 65112 - protein, 73 aa, Zea Mays
MDSYHELGVRTTDFEVPDQEPGLRCLEWLQEELLALPAIVEGFMSYASLVTCEEAMNALSREGCRHYEVFDQA

SEQ ID NO: 65113 - protein, 125 aa, Zea Mays
MHCKSSFLVYAWGRGEHGRLGFGDDKSSHMVPLKVELLAGEDIVQVSCGGTHSVALARDGRMFSYGRGDHGRLGYGRKVTTGHPMELPINLPPLSSSRDGRWQAKYVACGGRHTLAIAEWTEATD

SEQ ID NO: 65114 - protein, 301 aa, Zea Mays
MLLPPSLLRDDVSKSMCLDLSVKDNSAKPPRRHSIQTKPGASPRPTPSGTVTPVSGVRSKRSESQGRFDTPTSEVSMSISRRKFSTLSSISYWMTQIRLAEAASKHSVSLGFFKLALESECEPLDRMREELKSYVARHGLATELEDPVKDILQVYDILDDFEKLKISAEPSQQPKKSDKAARTATNASPNGNLKPRSLNSDATESKEAVKKESIQKVNPGARIRGSCNRNPVKNTTAKEAVAKNTGKETKKGAKGQQEVSEAPSALPNQESADVVKEITHEDKENMGDIEMAVDVAVAQDI

SEQ ID NO: 65115 - protein, 50 aa, Zea Mays
MLKLSIAFISWSKFYYQLLNVSDYQTIVIVNNNNNNNNNNNNPNAMQMTN

SEQ ID NO: 65116 - protein, 370 aa, Zea Mays
MVTRELCKLPTFFTTVLFDKIDKESTGFVTREAFIDFWVNNNLMSMDSATQVFTILKQQNHNYLTKEDFKPILKDLLDNHPGLEFLKSTPEFQERYAETVIYRIFYCLNRIGSGHLTLRELKRGNLLNALRHADDEEDINKVLRYFSYEHFYVIYCKFWELDTDHDFFIDKENLIKYGNHALTYRIVDRIFSEVPRKFTSKVEGKMGYEDFVHFVLSEEDKSSAPSQEYWFTCIDLDGNGILTHIEIQFFFEEQLHRMECMAQEPVLFEDILCQLIDMIGPENDSYLTLKDFRRCKLSGHFFNILFNLNKFMAFEARDPFLIRQMREEPSLTDWDRFARREYVRLAMEEDGEDASNASGDVWDESLESPF

SEQ ID NO: 65117 - protein, 157 aa, Zea Mays
MLLLHKSVPLRLLLPRRPLKTFLLPPPSRPRCLSLLPRAAMGSVAGDTAARLAYPPARRDDSVVDDYHGVRIPDPYRWLEDPDSEETKEFVARQAELAETVLAGCPDRENLRREVTRLFDHPRHAAPFRRGNKYFYFHNSGLQAQSVLYMLFQTFMY

SEQ ID NO: 65118 - protein, 309 aa, Zea Mays
MASDTEGIAALFSMYNDDEEEEDADEPSPPFPALPAAVTSSSPLSPQAGAEDPNPSVAPPSPSRPEELASLKTLASPHPSPARGLLPPLPSRRSSSPFAVSSPSPLRGPFFAPPADLPRPPRRGALAIVDYAHDETAMSPEQEDGEITSNTYGFGSDAQAAEGNLEERTYSGTVHVMTPNTLAELSQHPDAPEQNQVGTDMAVDVTRTEIKGAQVEGTTDISTNGESDDPSNRFLPPPVTTKCSAALQFSSLFMFRGSVMAMLLFSKKLTGSLHTEGLERALMLKCATGRTTEILTFCSMLWDTKKLIR

SEQ ID NO: 65119 - protein, 607 aa, Zea Mays
MLLGFVLLGRSLEESARLKASSDMNELISLLSPQSRLIVTSSSDNPSADSSLNSDAITVEVPVDDVRVGDSILVLPGETIPVDGNVIEGSSFVDESMLTGESLPVAKETGLPVFSGTVNWDGPLKIRATCTGPSSTIAKIVRMVEDAQAREAPVQRLADSIAGPFVYTVMTLAATTFSFWYYIGTHLFPEVLLNDIAGPDGDSLLLSIKLAVDVLVVSCPCALGLATPTAILIGTSLGAKRGLLVRGGDVLERLAGIDTLVLDKTGTLTEGKPVVTSIASLAYEETEVLRLAAAVEKTALHPIANAIMNKAELLKLDIPITSGQLTSPGFGCLAEVDGSLVAVGTLDWVHDRFETKASPTELRDLRNRLEFMLSSEASSSNQSKSIAYVGREGEGIIGAIAISDILREDANLTVERLQQESITTFLLSGDRGEAVTSIGRTIGIRNENIKSSLTPQDKASIISTLQAKGHRVAMVGDGINDAPSLAAADVGIAMRTHSKENAASDAASVVLLGNRLSQVVDALSLSKATMAKVHQNLAWAVAYNIVAIPIAAGVLLPQYDFAMTPSLSGGLMALSSIFVVSNSLLLQLHGSFQNTEKRQGDLSSRLN

SEQ ID NO: 65120 - protein, 894 aa, Zea Mays
MEMAGVVTYTGAKIIQNARLLVEKIGRPLELDTDGIWCVLPGSFPENFTFKTKAGKKLTISYPCVMLNADVARNNTNDQYQTLKDPVNKTYTTHSECSIEFEVDGPYKAMILPASKEEGILIKKRYAVFNEDGTLAELKGFEIKRRGELKLIKVFQAEVFDKFLHGSTLEECYSAVASVANRWLDLLDNQGIDIADSELLDFISESSTMSKSLVDYGEQKSCAVTTAKRLAEFLGDSMVKDKGLHCQYIVAREPQGTPVSERAVPVAIFETDPEIAKHYLRKWFRFSSDANIRSIVDWSYYKQRLSSAIQKIITIPAAMQKISNPVPRVLHPDWLHKKVREKDDRFRQRKLRDIFSPLAKEEGLHNLNRTGDMEDLLISNKDLRKNPSHGLDIDKENNPNGASVGSGLNISKKQQNCMTGLNVPCTSQIQNAASYETVDKGTDYQGWLDAKKRKWKYVREQKKRRRLGAAATFDDPNALLSARHANQLPVNSRNRSTFFQKQELALFRSHWQIIQLASSTVPGHFFAWVVAEGIMFKIPINVPRTFYLNSKAPVTEEFPGRRVKKILPHGRPCFNLIEVVTTEEQFRAEGKKLAAHLAEPDVEGIYETKIPPELNAVLQIGCVCKVDKSAKRRSIQDGWDLAELQMKTTAECSYLEQTFSFFYLYHSLSEGRAVYVFYFPTSFRIHAVIVNPFRNKEISPSFLEKQFGDACQALGSVPENLSFHVDYQTSIDAGSKYAQRMLLEYRQQHSGPVVGIIECPKLQAIKVAIRALDDLPCVTIPSNARDNNYQALGWQATAGRTSMQRCAASTQWFNERISLAKYAHVPLGNFELDWLLFTADVFFSRALRDQQQEALMKERHVLLMKSFSLHLLILVHIEEFLLSLRSTIWRLMLS

SEQ ID NO: 65121 - protein, 113 aa, Zea Mays
MRQRPAQRRARRRGAAAAAPGARPWRHGRRSRSAPLRGNGMGRKISRLSYVFVLIRSIYVYRKKKKRSSCERRQQWRMVEACYISESTTSMEGASGVRRLRRDTPERGVGGYV

SEQ ID NO: 65122 - protein, 342 aa, Zea Mays
MRPAVVTVLLLVAAAASPAAALYSAGSPVLQLNPNNFKSKVLNSNGVVLVEFFAPWCGHCKQLAPAWEKAAGVLKGVATVAALDADAHQALAQEYGIKGFPTIKVFSPGKPPVDYQGARDVKPIVEFALSQVKSLLRDRLSGKASAGSNGKTSGGSSEKSEPSASVELNSRNFDELVVKSKDLWIVEFFAPWCGHCKKLAPEWKKAAKNLKGQVKLGHVDCDAEKSLMSKYKVEGFPTILVFGADKESPFPYQGARVASAIESFALEQLEANSGPAEVSELTGPDVMEEKCASAAICFVSFLPDILDSKAEGRNKYLELLLSVAEKFKKSPYSCLDSCWQAS

SEQ ID NO: 65123 - protein, 1569 aa, Zea Mays
MEHAKDIATLVFRLLIVHPKTLRVNIKALELAKKIRWEFYASSSLVYDGVDFDKMKNMSADSIASINMNNIKAFAETFLADPNKHVEWLANSGSGSRFSKTLFLLIVLQTLVSTEALDEQVNLCHACLPVLKDECHHIQPKDSDVGDEISITNLEMCSLELVKHFFNRDTEALNVRILVCIFWGIVRVQSSCIKQNPVVGSGGNTMLDDLFLFFLVSPAKNIFQKHLQYLVNCIGAPFQFISKYFLDEDLSERVQVESLLVFASICSKCASSDNNSLDESICVQLLLGFPSIILPLAHVNKDIRASAIKCIEGLSLVWQRLSTSVPRNGNNTKLPQCLSSPTFGSFLELLVNQKTMICSDAKFLPAYISSMLSPCKDILVPENLHERFDPHTKDTILTFILRSALRLPPYGKFMVLSVLKGVGSILFHAEDVKSLFFDLLDRRDQYQNRHNCKQILSTHEMHTLCLLLEVLFSTPDHVNIGFNMFEPLMKALKVDASSPGDSVVVMPCLTVLQNLQPGFFDNLKTDTKEKVVGRLISLVRTESFVVRNAARDALLRINVHSSTLVKFIELISTLGDARGHSKRIKRNEDRDLNVFCNFAEIFGENSVASILVSLLDILFLKKDVKQRSRLLQPLFQILSKLLSDQWVSVIVSQYNDQQDTSSEIPDLSSFVKEVQHLVLLALKDITDTLQSGHHDAMVSSSDVGLLIDCVRSIQDIGTRNHGFSLIASLGKACPQLVSESIVDLFVAIGDAIKQDDSHSQRVLEDLLSVLVPCWLSRTTSIEKLLQIFIKALADVPEHRRLTLMVYLLRTMGKENNLSTVIMHLLHSVVERISHSFSVHHGDDYRLAMSQEWEYGLAVNVLDQFSYKLWFPCLSKLLKNIRVHEKQDLHLMLHLAMRLILFKLQDTELNFELESEEAANSIQGSLGALMEEVILCGVYARDKKRDICTDITKEVRDFANTILKTITGWMRASTYLMGITLLLDHSDNHVKRKTLRILSETARGNSLVQKNQRKARKLKHISGTTIKVDKSSGPYFSKLCLKILELIDRVGDSDTKVKVAAISSLETLAKEYPSDNPVYSNCLATIIDQIGSDEAAVSSALIHTVGSLVNVIGSKALPQLPLIMKNIMLMSHQISCCPSGNYAHGSTRTAAELSNQDITVLLSALTTIEVIVEKLGEFVNPYLKEILDLVVLHPECSTQMHAKLDAKAARVRELLTVKVPVRLILSPLLNLYSLTANCGDASLTLAFSMLASLVGTMDRLAVGTYHSKIYEHCLAALDLRRQHPDSLKNINMVEQSIIHAIISLTMKLTEGTFRPLFLRTLEWAEAEVDESSSKKSLDRAIVFYKLVNKLAEKHRSLFTPYFKYLLEGSIQYLSEDDALGGSKHKKKKTKLVDVQVEQKDKLLGLKLWNLRALVLKSLHQCFLYDNDQKILDSSNFQVLLKPIVSQFVVEPPKSVESVLDAPSIEEVDETIILCLGQMAVTARTDVLWKPLNHEVLMQTRSDEVRPKMLGLKVIRYMVQHLKEEYVVLVPETIPFLGELLEDVELPVKTLSQEILKEMETLSGESLQQYL

SEQ ID NO: 65124 - protein, 274 aa, Zea Mays
MGSSHSNIQFDWKTRVNICLGIARGLAYLHHGVSPHIVHRDIKASNILLDRDLTPKISDFGLAKLLPPNATHVSTRVAGTLGYLAPEYAIRGQVTRKSDVYSFGVLLLEIVCGRSNSDTRLAYGDQILLEKFPEITNGALLLQTWMHYEQGSLERIIDRSLGGGDLDVAQACRFLKVGLLCTQDVTRHRPDMPRVVAMLTGEWDVEPETVSKPAIISDFMDLKVRSTRKASDNVATPPTSSSTFLSSLMAHSSPLLSNESTQASMAFTGVSDRE

SEQ ID NO: 65125 - protein, 81 aa, Zea Mays
MSEERPVPRRESPWGLPEGDTRQPKAHRCNDRAEDVVQACFEGNPFKTVPGPFKLFWQCMRSKPGYVYLVIIYALTFWHIS

SEQ ID NO: 65126 - protein, 359 aa, Zea Mays
MFIKLKQIGVEKMHKDTKYVLFLDDDVRLHPGTIGALTKEMEKNPEIFIQTGYPLDLPSGSLGSYCIYEYHMPCSMGFATGGKTFFLWGGCMMMHADDFRQDRYGIVSGLRDGGYSDDMTLAAIAGQHKRLIFSPPVAVFPHPLASDLSFSRYWNYLRKQTFVLESYVSNVNWMMNRALFTSHCYLSWGFVWPYIMALVHVLAALRAPYSKVVKEASDSSWGLFLVGLLFTCTLIELVSMWNLTKVEIQLCNMLSPEGPKVSLDSYNWGLVFIAVLVDNFLYPVSAIRSHFSQSINWSGIRYYLRDGKISKIERENSSKYTDLGGKHLYGKRTYPPNKSLLGYLSRTLVQWHQPKKYDV

SEQ ID NO: 65127 - protein, 233 aa, Zea Mays
MLTGKNPSEHGKSSGASGNGVTSQSGESGSDSSSEGSEGNSHNDSHHKESGQEHDGDVRSSRNGVSRLQSEGKLNQAMAILPIPSSGPATDPTTNLNIGMDYWANTASSAPAIHGKATSTTVPGAVVPAEQWTQDEHELKKQRRKQSNRESARRSRLRKQAECEELAQRADVLKQENASLRDEVNRIRKEYEELLSRNNSLKEKLEGKQHKTDEAGLNNKLQHSGDDSQKKGN

SEQ ID NO: 65128 - protein, 72 aa, Zea Mays
MCDARVLVKPYKEKGKVPDRKLQHPHLGDFAGCTSPTGLLDSRDPFDLQQPQIAFLLLNLPLMQINKLVCLF

SEQ ID NO: 65129 - protein, 152 aa, Zea Mays
MSRQSEMDEAVPALATGQASTDAVTEQPVNVYIWDMDETLILLKSLLDGSYAGAFDGLKDHEKSTEIGKRWENLILELCDEHFFYEEIENYNEPYLNALNEYDDGRDLTSYDFEADCFSSPYDDANKKKLAYRHRAIGEKYAKLHDRRAGLV

SEQ ID NO: 65130 - protein, 703 aa, Zea Mays
MAPAWERARRALATRFCMRFAARRVVVEDAPRGMDDIEAEEEEEQEQQQHQEEPAEDEREMSLAAESEDLASSWSGSRSSETCAICLSGMRSGRGQALFTAECSHKFHFNCISSNVQHGNKICPICRAVWKELPFQGHVATSAAAHVVWPQMSMQSVSPLDELPVFGYQDTAVMNDDEQIQPTETAVGDEAPPPPPPLLEITTYTEFPAVQESVAHEEFAIVIHLKAPSWVSTRAPLDLVTVLDVSGSMSGPKLALVKRAMRFVIENLDPSDRLSVVAFSSAAWRLFPLRRMTASGQQQSLQAVNCLVADGGTNIADGLRKATRVVQDRHARNPVCSIMLLSDGVDSHVLPPRRGSAPDYGRLVPRSALLPGSEHHVPIHAFGFGIDHDSRALHAVAQMSGGTFSFIDVVGSIQDAFAQCIGGLLSVVAQETTLSVECADQGVLLTSIKSGSYASGADGDGRGGFVDVGRLYADEERDFLVTVRVPPSRGTIALVRPSCTYRDAVTTEMVRVGGDPVTLLRAASPVSAAMSLQVEREWHRVHATEDMAAAQAAAEEHDYARAASILEARRRLLESCASLSSDQQTQALVAELREMQERVLNPRLYQGFGRAYILSGLSSHSWQRATARGDSTELTGLVHTYQTPSMVNMLNRSQALQPEVAEALTRSPTIAPLRSPAPASGSRGTRRGPRSFRPAKSFTGRSS

SEQ ID NO: 65131 - protein, 314 aa, Zea Mays
MWAVHGRESTAAALRLLLIAIACGLVFALLHLPLPDDRARTADPGGQRGAAGGGGARLSVQQGRVREARRLSVVTEETDGQTDETAAEEDERISKSPPDTKEKIWMMQDQLILAKAYLHFASPQGSVHLVRELKLKIKEIERAISHSSGGTHVPGSVLQKIKAMELTLSKAQRTYPHCSQMTSKLRAMMHNSEELVRAHQSESSFLEQVAVRTLPKGHHCLAMQLTAEYFSLDPTKREFPKRDNIQLGGYYHYAMFSDNVLASAVVVNSTIAASKFQIQAEGGSGSEIHFCTQPLAFLFARSVSIFEQGSTLGP

SEQ ID NO: 65132 - protein, 332 aa, Zea Mays
MDLERSPPASSAEAPGDGGGGGAAACSICLDAVLARSAGRSVAKLQCGHEFHLDCIGSAFNAKGAMQCPNCRKIEKGRWLYASGHRASVDIDMGGWVTSDNYDITSELPFGFQWCPFSGFTRLASMFEEREAELTYHTTGDRSSAASSSLVCPYLALRGFLHPVHVPSTSNPGAESTSFRRHATGLEGHATLDLNNAQLFHAIESINHDSEHRHLSNLPVSGIPEYSMTPFGIGLPRYDSGSQQRFRSYAHHHPLIHRPAPRSGSNLVAPPLGSVPAVVAAAETARGSHMYQRSSVHGSPFPPTTTRRVRPRALTITSFIAATSSEPCAWRL

SEQ ID NO: 65133 - protein, 269 aa, Zea Mays
MGGALLLTLLLAAVPLSLGGGGGAHPGYSDDDESACTVDAGAELLRRMEERGPDRRIIDITHAVVPDLPAFATGAVAGPMLRLRESMADGSEYNLSELRMECHTGTHVDAPGHINQAHFAAGLDVDTLDLHVLNGPALLVDVPRNTNITAMEFLNIPRGVRRVLFRTLNTDRKLMWRKGGDMSYVGFTEDGAQWLVDNTDIKLVGVDGLSVASFDHLISAHVVFFKTPDIIPVESLNLDDIEAGIYMLHCLPLRLVGAEGAPTRCILIK

SEQ ID NO: 65134 - protein, 85 aa, Zea Mays
MLMVLVLVFMGNLVGTGSKETVGGGGGRGGGVHKGNRDAVGAGLFSIREEGSCSTGVCEQDISPDADSVISDKNFTAESDITRRG

SEQ ID NO: 65135 - protein, 784 aa, Zea Mays
MIQRMGRTGRKNEGQELQGYRKKQGDCRTMRKLLHNSERFEYHASPRMVPHVYKPEVKYVKLTIDKYIPHAKKMRVAAKEASPIPWKMSEADGQMITRYFSVCKEEVWRPSLVAFPRFQLYPSVVHKVPHSFRTTDMLTDAMKQLQDPSLFRTKCEIPLQEPANVSAVEEGLEHEGLYAANGNEEMPQECDGLEASSSVVWNENVSVPGSPVKKYPVHTFFSGDYVTVDRRGSVLITYVPVLPQKIAFSKDIKSAVWNNKDQNKAKPYRSAAGVCRTTVEFVLGTNTDKHLFVDNLSTVAMHSPECSWHGDNVDDNHVLTTVPSKTLTSPREKMDTPCNVKLPESTYSYQEDMELNSRLTVYMEEGIVPESPVVEVSHLRLEMDEAADFGAVPKRGSPKSRDERAHANVAGSHKGPLNFEKNDQLLCGENEFDGSSRLYMLDQTRAKTEEPMHPSNVKMATTTRHTPGNMLCDSFSGDYQLRSGGDASGSVQQAPKYRRLCKYGDKIKRVSSISLDGCDDRFEECNIANKDRPNQIKHAMGTKRKTKRRLDAYIDEEVGVSEDAYVSEDEDDNQSEDKYEDSFIDDQATPTEFTQTEQGDRHNGDMMGFYRQSLFTQSPVVLPSRYLDVSYNSASRTGNSSYSSEARHNYTETPKEIQTQHHTINPSPSYSFVQDRCERGIANCESSTKLDCRKRRLSFQQPLAIPVINLEPEPAPEPSPHVASRVADHLYFDDGFFENLDLDAIEAQATEQWRQKTTQSTQKPVEIKNASDMSFAPPSFDLGL

SEQ ID NO: 65136 - protein, 1501 aa, Zea Mays
MASPATDNDIGDEHLFDGVRFMLVGFNTYDASQYRSEMVRRGGTDAGPSGNGCTHVVVWNRIYDDPTCVAERAQGKKVVSGLWVEDSLDRGVLADADRVLYWPMRHLKGIPGAQSLLICLTGYQKRYREDMMKMVSLMGARFSKPLIANAVTHLVCYKFEGEKYEVAKKVNIKLVNHQWLEDCLKAWKILPVSDYSKSSWELELMDTHAIDSEHEAEASEPRSLNNRPSVSGNREVVVGRNSNTPVHIVNTEDDNSKTHGIRGRISANSTVAVSANVDVFGPIQSPSVHIMNIEDADINTHDITGQDNPDSSLLPISAKVDILAPIQSSGEKRDTVRTTNSPNLQEVKEKYVGARTQDLASGVLGPQSTSKMPVFRNHVDTLNGTLDVLKGHTDHVSRKYSASHDQTDVAEVLLTSPLRGNQSVDELDSSKVDRWQHQEKDRPSGSHITAAGYLNADAKLNNHEFNPKPRSDSMSNYIKNTNNYKKTSRNSFLQEGYSVNHMVSPQRAEESTLRGYSNLSTLETRQQKVIQPADVQSIAGNENPKREDGLDGACAQKRKSLVSPASINLQTEDLASETGPLDSPFVSRVSDASERIINLVEANAVNLGKERSSFSTSRQARSRKTSLKHGGPINGIKLSEYSSSDKNVKSLQKGRMSFKAMTESKCAMSSSATVQDGKTSAGFPFQDKDGESTHSSGNAANQDCLNEIGNAFTKDPAHDKSVHSSNNSQVVPSYRNASSRIEDPVKVNGNEMAVASNSELEKVVSDATVKESTKQFQDTSRNVQAETSYSKKAPTTIRRNAGVKRHRSADIEAEGSVINSAKKVVPESWPAKGSVINSAKKVVPESWPAKVIHGEHADPASKNGYSTSCAAELKTNRPKKALICRVTNTVAKRTRGACAKKDDARVSSSLEFSKVTSQENFEIISPKKLDTANADEQRRNSPKKIQNTRVRNRATKRSWKSDTNMSNDTVMDKAETVAAGALSDDLLPTDNVEDWPKKLSSHGSVSDCETLSPKTISKARIRNAASNRKIRTVDHKSGDKFGKIGSAVKSETKAFSSNRTEGISCNISKVIADPDSEKSNKDVVREVSGLFCQDSCTIDKQGSYNSKLRSSTRNKAPTPDHEKENRLGSSDLNSKPNRTGSLRSKSDAKSIKKNTRVLSKHQRGNRSEPCTLITSKPALFILSGNSEQRRGYRSILRRLKGRVCRDSHHWSYQATHFIAPDPLRRTEKFFAAAAAGRWILKREYLTACIEAGKFVDEEPFEWFGTGFNDGRTISFDAPRKWRNIRQQMGHGAFYGMQIVAYGQFILPTLDTVKRAVKAGDGAVLATSPPYTRFLDSGVDFAVVSESISRTDAWVQEFISHGIPCVSADYLVEYVCKPGQPLDRHVLFETNCVASKSLEKLTKKQVEMATAEKSEPSEDDDPEDLSCSACGRRDRGDVMLICGDEAGEAGCGIGMHIDCCDPPLDAVPDDDWMCPRCAVPEPETETKHARGTERRGRGSRRR

SEQ ID NO: 65137 - protein, 82 aa, Zea Mays
MKPTSSFAMSISISYLFVSARTTATPPLILLFASCFRREPCESPCGDGVGRPTAASMGHHRRTSSPPSSAYTTRRRPHRPRR

SEQ ID NO: 65138 - protein, 108 aa, Zea Mays
MTVAPNPRCRLLHRKRLFHRHRRLRLVLTRAWMAHAPLSSKCAVDTKLPCLTARSPAPPRSQVLRSSRSTILRPRPITHSPWPRIPAPPYPRPRPRLILPCPRTASNA

SEQ ID NO: 65139 - protein, 441 aa, Zea Mays
MLGFCAPSACSPPDEATPEPFRSLQIATTVAAAAATTKKKRRPAGTPDPDAEVVSLSPRTLLESDRYVCEICGQGFQRDQNLQMHRRRHKVPWKLLKREAGEAARKRVFVCPEPSCLHHHPSHALGDLVGIKKHFRRKHSGQRQWACARCSKAYAVHSDYKAHLKTCGTRGHSCDCGRVFSRVESFIEHQDSCNAGQARAGAGVAAASAGSQQQAPPAMSLSRTASSTSPSSDIAISPVAAWPAGPAPAIPSPASTAAFHWFEQVPSPRTPPPSVHHRGGHNLELQLMPPSCSGAGGDAPPRTPAAPSQSHAAAMAMQLQLSIGVCGDAGDEVLAAAREEEAREQLRQAVAEKAAADEARAQAKRQAELAERELASAKRMRRQAQVELSRAHAVRDHALRQVNATLLQITCLGCRHKFHARPQLDAVPARWPAAAATCPPS

SEQ ID NO: 65140 - protein, 363 aa, Zea Mays
MSKELESKKKSPSVVARLMGLEEDLPGQEPALPSTKRNLKKRHLNGNLVKTNNLHRHQEQYHSSMTTCDKHIGPKETVEFKDVYEVSEEPLRTYHFQDQTFPREMSSRSKRDIRMEIVRQKFMEAKRLATDEKLLHSKEFQEALEVLSSNRDLFLKFLEEPNSTFSKQLAGLHRSPSPPQTKRITVLKPTKFVESDCRREIRTHRINEGNEHVMRRTHWRSHSAEDTLSQPTRIVVLKPSPGKPSRTMARLTTEAAPAQFAEQIGFYGGLEGHNYPSDALHRRDESLLSSVYSNGYGGDESSFGRSEVDYIDEEDSNLSDSEIVSPVPPLHSWDHFKRYSSPHSGSTFSRTSRSPESSVITES

SEQ ID NO: 65141 - protein, 113 aa, Zea Mays
MMRRWNHACAGAGGGDERQHGLLALPAAGRRRRLQDERAAGLHGGLREEGGDGAREGGAHQEQEEAQEGTAGCSSRLGRRQIGGGRVVVFARRPCQDDAVMVFGMLRLMTTTP

SEQ ID NO: 65142 - protein, 463 aa, Zea Mays
MTRVIHDSGDGMQKEALDLVSSDVNFPKGCFPDYRIGPNNQIIDPEETHEAVPLKEVVAKETAQLLEQHRRLSVRDLKEKFEKGLSSASKLSEEAKRREAASLDRQVLLKKLRDVLDTLKGRVAGRNKDDAEEAISLVEALAVQLTQREGELIYEKAEVKKLANFLKQATVDARKVAEEERALALAEIEKARAAIEKVEKAFHVHDSTKSSREEEIEELRKEVREARRIKMLHQPIKVMDMEFELQALRTLISQKTQLCNQLNKEFCIIPRVDGAPNIANCPIQWYRVISGGSRGLISGATKFTYAPEPFDVGRLLQAEIILNADKIIVQTDGPIDNAAGLEHYVDSLMKRTDIEFNVVVTQMNGKDYSSNSVHVFHIGKLRIKLQKGWSTKARELYSTTMKLCGSRGGGNAAARAVFWQARKGLSYTLAFETDRDRNAAIMIARKFASNCNIALAGPGDQDT

SEQ ID NO: 65143 - protein, 304 aa, Zea Mays
MREVVTVQVGGFANFVGSHFWNFQDELLGLADDPGADPVFRTAALDMDVLYRAGETHQYSGDLILSDERAQIRNSVIGSWNLVITGLSCCRSGKVTKSVAKPHERNLFLQSLSEEEQNPSSSDGQNNASVEDKDLVANLENGVKFWTDYSKVQYHPQSLYELYGSWTDFDRFDNYGTAKEVVSEWSQMEEMNERLRFFVEECDHIQGIQFLVDDSGGFASVAAQFLESIVDDYTNTPVMLYCVRNPDSYGSSRNQCETIIRSLHDAVSLSKLSYYCNLMVPIGLPSLSMLLIAYNLLRRLPYNM

SEQ ID NO: 65144 - protein, 212 aa, Zea Mays
MAAVAAHHHLHPSSVAARTPTLGRRHRFSSLPLAARPSSQGRFSFRAATRVLTRAGSTGASSAASPAATTASSLSLEELRGGCTTWTWRGMRVNYLARGQGPPVLLVHGFGASVAHWRRRPTVLVGNSVGSLACVIAASESSREAVRGLVLLNCAGGMNNKAIVDDWRIKLLLPLLWLIDFLLKQRPIASALFNRVKNRHADLNTPPLTWPR

SEQ ID NO: 65145 - protein, 97 aa, Zea Mays
MTVIDILTRVDAICQKYDKYDVDKLNGANVAGDDPFARLYASVDADINQCVDVRSRPLALRQRPGALDLNLTTVCLAFGTESGNGEAREEPGRGGGA

SEQ ID NO: 65146 - protein, 577 aa, Zea Mays
MAREATNAWPRPSPSARKRSKGKRAVLSPAPPTQAAATEMEAEASVPATDYVYDALPGLHLAFSPEETLDDAAAGQDEDDATATYAVFRNEITEAGDVLADIPAADFFSLDVSTSASVEPEPEPEPPSPAPTAAAATPSISRALEDQPPQGSERAWFRGGRRFRSPMLQLHKEILDFCDFISPSTEEQSSRAAAVQDVSDVVKHIWPQCKVEVFGSFRTGLYLPTSDIDVVIFESRVKTPQVGLYALAKALSQKGVAKKIQVIAKARVPIVKFVERKSGIAFDISFDIDGGPQAADFIKDAVKKLPALRPLCMILKVFLHQRELNELVWGGKDILGYHRSKEHNLGILLVRFFDFYGRKLNNWDVGVSCNSSRTFFLKSDKDFMNHDRPHLLAIQDPMAPDNDIGKNSFNYFKVKSAFSKAYSVLTDANLFISLGHNRSILGTIVRPDSVLLDRKGWNNEDMLAEPWEPITQQFDTENDAVYNWHVIDEDEPLPRNSQSTSEDTSSSPSKKRKSPKSRRKSRKKSKATASGSSDVANGFRKDRSSKREAGSSKRRKGPKEYDRFTNTLPKYTHVSKW

SEQ ID NO: 65147 - protein, 437 aa, Zea Mays
MDAAAAASLLPRAAASSLLPRRVLSPLHVSRSGLLPRQSSFLAARCAHSRAPPPHPPLPRADCDDAAAKAHPRLRLRLLAEEFRALPSDADRARRLLSLAAALPRLPEPDRAQGNRVMGCVARVWLVARCNASTGWRMWFSADSDSDLSRGYCACLVAALDGAKPEDVLAVDPADPDLAPLGAGTTAAWSRASTWHNVLVGMQKRARTAIAAREGRHPGKPFPSLVIARDGAVSAQGSYAEAQAMFLSPDESKVSGLVNTLKEKKIGIVAHFYMDPEVQGILTAAKKQWPHIQISDSLIMADSAVKMAEAGCDYITVLGVDFMSENVRAVLDQAGFNKVVVYRMSSEPIGCSLADAASSCEYTHFLREASRCYPSLHVIYINTSLETKAHAHELVPTITCTSSNVVPTILQQIYFREWLQCQMKKLQKFIQTTTENL

SEQ ID NO: 65148 - protein, 193 aa, Zea Mays
MADYHFVYKDVEGASTEWDDIQRRLGNLPPKPEPFKPPPFAPKVDADEQPKSKEWLDVREPEELEELEDDLDDDRFLEKYRKMRLAELREAAKAARFGTILPITGSDFVREVSQAQSDVWVVVFLYKDGIVWKNWLLGIQRRSLLKLSPQTASPTTQIGMFLQYWCITTVLSKGLMLVCRSLVERDAHLNLLR

SEQ ID NO: 65149 - protein, 150 aa, Zea Mays
MLENQRKMVGIFLRRSARPCVIFFDELDSLAPARGSSADSGGVMDRVVSQLLVEIDGLSDNSQDLFIIGATNRPDLLDSALLRLGRFDKLLYVGVNTEASYRERILKAQTRKYKLHKNVSLLSVAQEWFHAAKRSVSISADPLRHMLGSS

SEQ ID NO: 65150 - protein, 179 aa, Zea Mays
MTPYISIANEPAENPLIIVEDPSSSQLCGAKCFSESTGEMRQSSKKSRRYSEIPQDLYARIPDNAASSKDNSKATDVFNPGTPNHLLPVLGLCAPNADQVNSYKNSICAPSIKEHKRASGDVVNKQLSTPADHSNELRNEVQSASDKVIFPGASEEALRRISNMIPDNYFPFSHVRHLS

SEQ ID NO: 65151 - protein, 2173 aa, Zea Mays
MRLSTEHQSHCLHFTCSNSSSSTPLHPFPATVNICGLLVLARAGEQSSSAMREEMDLGDIVLSWSVQEITNDDLYKTKVERIPFSFGSLDDYLRSYMTPLIEETRSCLNSCLELIAEAPSSKILSFKVAGKSGLHSMDVDFWDNGAGFSTETYTARNGDIFVLSNMKPEAADDFNRYGLTYCLAMVTEVSMNDEYQKGFKVKVSNSTGLEGDFSKLVHATFLDNIMANMRIWKALCFDSSMNNNFTIIKSLLAPRNMGEDVCSVCAKKDDCLMSSAELPPVNLNQSQLDAIESIISAVRCRHLNLTKLIWGPPGTGKTKTVSALLWALACLKCRTLTCTPTNVAVVGVCTRFLQNLKEFSKQIDICGLPLSLGDVLLLGNRDNMDISEEIQEVFLDYRVDELTECFSLLSGWRHIIVSMISFFEECGSRYDMLLECDGGSDSVCFLDFLKKQFDVAAKAVKKCMMTLWVHLPKKCFSHENVSNISMVLRLLEKINAFLCDGDLTDESAKRGFDFRSTENSIYEPISYIEKELGDARSLCLKLLKDLQSSLNLPVGVNRNWIQNYCMRNATLIFCTASSSYRLHNAEIAPLDMLIVDEAAQVKECELVIPLRLCWLKHVVLVGDDCQLRPLVRSQVCKEAGFGISLFERLVILNFEKHLLNIQYRMSPCISLFPNAKFYDKKILDGPNVHSSYNKDCTGLLFGSYAFINITDGREQKEGAGNSWQNLVEVAVVMHLIRTIFKSWRKRDQGISIGVVSPYSSQVAAIKDRLGKKYDTSDNFHVRVKSIDGFQGEEDDIIILSTVRSNERGNVGFLADIQRTNVALTRARHCLWILGNANTLYKSGTVWTDLVSDAQRRKCISNATTDPELCKLILHVKNELDELDDLLCSSSAVFSNTRWKVVLSDNFRRSFMKLKSPLLKKEVLQKLVKLGGGWRIPIKNLDVTDAFQLAKAYRIRDLYLVWSIDLEKNERYFQMIRVWDLLSQQHVARTVQHLENLFSMYTDEYLDHCRSVQTEGKLEFPIVWDAEHDIVRYKKDCKVDDQVDHDHLDFSCALENTKVSESFLLMKFYSLSSGVAHHLLTATDGTEIEIPFELTDEEEAIIRFPLTSFILGRSGTGKTTVLTMKLYQIEQHSFIASQGIELEVDLSVVDPKDRLAMDTRKGESFVKQVLITVSPKLCSAIKNHICRLKRFCSGDVSDQPNPLHMYDVIDDPEEFTDVPDNFSDLQHEHYPLTITYRKFLMMLDGTMKSSFFDMFYGDFNPSIERGHSKTRAMQAFIESKEVTFEKFAAFYWPHFNGELTKKLDASTVFTEIISHIKGGYRANMPCSGKLERLDYVMLSDKRFSSLNSKMREKIYDVFLDYESMKRTAREFDLSDFVNSLHRSLVSEGYNGALVDFIYIDEVQDLTMSQIALLKYVCRNFKEGFVFAGDTAQTIARGVDFRFEDVRSLFYTSFISESEACNQVIKHGNHAHLTDMFQLSQNFRTHCGVLRMAQSIMSLLYYFFPSCVDKLNPETGLVYGEAPVLLESGNDENAIMTIFGESRGEHADQHGFGAEQVILVRDVATKKQIVNLVGKQALVLTIVECKGLEFQDVLLYNFFSSSPLRNKWRVVYDYMKTRDVTSSSEVISHPGFDRNKHYLLCSELKQLYVAITRTRQRLWICENADDYCQPMFDYWKKLCIVEVRLLDSSLIQAMQTGSSTDDWRLRGTKLFNEGQFEMATMCFEKAGDAYRENWARAAGLLATADRVISTNLERGQANLQKASEIYESIGMHEKAATCYIKLGDYKRAGMIYMEKFGTKRLEDAGDCFAITECWSLAAEVYFRARCYTKCFSCCSKGKALSLGLQFLRQLEKEQCENFSSDFVAVRKTYLESCALHYFKCGDIKHMMPYVKAFNNVDHIRAFLSSRNLLDELLSIEMEMGNFLEAAGIAQRKGDVLLEVNILEKAESFVNATHLLLLYVTANSLWSPHSRGWPPESFEKKEQLLTKVKEMAKKVSEDFFCLACFEADLLSDSHRSLASLTCSLLEGRKCGNMLVELISARYIIDVHLQSQTSRYNLELEPVSDQLCYNMMACDQMSLETLSCIWNQWKLILVKVLAHLNPSEDIKSNDSAAVCEDLCAKLFGLRKDSDNRYVVLNVDSGWLTNTGRSSLEQDGNRCWLHTVHCQSCARTFMGIRI

SEQ ID NO: 65152 - protein, 502 aa, Zea Mays
MAMAGAGAAAAAAKRCMNPACGALPASSVVVGAGGDWRKGWPLRSGGFALLCDKCGLAYEQFVFCDIFHQKESGWRDCSFCGKRLHCGCVASKNSYDLLDSGGIQCVTCMKNSAAQSASGQVVPKLFPCPNNLLFFGKSDELLSSRKFEQPPSLMLDSRNDDIAIVNKSSHLFMVSGIEAGQSSNILRQKEIENGPRQIKWEQPTLNIGDMGRPLLTRSQSALESPQCTRRDDNKDPTTDSTTSESFPEACLSMNLGIANNGNRMEATSTAERPMLSPTTAIAEGRELTTALSPFQHAQRARHFLTRPPRVGEGAAFDPTRDMFPHLRVARPPAEGRGRNQLLPRYWPRITDQELQQISGDSNSTIVPLFEKVLSASDAGRIGRLVLPKACAEAYFPPISQPEGRPLTIQDARGKEWHFQFRFWPNNNSRMYVLEGVTPCIQSLQLQAGDTVTFSRIDPGGKLVMGFRKATNTDSQISAIANGSLLSETLFSTANESIGVLE

SEQ ID NO: 65153 - protein, 55 aa, Zea Mays
MAPHTSYPSPALSAPHRARIRTAAARIAAGIVGGELSWRPNPFRYCTMASFIQLA

SEQ ID NO: 65154 - protein, 304 aa, Zea Mays
MEPPSRSKSDGSPLEVAGNRLAIEALVRNLSSSSLDDRKSAAAEIRSLAKKSTDNRILLAESSAIPALVKLLSSKDPKTQEHAVTALLNLSIYDQNKELVVVAGAIVPITQVLRTGSMEARENAAAAIFSLSLMDDNKIMIGSTPGAIEALVELLQSGSSRGKKDAATALFNLCIYQANKVRAVRAGILVPLIRMLQDSSRSGAVDEALTILSVLASHHECKTAISKAHAIPFLIDLLRSGQARNRENAAAIILALCKRDAENLACVGRLGAQIPLAELAKTGTDRAKRKATSLLEHLSKLQVL

SEQ ID NO: 65155 - protein, 442 aa, Zea Mays
MVQVCIRLLLMWEIIEKEKAGPVSAMVGNRLESRPISASPSFSSSLVAYKGSAKTFNLVEMERATLGFDESRIIGEGGFGRVYEGILEDGERVAIKVLKRDDQQGTREFLAEVEMLSRLHHRNLVKLIGICTEGHSRCLVYELVPNGSVESHLHGSDKGAAQFDWNARLKIALGAARALAYLHEDSSPRVIHRDFKSSNILLEHDFTPKVSDFGLARTALGEGNEHISTRVMGTFGYLAPEYAMTGHLLVKSDVYSYGVVLLELLTGRKPVDMLRPPGQENLVAWAGSLLTSRDGLESIIDHSLGRSIPFDSIAKVAAIASMCVQPEVDQRPFMGEVVQALKLVCNEGGEFNESTFSQDLHIQDVEVMSRASTDVDVDPTLSAELFTSSARYDAIDAPGSFRRYSSSGPLRVGRTGLNKERGLSTGSSSEHVGLQRFRIDGE

SEQ ID NO: 65156 - protein, 214 aa, Zea Mays
MRVREFCGGCRSDQGGTFKELSVRIQGSRRLLRTRRPFVAEITDAMGNEIFKVRRPFWWINSSIYAEVDGKEIGVVHRRWHLWQRIYDLYLGNRQFAVVENPGFWNWTFSLVDEDDKLLAQIDRNWRGIGFELFTDAGQYAIRFGDDVQSDKFAHLPFIISGYVGAHFSQLVNVSQKLQTKELHVVRQLTLPERVVALALAISLDSDYFSRRGG

SEQ ID NO: 65157 - protein, 69 aa, Zea Mays
MILLTLVLFVVLSFICCDLAKVNSTDGTNDTSICFVNTLRSLLSYFSFKVRCRLKVHIMNRALPSFELL

SEQ ID NO: 65158 - protein, 516 aa, Zea Mays
MSALQASLLLRPLPSPLPPRRRQPLPSAFASLPRGANAPRRAPLRLRALDPIAPQPDASEPPAAASSSAAEAEESESTTMTESTAQPATMSGKEELEDLVGKARAWAVAVAAAVVAAVRRFVDWVLSRNWMSWWPFWRSDHRLQGLIEEADANPNDAAKQSALLHELNKFSPEEVIKRFEQRSHAVDSKGAAEYLRALILTNTIADYLPDEQSGRSASLPALLQELKQRVSGNEDKPFMNPGISEKQPLHVVMVDPKSTGRSTRFAQEIVSTMLFTIAVGVMWVMGAAALQKYIGSLGGIGASGVGSSSSYSPKEMNKDIMPEKNVKTFKDVKGCDDAKKELEEVVEYLKNPSKFTRLGGKLPKGILLTGAPGTGKTLLAKAIAGEAGVPFFYRAGSEFEEMFVGVGARRVRSLFQAAKKKAPCIVFIDEIDAVGSTRKQWEGHTKKTLHQLLVEMDGFEQNEGIIVMAATNLADILDPALTRPGRFDRLSSQVQMCGVAKRFWSSICKISQWQMM

SEQ ID NO: 65159 - protein, 238 aa, Zea Mays
MDLSQALTSSSDDETRALGTLLDMFSSSFSLDDIADAYIKANGDVNKAGDFLYDLQHSLPHTKDVESSVEANLSHTDKAVEENCMDNSSQPRTLLRTEQAVEENHFENSDHTKMPENLHKSSAAFGTVSSMLRKESIRATTTASRASKKGKPLRVELPEYMRDDFKVTSDESDSAPRRETLNNRDVEEFLFCMLGEGFKLSKELIHEVLGSCGYDIKKAADAFREGNQKEVDYLIQEA

SEQ ID NO: 65160 - protein, 527 aa, Zea Mays
MGDLETLNLGKNHLSGQLTDMFSELPKLSTLDLSFNRFSGSLPKSFQHLKDLKTLNVESNQFSGHIDVLAKLPLEDLNLQNNKFTGWIPSKLKDISNLQIGGNQWSSGSAPPGMEKGSALEGSSGGGGRSGVNGIAIAAVVIAVLVAALILLSVLKRNRSSSSSHYLMDESAINMKPLEHSSSISSTTPSAMPIKPISDNEFENKLNYSRRSTDPVNLVAYSSSDLQAATGSFHSSRLLGQGTIGGVYKAKYADGTVLAVKKFDPLSFSGSSDFMDLVNSISKLHHPNISVLVGYCSEPGHYMLVYDYNMNGSLYDFLHLSDDYSKPLTWDTRVRIAVGTACALEYLHDACSPPVIHKNIKASNVLLDADLNPHLTDCGLAYFYEDPSQSLGPGYDPPECTRPSGYVMKSDVYCFGVVMLQLLTGRKPYDSSKPRAEQSLVKFVGPQLHDTNALEALADPGLRGLYPPKALSRFADVLSRCVQSDPELRPSMSEVVQLLLQCVQRTTSNRRLGGHRTVSQRSDDSDW

SEQ ID NO: 65161 - protein, 571 aa, Zea Mays
MAFPADALVLEITDTSSSATAAAARAPSSPSPPPLSISDLALIESSSYFRALLGGSFSESGREHVRVGCNLEAAVQVLRYLFEPSESFNITHNNFLPLLEGALFLAVESLLVECQRWFGTIASQTSAMSVPLDFIIEVWYFAEEHGVTFVQDICQKFLAQNFAHAISGRSFNKIPYDLLCSAIKCPHLTVDSEKQLCEAILYWVSENMKACEQSNPNSVDGHLFILSKVKICLLPLGFAAGTMRHWFDFGNKIICTILDLLKDSLKTLLDAVDDGNLDRYCIRITEYSKNIVLSGCPQVTTAFLYISVLPNDLSVSLKRRIVSSYTQVDHQTFVLYEELEKATKTLSFKNVHMVDISKCPNVHFGAAIDWLKLGFPELRVFRVSHCLSFQFDDLLYLLMRCPWIDEIDMTIDTSTVTPRHSVISSSSEVLSKAKPNQKRYGIHCSAYDRQPNSVFLNISRLTLEGRNDIDDMDLLEISVLKNSLCYINIRNCFLLTDDGISNLLMKCTKIHSMVLSYTSFGNRSIQMLCAANPSGHNSGHAHVMASYMQELHLDGCKGKNNSLCPMPQILP

SEQ ID NO: 65162 - protein, 1083 aa, Zea Mays
MRAVTLSHQELRQSLHGNKLKELRNASVQPELIPEWNRWKQELIKQYFSLHPAGNVGNFEKNNCYDDPALDQQGSRKRPKLEVRRGEIQISHMGEADYRTPTEDPNQNNLPGNSVMHENVGALGSTDQNNSVTLPGSFGTNENTISSSANAALQNARLDLDSFKSSRQCSAHIEAKGRQCGRWANDGDIYCCVHQSMHFLDHSSREDKALTIEAPLCSGMTNMGRKCKHRAQYGSTFCKKHRLQTNLDAMHPENLLDPSEVLHMGEEPPNKWVEEISKSQAMYSIDLETDKKVQDAVKVKLMTIVSIENSGEKGAMEKADMCVASTSITNTDDTSLCIGIHSHDSIVECQDYAMQHTLYCEKHLPRFLKRARNGKSRLVSKDIFVNLLKGCTSRKDKICLHQACEFLYWFLRNNLSHQHTSLASEHMPQILAEVSKNPDVGEFLLKLISTEREKLANIWGFDTNRSKQIYSENKEGSLVLHKEGTNLSSGPKCKICAHQFSDDEALGLHWTTVHKKEARWLFREGTNGLSLYDSHNIEDANGSQKFICRLCGLKFDLQPDLGRHHKVAHMDSDVVGHSSLGRGKYQLNRGRHYYSAFKKSLRPTSTLKKRSSSGIEKNFKFQSSALTSQIIQSETSSFGKLQDFQCSDVAQTLFSKIQKTRPHPSNLDILSVARTVCCKTSLAAALEVKYGSLPENIFVKAAKLCSDNGIQIDWHQEVFICPKGCKSRYNSNALLPMQLTAVDFPEAPSVDPLNDDEMWAMEEYHYVLDSKHFGWKPKNESVVLYEDISFGREKVPIVCVIDMDAKDSLGMKPEELLSHGSSVPWQGFHYITKRLMDSSLINSENSMPGCACSHPECSPEKCGHVSLFDGVYASLVDINGTPIHGRFAYDENSKIILQEGYPIYECNSSCTCDSSCRNKVLQKGLLVKLELFRTENKGWAIRAAEPIPQGTFVCEYIGEVVKADKTMKNAESVSSKSGCNYLFDIASQIDRERLRTVGAIEYLIDATRSGNVSRYINHSCSPNLSTRLVLVESKDCQLAHIGLFANQDIAVGEELAYDYRQKLVAGDGCFCHCGGTNCRGRVY

SEQ ID NO: 65163 - protein, 283 aa, Zea Mays
MEYAAGGELFDRIVDRGRFSEDETRYFFQQLICGVSYCHHMQICHRDLKLENVLLDGSPAPRLKICDFGYSKSSVLHSRPKSAVGTPAYIAPEVLSRREYDGKLADVWSCGVTLFVMLVGAYPFEDQDDPKNIRKTIQRIAAIQYNIPDNIRISDDCRQLISRIFVSNPLRRITMREIKSHPWFLKNLPRELTEAVQLSYFRRDNSVSAFSDQTTEEIMKIVKEARTLPKSSRSGYGYSEECSDEEEKEVESEPKEEEEEAECDKTVREVRESGELDMTSLHI

SEQ ID NO: 65164 - protein, 1114 aa, Zea Mays
MTTSPPPAEQQHEEEEVLVPYGPHLELPNGAQPMEVVPAEPAATVENQQIEDPPISRFTWTIENLSRVSTKKLYSEIFVVGGYKWRILIFPRGNNVEFLSMYLDVADSGVLPYGWTRYAQFSLSVVNQIHNKFTIRKETQHQFSARESDWGFTSFMPLGELYNHSRGYLVNDTCIVEAEVAVCKVVDYWSYDSKKETGYVGLKNQGATCYMNSLLQTLYHIPYFRKAVYHMPTTENDMPSGSIPLALQSLFYKLQYNDSSVSTKELTKSFGWDMHDSFMQHDVQELNRVLSEKLEDKMKGTVVEGTIQQLFEGHHMNYIECINVDFKSTRKESFYDLQLDVKGCQDVYASFDKYVEVEQLEGDNKYHADKHGLQDAKKGVLFIDFPPVLQLQLKRFEYDFMRDTMVKINDRYEFPLQLDLDRDDGKYLSPDADRNVRNLYTLHSVLVHSGGVHGGHYYAFIRPTLSDQWFKFDDERVTKEDAKRALEEQYGGEEETNPGLNNTPFKFTKYSNAYMLVYIRESDKDKIICNVDEKDIAEHLRIRLEKDREEKERRKKEKAEAHLYTIIKVARDDDLKTQIGKDIYFDLVDHDKVPSFRIQKQMAFAQFKEEVAKEFGIPTQFQRFWLWAKRQNHTYRPNRPLCPQDEAHTVGQLKELVNKAHNAELKLFLEVELGLDLKPLPLPDKTREDIFLLFKLYEPEKEQLRYVGRLFVKASGRPQDILPKLKMLAGFSQDDDIELYEEIKFEPNVMCEYIDNRLLFRSCQLEDGDIICFQKSSKADSADRYRFPDVPSFLTYIRNRQVVHFRSLEKPKEDDFFLEMSKIFTYDQVVEKVAEKLGVDDPSKIRLTSHNCYSQQPKPQPIKYRGVERLLDMLIHYNQTSDILYYEVLDIPLPELQALKTLKVTYHHATKDEVSVHSIRLPKNSTVGDVLNDIKTKVELSHPNAELRLLEVFYHKIYKVFAPNEKIENINDQYWTLRAEEVPDEEKNLGPFDRLIHVYHFTKDTQNQTQVQNFGEPFFMVIREDETLSSIKERIQRKLKVPDEDFSKWKFAYISLGRPDYFEDSDTVALKFQRNMYGAWEQYLGLEHPDTAPRKAHTINQNRHSFERPVKIYN

SEQ ID NO: 65165 - protein, 74 aa, Zea Mays
MTMVVHHAGAVHTGDPCHVIGGNQPSLLSCVGRRRTGHTVVVVYATAEVWMGCGGKDPSGTTVAGSRPPYPGMP

SEQ ID NO: 65166 - protein, 323 aa, Zea Mays
MRAEKRSRKAWLAAMPVLFGATKGAEVCSFKCQIAHWRQGHKDECHPPSVNTRHDDEEEKAEVGRAAKENVSVGVKQVAEMNKPDVGSETSDANHDLKSSNGKSKHMPSKAVCSSVEIPGGHKSNNTVEISQNVQSVDSSKMGSSIKHANFVEDGSSTEDLNEEYQRAKDATVVEDCSQTNSTRANGATLSPTGILSHLNDIGSSFGPEMLQEAGAAHTYIESFAYRLYILIIRCVAPPLVPELDRDAVAPAGSGDRKAAKLGSWSSMSSNRGSKKRKSSSSSFGRRSTSTCEERQGVFRMLMSWNQESRFSNKIKTTTSKER

SEQ ID NO: 65167 - protein, 180 aa, Zea Mays
MGRGKIEIKRIENSTNRQVTFSKRRNGILKKAREISVLCDAEVGVVVFSSAGKLYDYCSPKTSLSKILEKYQTNSGKILWGEKHKSLSAEIDRIKKENDTMQIELRHLKGEDLNSLQPKDLIMIEEALDNGLTNLNEKLMEHWERRVTNTKMMEDENKLLAFKLTTFTLMLKSRVPHTDI

SEQ ID NO: 65168 - protein, 808 aa, Zea Mays
MEGEEDGSGSAVQRPPPQQQQIRVVRCPKCDKLLPELPNYSVYVCGGCGATLQAKKNSGSDTSSDKSDTAEHVKYLEVLESLPDKKGVASEASCAVREAETNKIEAGSEERFVPSCCTMKLEPALGDDSREVREAKYRRIRHEGKGEAKQPATARDRSPRPVVNSIPSNADPVEGPFECHMRPGFIYANGEKGHLSDRNFDDPSTRVSGLEKDRTELLRMLDELRDKVQRSCEIADKSSVNASTNRMVNPTSSCIPHERLSRLRYGSPQLQRNGSQHSPSLNGQTPGVPPAFPSLSVQQDLHGYGESVAHTGAPIYPAAPYPWRNFDNYFQGHYDPDPLISYHHDGFYHQPACSCLHCYHREFLPVRRAPYLMNNPSLYHAEGPVMFGAQNYNTRGMNGMMRRSHMRATLSKKPAQTCEPIVNGAPFTICYNCYEVLQLPKNSLLLGKDEYKLRCGSCSHAIVVRLDGSRLDVSAPTPVSHLSPGSKNYYNNGQANNGQNADERLLPSYSFSAGSHCSQEKDLPSNSSEPDKTQCISSASISEDDNSPARSNSQKNSSGSRDVPHDAEVVIRVPTLPLRDHFGYSPSDRVVDGPGKGSRSTRSEHEKGVLTESFKPNKVKCVPVASVLDPSDDEYDDPEHSQDPGGGAQYVDHLRATKSGDSFFSSLIKKSFKINGGMGNGRANVFINGYPISDRAVRKAEKIAGPVYPGEYWYDYRAGFWGVMGQPCLGIIPPYVAEFNYPMPKNCAGGNTGVFINGRELHQKDMDLLVGRGLPDSPDRSYRVEISGKVSDEVSGEELYCLGKLAPT

SEQ ID NO: 65169 - protein, 563 aa, Zea Mays
MAKLHCQWESEGRNPNSSTFQIHIPPLCLSPVTPRRLRRDPEMDVAATPSRSKSKPRSSLVNPVAAPAESRMDLCTPSKPTPRRNSKSTASPAPMSPSTPYTVRRSRRLLETPTKAALEVQVKATLTPTSKGKRAAPSPKTPAQHEPKRQKRHPRKRAYYRKVVYDGGEFEVGDDVYVKRREAAESDAEDPEEEECRVCFRTGGGVMVECDACLGGFHLRCVRPPLRRVPEGDWACPYCEAERAGKVVERPRPPEGKRIVRTAKEKLLSSDLWAARIESLWREPDGTFWAKVRWYIIPEETAAGRQLHNLRRELYRTNDLADIEMETILRHCSIMCPKDFRDANDGGDDVFYCEYEYDIHWHNFKRLADIGDEPETKEDPSDEPYNASDDYNSDTDEDSEYDEVEEPTSSFSARGNQSHELAANSRKGRIYGLQKIGIRKIPEHVRCHQKTELEKAKATLLLATLPKSLPCRDKEMEEISIFVKDAICNDQCLGRCLYIHGVPGTGKTMSVLAVMRRLRSEFDSGTLRPYCFIEINGLKLASPENIYKVALKLESKQTSQLFC

SEQ ID NO: 65170 - protein, 486 aa, Zea Mays
MTPCALTVDSLNPKVLALADHLGDNAIARRAQCIQNEIEAEPESHPFREIIDCSLSNPQSMGQRPNKFFREVLALCDYPHLLEQSGTNSLFSSGAIARAREILDLFPGRATGGYSHSQGTEGLRDIIAAGIAARDNFPCNADDIFLTDGAAPPVHMMMHLLIRDKKDGILCPVPSHSLYTSAMLLQGATLVPYFLDESRGWGVSMSDLKKQLDSARSMGVFVRGLVVINPGNPTGHVLVEENQREIVDFCRNEDLVLLADEVYQENIYADEKGFHSFKKIARSMGYGEGDISLVSFHSVSNGYYGECGRRGGYMEVTGFNSDVKKQVYKVVSLSSCSNISGQILMSLVMNPPQVGDESYASYQAERDGVLSSFARCAEAMVRSFNGLEGVTCSEAEGAVFVFPSVRLPKKAVAAAEASNTQPDAFYALRLLETTGIVVVPGSVFGQMHGTWHFRCTVLPHEEKKTMTVIISSFVAFHRAFMEEFRD

SEQ ID NO: 65171 - protein, 794 aa, Zea Mays
MTNDKCDKLQTLFSEDDWKLVQLVLTLFRNVLAIQEITLTQKASGEATHLLFLSDNFLELMFQENVMDIILVLTQHIDEPSGYLKEENLLLMEIYHYLFLGRDPGLIARASNKGLKDRVNGDIVSSVDSLRLMMEEEERKKRMFRQLNSEHSSLSGTFTCFSVDGSKSLCKGNPSSASANSLLKIRNVQRGPQKRIAWDNELLYVPKEGITEMLRSFMDQFLSGAYNILMQSVCGDIMDEHHSIEKSDITTFFKVARFVLAFQHEKASNDQLPQLYLGLFVMNIITMSIQKSAKGIQPSGVSPSNEPDDNLPFHGDICGPVAATLNEDMFNIVISRWRETYEALKETNDYKTLSAAGSLMKNMIDMIYLVLKVLPEDSRESQTARVLLYKLFYDQTEHGLTQFLLNLFRSFDSHKQPKSDLVDLLETIHIMLQLMEKLQARGALRVAKKTKKVRRKKSTNDKKENSEPKVDNAEPNDANPTDGTKCSPETLPDLRSEGPALESSPSEPGKVDTSGAHVLDTLVDTVVNIESTAHAEGDPSCTDSGVMKRNLIEEEGETSDSSVDHQPATSEVDFNVSRLISSLANNSVVQNICWLLKHYKSNSYRTNHYIICMLRRFCEDLELSPMLYQLSLLTTFYDILAEQKLSSSKEYTNIVNFLSKVVRKMLRTIKKQPLLFVDILFWKTRKECHCIDADALLNELKNDVGSKDSEIGSSKGWRDRINIADSLGDDEVDVVIPQAPYDADKDGDLSAGEHTDDFRKSSTKYKRSRLSLSDSEADEIERFLYALLYLNTAN

SEQ ID NO: 65172 - protein, 738 aa, Zea Mays
MSSSSAASIGQPPPPAPPPEEEKKCLNSELWHACAGPLVCLPTVGTRVVYFPQGHSEQVAASTNKEVDGHIPNYPNLPPQLICQLHDVTMHADVETDEVYAQMTLQPLNPQEQNDAYLPAEMGIMSKQPTNYFCKTLTASDTSTHGGFSVPRRAAERVFPPLDFTQQPPAQELIARDIHDVEWKFRHIFRGQPKRHLLTTGWSVFVSAKRLVAGDSVLFIWNEKNQLLLGIRHATRPQTVMPSSVLSSDSMHIGLLAAAAHAAATNSRFTIFYNPRASPTEFVIPLSKYIKAVFHTRISVGMRFRMLFETEESSVRRYMGTITEVSDADPVRWPSSYWRSVKVGWDESTAGERPPRVSLWEIEPLTTFPMYPSLFPLRVKHPWYSGLAALHDDSNALMWLRGVTGEGGFHSLNFQSPGIGSWGQQRLHPSLLSNDHDQYQAVVAAAAASQSGGYLKQQFLHLQQPMQSPQEQCNLNPLLQQQILQQASQQQMVSSDAQNIQSVLNPGAIQQQLHQLQQMQHTHNDQKQKIQPDQQYQVASSAVLPSPTSLPSHLREKFGFSDPNVNSSSFISSSSNENMLESNFLQVSSKSVDLSRFNQPVVSEQQQPQQQQAWKQKFMGSQSMSFGGSVSLNSPTSKDGSVDNKVGRDVQNQSLFSPQVDSSSLLYNMVPNLTSNVADNNISAFPSGSTYLQSPMYGCLDDSSGLLQNTGENDPTTRTFVKVSIIESTKNKFKPFLM

SEQ ID NO: 65173 - protein, 476 aa, Zea Mays
MYEHLPAFPIAPAAVGDCRGIPFDPSFLPRLLLSATSCTSPFLAERAVSALHATGLKLGALPSSLPASNALISAYSQADLLPSALRVFSLLSHPSTASYTTVLSALSRHGRPHEAISLFATSASAVAPDAELLSCLVSCCRRASALLPARAAHAYGIKNVAALAFYASAGPALVALYASRGKVGAARRVFGYMDGLDVVSWNAMIGGFASAGMDEESWACFREMHSRGVRGNARTAVVVLGSCDMESGRQVHGTIVSSHGGSSNAILWNALMSMYSRAGCVTDAERVFLEIVKKDVVSWNVMIGAFAKNGYGERALEFVDMVLQCGMKPDSVTFTAVLMACCHCGLVDEGLVLFQRFVSVVGLVPTMEQCACIVDLLARAGRFLEALEFIGQMSVRPNTVVWGALLSASKMHHNVEFAKIAFEQLVQVEPENAGNFVTMSNIYAKAGMVEDAKRVRMMIDSVELAKPSGKSCVEIL

SEQ ID NO: 65174 - protein, 579 aa, Zea Mays
MTLASCVASCTRQSETNDVPCAISGKAVTKCDGCVPTEVRPTDLLDVLWILSERSKQHFNPKYRLKVCEQVIQVATSLINATEIPLNQLLHFIATIPREFTDYIGPLRVVVQKWFFQKEECSPGDTLLSKLIDFSATFVSQKRNEGSNVFDDEDVDAWEAEARRWARTLLLVTEEEEHLKRIFRFLEAYGYKLSEQCPSGDFIPIKFFIIVLSFIEELELRQRKLVCRSNTILRGSDTLNGLVLDDLNKMFTESLLLILENMVAFSKLSCSIFWLDVDNKDLPPSIKGKLGGPSQRRLATSITSSVLQGIWSMRCVSSVASWCNPYNSDDSVSSAFSVLWDFYLNVTHHSTIANEIGAELHLAAYEALAYVLAVLSTASSTQFLDFVEAKQTDQAHKFSLDILVTTFLDNINHLLTEGTLTRSRRAVLMTWKWLCMDSLLSISSCYSDNESQMKRLEPLFSDSTLRCIFLDIIESLENTGENSVLSILRCVRSVLRLLHLNEGNTIFSSLGISYEMMMQLAKSSWILHLNCNKRRVAPIAALLSAVLHPAIFCNLEMHQTNEKGPGPLKWVSCEFSHCL

SEQ ID NO: 65175 - protein, 262 aa, Zea Mays
MHAMWRPQKFKAIYLMATLYVLTLTLPSAASVYWAFGDQLLTRSNALALLPRTAFRDAAVVLMLAHQFITFGFACTPLYFVWEKLVGLHDCRSLCRRAAARLPVVVPIWFLAIIFPFFGPINSAVGSLLVSFTVYIIPALAHMITFRSATARENAMEPPPRLLGRWTGAYMINAFVVAWVLVVGFGFGGWASMTNFVRQIDTFGLFTKCYQCPPPPPLPFPGGGLGNITMPFNGDGLPPTPAPSPAHYFFRHHRHHSHHRGL

SEQ ID NO: 65176 - protein, 292 aa, Zea Mays
MAAARRIDLADRWRRMQEDEDADDGGESSAAKHRRLIRAKEEWFSHCYTFLINLPKEDHIWCGYADIMSPFMETFHGFFDDEDENSSLRIMWTRVSREMGICTQCVCEHHQAQGFFNTEYQSDTVDPLLKVLRLLDEERITGHLIHINTKLQLKEYDPSCHGAEVVSIMFEVLMYPVLLDDQSLANQFQMFIEKIDETYEVSLSTNQQYPGVYALLFFKSCKARAIGLRLARSMGKLRRAVDLEPLQPLLQKYIIFLEAEVLPSTSEHSRPRVQLKRADVWLGFKSLYPWIS

SEQ ID NO: 65177 - protein, 123 aa, Zea Mays
MVAERALFLWNNEHLFDLISQNCQVILPIIYPALERNARWHWNQSVLNVTMNVRKMFFDMDERLLLACQTNFQEEEKKRAASEERRRLVWEHLERNAAFHPVTGDIGFAVPPTSAPLVAPTMT

SEQ ID NO: 65178 - protein, 63 aa, Zea Mays
MMRPRQRPRAQHFSTGLLPTGKDSMVLGGEIHGYGGGRHWVWVVARERGAWPRVLYPRLGATT

SEQ ID NO: 65179 - protein, 156 aa, Zea Mays
MAATAGGNKIRNAKLVLLGDVGAGKSSLVLRFVKGQFVEFQESTIGAAFFSQTLAVNDETVKFEIWDTAGQERYHSLAPMYYRGAAAAIVVYDITNAASFTRAKKWVQELQAQGNSNTIVALAGNKADLLDTRKQRRMLKRMVSSSWKLLPKQLPM

SEQ ID NO: 65180 - protein, 141 aa, Zea Mays
MSMKIRDKARRFITLIDELYNHHCRLICLAASSIDDLFQGTEEGPLFDLESFQFETESEGTKLRRDVLAEGNAGSGPSTTGLVAILSGQEEMFAFRRAISRLIEMQTPLYLERVLAVHPSFRRPGLARNNRPAVPQPAPAV

SEQ ID NO: 65181 - protein, 281 aa, Zea Mays
MEVAAAATAGAGVVELQLDLLEAAAPTEREAKRRRVHPVPAGPPAGAAAPGRRSCSRRRRAVQRLFQACRHVFRGPGTVPSPGEVQLLRHMLDRMRPEDVGLSPDLSFFRARDATRGGGTPTITHTTIYKCPNFSMVILFLPRNAVIPLHNHPGMTVFSKLLLGSMHVKSYDWLNTADPDPSSATSTTSSSSSDGPCLRLAELVVDDVFTAPCDTSVLYPTAGGNMHRFTAMAPCAILDVLGPPYSIEEDRDCTYYAELPYAHHSPTWARTYCGDYTHQQI

SEQ ID NO: 65182 - protein, 513 aa, Zea Mays
MCNWDARKALLDFDWASHDNTHCDDQSVWRCTDCHVLDCEDHKIASISNKEKSFDLHEIFKTLPGVRMEKNMQVARITPDERALELGIWSVPDDVLHKVLILLKPRDLVRVAATCHHLRTLAATVMPCMKLKLFPHQEAAVEWMLKREQNVHVLAHPLYKDFCTEDGFPFYINVISAEISTGDAPTINDFCGGLFCDEPGLGKTVTTLSLILKTHGTMAYPPQGVDVSWCMHKPDKKCGYYELSPSFSSNRNSSSVSKKLLGEDVIADCPSPDDSVCSTRSSRKRGRLLSPDPTKVMLHAAIENSPSSSNSKVQPMPAMHILKFTKNSRQVRKNPMDAYSDVSVGNKRKIDTTSEVSETWVQCDACRKWRRVSDGTVLDSTTVWFCTMNPDPTRQKCTAPEESWDFKRKITYLPGFYKKNSLPGNEENVSFFTNILKDYVTMINSETKKALLWLAKLSPTKLLEMEFVGLTRPVLDTRATTGKGAHPYYKIFQAFGLVRKIEKDTTPCVLGYP

SEQ ID NO: 65183 - protein, 130 aa, Zea Mays
MNPGRHRVNPSLSGHGCSTGQHMKLLDSSQTPKRQSWTGTMLTASLLSTLSSAQALAAEKCVAGGFDRGGRAVSDRTDRFEVRDAGVGRGGGLLWPWRPAQRDEASASAQDRRGNTRWGNRLEESEMCGR

SEQ ID NO: 65184 - protein, 868 aa, Zea Mays
MSASASAGKLAAALHRRTRRVTSALACAALEWVLIALLLVNGLLAYAVARFADYFGLSPPCLLCSRVDRLFQAEGGGGGDASGAGARWLRDALCDAHAAEISALGYCLRHRRLAEAGEMCVGCRPSSWKERTSDAGACACCEAAAVLRASPVRELEDTTRDARVSEKEVEDGDQGYVLLAQDDHEEEPDEVENRQQEPQSEVDGRQHLEDEVMAAVQDESLEFMDQVEDITIEDDRLVSVVALDEMTIADDSGLHRDVEEVDGTNHVVEDEQDPRDVDVGAVLEEKRMLDSSVATPVDLTEDSVVPTSPVPCPETSTDPSHPDHSSVSQDDGDVLEDTSTAEEEHIFVPQVSEAVSEDDNRTAAEVDTNCEVSIGSDICEREQDEHVVPFQDLAAFEELVAPLATGDDLPLPSEVLEPPDQEAGEVEQEDVTTSTGLDLQPNEQNEIEEDRAPETPTNSVATQRSDRMFLLERKRSLSLSLDGSVASEMEGSEPSTVDQLKSALQAERKALGALYAELEEERNAAAIATNQTMAMINRLQEEKAAMQMEALQYQRMMEEQSEYDQEALQLLNELVSKRAREKQELERELELYRQKVQHYEDKERRRTASFKANGVSPSGSGTSVSSSGEDSDGHSDDYCELGDSPDGGNVQSSSDAALSSMRDQDDGTKHLAALDDSLTYFEVERLSILEELKTLEERLFTLEDDDINTSKEVTGHSSSDMDLPHDGLQSPEYILTGDRPRFGGRASISRGKSLLPLFDAVGDEACDRMPPSAGAGEADQADDAATKPASVLVKEQERLAIIEEVDHVYERLQALEADKEFLRHCIKSLKKGDKGMDLLQEILQHLRDLRSVELHVKNAGGAMAANSA

SEQ ID NO: 65185 - protein, 1447 aa, Zea Mays
MKCHSVAALWSPLPPSHHVTAAATTPVALFTGAADGTVLHWPLALASASPSPRPSSLLCAHAAAITSLCPLPSPASLLVACTAGVLSLFSTYAPLRCLRRRSLPLWVGSPSLIASLPSITSADPRVAILCHAPDDGHRHVSALVVVDARTLAVLYTVFHGILSVGTPNAIAVSGGGDDAVSVVLADAQGRVQVMPVAEGAAVEVDPPRRLIVSSVASVASAELADERVEAVALSHDGKNVALVLKTRCLLKCVTEGVVLGEVSLLGTSLCKDKNTVDKVCTAGAFFLSSDEWDAHVSDDGVVVRNLVLWSNNGAVTMYRIALGSSYFDSEIVCEIPSNLSMQGEGLEVKFCWSNQHLVRVECCSYKVAGSLLWKPTVAIWCMDQFELSKTVNTQKPPMRKMLGEGGLQGEEFRPEPSHSQYNINRGSEVISQMCSLERYRGTVSSSMLLSEDSYAPYAVVYGFHNGDIEVIRFLNLSPAAAKFGGRGLYPHISERLFLGHKGAILCLAAHYMHAHPDSRNFHRALISGSLDCTVRVWDLDAGTLLSVMHHHVGSVKQIVLPPPWTYHPWDDCFLSVGEDGLVALVSLQTMRVERMFPGHPDYASLVAWDGVKGYIACLCKNLHSCNDAGSGLYIWDLKTGARERVINGTASQLAFEHFCRGISKNTVTGSILGGTTSASSLLVPIFEDMSHIRSHADKNGHDISSVSTNLHNGCTDSVTVNAPTTYDFKGKTPAPDEAHEFHGDNSVYNSGKAVSSHSIHNKKIKCPIKCSCPYPGIASLRFDLTAIMSTQGMTNSNSDRHLKDHLHSENPKEMLQPGTLDSPSRVHEMDSPSRESLEGCLLRFSLCFLHLWDVDCELDKLLVDEMQVCKPEGCHIATGVVGDKGSFTLMFPGKEATLELWKSSAEFCAMRSLSIISLAQLMIKLSRSCTNSSSALAAFYTRHFAEKVPDIKPPSLQLLVSFWQHPSEHVRMAARSLFHCAAPRSIPQPLRVNKNKVVNAPLSSSDNMNVLICAVQTASVSNHGELKEDDENVDKDDIDTANMILWLESFENQEWLSWIGGTSQDAVASNIIVAAALVVWYPSVVKAKLSSLVVSQLIKLVMSMNDRYSSTAAELLAEGMENTWKACLGAEITHFMSDILFQIECLSTAPSSNAINKTAVAITMREALVGTLLPSLAMADVTGFFGVIESQIWATSSDSPVHVASIKTIIRVVRGAPKSLVPYLDKAINYILHTMDPSNLIMRKACIISSMMALREMARVFPMVALNESMTKLAVGDAIGEIYDGTIRVYDIESVTKIRILDASGPPGLPSLLAGSSNRTTTILISVLSFSPDGEGLVAFSENGLMIRWWSLGSAWWERLSRSLTPIQCTKLIYVPPWEGFSPNSARLSIISSILDDKPGRSEKELGEADNLKLLLHNLDLSYRLHWIGGKTIKLTRHGQDLGTFQL

SEQ ID NO: 65186 - protein, 346 aa, Zea Mays
MHGAPLYIAETSPSQIRGTLISLKELFIVLGILLGYLVGSLEIDNVGGWRYMFGFSAPLAAIMAIGMWTLPSSPRWLLLRAVQGKASLEDNKKKAIQALRTLRGRTASEKVLADDVDDTIVSIKAAYAGQEAEGNVWDVFEGASLKAFTIGGGLVLFQQITGQPSVLYYAASILQTAGFSAASDAAKVAILIGLFKLLMTGVAVFKVDDVGRRPLLIGGVGGIALSLFLLAAYYKILNNFPFVAVGALLLYVGAYQVSFGPISWLMVSEIFPLRTRGRGISLAVLTNFGSNALVTFAFSPLKELLGPANIFFLFGVIAVLSLVFVILVVPETKGLSLEEIESKILK

SEQ ID NO: 65187 - protein, 208 aa, Zea Mays
MSEQAEQGFYFVGKHYSTLLKQKLQSLIGDEEPSPQTVEVIMGRKLQVSLGANGCAYFPFEDLCDRPLGAADYFGLFKKFHTLALDGVPKFGSSNRTAAYRFVTLIDVMYENKARLLCTAEAGPVELFENIMTLAEAQKVSPRSSRSQKSDDPDLCVDNELGFAKDRTISRLTEINSREYLEDFEMRLGQQQLLPLQALDNGGDVVLA

SEQ ID NO: 65188 - protein, 391 aa, Zea Mays
MKTTKGGKAMNPTDAFRKEQRKKELKRNKKERKKVRDVGILKKDPEAIWEQIEKLEKMKADGALDKARKHKKRQLEDTYNLIVKKRKEYEQKMKEKGEQPIMFSHLAPPKRRPTGDEDGRANPKPEDSVYYHPTLNPSGAPPPGKPPMYKSSIGPRIPPPSSSSTGASSSMSESEAGPTTLPPPPPPPPLPDTSESIDPPAPPFPLPPLPPLPPPPPKPNSDAALPGLPLPPPGPPLRESVSGHTVLPPPLPPSQRSSNPPPASSANESKTDSAWPLVVLPPPPPPPGLSPKSYDMEAAGTSKDTPGLKEDTAARVLPPPPPPSLPPLPPMQSDMLSPGVMRLPPPPPPPDSRPSLMAPGVSRPPPPPPGFPRLKCQYHHMHPVWFSFFFD

SEQ ID NO: 65189 - protein, 313 aa, Zea Mays
MASRPPLRTTSVASVFSSTDSSTSTGPPGGVPQSITALLNNPLPSSAASSYSWLSWPPTTITLPDAAPPPPSHPCEITRADFAPYLAAVSDPFARFADIRLHAHAELAASSDAEGAPAASSGLAACLREVPALFFKEDFALEDGPTFQAACPLDDDALQERLGQHLDVVEAHLVREIALRSESFYEAQGRLRGLDGEIVTAVGRIRELREVVQVLTGDLVGAARQVQELNATRGNLVALQQKLTVILYVSQALTALKLLVAAADCAGALDVIDNLQNLLDTDELAGLYCFRHIRDQLGTSLDSVNRICACCCS

SEQ ID NO: 65190 - protein, 57 aa, Zea Mays
MICPLPGVSRERRHRQIRIPESSETEPLRGKNNSGRSDAPEHEARPPRPKSRTFSSK

SEQ ID NO: 65191 - protein, 346 aa, Zea Mays
MASADAGTCPWDALPLHLQERILSLLPITELLPVAAVSRAFHRLLRSPTFHALLSPHRLDAFFLLSPRLAVHPLSRRVRTMPAFAALSPPSYPLVSSPSPSLLITCASLQFLPPIPDGAYLLSAIVPSRGSSTSCTLVAVITGAAARSYTLDTGDPSPQWASRGDLPLSLTLLENAAVSGDRSKLFVLGRGPEALLVFHLVTGTWEVLHVVMPQGLTTAHLFLFDGSLFLVGGIESFGVVDRVVVWRLDDDKVEEVWWREVSVMPTEVFDELLAGRFGRFWHFQAADRLGIVCLYNAVDRRLVMFDAADGMWTVLPRLSALDACESFRWFGHVLEPGVEILMGLRW

SEQ ID NO: 65192 - protein, 137 aa, Zea Mays
MGRLCCFPFIERGRGEEWSARGGREAPTGLHGAIDASVSLHGVNGEQWERKNGCFDVPLTRRRRTVAALGLRGRGWAVDVAPWRCSAAWRAAAGARGSRLGWRARRGCLAPARERAERGESGRERNVRERDVRERGT

SEQ ID NO: 65193 - protein, 159 aa, Zea Mays
MARLLVMILLALFLLAVAPAQAARFTNHAGGLRARIGEAPALEAAQVSAERTTQEGQIWRSLLRIVGVDASVFFRMPVKKTGMGAAGEFTYASLEKTDVGLEGGIARSVGGRGGGHGGGMGGVRVRFAGEAGARGQGWGCGCGAGASGGTELWTTSLAS

SEQ ID NO: 65194 - protein, 181 aa, Zea Mays
MTLYLEEANDLLMQIPIIINEVCSHCNIVVLLLRSPTISVQVHRDGGSKRGQAMDINFLKPAFSPNAKGSSSCMTISLKACLSNSGSYLHALTPCPSVACKVPCLLSLFSLWGLRLHVLKCFRILDVPLVVVSAQILWLQYLHCPFFTMLFASFILMKCYHISERGAITFLSLPLFSPSLT

SEQ ID NO: 65195 - protein, 87 aa, Zea Mays
MAQTAILRRQVDYRLRPALELSPRLTVAPAPKRQLTPNASAWCLSPGGQHVRLGASASASPIARATSYCRGRARGLCRAWRVSTPHG

SEQ ID NO: 65196 - protein, 157 aa, Zea Mays
MEWSHTKHVLIKCGVCLKHISTTIYEHSVGVHDCMAHGSANSGRACRAANRGRRILRSIPRPSSSLPPHGGPSSPSNPPPSPAGVPFFPRVAARTRTRSRLPSHPPPLPARLSASLSSPRAAARARTRSRLDAEGTTLCLPRLRPLVASTTPPLPPR

SEQ ID NO: 65197 - protein, 257 aa, Zea Mays
MSLFTHSDQDDELRISSIFTRAPRPPAPSMSSPFSAASVAAGSEAAAGTRKLPVLLFDVMDTLVRDPFYHHIPGFFQMSMKELLEAKHPTAWSEFEKGLIDENELAKKFFKDGRSFDLQGLKECMVRAYEYIDGVEDILCCLKKNNYEMHAFTNYPVWYQLIEDKLKLSKYLSWTFCSCRTGKRKPSPEFYLQAADQLNVDPASCVFIDDRMINIEAALSVGMVGLQFKSAEALQKDLCALGVELSPLVCEGEAQVQ

SEQ ID NO: 65198 - protein, 1158 aa, Zea Mays
MIFGIALGFNLLFEYDDLITGICFATVVPNLLPYAISHLGKKMEGTINACIAGFALLSYVLGLLVSQPQIPLTMNVIFPKISGESAYSLMALLGANIMAHNFYIHSSVVQGQKKSSAVGLGALFHDHLFSILFIFTGIFMVNYVLMNSAAAESTNTLLITFQDVVELMNQIFVNPLAPTIFLVVLLFSSHIISLTSAIGSQVISHHLFGINLPLSGHRLLLKVFAIVPTLYWAKVAGAEGIYQLLIICQIIQAMLLPSSVVPLFRVASSRSIMGAHRVSLHLEILVFLAFLLMLFSNIIFVAEMLFGDSGWMNNLKGYTGSPVVLPYTVLVLVALISVAFSLYLAVTPLRSGSHEAESHEWSVHSQRELLNTSQEREDVKVDNVTYEEDQRSDVVPSPRDVPDSHPELALDYIDTSDTAVESDHDSQQSTAYASTAPETCSSPSFTREESKSVVAVNWPEPLEKVPTSTVMEESTVENVVSRITTERDVLVETDVVSGKDKEDIRTLESEKSIVDSTPYVSDDGPPSLTFSRGKGSDAGNGSGSLSRLSGLGRAARRQLAATLDEFWGHLFDYHGKLTQEASTKKFGILLGIDLRTPSTSVRTDKQAAEILKSPLVRDSMRGAAFLSSSVDMMSPKNETSNLELAYGLQRGPGMGLSSWSQGMQLPNTQLQSSSNSLLEQSARLNSNFSSSYSDNNQFYQPATIHGYQLTSYLKQMNASPSLYSSMPLDPQRLPKSSVSAVPNYADSMMHARNHNLLASLGGTTTQLPATSRVGSMMPERSYYDPSSVDGNENAGSPAYSKKYHSSPDMSGIIAASRAALLNEAKLGAAIGPQSYLSRLAAERSQYASSTARPAAPLAFDELSPPKLQSDIFSAQSSMRPSARSLWAKQPFEQLFGMSSAELSKGDFNLPGRSGGVAKDDFSYKESETKLLQSLRLCIMKLLKLEGSGWLFKQNGGCDEDLIDRVAAAEKLLMQGTAENQLLLHGGDLQQHSSDQAGIQYMRTLPNCGEDCVWRASLVVSFGVWCVRRVLDMSLVESRPELWGKYTYVLNRLQGILDPAFSKPRGALTICTCLQKDTRVRNSPPHSGLTAMGPVPTPIRGAFTTAGVVLEMIKDVEAAVSGRKGRSGTAAGDVAFPKGKENLASVLKRYKRRLASKGQ

SEQ ID NO: 65199 - protein, 119 aa, Zea Mays
MMIHGAAGQTFWWNHIIEFAGINGVLYFSSLTFRDVGISSGALASLYVGITNFGGALVASNLMDKQGRKKLLIGSYLGMVHFYFCNWCWTSYRYHYTRAQQCSDTLKSYGLQFHCALDM

SEQ ID NO: 65200 - protein, 424 aa, Zea Mays
MMHHLVGSNFKQLKDVAYAVDDVVDEYQLKAERNDASGDGDFVSRYMRRKPESFIFQCKAAKKIKAIKKRFAAIVKQRADINIIATSLTGSGHSISHMKKTAVGLPSVPTMDATLILGREMEKHQLISKLTETNDQQKTMIVSIVGLGGSGKTTLAKLVFNDGTTIAKHFKVRLWVHVSQEFGFESIVGKLFEAIAHGKSESHNLQHMVRRISDELTEKVFLLVLDDVWTKDRMELEQFMVLVRSGASGSRILLTTRNSDVAEAVESSYLINLPLLSLSDSWQLFIQSFGTTVEGLDREFLDVGNAIVNKCGGVPLAIKVIAGVLHDKKRIQEWQAIRDSNLFDAEGKERRVSACLRLSYLNLPSHLKQCFTICSLFPKGHKIDKERLIDQWIAHDMFASADAVDYLEYTGYECFSSLVQMSFL

SEQ ID NO: 65201 - protein, 97 aa, Zea Mays
MYPMLTIFFIYKLMKLSVRFEGMTLSSTNRQACNIVVALWTSLLFVPSNYGFYSRDDFVYLVVHSVRVGLVTRKLEGIHKVEIPLIYSLNSKGIPPP

SEQ ID NO: 65202 - protein, 586 aa, Zea Mays
MLSSLHFLGRTCINISLSVFIVFCQALSVLILYVRCTAIDPADSGILISMDDILIYKSEAHVDTQDEAGKPGLRNDEDIRKHKSCFGRVCFCCAIFTTGDCRGGDEANHQEDYGEEALFCTLCNAEVRKHSKHCRSCDKCVDGFDHHCRWLNNCVGRKNYITFLCLMAVSLAWLAAECGVGIAVFVRCFTDKTVIEDQIGEKLGYGLSRAPFATIVALATALSMLASVPLGELFFFHMILIRKGITTYEYVVAMRAQSEPPGPSVNDDQQSLASSPMSSAPTAFSGSSFARHYKGAWCTPPRIFIDQDEIIPHLEPGRVPSTVDPDTTDPMERTKTHPKRPVRISAWKLAKLDSNEAMKAAAKARASSSVLKPINTRNQYEADSDSLSSRNSVISADTGHHRYPRSCGNSQYKPSYPPSRASADDIELYPQTPSSFQSNSRTSTPIAEHHPSKHFNPIYQTSANRSPFSAKASVSEAPVSEITNAGRSYPPPQADRSSRSSVYWDQEAGRFVSAQANQGSSSRPAYPDLLYTGQNIFFGGPLIADPAARSFRDPGGSSQRSAGPRSHQLPVFVPSDPQKDQLSRLP

SEQ ID NO: 65203 - protein, 168 aa, Zea Mays
MNDASEVLGVIFECLHKSYTSRTVCHGKPHEKNSIGSWDCANISCIAHSLFGMDVYERMNCHNCKMESRRLKYTSFFHNINASSLRTAKMMCPDSSFDELLKVVIMNDQLACDQDVGGCGKPNHIHHILSTPPHVFTVGKPFLALGYFRLQLFCMYFHVQSCCCLMNI

SEQ ID NO: 65204 - protein, 473 aa, Zea Mays
MASSADPHAAVAAAMAGTTPSDSLLGAKKAGAAAAVWKLPEAATVPVAVVVENPIMDADSWPALPGLSSPPPPAAGPVAKASPKAASPASTGAVMSPPSLANPGAPDANPGSEAPVRNPVVQRALVMPAANGLEKIAPAPEPSPVYVPNARSNGADPHQNGRFGSHPHGRGGGYVGGNRRGNGGGGGRRGSEHHGFFDGQRRGGGRRDGHGPVHHQRGHQPTYIRTPTLAVVAGAPPPPPPFVSPATPQAPPYGTPMGFPADMAPQVYYYAAPTSEGIQGLPFMSHPASPQAVLIDPFRKGLLDQIEYYFSDANLCKDLYLRQRMDDQGWVPLPLIAGFPQVQKITNNIQFILETVMLSNVVEVQGDKLRRRGAWENWLLPKQNYSAGSSSGSLPPVTSNIDSLTSQFRFVGLEGATYHATMPVMHGEALLTRSATSVSLGYHASTMGGLPSNGSEPLLGPKSARNLLRSDTF

SEQ ID NO: 65205 - protein, 211 aa, Zea Mays
MVNGLVGSADDWKFAAEQFVRRMPDKVIVHRSQCNSATQTFDGVDLMGERLANEVLSVVEQRRGVKKISFVAHSLGGLVARYAIGRLYEPNSRRKSSGGESRDDVVHLNGHIAGLEPMNFITFASPHLGSSGNKQLPFLCGLPFLERRASEAAHLIVGRTGKHLFLTDNDDGRRPLLLRMVDDSDDLQFRSALRSFKRRVAYANANFDRIL

SEQ ID NO: 65206 - protein, 158 aa, Zea Mays
MGVLGTLARNLDALVGPGIMLLYPLYASMRAIESPSSLDDQQWLTYWVLYSLIALFELSCWKVLQWFPPWPYMKLLFCCWLVLPIFNGAAYIYEAHVRRYFKIGSYVSPSYSERHRRVLQMTSLDARSADMVRVRVCLIITSGLANTSRKESKDGMGP

SEQ ID NO: 65207 - protein, 691 aa, Zea Mays
MTMTAQQHRHPKRRCVALSLSPSLARIPGAPTPPLDSLADELLFLVLDRVAQADPRALKSFALASRACHAAESSHRRTLRPLRADLLPAALARYPTATRLDLTLCARVPDAALASAAVSGSSSALRAVDLSCSRGFSAAGVSELAVACPGLVDLDLSNGVDLGDAAAAEVARARALRRLSLARWKPLTDMGLGCVAVGCTELRELSLKWCLGLTDLGIQLLALKCRKLTSLDLSYTMITKASLPPIMKLPSLQELTLVGCIAIDDDALGSLERECSKSLQVLHMSQCQNITGVGVSSILKSVPNLLELELSYCCPVTPSMVRSFQKLAKLQTLKLEGSKFMADGLKAIGTSCASLRELSLSKSSGVTDTELSFAVSRLKNLLKLDITCCRNITDVSLAAITSSCSSLISMRMESCSRVSSGALQLIGKHCSRLEELDLTDSDLDDEGLKALARCSELSSLKIGICLKISDEGLTHIGRSCPKLREIDLYRCGGLSDDGIIQIAQSCPMLESINLSYCTEITDRSLISLSKCSKLNTLEIRGCPRVSSIGLSETAMGCRLLSKLDIKKCFGINDAGMLYLSQFSHSLRQINLSYCSVTDIGLLSLSCISGLQNMTIVHVAGITPNGLAATLMVCGGLTKVKLHEAFRSMMLPHMIKNVEARGCVFQWIDKPFKVEVEPCDVWKQQSQDVLVR

SEQ ID NO: 65208 - protein, 370 aa, Zea Mays
MQFEERLLHMLRTYNKNCRKIQNHFLSTRYSTVILEIPNHLGNNQLPISEKFSLYVIIQLSWTKVKLMLCTDAIERAWQILEKIPGRATGAYSHSQGIKGLRDEIAAGIAARDGFHASGDNIFLTDGASPAVHMMMQLLISSESDGILCPIPQYPLYSASIALHGGSLVPYFLNEETGWGLDVDELKKQLEEARSKGITVRALVVINPGNPTGQVLVEENQKKIVEFCKNEGLVLLADEVYQENIYVEDKPFHSFKKIARSLGYTDDDLPLVSFQSVSKGYYGECGKRGGYMEITGFSPEVREQIYKVASVNLCSNVSGQILASLVMNPPKAGDESFESFMSEKDGILSSLARRAKSPNMEISNKNKSYT

SEQ ID NO: 65209 - protein, 588 aa, Zea Mays
MSAPLDRLARPCFEGFVHNDERKESRSDADNSEGDKKTKIGSFKKKAINAGNKFRHSLRRRSKKKTERGDSIKDIRDIKELQDVETFRQCLIDEDLLPPQHDDYHMMLRFLKARKFDVEKAKNMWSDMLKWRKEFGVDKIEEFEYAELDEVKKYYPQFYHGVDKEGRPVYIELIGKVDANKLVQVTTLDRYVKYHVKEFERCFQMRFPACSIAAKKHIDSSTSIFDVQGVGFKNFSKSARELITRLQKIDNDNYPETLCQMYIINAGQGFKMLWSTIKSFLDPKTASKIHVLGNKYQHKLLEIIDECELPEFLGGKCKCIEGCERSDKGPWKDPNIIKRVLNGEANYGRQIVTISSTDGRIVSYAWPVHPNRKGSDASAESGSEVEDVTSPTASRNLITHPILTPVHEESKLSAHGSSSVVHASIGENIPVVDKIVDDGWGSPRSSPQAASSGSLSLRNLHGTFEGLRAQTITWLTFLMMTLFAMLCSVPSKMARRISNQSENDVISSMLRRLGELEDKVQVLETKPSEMPFEKEELLNAAVRRVDALEAELISTKKALYDALMRQDELLAYIDRQELIKFRKKKFCF

SEQ ID NO: 65210 - protein, 435 aa, Zea Mays
MLGVLRRAALAAASSPAADLRQFQCAYHRSSERLSPIRDQEVSYGLNWAIAGKGVIVKDKVLHNLETSELQKGGATYPDFLSGIPLHVRGDVIGGVPGVSKAQFAKLLKLVTFHLSSISCLYVQDGAIGSSAECDAKVRVISDNPSAVMLLSNVLWKIPDRAISHDTSPLTIYATSSISNNVKTVLGSGTQYANGFAVADIERSSLILCGKAFADSAIVKDALTAMTAPILSARGGLPVPGWILNFGGSTVLLFAPVEIMMSCVEIHNALLSIDCGAVISSKGSTVLFPTKASREQKLLTKPTAVIIVSSDSSGAIPSVCKLSPGQAAYHFLAGYHDGKFVPAYNRAPSPADPLALASSLFSHLKEDDTPSYLINAKHSGKYIDGNGFMKLLKLALSHDLPDIKTEGSRVGELKGKYRSFLSSKFGQCLPEEFSF

SEQ ID NO: 65211 - protein, 290 aa, Zea Mays
MYHRKNGENFFVPASNAHECHSKEVLKSQLYVEKYVESNRHTFLDYISVGCQLNFMVGVDFTASNGNPRLPDSLHYIDPSGRPNVYQKAILEIGDVLQYYDPPKRFPAWGFGARPIDGPVSHCFNLNGSTYQPEVDGIQGIMSAYISALRNVSLAGPTLFGQLISTAMAIASQSLAENQHKYFILLIVTDGVVTDFQETIDAIIKASDFPISIIVVGVGGADFKEMEFLDPNKGEKLESSTGRVASRDMIQFAPMKDMHGTGISTLQSLLAEVPGQFMTYMRTRETQTDS

SEQ ID NO: 65212 - protein, 122 aa, Zea Mays
MLCGQDWFEQYRESVIQAEQMILTTLDFELEVAHPYASLSSALGKLGLTHTVLFNVAWNLINEGLRSSLWLQFKPHHIAAGAAFLAAKFLHYDITFHPNFWHEFKTSPYIVQDVVQQLKELL

SEQ ID NO: 65213 - protein, 409 aa, Zea Mays
MGLFSSPAKVYKPAADVDLGPGSDELYISPNVKAPRVAGLLVKIFVWILEMPIVGQIVLYILKKDNLINKLVSDADIPEPPLFTASHSWEDTPEQSVRLTKPDLSAAERVQEAVGCLPARLEAALAADARGIRRWTVRDFSDAYRSGEVTPVQVAARFLAAVRESSGPGVSNMAFFISCDPDDVMRQAEESTLRYQRGAPLSALDGVLVGVKDEIDCLPYPTTGGTRWLGAARRCEADAACVAQLRACGAVLAGKANMHELGAGTSGINPHHGSTRNPYNASTIAGGSSSGSAAIVCAGLCPVALGVDGGGSVRMPAALCGVVGFKPTAGRLSNAGVLPLNWTVGMPGILAGTVEDALIASVILIDRHLLGDRRPVPAVLLAAGTESSSARLHTLHRQHQARQIRKVVQ

SEQ ID NO: 65214 - protein, 269 aa, Zea Mays
MEVGDLHKVWEVRALKIKPDATAARATLDRVARPRNPRLLGLNVGAGVEVKLRLRRAGRDHDFIPYEEVLDTMLHELCHNERGPHDAQFYKLWDELRKECEELVSKGITGTGQGFDGTGRRVGGFTVHPPPPSLRQATLAAAQKRARNGALLPSGPRKLGGNSEIMSALSPVQAAAMAAERRMYDDLWCGSHDQSAIDDSDDVIILQESPNLTRDEKDKGSCSNTSAQPSTSSRIHIAARDDRTTSDALDSSKWECGACTLLNQVSSRS

SEQ ID NO: 65215 - protein, 179 aa, Zea Mays
MRQLNIEDFVHDYYSVERFKMVYQFQINLMSDKSGWPKVDVGIEMIPLPLQRAAGIPRKQRIKASGEPGKRGPHQCKRCFQFGHVEKGCNATQAELASTTSSKKGKNPRKSNHEDEAVEASRYDAQASTSVVEPSPMPHSSAGITTRRMASLSPTSPGVTTRKMATISPGGFCQRLIIE

SEQ ID NO: 65216 - protein, 80 aa, Zea Mays
MLMHTQLAGGRAPAPPGTGREGGAAPLCKGGLTGGAGGPRAHAKAEGRGGSPPPIGKLLPPPPPPPKASCICKAWPQHGP

SEQ ID NO: 65217 - protein, 97 aa, Zea Mays
MLKVGKMMNQLKLKLKLLQIIRYAVTKAFCIAFVMTFFSVFDVPVFWPILLCYWIVLFVLTMKRQIVHMIKYKYVPFSIGKQRYGGKKGPAASASKE

SEQ ID NO: 65218 - protein, 97 aa, Zea Mays
MRASASRYGAKKLCQPYRPYGTTPLTSATATTMTPRIPSSCAPFAIAASISYRFHVDAVCPGLSQASIGPYMHAQSLPAGLGMEELSFVFFIQKCSL

SEQ ID NO: 65219 - protein, 339 aa, Zea Mays
MWEDCLWLYVFPMLEHVSHLASTSSRDEWQGKELGTRAGKAVHMLIHHSRNTAQKQWDETIVLVLGGIARLLRSFFSYLQQLRKFSSGWVLLLSFIKNSILNGSKEVAIAAINCLQTFVGANCPKGNLESSYVKSVLDIYELVLQTSSNFKNDSTDKVKQEVLRGLGDLYVQAQSLFTGDMYLRLMAIMHLMIKTTLNPTDYDSELGSIPAVQRGILEIIPMLRPTVVLSPMWTHLLLELLCYLNGHEGPLQKNNEQTPDHNSQALVDGAKHALVERSNLNGGGTKLDMVGSGWGILFVEKLVPIIANLFLEAPPNERFSVSPEVIQGLGRYLLFMIYI

SEQ ID NO: 65220 - protein, 89 aa, Zea Mays
MHEVVNGVPYELLHRLASQLPSVALGSGFHLPFLLKVALDLETPSISSKSDTVEAPIHARHNVRSDGRPLRPERCHHRLLGGRRPGGGD

SEQ ID NO: 65221 - protein, 448 aa, Zea Mays
MEWKVYKLSIGAACALEWPPERFVIQVLDDSTDPVVKDLVETECQRWKSKGVNIKYEVRGNRKGYKAGALKEGLKHDYVADCEYIAMFDADFQPDSDFLLRTIPFLVHNPEIALVQARWKFVNSDECLLTRFQEMSLDYHFKYEQEAGSSVYSFFGFNGTAGVWRISAIDDAGGWKDRTTVEDMDLAVRAMLQGWKFLYVGDIKVKSELPSTFKAYRFQQHRWSCGPANLFKKMMVEILENKRVSLWSKIHLWYDFFFVGKVAAHTVTFIYYCFAIPVSVLFPEIQIPLWGVVYVPTVITLLKALGTPSSFHLVILWVLFENVMSLHRIKAAVSGLLDAGGRVNEWVVTEKLGDTSKAKPGTNGSDTAVKVIDVKLTEPLVPKLVKRRARFWERYHCSELFVGTCIILCGFYDLLFANKGYYIFLFLQGTAFLVVGFGYVGTLPPCTA

SEQ ID NO: 65222 - protein, 395 aa, Zea Mays
MNDESSHRHSLLRVSGSRKFHDDPAQNSASRAELHRKSIAQMKINTQSVQDMHIYADPSHVPVVLIEQHVMVVPQHSSSKDLASNASEQKDTIVLPKLQGEPLVPKSSVGKKSGRILRAVIFVHGFQGHHLDLRLVRNQWLLLDPGADCLMSEANEDKTSGDFKEMGSRLAGEVIAFLKKKMDKLSRYGGCKELKLSFVGHSIGNIIIRSALAEPALQPYLKNLYTYMSISGPHLGYWYSSNSLFNSGLWLLKKLKNAQCIHQLTFSDDQDPHNTYFYKLCKLKTLENFKNIILLSSPQDGYVPYHSARMELCPAASSDTSKKGQVFTEMLNNCLDQIRAPSSDTRTFMRCDVNFDQSNHGRSLNTMIGRAAHIEFLETDIYAKFIMWSFPDLFR

SEQ ID NO: 65223 - protein, 858 aa, Zea Mays
MEITTRDFMKDGQSFKDEDERNQRFMNLNMNMIKEDYWREKFVRLHLLLTMKDSAMDVPINLDARHEWNNFLERIGVESNNEVSIKGRMDDIRLWASYRGQTLARTVRGMMYYRRALELQCYEDMINDQGYGLADLDTAKAARSKAIADIKFTYVVSCQLYGVHKTSKDSRERGLYENILNLMLTYPALRIAYIDEKEVQLRNGKIEKQYYSVLVKGDDEEIYRIRLPGKPTEVGEGKPNNQNHAIIFTRGEALQAIDMNQDNYLEEAFKMRNLLEEFLLTHGKSEPTILGVREHIFTGSVSSLAWFMSSQETSFVTIGQRVLANPLKVRFHYGHPDVFDRLFHLTRGGISKASKIINLSEDIFAGFNSTLRRGNVTHHEYIQLGKGRDVGMNQISNFEAKVANGNGEQTLCRDIYRLGHRFDFYRMLSLYFTTVGFYFNSMVAVLTVYVFLYGRLYLVLSGLEKSILQDPNIQNIKPFENALATQSVFQLGMLLVLPMMMEIGLEKGFGRALAEFVIMQLQLASVFFTFHLGTKTHYYGRTILHGGAKYRATGRGFVVRHAKFAENYRMYSRSHFVKALELLILLVVYLAYGSSYRSSSLYLYVTVSIWFLVFCWLFAPFVFNPSCFEWHKTVDDWNDWWKWMGNRGGIGLAPEQSWEAWWVYALSWLVIAVALVSLKVVSMGREKFVTRIQLVFRILKGIVFLVLIGLLVLLFVGFDLAVSDVGASILAFIPTGWFILLVAQLCGPLFRRLIIEPLHLLCCPYGTGGACRGPCCARFRQRTGAALRKMGPWDSIQEMARMYEYTMGLLIFLPIAVLSWFPFVSEFQTRLLFNQAFSRGLQISRILAGQNGSGTKSD

SEQ ID NO: 65224 - protein, 326 aa, Zea Mays
MEKFKIESDQSVFYSLLHALCKIKNIEDAEELLFLRKKFFPLTAEGFNIILDGWCNVITDVAEAKRVWREMSNHCITPDGMSYTLMISCFSKVGNLFDTLRVYDEMKKRGWIPGIVVYNSLVYVLTRENCVKDAHNIFSKLTDEGLQPDVETYNNMIVPLCESCKLDEARKVMESMILRGIVPTISTYHAFLKQEGIDESLKLLQKMKEDGCGPKSDTFVMLIDKFFLLNESGNALRVWNEMRKYEISPVRAHYMTLVQGLVKHGCIPRALEYYDEMKEKGFASDTQLDKEFKTFLLKNRDHWRGAGKYNIIPQRGKYFTKQSRMQ

SEQ ID NO: 65225 - protein, 279 aa, Zea Mays
MDAGLRVVGCLQDARRAGGSGDDVGVDRAQLVRGQQAHLHAGQLPVPLRRLRLLPDQRPAAPAARQAPSPPRGAHPHGRLRRGLQLRAPDGGRGRPPGVPPGQGAAARRGARLRAQPPRAGAPRAAAPGAAPPRLRHPLGAPGAQEAAARRGPWPRPPHHPHEGRRRPLLRAHGRRRRHRRRRQGTHAHGARPGALPHDAAPLRQHLRQQRLVRARLHGGQGPPAPGRPRPHAHLRRRIQVQQRRLEGPHPPLPAQGRLQPIHGQVRIRQGPHRLVIAP

SEQ ID NO: 65226 - protein, 603 aa, Zea Mays
MSAKQLCDALAAVGFDAGDDPLDADSLEWAFLQGEDSRRMLAWVCARLRPGNVLSATDLELYEQLEMEGKLLKGEDLDFAFDRISAFSDNMENQEYIFLTEESLEDICESKLALRAEVSDLERQLASLEWRLDILTAQATTINQGKKSRSSANTRANGQLTGLDKMFAKRSLEMNAILGKLTASTQELSYYHSEADIGVYLSYCDFQPYVRSALACTKELNKWFSKKFEKGPLQLVVQDDKLRGDPVNSHHFVVELSRINSIFAKSKRQYIEAQVEYAKEEAILSVLRTQLASQQSYIHQDSHSLRRKNSELAEELKDLSHQVQEYLSETVTGLCADLARLSGANILEGDHNLKLLRQDCYISHQKKFINHLVNQLAAHLFLKIACQLEEQIKISSAYSFLKAVELELQGYFSAFDGRLGRYNLIDQAASEMFEEGSVDDSDSYLHAVRDILSSHSSSQATSPEYVSSYGLIGQITELQDELQYLQHETENVLPRERGRCTDELCRMIQTLEQILAVSLSDEQPKLTPWPLAHSLEDLEMVSQQVSASVSEVTLARDEKAEKLKQPSRNAQQERQVFSDFFCHPERLENRVEELLSRFRALPE

SEQ ID NO: 65227 - protein, 153 aa, Zea Mays
MARSMTRRCRRSSNRESRAAAVSRGARAPRRCGACRRIHPRSNVRRAQQEAKARSRPTEERGVETSYRGRGAGDGRESSTTMGCCRGRPPRAARGTTARRKTRARPRSWKPSEQRGAAMAGRSWEAATRRELGMGAAWAEASTSSANISDGRR

SEQ ID NO: 65228 - protein, 281 aa, Zea Mays
MEDGVFCGVFDGHGRCGQFISKLVRDYLPFMILSHRNALLMGSDDDDDDPAQLLEEWREACANAFEAMDKELKLQANVDCNFSGTTAVCAIKQGKDLIVANLGDSRAVLATMSDTGYLKAVQLTTDQKPNVPQEAERIKRCNGRVFALKDEPSVLRVWLPDEDCPGLAMARSLGDYRLKRHGVVSEPEVTHRRVAPGDLFIILATDGVWDVLSNEEVVSIVCATPRKQHASKAVAEAAAQRWRTRYPTSRVDDCSAVCLFLRDQDWASSVAAARAKAAASR

SEQ ID NO: 65229 - protein, 332 aa, Zea Mays
MNKTYGGGGWCNTTQSCSERKMTNFGSSKYMGAVNFTGILSNDHTENPDFYNWNTVVIRYCDGASFAGDAEGGDLDGTKLFFRGLRIWKAVVDELMGKGMDAAKQALLTGCSAGSLAALLHCDNFHGRFPHEVSVKCLSDAGFFIDEKDLSGERSMRSLISGVVHLQNVKEVLPNDCLQKKDPTECFFPAELIKGITTPTFILNSDYDSWQIRNILAPNGSYPGQEWSSCKADIRNCSCAQLDVLHGFKKKLVSELKVAEDNKDWGLFIDSCFTHCQTPFDITWNSPISPRLGNKSISEAVGDWYFDRRQNAKQIDCEYPCNPTCSSLLPTA

SEQ ID NO: 65230 - protein, 781 aa, Zea Mays
MAGGGGGSLSSPSASFLSSPTPTPPPRLLRRCSTKSASRDSPILRPKKPPPLFCAAAATPTPAPAAASKSAGSWRDLCSLNAWVVRDYRRLVDSVGALEPALRRLSEEQLKAKTAEFRSRLTRGETLADVQADAFAVVREAARRTLGMRHFDVQIIGGAVLHDGCIAEMKTGEGKTLVSTLAAYLNALTGKGVHVVTVNDYLAQRDAEWMGRVHRFLGLTVGLIQAGMKSDERRASYRCDITYTNNSELGFDYLRDNLSRNKEQLVMRWPRPFHFAIVDEVDSVLIDEGRNPLLISGEDNRDAVRYPIAAKVAELLMEGVHYTVELKGNNIDLTEDGVAHAEIILGTDDLWDENDPWARFVMNALKAKVFYRRDVQYIVRDGKAIIINELTGRVEPKRRWSDGIHQAVEAKEGLKIQADSVIVAQITYQSLFKLYPKLSGMTGTAKTEEKEFSKMFKMPVIEVPTNLPNIRVDLPIQAFATARGKWQYVRAEVESMFQLGRPVLVGTTSVESSEYLSELLKVHKIPHNVLNARPKYAAREAEIIAQAGRKHAITISTNMAGRGTDIILGGNPKMLAKEIVEDNILPFLTHEPPNIDMEGESTSHKGLSNVELSPSSVGLLAKAAIMSKYIHKSERNEWSLSKAKSTIAESIEMGQMIGMEKLQERMTEESEMYPLCDAIGLAYLSVLRDCEVHCSFEGAAVKRLGGLHVVGTSLHESRRIDNQLRGRAGRQGDPGSTRFMVSLQDEIFQKFNLDTEWAVRLISRITNDEDIAIESNVVVKQ

SEQ ID NO: 65231 - protein, 81 aa, Zea Mays
MYNCPYLVIYFYLFIHVQVALLWTKLVFFEPKAKNTFPSFCTQQSILLRHMYTFETKLLCVHRSTVVEDGVSLFVLHVMMM

SEQ ID NO: 65232 - protein, 185 aa, Zea Mays
MDSAYDSDASEEGDDDGDDLSVRQGTPYTHIHEIVFSTIDKPKLLSQLSALLSDIGLNIREAHVFSTHDGYSLDVFVVDGWPVQDADGLHKALEASILRNEGSWSGSSHSSAAERTLPFQVKGGEWEIDKRLLKMGGMVASGSCGDLYHGTYLGEDVAVKVIRAEHLNKNVWNEFTQEVYILSST

SEQ ID NO: 65233 - protein, 511 aa, Zea Mays
MLVSNLGQSMTLLQVYAAVIRIFVESSMFEDALLTYIQAKNIGVDRRLCNFLLKCLVEGNQIMYARSLFDDMKSCGPSPNVCSYSILMSMYTHGERSCLEEAFELLCEMESNGVRPNATTYGTYLYGLCRSRQVTSAWDFLQTLSQSGGPCSNYCFNAVIHGFCCEGQVDKAIEVFHGMKKCGYVPDVHSYSILVDGLCKQGDLLKGYDMLEEMARNGICPNQVSYSSLLHGLCKTGQVALALKIFKNLQDHGFEHDQINYSIILHGCCQHLDLKAISDLWFDMIHHNIAPDVYNYTSLIYALCRHRNLQDALGVFELMLENGLSPNIVTCTILVDSFSKQGLVGEAFLFLDRMHQSLGIVPNLCMYRVMINGLCKTNKYSGVWNVFADMIKRGYVPDVVLYSIIIEGFVKALKLQEALRLYHKMLDEGVKPNIFTYSSLINGLCNDDRLPEAMGLIRDMIGEDLLLDNVLYTSIIACYCRRLNMKAAMEMAQRDGKKRCVARCFCIYLYD

SEQ ID NO: 65234 - protein, 129 aa, Zea Mays
MLWKDPKHGHWWLELGPGLVVGYWPSHLFSHLARHANMVQFGGEVVNTRPSGSHTATQMGSGHFPREGFDRAAYFRNLQVVDWDNNLIPAANLKLLADHPGCYDIQGGTNSYWGSYFYYGGPGRNAKCP

SEQ ID NO: 65235 - protein, 366 aa, Zea Mays
MPSPSNSHSSSSNSSDRDDDGGGGGNGRSWAAAERVASYLRNHKSVHAVCEKLGVDTKAFTPIPAGDRRACSPPPAGSICVYADALEAGMRVPLDPFFCELLSHFGVAPSQLAPNCWRIMAAFLALSRSAGVHPPSVPVFLHFFALRVLKNMRAEKAAAEAAEAAKVAAKSEPGCSASPGWTPLSGKKRPAEDNTREATGHGSASVPPGFSTRQKRKLQHAPDRHDGDTVEWEAARQLLQGVITPARERAFLMADPFSVIATSYIATLQAANYATFSLGHALKLHEELEKAKAELAEAKKTTEAELKSAKEAAVQEFLGSEEHERRLVEEALKGYERGLEDMKRVALRLRPDVDAAQLFVPPGGFQ

SEQ ID NO: 65236 - protein, 1032 aa, Zea Mays
MTMEHGEDCCVKVAVHARPLIGDEKLQGCKDCVAVVPGKPQVQIGSHSFTFDHVYGSTGTPSAAMFDECVAPLVDGLFQGYNATVLAYGQTGSGKTYTMGTACKEGSHIGIIPRAMAALFDKIENLKTQVEFQLRVSFIEILKEEVRDLLDPTAGTVGKAENGNGHAKLSVPGKPPVQIREASNGVITLAGSTEVHVTTQKEMAACLEQGSLSRATGSTNMNNQSSRSHAIFTITLEQMRKIDPIMTADGMPIEEMNEDYLCAKLHLVDLAGSERAKRTGSDGLRFKEGVHINRGLLALGNVISALGDEKKRKEGAHVPYRDSKLTRLLQDSLGGNSKTVMIACISPADINAEETLNTLKYANRARNIQNKPIVNRNPIADEMKRMRQQIEYLQAELVSARGGATSDDVQGLRERISWLEQTNEDLCRELYDSRNRSQNDPCEPEIQRTLNGFTKSEGLKRSLQSTDPFDVPMADSVRGNPKDIEDEVAKEWEHTMLQDSMGKELNELNRQLERKESEMKMYGCDTVALKQHFGKKLMELEEEKKAVQQERDRLLAEVESLSADGQTHKLRDAQLQKLKSLEAQILDLKKKHENQIQILKEKQKSDEAAKKLQEEIHFIKAQKVQLQHKIKQEAEQFRQWKATREKELLQLRKEGRRNEYERHKLQALNQRQKLVLQRKTEEAAMATKRLKEILEARKSSARDSSAGSNGTSQGYNMGERSLQKWFDQELEVMVHVHEVRNEYEKQSQLRAALGEELAILKQEDIRAGGSSPQRGKNGNSRTNTLSPNARQARIASLESMVTISSNTLVAMASQLSEAEERERAFSGRSRWNQLRSMGEAKSLLQYVFNVAADARCQVKEKEVEIKEMKEQMTELVGILRHSESRRREMEKQLKQREQTTPMATTPPKSGNGTTKHSADDPNTPLSPVAVPAQKQLKYSAGIVNSPSKGVAAIKKEQLKMVPIAQLSAGKRVSIAGHSGKLWRWKRSHHQWLMQFKWKWQKPWKLSEVIRHSDETITRIRPRPPLLPHKPHN

SEQ ID NO: 65237 - protein, 559 aa, Zea Mays
MVMQPMILPMVLTIAESQDKGDFELATLPALVPVFTSASGETLLLLVKHADLIINKATQEHLISHILPMLVRAYDDNDPRLQEEVLRRTVSLSRQLDTKLVKQAVLPRVHGLALKTTVAAVRVNALRCLGDLVPSLDKEGILGILETVRRCTAVDHTAPTLMCTLGVANAIYKQCGVEFAAEYVIPLIFPLLTAHQLNVQQFAKYMLFVKDITSKIEEKRGVTVTDNGNTEVKASPSLANGIHSEPMPGQIPAAKSSPPWDEDWGPSKKTGVPSLSVDSSAQTKQPSVHPFDFSTQTKQSTPLPFDLSTRAKQPSLVSHATAATIPPAQPQPVQSLVPSSGPQTSGSCAPVDIEWPPRRSSSSDFNASLSISKENESGRLSSDGLDDIDPFADWPPKPSNVTSITATEHRPSINQNISGFSSGNIGFGGSGNSIGQAKSNQMSWSNTPNLMGMNSTGSYLNQGSAALGFGNPIGGLSTGLSNPSSSSTGLSMMQPKSDFGSLSMSANNAANGPPRLAPPPSTSVGRGRGRNQGQSALSRASRPPHSNSSSGQQPILDLL

SEQ ID NO: 65238 - protein, 628 aa, Zea Mays
MEGYTWIGSLQLGDYKFTHFREIDLAKRYITSLYFAIVTMATVGYGDIHAVNIREMIFIMIYVSFDMILGAYLIGNMTALIVKGSRTERFRDKMKEVIRYMNRNKLGKEIREQIKGHLRLQYESSYTEASVLQDIPISIRAKISQTLYKPYVESIPLFKGCSAEFIQQIVIRLQEEFFLPGEVILEQGSAVDQLYFVCHGALEGVGIGEDGQEETLLMLEPESSFGEISILCNIPQPYTVRVCELCRLLRLDKQSFTNILEIYFVDGRRILSNLSESEYGGRVKQLESDITFHIGKQEAELTLRVNSAAFYGDLHQLKSLIRAGADPKNTDYDGRSPLHLAASRGYEDVVQFLVNEGVDMDLTDQFGNTPLLEAVKQGQERVAALLFAKGAKLSLKNAGSHLCTAVAKGDSDFIRRTLAYGADPNCRDYDHRTPLHIAAAEGLYLIAKMLVEAGASVFTTDRWGTTPLDEARKCGGRVLGALLEEARANELAMFPERGEEVRDKMHPRRCSVFPYHPWRAATGEERRIEGVVLWIPHTIESLVALAQEKLGLPGPASRLRLLREDGARVLDVDMVNDGQKLYLVGGEDGDQKYVEENGIKSIVPAGHCTELQIRNYVRCEMEMQCEAN

SEQ ID NO: 65239 - protein, 87 aa, Zea Mays
MTSQVTLSQMMVVVMMKMVTLVVQVLQLGHQLIMVLVKMNNQPLSVQDQKGRRSSLSRACTCLRSGLIFKHKHKNTTYAWTDSMARF

SEQ ID NO: 65240 - protein, 800 aa, Zea Mays
MAAAAMCPGPMKATSQGAFQGENPLDYALPLAILQICLVVVVTRGLAYLLRPLRQPRVIAEIIGGILLGPSALGRSHRFLHAVFPAQSMTVLDTLANIGLLFFLFLVGLELDISAIRRTGKKALAIALAGISAPFALGIGTSFAFRATIVKGTPQGPFLVFMGVALSITAFPVLARILAELKLLTTDLGRMAMSAAAVNDVAAWILLALAIALSGSGSPIVSLWVLLTAAGFVVAVSLFLRPVLAWMARRSPEGEPVKEVYICATLAIVLAAGFVTDTIGIHALFGAFMVGIVVPKDGPFAGVLIEKVEDLISGLLLPLYFVSSGLKTDVATIKGAKSWGLLVLVIANACLGKIGGTVITSLLVKIPVREAVTLGFLMNTKGLVELIVLNIGRDRKVLNDEAFAILVLMALFTTFITTPIVMAIYKPARRAVPYKRRTVECAAGDADGELRVLACFHTNRHIPTLLNLVEASRGTARRRLTMYAMHLVELSERSSAISLVQRARRDGMPFFSGGKEQRAEQVVVAFEAFQQLSSVRVRAMTAISDLDTIHRDVIDSAADKRAAIVVMPYHRALGHDGSFASLGSAYHAVNKRVLREAPCSVAILVDRGLGGHAQVSAKNVSFSVAVLFFGGPDDREALAYATRMAEHPGVAVTLARLQPSRPPLLDEAESAADEAAVEAFKARVGAVKDGSVRFEEPEACTREQVLETIESLSGFNVFVVGRMPPVAPLVERPDELGPVGSYLVSPEFRTSASVLVIKRYDPATNPKSKRFDPKAGPPVATEEDVLDEEMGMGRATVVPV

SEQ ID NO: 65241 - protein, 1012 aa, Zea Mays
MSEAVAILSLSASAVVEDVLRQHGCRLSDRDLASRRAEEAAGRRNEAAGWLRRTVGAVAARDLPEEPSEEEFRLGLRNGQILCGALNRVHPGAVPKASAPCADGAALSAFQYFENVRNFLVAAQEIGLPCFEASDLEQGGKSARVVNCVLALKSYGDWKQCGGTGPWKYGGNLKPSVSGKSGHGRKNSEPFRRSQSINEGEVPYEEAGFNGDAHFDSSDMSTSRPLKMLVSAVLSDKRPDEVPQLLESMLSKLVEEFENRLNSQNELVKAALKSGIDNTKSFSKSKVLVETPPNTSGRKMDTGDIYCNHKKTKKEASREVALKQHLILQQQSKNVESDLITTRAGMEYMQMKYSEDLNLLGRHLFSLAHAASGYHKVLEENRKLYNQVQDLKGSIRVYCRVRPFLPGQASPSTVGSIDEGNITIVTPSKSGKEGRKTFSFNKVFGPSATQAEVFLDTQPLIRSVLDGYNVCIFAYGQTGSGKTYTMSGPKNMTEQTQGVNYRALGDLFKLAEQRKGTFIYDIAVQMIEIYNEQVRDLLVSDGLNKKLEIRNNSQNGLNVPDASLVRVASTMDVMELMNVGQKNRAVGATALNDRSSRSHSCLTVHVQGRDLTSGTIFRGCMHLVDLAGSERVDKSEVTGERLKEAQHINKSLSALGDVIASLAQKNSHVPYRNSKLTQLLQDSLGGQAKTLMFVHISPESDAVGETISTLKFAERVSTVELGAARLNKESGEVRELKEQIARLKSALAAKNLGSEQIISHDSEAFNIKMPSPGFSNTRQGSCDLLSSQSNFRQPMEDVGNIEARANHTLRQKKPSFDLQDLLTASDSPSWPDSNLRVNFQMGDEREAIGGDWIDKVVVNNNNSASDWEGDNTALPDFFYQRYHSGMREKQYQRNNMRQKDDHEYEQQRPRFYSTNTDDSDDIDIATSDSSESDALWQLNVQSMNNSISESGSKVKKPQIKLRDGSDARTPIHSQIPSGSRKVANGSSRSVRQPLSRSDSRRLSSNGRQTGAK

SEQ ID NO: 65242 - protein, 525 aa, Zea Mays
MEVFGPVTPGQVSFLLGLFPVLISWIYSEILEYKKSLSHGKVHSDANLDNGTIKEDEKSVLLEGGQLKSPSTKFRNLSTKANLLRFITMDESFLLENRAVLRAMAEFGVVLVYFYICDRTDIFPESKKSYNRDLFLFLYILLIIASTLTSLKKHHEKSAFSGKSILYLNRHQTEEWKGWMQVLFLMYHYFAASEIYNAIRVFIACYVWMTGFGNFSYYYIKKDFSIARFAQMMWRLNFFVAFCCIVLDNDLMLYYICPMHTLFTLMVYGSLGLFNKYNEVPSIMAIKIACCFLSVILIWEIPGVFESLWAPFTFLLGYKDPSPSKAHLPLLHEWHFRSGLDRYIWIIGMIYAYFHPNVERWMEKLEESETKVGFLWYEYIYKLDKVTYNKYHPYTSWIPITVYICLRNCTQQLRNASLALFAWLGKITLETYISQIHIWLRSSMPNGQPKWLLCFIPDYPMLNFMLTTAIYLLLSYRVFEITNVLKSAFIPSRDNSRLYQNLIAGIAISVCLYLCSLILLKIPGV

SEQ ID NO: 65243 - protein, 2180 aa, Zea Mays
MDLAGMKRRELQALCKRHGLPAGGTNADLVGRLDAVLSGPAVVEEEVAGVPARKGCLKQTGGGATEAKKVTFGAEVGKARRLRSRVIWSPVVAKTRGKSARADVGADVPVRRSRRNSFNPAEAEEAGEAVAVDRKPKRKNQENDEGVAVIAQARVTRRSNLEWSATVLPPAVEKKRGRQNAAESDVQKSALVEVTARTTRSRSIVPVVVPPTVVENKRRKTGDPQTTVELTMLSDVPRSDFPATRSLRNKIVHVNNSVVDETHTTRQLENKMRPSTRRHQQVASSPEDKGQKIPATSKSPLLRWSRRNYSEANSANSVNIKLAKDSSTAQPLAHHNSHSEDLEKQPAVKEPIKRSTRKSIALAALEKEKDVIEGKNPEAHVRRSTRKSVVQVKDTKSIVEETQYANSEDVAKQPATKGPARGLRRKSVITELHEKEKSLIAEKNMETDEAILTRKPVIPVKNIKAVGEGIQIGKGKDVDKQFVVKQPTRRSSRKSVLPDMLENNSGLLAPKMNAEMNVRRSTRKSVLPDMHNEKQDHHKMARNENLQSGKYQDGEKQQKVKDSIRQSRRSIATVLLEGQNNDEGKKFKNPTRRTTHKSHALNAVEEVSMDHIEVGEEGLKLRKRSRFLLEISSSANVSWKHQNAQISNEKDNTEGSQQASNCTTSKRRSSKKRRTTAPEEVMPFKVANDDIVIMEETKDTLEYNNESSSKVQEICQVNAAREEFSSGPLLVTVAPSDEICTVQSVAVVIPGSESGDDANQSSDKSKQPQEHSVTQTVDDHLSETRSGKLDQSTCITGLVSDNCVVSEDKTLMSEDREEQSPVSGEQRVSLEANANEPEEKNLANVTSTDLHTKSLQHDIDRIAKETDKDVLSLVFPIEEHEEKYGVSPIAVEKCVCREASACESARKPLTVIFSNNLHTKHLQHDCDVLIKETGEEVLAQENCNDQPVPAQTDQEIKLNDELADPDVLAQENCNDQPVPAQTDLEIKLHDELADPDHEEQSPVSGERRVSLEANANEPEEKNLANVISIDLHTKSLQHDNGRIAEETDKDVLAQENCNDQPVPANEPEEKNLANVISTDLHTKTLQHDNDRIAEETDKDVSSLVFPIEEHEEKYAVSPIAVEKSVSREASACESAGKPLTVIFSNDLHTKHLQHDCDVLIKETGEDVLAQENCNDQPVPAQTDLEMKLNDELADPEVLAQENCNDQPVLAQTDLETKLNDELADLAMESGCSITERNEGLVAHNLDQEGFLEATPECKQECGLPEETVISSKETGSLLCADQSPIGLESLFSQESIVESVGHCALASATTHTENGFDDSKDCHNKSALENVHVPEPCSHNDTKGGIFKNVDCMHTSQRDDRMEGVPEANTDEEHVLSAFLLDANHLNVVINSEEVVCEGEDSKELLHSEDCKASSEKTDVNDGNVYGISDAVVRCALHAPADDNYEIFLGPNTDVPRQVYNDGCSDVKEDRFASKPWTIDIIEDASVKERSNLKDWQLDSKLEGTEIVESGLYFNKDIGNILHSGSIGEITPSGSGLSKDSSVDYRGEVLDGFSMEASLERSSTRGEQNGCRLDAIENPSITLATSGYKHEGALSEEAVYTKKNYAGTCLSNPRELIMELQSHFSKENINESDPHDSLVFPTAENSADEQLVKVHHGSNLSQLGLTDLLDGPIGCSNTDVLCQCDNHKNQSNEDKVEEVEAVSAAKYIESEVVLLPSQERSNLNNEQLNTKLESPNIMGSCLNCDNDVCNTSDNGSVFVIGKRTPSASGLPEDYPKDSDLQQPVLDSFSVVSSFQDNISGKKTVSGVAGSEILSLSLATPDYKHEDGFSEEAVCRTKNYTGTSSVDPRHLDMEGHSIYSEGGTEKSNLQDNLAFLSAESGKDEPIICHVEKLVDAHASSDTYQGPCQDLGRHEEQESCMSIPMQAKESGGVLRSSHTKGSVTAAQIDLAGDAHLIVSDNAAAKQVFSEEKEETKSISSSDIDILHEKSYSSGHDDHAACAAETQFYHPQKASISDGLHLGPSSLQVESLDALDSDILYVNTGVLEQHHKEGYYEPSVYQITSGICTMSEAEPFEVLETGKDVKTPSKLDEQLNPGLDGDEAEKHSLDCGTDTSPVMSKRTLSSPGSGPCQQYVNESTTSTQSTDNHPNDLPAPRSPEQSACFQNDNDSGSAFVKAAGEEV

SEQ ID NO: 65244 - protein, 140 aa, Zea Mays
MESDDEIRRVPELGLELPGASTSGREAGPGAAGADRALAQSSTAQASARRRVRSHADKEHKRLKRLLRNRVSAQQARERKKAYLTDLEVKVRDLEKKNSEMEERLSTLQNENQMLRQILKNTAVNRRGSGSTASGEGHGQ

SEQ ID NO: 65245 - protein, 157 aa, Zea Mays
MAFQGCMQLKAYLAFTGGFYLFGDGTFHFLCLCFRLFEHTVDFLYQKVIQKKKEDCSTIQQLGATCLAGYISGAVGTVVSNPADNIVSSLYNKKAENIIHAVKSIGFRNLLTRSLPIRIALVGPVITMQWFFYDTIKILTGLPTTGGLPRELEEANI

SEQ ID NO: 65246 - protein, 433 aa, Zea Mays
MAFVVLRQSMSTVQCVLVASADAGVSTQMVRFATALSKESIVDVEGVVSLPKEPLKATTQQVEIQVRKIYCINRAIPTLPINLEDAARSEADFEKAELAGEKLVRVGQDTRLNYRAIDLRTPSNQAIFRIQCQVENKFREFLLSKDFVGIHTPKLISGSSEGGAAVFKLLYNGQPACLAQSPQLHKQMALCGGFERVFEVGPVFRAENSNTHRHLCEFVGLDAEMEIKEHYFEVCDIIDGLFVSIFKHLTENCNKELETINRQYPFEPLKYLDKTLKLTYEEGVQMLKEAGTEIEPMGDLNTEAEKKLGRLVREKYDTDFFIMYRYPLAVRPFYTMPCYDNPAYSNSFDVFIRGEEIISGAQRIHTPELLTKRATECGIDVSTISTYIEVFSYGAPPHGGFGVGLERVVMLFCALNNIRKTSMFPRDPQRLVP

SEQ ID NO: 65247 - protein, 650 aa, Zea Mays
MLDVEVKIKLKNAELQAKKDQLRIWTGFKPPATNSKPIHDQKFNGKVVEVVSGDCIIVADDSAPYGSPSAERRVNLSSIRAPKLGNARTDVKPDHFAREAKEFLRTRLIGKQVAVEMEYSRRISTVDGQSAAPTANMADTRVLDYGSVFLGSPSQTDGDDTSSAPSSASQPGVNVAELLLSRGFAKTSKHRDYEERSHYYDALLAAESRAEKAKKGVHSQKESPVMHITDLTTVSAKKAKDFLPFLQRNRRHSAIVEYVFSGHRFKLTIPKETCSIAFSLSGVRCPGKGEPYSDEAIALMRRRILQRDVEIEVEAVDRTGTFIGSLWESKTNMGSVLLEAGLAKLSSFGLDRTSDAYILTRAEQSAKQQKIKIWENYVEGENASNGSTPESKQKQILKVVVTEVLGGGKFYVQTMGDQRVASIQQQLASLKLKDAPVIGAFNPVKGEIVLAQFSVDNSWNRAMIVNGPRSVESPDDKFEVFYIDYGNQEVVTYSRLRPVDPSVSSSPALAQLCSLAFIKVPSLEDDFGQEAAEYLSECLLSSSKQYRAMIEEHDTSGGKSKGQGTGNVLIVTLVDAETESSINATMLEEGLARLERSKRWDTRERKTALQNLEQFQDKAKKERLRIWQYGDVESDEDEQAPPARKPGGRR

SEQ ID NO: 65248 - protein, 325 aa, Zea Mays
MDGEAIRMGGGNLAPAYLSGAATATAITMQDPNQNQNQNQNQNQSQFLFSANSTALQLFGSAAGNENLLKLQVPLSDYHQQSAGRLARVGNPGAVSTGLRLSYEDDERNSSITSGSGSMASLPATMSCVDGFMAELDKESKEINFYLRLQADQICKRMKEANQRWMVSFLASVNQAVGKKLRDKELEVEAVNRKSKELNEQMRQVAMEVQSWQSAAMYNQSVVNTLKNKLMQLVAQNTNLAREGMGDSEDVASSQSPDAGGDALGGLRGTATVGLGACRCCGRKEASVLVMACRHLCLCADCDKVSDVCPVCRFPKSGSVEINMS

SEQ ID NO: 65249 - protein, 119 aa, Zea Mays
MAKGEVPAIGIDLGTMYSCVGVWQHNRVKIITNDQGNHTTPSYVAFTDTERLIGDAAKNQVAMNPTNTVFGTCQMISSSLLFSFISLNLECPISSLALRLFDSMLRDFPLMIDDAEFYL

SEQ ID NO: 65250 - protein, 138 aa, Zea Mays
MFGVVGCILCVVGSVGIVLHAPKERKIDSMKEIWHLATQPGFIVYSCVAVACVLFLIFRVVERSGHRLMLVYIAICSLMGSLTVISVKAVAIALKLSFGGSNQFIYVQTWFFIVVVTICCLVQLNYLNKRRRTARHFI

SEQ ID NO: 65251 - protein, 195 aa, Zea Mays
MDHEVLQGGSFNEAVDLRKEEVEQLIVNLILDNVLKEEFQHTAYSTNAYVTLGALWKPALQGNRVVKLEIAIASKDRDVRSKGAKRGRMSDLEAKLDELRRDLSSTGSDAIFPHAVLTAQQISLLSSQKPTTPAELEKVIGKVKTRKYGSKIIELMRSHDNSGSGRGKEAGDEHRAKKIKTKDEDVVCVESSEEE

SEQ ID NO: 65252 - protein, 1020 aa, Zea Mays
MEIWGKSRHPNVELRAFCSKHSAVGYTSSVENSNLASELNPRKSGPDNTTLNSGKIPILRFTRKNKDKFTNCGTSTSSSGNLIRVKTIEQGALANTVRNANTQPIQIWERGTGHPSVGGDHMGSSGDIAVVLRKLIDSGKISVSDIASEVGISSESLEAALVGETTTFSHGLTLKIMKWLQNYVQMHSAQGDVCKGSSEVVQESKSDRLVTTDTVDVKNPLVLDDDKGVGVLVDLLDSSVTEPAQTRSESNSKILNENSATCATGVTILQNGKKNMVKEGYNPECSAKEFANESTQDFSPISNKYVLKDEHGILILNATSGNKEFGTSTEIPNENQGALRGRKINDLTDVELGPCLEKGVSSHDHCFVRGDNGRDRVDSVENSFNARDCDSNCSHGQPFFNFDDSHSYIHPFIQKKISHHWDITFNQNKEALNHYIQESSYPSLEKVPTDSSVEVEGTADTTATGQVLKARSLKILEHSPDDEVEGEMVYLQSRLLDNAVVLKHRYEKLIAMVVQNLSRELDALSKRKWDLIFVNQFLRDVREAKKRGRKEKRHKEAQAVLAAAAAAIASSSRNSTVRKDAKEDAPKSSPKLAAGSSRVGQRTSLPQANDSSKSSNSKISSDKKSGSFLLPISSKENGLYCDVCMRTETLLNRIFVCYRCKAAVHINCYRNLENSIGPWNCELCEDQDISSEAATVSDKSHCNGKKLPFAQCGMCHGTSGAFRKTVDGKWVHAFCAEWLLDTKYVRGQDKPVEGTESLVEGKDTCCVCLHNVGVCLRCSSGDCNITFHPTCARSCGFYMNTKGFGTTPQHKAYCGKHSVQQKEADAQQYGPEELTSMKRMRVELEKLRLLCERIIKREKVKRETVLCDHEILAKTKDTVIFSYLACGASSESATTSVNNRSYSGAAQRSDDVTVDSTISGKKTIRFSLNNRGADRNTADSSRTLLSFKRKLSERGPRAGKQLPQRPTIAAEKLEDEDKKTTDKKNLRLPKGYAYVPRDSLSKEKLWKQNTQPHNPQEPGG

SEQ ID NO: 65253 - protein, 205 aa, Zea Mays
MRYAMQQAFKSMMTQSAPNSFGSNSPFPFSMPPQASPTAPSTYPYLEPKKDTSPHVSTVDVSANEVEATGTSKEVDVTETPKPSKKFAFVDVSPEELQQKNLQSSPETVDVKHDSTYSESKEDTEEQVPTISTNTESKEDTEEKVPTNGASFKLNEGAAHGPTESNNSASMLSVETIEKMMEDPAVQKMVYPYLPEEMRNPNSFK

SEQ ID NO: 65254 - protein, 193 aa, Zea Mays
MPMKELIAVAQARRFSRSTSFPDNFLNAKYIPETSINIPSKEGPHRQLSPSNRIIRSTSGNDNVNSRSPFDNIQQKKLAAHGANAARRSFKDFLSTLTRTKESISRATRLAMECAKFGIAGEFQGAILFEPCERIWKSRAPPKCNFFMWLVAHNRCWTADRLEKRGLPHPARCPLCDQVDENLQHLLIKCVFA

SEQ ID NO: 65255 - protein, 183 aa, Zea Mays
MACVSTFQSCPIARRAKINTRSRGSSSSVAKGSPPPAFQFQCRASTFAADTSLRLELDENPEAIISGAWPGNCSLLSYDDLRAYLESQETAAQADDQRGVALLSETMSTPVLVATADQTLEDVECHFEAVSGLPVVDSGLRCVGVIVKNDRARASHGSKTKISEVMTSPAITLSSDKTVMVHA

SEQ ID NO: 65256 - protein, 488 aa, Zea Mays
MEMQSTAAGTLAQSQAAAAGTGNSFTYADLHAITDGFSDEIGRGGFGVVYRGKLPQPDGEEVAVKRLTTTTDNNNPKQPAGDDDDEQFEKELGAVRSIQHENIVEFVGYCNGYTPSSTVLPDGRPVYRKIRALCFKYMEKGSLRKHVADESLDWQSRYEIIKGVCEGLNHLHSKGIVHRDLKLDNILLDGAMKPKIADFGLSRFMGAQETTRITRNIVGTFGCMPPEFFCDGQYSKSFDVYSLGTVIKEILAGPAAADDGSIYGYYDPLKKASEYWEQRLVEDADVQRVKACIELVPLCWGLDRKKRPTIERVLDTLNYTDISVQKEQHYYCSRSSGPQPEKSRLEGGAGGELRDIDMEVTPPPHRLKAVWLKHGAVIDSLQFSYTDCDGREQGAGPWGSQDAWDKVLQLEPYEFLVGVSGTTGGYAGLPTSVIRSLTFVTNVRTYRTRGAPVGDPFALEAPAGSCIVGFHARAGHFLDALGVYHRPI

SEQ ID NO: 65257 - protein, 209 aa, Zea Mays
MNGSSGSQGHHVSGEKKQVCHVSRPILNNGPKHRPLTPMRRCRGVACVVIILSTAFLLVVYLAPITTFAVRLFSVHYSRKATSFLFGMWLSLWPFLFEKINKTKVVFSGENVPPKRRVLLFANHRTEVDWMYLWDLALRKGHLGYIKYILKSSLMKLPIFSWAFHIFEFIPVERKWEIDEAIIQNKLSKFKNPRDPIWLAVFPEGTDYT

SEQ ID NO: 65258 - protein, 198 aa, Zea Mays
MPQNSFIIATKTVSAEVYVFDYSKHPSKPPLDGACNPDLRLKGHNSEGYGLSWSIFNEGHLLSGSEDAQICLWDIKANSRNKSLDALQIFKHHDGVVEDVAWHLRHGYLFGSVGDDHHLLIWDLRSPSPARPVQSVVAHQGEVNCLAFNPFNEWVVATGSTDKTVKLFDLRKIHTSLHTFDCHKYVSAFFVLFIATVC

SEQ ID NO: 65259 - protein, 62 aa, Zea Mays
MYLCSYGLISACIFVMYLHCFRNLELFPPMHAIFYSSLVFLNLMELVKEILGNQVLESLFGG

SEQ ID NO: 65260 - protein, 218 aa, Zea Mays
MLTRVAKPDQLGVRFLGRPMVRPQRVEQSKASCFDVGAIVDAWWHGGWWEGIVLYQVGSGRLQVYFPGEKRTAEFGEDELRCSLEWVGNKWNPLKGRKDVTSKLTSTADCGSEYLIAKQDPLNFHVPKNSEPQLEGHQYDKRDNLRWRPRKRSRRSGSRKQSDTSSGSSSGDMDLFSPSPSGSFGQHNLVPDEETCKSSGEQTFMGVPVQVPNLVMSR

SEQ ID NO: 65261 - protein, 1028 aa, Zea Mays
METAAATARPGAARKRRWNQSQPCQGEGPSDLKFARLRFDGDGGAKGAWEHLDLVLSLQSKELSLERKIELAVEFLTTLPNNSSCSIQLLRLVSFIGNWLQSILNFPENSKKILHIFDPALDSRCWAILRVCVEKKPSISISLNLLKSLSRVASHGLGRVDSNTSCPDNESIELFEQVFDCMSLLFSSNTRAFFNAGVDLWASCAIEVVNLAQKVSAKKDNFCPVLQKLANCLLGQFACFLRFYANPKNIFHAFVDKVLGPLLELLVLLNSQAHSSEHKQTGTMLKIVEDVFSNGLFHPQHLSGYFGLRSLNKSSAAKDIKGSYHRHLFQRFKGIKTENKAVLLAGFGYLFQLFVRRARNQRTTVAPSRTTLGTLHKSNDGSEEPQHRESLFEVFIMFMEPIVLECKSYSQKDFSKLGVTRLVEVHCMLKSINVMLITLIEEKIYVPTEDTLEGSHFNFLQDIYSVLILISEKMYKFWMSAVHLEDVNIKKIVPLMFAEIISAVGNFLEIEYKVLGDDLVKLWLMIFALSAINTSSKDIEPCFLLASKISSLSAQVICTFSELRQVSRSIFSLCDAVRAFRVEGPDGVHGSFSVASLSSQECLGSLTTLLSSETLMGAIRTSIKSMPQGQSSRCIEELTSDLTETLNWMADCSFEDDVSKLREPSIARKSIFCQKAELLGRHLSEVYASILDSITVTVSNSTLVGKSVERLVNAVRRNFSHLVRNKSKNINGFISSIMGKNVSKKLHANRQKIPSFSWIFCLFCRLYISCRSLYQQSIGLMPPDVAIDATKLVGNPFIVCSGKEWTNPTNILGKGYFALIDENSNSLLDVIESLSESLSTNCASFAPLVYIFHVMVLQRLNDLNRQIKAFQFLLEDDAWQIDNKDIGNTRLLKESCSLEAAKLMSFVMNYVKLLSSGETGPFGSYDVSSSWDLSLCSLDEGSFPIATWQLLCENIDVWSSHVSKKDLKNFFSNLIRFSFTQKRSSLDKENNGTQSSGREMTLHSVSIGVLCDTIIYEKKVLVLRMRTA

SEQ ID NO: 65262 - protein, 160 aa, Zea Mays
MIEHDGSAKGIVFSQFTSFLDLIQFSLERSGIKCVQLNGAMNITEKGRAIDTFTHDADCRVFLMSLKAGGVALNLTVASHVFLMDPWWNPAVENQAQDRIHRIGQFKPIKSTRFVIKDTVEERILQLQQKKQLVFEGTVGDSPDAMSKLTEADLKFLFQI

SEQ ID NO: 65263 - protein, 415 aa, Zea Mays
MAAAARPASAHLLLLAPLPSPPRLSHLIHTRRLYALAPARRPAAARARRESSPPSAPSPPAPADSLDCVGTGSDVECFVDAGAEDAAPLLPALSAGASKDDGKSEGDAAVSASPTGRELLEWASLVSPFFFWGTAMVAMKGVIPRTGPFFVAAIRLLPAGALLVAFAAARGRKQPSGWEAWLAIAAFGLIDAACFQGFLAEGLQKTSAGLGSVIIDSQPLTVAILASLLFGESIGAIGVGGLVLGVVGLLLLEVPALSVEGNDTTIWGSGESLMFLSAQSMAVGTIMVRWVSKYSDPIMATGWHMIIGGLPLLVISVLNHDPALSGHIQDLTWSDILALGYTSIFGSAVSYGVYFYNATRGSLTTLSSLTFLTPMFASVFGYLYLGETFSTVQIGGALLTLVAIYMVNYKSIIGT

SEQ ID NO: 65264 - protein, 206 aa, Zea Mays
MGFIGAHGVETLKRYRYSGEDRSVVAKYVLQPFWSRCVTLFPLWMPTWLCFPTFQITLTGFSFLVLSALLGYICSPHLDTAPPRWVHLAHGLLLFLYQFEALALGSTLMCGGWTLCFWVVAAVPFYLATWEQGLGGMEPKNWIHLASTHTHGPTVPRCQDFRKSLPFFGWIPLPFLSEIEIPLYVLVLILMIVCAVIPTVRSNLLN

SEQ ID NO: 65265 - protein, 60 aa, Zea Mays
MAAPLHGFLLPLDLPPRSKDREEEEHIELKGKRGSRRCCFPSLLAEFLGETLGGYTPDHA

SEQ ID NO: 65266 - protein, 131 aa, Zea Mays
MAVGVQFGLWNSIMSCSLLILKEIYRLAFLLNKVDAHYFEEGNVQLDTNIDRKDSTIMQSPDDCAVSITSIIRHHESEYLSSLEESYLNLSDATFKDLRRKLPVTRTLFPWHNTLAVSLTRDLAKQLALGK

SEQ ID NO: 65267 - protein, 680 aa, Zea Mays
MAPLLLLLLLFPVQLQLLLLLAVADAVPGLCARATCAGHVIQYPFWLNSSAPDCGHRHGIGLVCEGNSTLTLPYMSHRYVVSSIDYKTRTVLVSDADIGDEYDAAGCPRVRVNLTIDTAWLRPAASDANITFLYDCKKSITLPSAVELSGCHWQQQQQQQDYCRRSYVLPDGGITGAEAHQYGCEDVVVAPVLDAHRREILGAPPANGSLRRVLQGGFELNYDTHSELCDRCGASGGWCGYRRDEAPAAGAGGGLTFACFCDGGPTTTGLCGAESKRKARILAGALGGGAAALLVGAAIFLFVIMRKRKQKKKVINSSSKLLKYSGSGGTPRSRVGDMESGSIEDPPTHHFTYEELEEATNRFDESRELGDGGFGTVYKGYLRDGRVVAVKRLYNNGYRRVEQFQNEAAILSGLRHPNLVMFYGCTSSHSRELLLVYEFVANGTVADHLHGQRAPERALSWPLRLSVAVESAAALTYLHAIEPPVVHRDVKTTNILLDADYHVKVADFGLSRLFPLDVTHVSTAPQGTPGYVDPEYHQCYQLTDKSDVYSFGVVLVELISSKPAVDITRHRSEINLASMAISKIQKCQLEELVDLGLGYDTDPATRKMMTMVAELAFRCLQQNGEMRPPIKEVLEVLRNIQGECLTSGKDGDKSKDGPFSPTTVHAPWDSRSTTPNTSRD

SEQ ID NO: 65268 - protein, 777 aa, Zea Mays
MRSNRRRLGGRGGGWGGQGGGVSVAASFAALLGCVVALVGGAAGQGPRPPSDYKTLSGAAPLVVAKGGFSGVFPDSSQGAYSFAMITSAPDTAMWCDVQLTKDGVGVCLRDINMKNCTSVDQAYPERKRTYVIDGVRKTGWFVSDFTIAELQSVSLTQAIWPRTRRFDGIYPIISITDFRSLVMPSPVWLNVQHDIFYKQHGLDMRNYILSIKKGVSMDYISSPELGFLKNMSGRVGRKTKLVFRFLEKALLDHSINQTYGSLSSNLPFIKSIASGIIVPKSYIWPVTKDNYLLPSTSIVTEAHNAGLEIYASDFANDRIIPYNYSYDPLAEYLNFINDGGFSVDGVLSEHPITASEAIGCFTKLNSNKTDHGEPLVISHNGASGDYPDCTDLAYHSAIDDGADIIDCPIQVTNDGVLMCMSSTNLLDTTNVQRTTYNSLVSVVPDIQPQPGIFTFNLTWSDINSNVLKPKISSPVSGYFLVRNPRYTNQGKFLKLSDFLAIAMDKDLSGVMIIIENAAFLVNSLGIDIVDSLTTALSAAGFDNHPTKEVLIKSKDSDVLVKLKQQKTKCKLVYTLPSGIGDASNSSLKDIKKFAEYVAVDSKSVFTLSSDFIIRQNSLVQDLQSAGLALYAEVFQNEFVAQPLDFFGDETVEINYYIQSFNLSGIITDFPKTVRRYKRNTCTVLGKDMPSYMQPPQAGSLAQFLQTFKTQPPSLPPMSTLNSSSVEEPPLPTVALRSVSDGSASGATKTPGTPSDAPTATVNAGMLLVMVFTALLI

SEQ ID NO: 65269 - protein, 119 aa, Zea Mays
MPNKRHKPGLTPPRAEPERQANIRRSRFRPLRSRHRAIHPALCARAGLVGWRPEAPPAVALLRSARRGARAIPSALWPSRRCCRMVLSISCSGTASSPARKASCCQASSTWLQMYQDSS

SEQ ID NO: 65270 - protein, 2052 aa, Zea Mays
MLVDGTFDINEKATIKNEDVIMLLINVLQKSSTSLQHYGLMVLQQLLKGSITNRTSCFRAGLLSFLLDWFKVEKGNDIVMKIAEIIQIIGGHSICGKDIRKFFALLRDEEIIAKQQHSSLLLTSVSHMLKEKGPEAFFEFSGHDSGIEIKSSVQWPYNKGLSFCCWLRVESFPEKGLMGLYSFFTENGKGCLAMIGNNTLIYESVNPKHQCVLLSLSLPIKQWKFLCVTHTIGRTFSGGSQLRCYVDGDLVSSEKCRYTKVNELMTRCSVGTELMPIGEEPSSLGFENTLAFTGQMGPVYAFSDALSPEQIRGIYNLGPSYMYSFLGDQNLLTNDDSRYKGILDAKDGISSKMIFGLNAQASNNRTLFNVSSALDGLDKSKFEATTMGGTKLCSRRLLQEIIYCVGGVSVFFPLLIHFDDAVVQNGEFATRDQLAGQVIELVASVLDGNIANQQQMHLLSGFSILGFLFQSVSPQLLNIKTLSASKYMFTILKTSSMSDILLRDALSQFYLNPHIWAYATYQVQRELFLLKVSQHDIRALVSFLERSQDVACVEDILHMIIRALSQNSLVPSFLEQVNSLGGCYIFINLLKREFEPIRLLGLQLLGKLLVGVPSEKRGPKIFGLPVGRPRSIAEDIRKGATAAPQLFFYSISDRLFKFPLSDHLCASLFDVLLGGASPKQVLQKRSQSDALKDRSMAPFFVPQILVCIFKYIQSCRDASVRTKILSDLLDLLDSNPVNVESLMEYGWSSWLETSAKLDVLRNYKSNSVAKADGLETNELILVRNMYSLVLSYCIFSVKGGWHQLEDTTNFLLLKIEQGQLPNSSMLRDIFEDLIGSLLETSSEESVFNSQPCRDNILYLLNLSHELFVDQIGIKLLFPSPDMSAHLSSDDINSAVLEIMNTEGNGLLTRSLLRVRSQYGQLDDGARFHVMSHLILETVIYGKSMLTTNIVGRDDSTEANNSKEAGFILNLVQKDRVLTAATDEAKYMKDAIADRMKLVQELHSKLDERSIQDVEQLQSFEDDVQFAKTAAIAADDSRKAAFQLAFDEDQQIVADKWIHILRALSDERGPWSAAPFPNNIVTYWKLDKTEDKWRRRLKLKRNYKFDECLCHPSSIKSSNDNAAPTVDPSANAKITEKMKHLLLKGVRGITGDISSESCEDSNDMIDPPQNVPPENHTVSDTSDSADSSDYPAIVQNRKESSSTSSDNDYIEVLSSVHCVLVTPKRKLAGQLTITRNALHFSFEFLVEGTGGSSVFDRFHDKKDSDSKNEMGGVEKLKGNLDGGRGNAAESSDTQIKNQSGKIKHHRRWKITRIKAVHWTRYLLQYTATEIFFDDANAPVFLNFSSQNDAKSVGSLLVSLRNDALFPKGTTRDKNSLISFVDRKVALEMSESARESWRRREISNFEYLMILNTLAGRSYNDLTQYPIFPWILADYSSEKLDFNKSSTFRDLSKPVGALDAKRFKAFEDRYLNFVDPDIPSFYYGSHYSSMGIVLYYLLRLEPFTALHRNLQGGKFDHADRLFQSIESTYSNCLSNTSDVKELIPEFFYMPEFLENSNSYHLGIKQDGEPLGDVGLPPWAKGSPEEFIHISREALESEYVSSNLHHWIDLIFGYKQRGKPAVEAANIFYYLTYEGAVDLENMDDMLQKSAIEDQIANFGQTPIQIFRKKHPRRGPPIPIVHPLYFAPQSITVTSVVPTIVTPLSVLFIGLLDSNVVMMNEGLILSVKLWLTTQLQSGGNFTFSGSLEPFFGIGSDVISPRKIGTSLAENVEFGRQCLATVQIRGDNYLILCGNWENSFQIISLSDGKIVQSIRQHKDVVSCVAVSSDGSVIATGSYDTTVMIWYAFQGRSNDKRYRNANYDLSTKDHVIIESPCHILCGHDDIITCLFVSTELDIVISGSKDGTCMFHTLREGTYVRSIRHPSGAGLSKMVTSQHGRLVIYSDSDLSLHMYSINGKHIASSESNCRLNCMELSCCGEFMVCAGDHGQIVLRSMHSLDVVWRYEGAGKTITSLVVTPEECFLAGTKDGSLIVFSIENPLLRKNAMQRHKAKPSIGG

SEQ ID NO: 65271 - protein, 60 aa, Zea Mays
MDALGRSRSCMPSAAEHETLQEVLVDPKTQNTRMRTAVDVVRLPQCEEGTERGRVVRGGM

SEQ ID NO: 65272 - protein, 618 aa, Zea Mays
MHSPRSRIRVRDPHPNPHRPSGGGRGGGGGCLRRRSPPAPPSPRYRRRPQRHTPPPRRGSDPHPDISAIARHRILLEAGRFAAHYLVAQGVLPDHVLRDREDPPASRGRNLDGGGDPRSSWNDGDWARAWEDDDRQARKSTRWDRRSQSFDDRGKKYHDAGRDVDRGARRTRDYDEPRRPPMSRSYSHNDRRPSGSADGGRVDPRSRSRSRSRARIRRDLDHTKVTDSGIIPADAADDGDCDVHYGHVDEMPRQQRRVPSSVVVADSADQAMATEDGEAEFDIHGLNRTRDVSEDEDGEFAAARLNGEDDVHPLKSVKEPALHRGSQLSNAVEDREAANAPTMVMDACTRETSGEDNAYSEATNEMVAPHPHSEGKPELPASCRPFDLNVVETPDACEMAGDPQADHVSDLVGWIHQQTNCHASEFQGQDERHMLKNGHDLIRYDLNSEAVEDAQDIHLLEDEKLPVGLGIDAHDTTRIQCWRGSHLRLNQNAGELEHENDCVIGEQLLLSDGMDGHLVRDYQMASEPKMGVYDLHSYNLESEKMLLDDGAEKHAHDNCHLHDGQVLFNQSANLQAHNRANERTIPVINLEDDDYEEQSDIREFLESKSYQCLGHALL

SEQ ID NO: 65273 - protein, 66 aa, Zea Mays
MGNNTKAGTGVCLVTLPSQDGSERGERGYRSELQLGRLGAFAWLEAWSLGRFSRWTGRLLAGHTFA

SEQ ID NO: 65274 - protein, 675 aa, Zea Mays
MSGSSAAGEDIVQHLSSNSNPSSSKLAKLEARMAGKAVSAPSSPPHHPMSAPVISFMDQEELPETSSSDDDNCEEFLIQKNTLKRPRSPDGDNMLALGNFEGSVNEAAKILGVTDTKPSLDNSSRKKQGRGRGRAGTGRGRGSRAADQTRLTSTSSAAVTNGQLDKLTNKEPRSSVQLGHDDRAALQDELSTLRGKVAFLEEDLSKSHQEATNYHELSDRLAKELKDLKDHDQQMRLKQMKILSDLLIAVSKAERQEARMRIRQESFRLGNVAVMRAGTIISETWEDGQAIKDLNAHLKSLLETKETIERHRKSLKKRQSDKGDGSDAETGMSEEDILLQDEICKSRLMSIKREEEQYMRERDRYELEKGRLIREMKRLRDEDGSRFNNFQILHHRYALLNLLGKGGFSEVYRAFDLVEYKYVACKLHGLNAQWSEEKKQSYIRHAIREYNIHKTLVHPNIVRLWDIFEIDHNTFCTVLEYCSGKDLDAVLKATPILPEKEGRIIIVQIFQGLVYLNKRGQKIIHYDLKPGNVLFDEVGVAKVTDFGLSKIVENDVGSQGMELTSQGAGTYWYLPPECFDLSKTPFISSKVDVWSAGVMFYQMLFGKRPFGHDQTQERILREDTIINARRVEFPSKPAVSNEAKDLIRRCLTYNQSERPDVLTIAQDPYLSYAKR

SEQ ID NO: 65275 - protein, 149 aa, Zea Mays
MQQSNYGREGFSHITVTGALAHGTKEVEVWLQTFGPGQRTPIHRHSCEEVFIVLKGKGTLLLGSSSLKYPGQPQEVPVFQNTTFSIPVNDPHQVWNSNEHEDLQVLVIISRPPVKIFIYDDWSMPHTAAKLKFPYFWDEDCLPAPKDEL

SEQ ID NO: 65276 - protein, 462 aa, Zea Mays
MCDLFVSKYFPCIFFPNQAADIIAVSTSLLDTLPAVTTPTERADDDDETPMDVDIKINLDVDLERQITAAIDPKLLQHLVNALFRGTLSINDSDLSEPSDAEVDAVGCICAFLHVTFNTFPLERIMTVLAYRTEIVPALWNFIKRCHANRRWPFFSKFASSLPADAPGWLLPMSVFCPIYKHMLKIIDNGEFYEQEKPLSLKDLKSLVLILKQALWQLLWIIPSSSTQKVSSNPSGLKKLSVENVKIRARVGLSELLTQLQDWNNRLPFTSASDFYSQEATSENFVSQAILGNTRASEIIKLAPFLAPFTSRVKIFTSQLTSSRQSISHSALTRQRFKIRRNRLLEDAFDQLSLLSEEDLKGPIRVSFINEHGEEEAGIDGGGIFKDFMENITRAAFDVQYGLFKETADHLLYPNPGSGLVHELHLQYFNFLGSLLGKAMYEGILVDLPFATFFLSKIQFFK

SEQ ID NO: 65277 - protein, 858 aa, Zea Mays
MAGELGQQTVELGAVVRRAAEESYLALRELVEKSQAEAEGKGIGAGANGSWQRSDTEKKIDLLKFITRTRQRMLRLHVLAKWCQQVPLVHYCQQLGSTLHSHETCFTQTADSLFYMHECLQQARAPMFDVPSAIEVMLTGGYQRLPRCIEEIGSQHKLSPDEEKRALRKLDASVRYRVLVTPRPKEVSNVSVTDGIAVFRVDGEFKILLTLGYRGNVDLWRILHMELLVGEKKGPIKLDESRRFALGDDIERRMAASENPFAVLYAILHEFCISLAMDTIIKQANVLRQGRWKDAIRSELISDSATVQTGNTPLMQLVQDAEFDSSGFKIPGLKVNYWLDEKSTSTAEPDSSPFIKIEAGLDMQIKCQHSSFILDPFTDKEASLSLDLSCIDVEQLILRAVSCNRHTRLLNIQRQLCKNVQIFQSPKDVVLTRDVAAAKDPMMNAEKGFSDCFGNEVLQVRACGQAYVSLGINIRSGRFLLQSPENILPRAALMDCEEALNKGSTSATEVFSSLRTRSILHLLAATGSFFGLKVYQQSQGTLKIPKTLLHGSDLMVMGFPHCANAYYLLMQLDKDFRPVFHLLETQCDANGNTNASGDVKEAIRYNKINIGQMQILKNEMNENPFDVKLQALQSLVDSADMMESDLPVQNAIEPLPLLPACSPSFSSIVDEVFEYERGSTAAQNRCLPVDIQGINARVVSPMHDGCLSYTQANNNMNVHPNVSLNSYFPSNFRHLQGANKSLQLVPSSNDNSNQIPAQSSHSGNLGNATPGHLIGSSTTTGGNTIFQISYQVSLHYEDCNLVSQESGEKKQNQCRVSCLCRHTLLICNQEAVSPMEMFLLKEIIVFRQLYMLLCYYMS

SEQ ID NO: 65278 - protein, 378 aa, Zea Mays
MAPGGEGKPSTGGGGGGVKGGRKRKFLPHGKPVRKGAYPLRPGVQGFFITCDGGREHQATREALSLLDSFYEDLVDGKGSDEKPKNIPDKPLNKKIKFEDSDSSDDEDEDNSGEEADNGNVNDVEKGETAPSEKQQEVLDTSDTVSKDNEEQAVTADEPREKKQRVEDPPVFEQAVQKETADEPKESTDKPKESSEKNIDDLIDEDLKEIGDRKKRLFASLETGCNGCIFIQMHKRAGDPGPVEIVQNMMSSAALTRKHMSRFILRVLPVEVACYASEEEITKAISPLIEKYFPKECSSGHKFAVLYEARSNTGIDRMKIINAAAKSVPQPHKVDLKNPDKTIVVQIAKTICMIGVVERYKELSKFNLRQLTSPESEK

SEQ ID NO: 65279 - protein, 264 aa, Zea Mays
MGRCGGGSGAGAGGGALGGCALLTAALVISTLVIQGAGGSKQSHAPAVARKVLLSITNWHPHNYLDDVLHPSQVQDQRLERLVSLTSPPLPAIGRRMQSPAASPETAVHPAKHGKDHGTPVSAPSNVSHHHAMPANNTHGKTHGTPVLAPEKRRHHHLPANNSYVKGPAVSPSKSPIIHRKGHGVPVAAPPKEHWSYLPPANRRHHKGSRPAPRKSNNTSAPSHVYPGSPAPAPERLLIKGKGKEISAHAPRHPNHYHSHHNSP

SEQ ID NO: 65280 - protein, 1134 aa, Zea Mays
MVTPPTVEQEDEEMLVPRQEAVDTDAAQPMEGTVVAQTEVVSTAESQPVEDPQTSRFTWTIENFTRFSEKKHYLEVFVVGGFKWSVLIFPKGNNVDHFSMYLDVADSTSLPYGWSRYAQFSLAVVNQIQPEFTIRKETQHQFNARESDWGFTSFMPLSELYDASRGYLVNDTVVVEAEVAVRRIVDYWTYDSKKETGYVGLKNQGATCYMNSLLQTLYHIPYFRKAVYHMPTTENDIPSGSIPLALQSLFYKLQYSDSSVATKELTKSFGWDTYDSFMQHDVQELNRVLSEKLEDKMKGTVVEGTIEQLFEGHHINYIECINVEHKSNRKESFYDLQLDVKGCRDIYSSFDKYVEVERLEGDNKYHAENHGLQDAKKGVLFLDFPPVLQLQLKRFEYDYMRDSMVKINDRYEFPLQLDLDRDGGKYIAPNADRSTRNLYTLHSVLVHSGGVHGGHYYAFIRPTLSEQWYKFDDERVTKEDAKKALEEQYGGDEELPQINPGFNNAPFKFTKYSNAYMLVYIRESAKEKIMCTVDEKDIAEHLRVRLKKEQEEKEHKKKEKAEAHLYTIIKVARDEDLKEQIGKGIYFDLVDHEKVHNFRIQKQMPFSCFKEEVAKEYGIPVQFQRFWLWAKRQNHTYRPNRPLTVHEETQSVGQLREISNKAHNVELKLFLEVELGLDLRPLPPPEKGKEDILLFFKFYNPEKEELCFMGRLFVKALGKPSEILAKLNEMAGFPPDQEIELFEEIKFEPNVMCETIDKKLTFHYSQLEDGDIICFQKSPGAEYDAPVRYPDVPSFLEYVHNRQVVHFRSLEKPKDDDFSLELSKLHTYDDVVERVARQLELDDPAKIRLTPHNCYSQQPKPQPVKYRGVVHLSDMLIHYNQTSDILYYEVLDIPLPELQFLKTLKVAFHHPTKDEVVIHSIRLPKNSTIADVIYDLKTKVELSSPNAELRVLEVFYHKIYKIFPLHEKIENINDQYWTLRAEEIPEEEKNIGPNDRLIHVYHFKKDINQTQIQNFGDPFVLVVHEGETLAEVKKRIQSKLQVSADEFSKWKFAFISMNRPDYLQDSDVVPTGFQRREVYGAWEQYLGIEHADTAPKRVYTVNQVPSHARRFGGAFRNLRYLLGKNLHVDLVMYG

SEQ ID NO: 65281 - protein, 210 aa, Zea Mays
MDGARVLIAASATAVCCLACAVWIFRSSSSSFPASSNKHQPPPANFCGCASCGCRDAKSANGEMAVGGENKKKAPEPAPPEAPSMMEQLVPEITTHALSYLDYTSLCRLSMTNSAMRRAADDDGAWKALYHKDFTVEQGTINPPNGWKAYYAATKAIINLNAEFYNIIREGSLPAMSRFWLNADYVKCIHATGEFCTGGVHLVVLDLLLR

SEQ ID NO: 65282 - protein, 569 aa, Zea Mays
MFLFVCGAAFKVANGNGKAGPSASLVQKYMDMGFTEEIVRKAMKDNGDNGADSLVELLLTYQELGNDLKVDNGFASGCAPQTVDDSDDDDILENWDDEDADGGRSTRVANSIDDSEDEDFLNEMSQKDKKVDSLVKMGFPEDEAALAITRCGQDASISVLVDSIYASQTAGDGYCGNLSDYEGNSNGGRNKGRFMDGNKKKRKRYGGQAQGNRGPLDGSCEEPMPLPNPMVGFNLPDHWTRPVDRSLPTQAIGPPYFYYENVALAPKGVWTTISRFLYDIQPEFVDSKYFCAAARKRGYIHNLPLERRSPLLPLPPKTIFEAFPRTKRWWPSWDPRRQFNCLQTCTSSAKLLERIRVTLANSSDPPPPLVQKFVLEECRKWNLAWVGLNKVAPLEPDEMEFLLGFPKDHTRGISRTERYRSLGNSFQVDTVAYHLSVLKDRYPQGMNVLSLFTGIGGAEVALHRLGIRMNTVVSVEKSEVNRTILKSWWDQTQTGTLIEINDVQTLTADRIEAYIRRIGGFDLVIGGSPCNNLAGSNRHHRDGLEGEHSSLFYHYFRILDSVKSIMERL

SEQ ID NO: 65283 - protein, 889 aa, Zea Mays
MDHVPALVLAGCCFLALLPGWACGLGSMSSIAVSYGEDGPVFCGLNSDGSHLVACFGADASVLYGAPPNIPFLGLTAGDGFVCGLLLDTRQPYCWGSNSYVKSGVPQPMVEGARYSELSAGDNHLCALRAAQDGGRGSSAATSLIDCWGYNMTATHAVDEAVSTVSAGSVFNCGLFARNRTVFCWGDETVSGVVGLAPRDLHFQSIGAGGYHVCGVLENAQVVPSSAIGDGDVNIVPMDAMSTVVGGRFHACGIRSLDHQVACWGFTLHNSTSPPKGLKMYALVAGDYFTCGVPAETSLMPRCWGNSGPLALPMAVPPGICVPTACSHGYYEYVNHGEVGSIKVCKPANSRLCLPCSTGCPEGLYESSPCNATADRVCQFDCLKCVTDECLSFCLSQKRTKSRKLMAFQMRIFVAEIVFAVVLVLSVSVTTCLYVRHKLRHCQCSNRELRLAKSTAYSFRKDNMKIQPDMEDLKIRRAQEFSYEELEQATGGFSEDSQVGKGSFSCVFKGILRDGTVVAVKRAIKASDVKKSSKEFHNELDLLSRLNHAHLLNLLGYCEDGSERLLVYEFMAHGSLYQHLHGKDPNLKKRLNWARRVTIAVQAARGIEYLHGYACPPVIHRDIKSSNILIDEDHNARVADFGLSILGPADSGTPLSELPAGTLGYLDPEYYRLHYLTTKSDVYSFGVVLLEILSGRKAIDMQFEEGNIVEWAVPLIKAGDIFAILDPVLSPPSDLEALKKIASVACKCVRMRGKDRPSMDKVTTALEHALALLMGSPCIEQPILPTEVVLGSSRMHKVSQMSSNHSCSENELADGEDQGIGYRAPSWITFPSVTSSQRRKSSASEADIVGRRATDGRNVGSSIGDGLRSLEEEIAPASPQENLYLQHNF

SEQ ID NO: 65284 - protein, 250 aa, Zea Mays
MVAPGPGGGKASRPVAPEWWQGARAFSFANGVEVDPGTGAVYFTETSTRFQRREFLRIVVSGDTTGRLLRYDPRGGGGVEVLADGLAFPNGLAMSSDGTHLLLAETTTGRILRYWLRPTAPKAPALLEEVARLPWFPDNIRMSPRGGFWVGLHARRGKLAQYCISYPWLRRLVLALPPRHVQRASSLLSRLGRQVIALRLSEEDGRVVEMASVHGDLRRVFRSVSEVAERNGSIWIGSVMSPFLGVYKLQ

SEQ ID NO: 65285 - protein, 342 aa, Zea Mays
MAMRSLCLPLLLFSVSISIPPAVSANEELASLLAFKVAAISGGYGDPLASWNESSAGGGGYCSWEGVRCWGKHRQVVKLSLPSRGLTGVLSPAIGNLSSLWTLNLSNNGFHNSIPASLGRLQRLHNLDLSHNAFSGKLPANLSSCTSLVSLGLSSNQLHGRVPPELGGSLKRLRGLDLFSNNFTGTIPASLANLSSLTTLDLGLNQLEGSITPDLGGIQGLQWLSLDYNKLSGELPRSLLNLSSLITMQVQGNMLHGGIPSDIGSKFPNITILSFGKNQLTGSIPASLSNLTTLQDVDLITNRLSGHVPRALGRLRALESLSLHDNMLEANDTEGWEFMASL

SEQ ID NO: 65286 - protein, 491 aa, Zea Mays
MARRLAYTTALTTLFSYGLLFAFGQLRDLFRHLLGCFRPNKDDDVKQGYAPICVGLEDFFVRRLYLRVQDCFGRPIASAPDSWFDVVERTSDDNNKTLQRTSKTTRCLNLTSYNYLGFAAADEYCVPRVVDSLKKYSASTCSARVDGGTTKLHTELEELVARFVGKPAAVVFGMGYVTNSATIPCLIGKGGLIISDSLNHNSIVNGARGSDATVRVFRHNCPAHLEKVLREQVAGGQPRTHRAWKKIVVVVEGIYSMEGELCKLPEIIAVCKKYKAYTYLDEAHSIGAVGRSGRGVCELLGVDPADVDVMMGTFTKSFGSCGGYIAASEEIVQHLKHTCPGHLYATSMSPPAVQQVISAIRVVLGEDGSSRGAQKLARIRENSNFFRSELKKMGFEVLGDNDSPVMPIMLYNPAKIPAFSRECFRQKVAVITVAFPVTPLLLARARFCISASHTREDLTKALDVISRVGDLVGIKYFPAQRPKIAEAGHGN

SEQ ID NO: 65287 - protein, 307 aa, Zea Mays
MDFFKIKKFRKGNKSARGGGEVIESDDDASAGNVTPRGLVEQKPGIGEGNNAEVAVDGGGAGNGVVEEEEDDDDDFITNEVKRRLKELRKNSFMVLIPEDECAEVEEDGDEEEGGSPTEWLESGVGDGFPLCGLDSLYDKYCESMLVFHKMIAQLMKDPESLNMSKKSPRSASKLASTLRNLSFKRKDELPEDCEQLQQQQSGYDPYQTLETAYVAHIALSWEALHCTYVHLSLIVAAQPDNPTTYNSAAQAFQQFQVLLQRFIENEPFEHGTRVEIYARSRSLLSKLLQVPTFQGMSDVPCLHGTN

SEQ ID NO: 65288 - protein, 187 aa, Zea Mays
MSRLNISEYPRGIHNNQGLHANYHPNHPGYNDYSYRPPTQPNMPSNMQNIGHWGANPGCSQPSSDPQGLVRYILGALEVLKTEKIPPTEQYIADCIWYGHGDANMPNFDVKKALQVAMQHQAVVKKKLGKMSFFLGKDENLWKCVNIMDDNAKYPKETLDAVHAFMSSAPGYSEIKSSQSRLAAVVV

SEQ ID NO: 65289 - protein, 765 aa, Zea Mays
MEEEEYSSETSNEEDGEKEGNAAESDVFRPVDVDPACLPRVGMIFDSEEDAFQFYVTYGCHAGFGITRRSNNTFDGFRYRSTFICSKGGQSRLRSGVTKPARKRGVKTGCKAKMIVKDAHFQNRWEVIVLELEHNHPLDPNLLKFKRHLKNSPFTINPPQICESEGQQSNSALVHSSRVVDTGITSSSTQIEFKAKIDRNRKLKLAEGDLDALLDFLNKMQDQNPCFFYSLDMNEQGQLRNVFWSDAKSRSSYNYFGDVVAINVTNFSDQYDMQFVSFMGTNHHAQPVLLGCGLLAGRSLGAYVWLFGTWLRCMNAKPPHSIITNYCHDVAIAIKKVFPNARHRFCLSHILNVLPEKLEEIDNKDEIISTFTTLAYDYVTMTDFDREWQDTIQHFRLERNEWLSKLYEVRMQWAPVYVKDSFWAGMSVTDRSDSVTDYFDGWLMSGTSLKMFVEQYEEAVKGKLEKESYEDLRSAQMRPPMVTGLPVEDQAAKVYTAEIFQKFFNEIGHSFHCNYNILERNESVVTYIVSEHVDQTNKVDYKVAYDNVQGDIWCLCRLYQSKGILCRHALTVLRQELVLMIPQKYIIHRWCKDCKQTCASISQPVSAEVVEFGSMNSESKEYALSIMREVRDKVISYEKSLRDQRVDSHVSTANFAYNPVNEDFTDDALPISLSTKGWDLTQGQSKRSRKKKLATPTVLDTLKKKTKRAYNKRRNATANTLNTSATATDGITDGTNVENISFDLSQYNNAPSFHWPESSSRSQLH

SEQ ID NO: 65290 - protein, 151 aa, Zea Mays
MDFQSARERKPRSISAVSEEVPRKELPELLPLVDLRWRVVVPAAVAAQEATGAELLLRAAAGEALLLHRLLLLQLLLLPVPRRVRRRRLRVLRAVPALLVRLHLRLPALLLLRLPHVQRRVLRPALLPVPMMAMRNFACMLVVVVPGDDDG

SEQ ID NO: 65291 - protein, 300 aa, Zea Mays
MMKFTITLMGSAQARASFEHLQLFTVSAIVNNGPSVKKVWNELVTSSEPIVRIGPASSHSPESGWYSASSFFLRRRKSTCAAAFSVLAVASASAAAAQIFEYNGSAVVAMVGKNCFAIASDRRLGVQLQTIATDFRRVFKVHDKLYIGLSGLATDAQTLYQRLVFRHKLYQLMEERDMKPETFASLVSALLYEKRFGPYFCQPVIAGLGDNDEPFICTMDCIGAKELAKDFVVSGTASESLYGACESMYKPNMEPEELFETISQALQASVDRDCLSGWGGYVLVVTHTEVQERVLKGRMD

SEQ ID NO: 65292 - protein, 661 aa, Zea Mays
MSSWLRSAVSRAVEAGGRSGVARAVKGYADTVAHHAGQAVADILHDRMGVQNYKSFKKTVARLEEAAVSCRGGERVELLKRWLGALQDVDAENGSSDLKVSEANDPSGEMDTLKAQTVLFYDADIDGAPMNFCDVFLYSQALEGITLSMILEPPSEEEVSLLLEIFSICLTGGKEVNKEIMSNVQDLAKAFSEYKDEVLVKREELLEYAQSIISGLKRNADIVRIDAETLELQRKLDEKQKSRGQSPEYQDKTSDKIAAANLEVFKEALGELRLCSRVEELLLKKKSITLGDSLEIHSQKVDKLKVLADSLACSSSKAEQRILEHRRQKEDALNFRVKKENEVSVSEKELLDEITELEKQRDELEAQLKKVNISLNAAAGRLKQTREERDQFDEANNQIIFSLKKKEDDLSKSIALCNVESNVVKIWIGFLEDSWKLQSSYNEQKDNKTCDELEKCVSDFLKLTKHHLSAFKEVLSQLIENIETYVGFYLPCREEEKEHGDDEASERTDPRKSLEEEYLETEKKIIIAFSIVDHIKKLFYSGEGADSRRDDPEVKSLIEEIEKMRESFESIERPTLSIESEKAKPLPVEGSKLSPSPLQAPATPKAAHVDSPKSPMKPEQHFDSDAELATLGSEIGKEDKEYSVEEISGWEFDELEEDLKS

SEQ ID NO: 65293 - protein, 70 aa, Zea Mays
MISTVALRPLHCKTKARLRRSLLIPCVHLAQKTTWNSAHCNGSRMDKHVTGLICNSFSVMTVVGDLFSNA

SEQ ID NO: 65294 - protein, 188 aa, Zea Mays
MPVQHIQASSSTPPATGEPRIGMRSCPIDVEAIDDDAVIYSSRPLPRARQQLTTTESITIIIDDDSETNLETAGDALDEHVNLLLSLGIERSHEPTSATNTFPGISMVDTPKVNTFKVPPEPVKEVPKEPKLSCPICMNEITEAASTVCGHIFCQPCIKAAIKAQKKCPTCRRKLTPRQQHRVYLPSP

SEQ ID NO: 65295 - protein, 777 aa, Zea Mays
MGFNRILTNGAPIGLFFGGSLFLYNRRVNRYFRRDGHTWRRKKDGRTVGEAHERLKVGNVDALSCYYAHGEQNPSFQRRCFWMLEPAYEHIVLVQYREVDVVRNYSSQLSNGLPEPLSSLGYPNAICGNQYHSSSSGASECSESHQSYSNLSSVTEVSSYSGNKEYTKNDGGLLSIPEVGHTCLQQNRTDNGNSKNKSGLNIALKKIAEQLSLGEDDDDYIFSNQAHSVGGDNQVKHIQQEGTQKGLSRNIAPSWEDVLQSSSGLPISSIYQQSDVEYQKNSEYHPPERLDSSDLRIQLAAAKKFLLGPEATVDSPSLNSVLRNRANCVTDTISAYDSRFGSSLNPDWQTKTALTFQSNSQGSEITELFDHGHFEHYSREDTTFSLGQTNKFNIREISPEWAFSYEITKVIITGDFLCNPSNLGWAVMFGDSEVPAKVVQPGVLLCHTPLHCSGNLRICITSGNREVCSEFKDFEFRSKPSSSFTDIAPSSRHLKSSEELLILAKFARMLLSGNGNPEVPDGDPQSGQCPKLKMDEGLWDRLIEELKVGCESPLSSVDWILEELLKSKLQKWLSVKLRGFNGTDSISKHDQGIIHLISALGYEWALSSVLSVGVGLNFRDSNGWTALHWAAYFGSCSFRRNTKVAKVATFLNMRRNAVKIQAHVRGHQVRKKYRTIVSTVSVLEKVILRWRRKGHGLRGFRAEQQSMVEAIEEDDEEDDDFDDDEAVKIFRRQKVDQAVKEAVSRVLSMVDSTEARMQYRRMLEEFRQATNWKDQMK

SEQ ID NO: 65296 - protein, 387 aa, Zea Mays
MASAGISGSGDDDAGGKLLADRYQKGEVLGEGTYGVVFKAIDTKTGNTVAVKRIWVGKDKKEGVNFTALREIKLLKELKGPNIIELIDCFPYKENLHLVFEFMETDLEALIKDKNIILSPADTKSYLQMLLKGLSFCHKKWVIHRDMKPNNLLIGADGQLKLADFGLARMFGSPRRNFTHQGSSDIDQLGKIFAALGTPKSSQWPDMVYLPDYVEYQYVAAPPLRTLLPMASDDALDLLSRMLTYDPKARISAQQALEHRYFSSLPAPTRPSQLLRSRWKGDQGNNKMPDLNLQHGPLVLSPPRKLRRVIAHEWMEGMHRADKVDEHPSGMRHTDDMPSQKSSRIPMSVDVGALFGTRPAPRPTLNSADKSRLKRKLDMDPEFGFAE

SEQ ID NO: 65297 - protein, 380 aa, Zea Mays
MPSCLLPGIAPRPPPAALRSLLLRRSRMASSGPARAFQLRLNPLTGDSEWLVVDEAETEAEVAAPAPTHHKQLLAATSYLDMLNDASRNRAYRLAIDATVTDPTSRVLDIGAGTGLLSMMAARALAAAGGEGRGSVSACESYLPMGKLTRRVLRANGMENKVKVFHKRSDELGVGVELDSRPDILVSEILDSELLGEGLIPTLQHAHDMLLVKNPKTVPYRATTYGVLVESTSLWKMHDLHSNEANAEDGVRLIPSGTQIVLSVKSQQHAMQCDALADEIRLLSEPFKVFEFDFSERPDSHRETKIEIKATADGHAHAIVSWWVLQLDSSGSVFYSTAPRWVRQSSGVDLPQYANGSKNYCDSHIYGISPGFILIPCMQN

SEQ ID NO: 65298 - protein, 370 aa, Zea Mays
MRRRTGAEIRVYSKADKPKYLSFGDELVQVAGPPAIARGALTEIASRLRTRTLRDTSTANNPPPFAPSDDPTVDMPSRKLTLYGGPTNDTPYGRPANDPLYGRPAIDPPFGRPTNDRPYGRPAIVPPFGRPTNDPPYGRPANDPPYERPTNDPPYGRPSSTIAYGRPNRSAPRDPSDAYPVDYFSKREHPSGGPMFTSNAPSAAYERYAAPTHFPTREPPSTFSHRSYRDHMPTDSYSSRGTQKLDITRDGNSDAYDYTEAAGQIHGLEDYRGLPSASGFSSTIELRIPNSSLESIVGVGGVNLAEIRQISGARLRLHEAHAGSSESVVEIQGTLDQAKAAQSLLEGFISANSRQQQSHSSRMPLYPRWG

SEQ ID NO: 65299 - protein, 57 aa, Zea Mays
MAVAHHFFLLPRSPPPPRSKDREEEEQDGLKRKRGSRRCSTPPSIADFPGETLGKDG

SEQ ID NO: 65300 - protein, 147 aa, Zea Mays
MRQLRMCIVKYWEDNSVGKLTTLRVKQSSGSYCSFSLAFQNDDQKSEGSMELLNSVKAISIHPLSNNKFLVLDSSGVLHVFIFSTTQMVSRGAIKQCSENIHTYRLHYPMKVQLSAVFSVTSIKCLCRDTIFLGFRWWTYCTCYVRS

SEQ ID NO: 65301 - protein, 89 aa, Zea Mays
MPPPRAIVRATPHAPVQCPGHLDGSAQSCLVSGSTTSTSTKGRIYHKTYGCQMNISDMEIVLSIMKNEAIRVCHLYMTFGCKWIMIIVE

SEQ ID NO: 65302 - protein, 336 aa, Zea Mays
MAFSAKPHCSCSTTTKPPTPVAHLSPPPSLSVRAAACAPRSAYGLSAAGVGGGKASPSTVRLRARAQRIRASQQQPRRRPEYVPNRIDDPNYVRIFDTTLRDGEQSPGATMTSAEKLVVARQLARLGVDIIEAGFPASSPDDLDAVRSIAIEVGNPPTAGAGTAHVPVICGLSRCNRKDIDAAWEAVRHARRPRIHTFIATSEIHMQHKLRKTPEQVVAIAREMVAYARSLGCPDVEFSPEDAGRSNREFLYHILEEVIKAGATTLNIPDTVGYTLPYEFGKLIADIKANTSGIENAIISTHCQNDLGLATANTLAVVPFPCLFIFYIIYYHVSTL

SEQ ID NO: 65303 - protein, 52 aa, Zea Mays
MVPHQEDLAGHRRRRHRRGDPPHGPHSLPWLQMSLNPEPWARAARCQRMGAQ

SEQ ID NO: 65304 - protein, 558 aa, Zea Mays
MAAAAEIGGFTAAALRPLAHPAPAAAPRRAVAAQSLRTTATETLTADLAASTANGAVHAQMYSEASSEIPSQAAIANSRRKTKIVCTIGPSTNTREMIWKLAETGMNVARLNMSHGDHQSHQKVINLVKEYNAQNTDGNVIAIMLDTKGPEVRSGDVPEPIMLSEGQEFNFTIKRGVSTEDTVSVNYDDFINDVEAGDILLVDGGMMSLAVKSKTADTVKCEVVDGGELKSRRHLNVRGKSATLPSITEKDWEDIKFGVENGVDFYAVSFVKDAKVIHELKDYLKGVNADIHVIPKIESADSIPNLQSIIAASDGAMVARGDLGAELPIEDVPLLQAEIVQTCRNMEKPVIVATNMLESMIDHPTPTRAEVSDIAIAVREGADAIMLSGETAHGKYPLKAVKVMHTVALRTESSIYNPTTSPSVIASAQNEEFSPSQLSKMFGSHATMMANTLRTPIIVFTQTGSMAVLLSHYRPSSTIFAFTNEERVKLRLALYQGVIPIHMEFSDDAEETFSRAISSLLKAQYVKKGDYVTLVQSGVTSIWREESTHNIQVRRAQV

SEQ ID NO: 65305 - protein, 140 aa, Zea Mays
MYFGYTSCPDVGPAEVQKIADVVKLLESKYDINITPLFVTIDPQRDSPAQLKAYLTEFDPRIVGLTGPISAVRQIAQEYRVFFKRVEEVGQDYLIESSHNMYLLDPCLETVRCFGSEYEASDLAEAITTEVQKASASSTN

SEQ ID NO: 65306 - protein, 707 aa, Zea Mays
MRCLVGGGVQDSPRAAAKRVSPASWRLDAATAEADAGRAEAKGVRFCVRPPDVMETVHEVAIYIHRFHNLDLFQQGWYQMKISAMWEEGGNKTPASPARVVQYEASDVGADDALGIWKIDDVDNSFHTQPFRIKYARQDIYLSVMVSFNIFNIEEEGPAASAVMLKFELMYAPTLENGSELQASSVTSSAAVHEFRIPHRALLGLHSYCPVHFDAFHSVLVDLTLHIVYLKAGATKPSLKVPDQGLGPTSYHIVKALLTSRKLLLEELKKISGAIGKTVEELDVADLNLGRYESFNPSKSGLPNSSKVFPATGKGVGQLTGVLHDFLEKNNDMVNGTDDSMLVNKTKILEYLHDAWAIDRKAEWSIWTVHSKIEIPHRYLRSMNDESSHRHSLLRVSGSRKFHDDPAQNSASRAELHRKSIAQMKNNMSWLFHSIVPARIWLRMLLNKRILLCYLNYKESLWYPKVVLGHHLDLRLVRNQWLLLDPGADCLMSEANEDKTSGDFKEMGSRLAGEVIAFLKKKMDKLSRYGGCKELKLSFVGHSIGNIIIRSALAEPALQPYLKNLYTYMSISGPHLGYCDDQDPHNTYFYKLCKLKTLENFKNIILLSSPQDGYVPYHSARMELCPAASSDTSKKGQVFTEMLNNCLDQIRAPSSDTRTFMRCDVNFDQSNHGRSLNTMIGRAAHIEFLETDIYAKFIMWSFPDLFR

SEQ ID NO: 65307 - protein, 437 aa, Zea Mays
MESIDLKVQVVESSFIAPSEPTPSKGLWLSSLDILLVNIGHTPTIYLYSSNDVAAADFFDVGRLKKAMAKALVPFYPLAGRLGNNSDNGRTEISCNGEGALFVVAHADGDLTIDDIKKLKPSPELRRLFIPLIEPSSIIMAIQVTSLKCGGVVLGTAIHHAAADASSAFHFFQTWSAFCKHGDRAAVAVELPCHDRTLLRARSPPTVHPDALLTLLPRLTLSDPEGSLATEVFTISSDQLASLKHLCGGASTFCAVSALLWQCACVARRLPPDSQVRMLFPADLRRRMRPPLPSHYFGNAVFRLCATGRAGDIGTVALGSVAARIKGAIDRMDDELVRSAIDYYEYETAEVNKRRTPTGTLPQTDLNITSWLGRSQYDADFGWGTPQFMSRADSDRGGFVHLINDEGGGTATGDVRVLVTVGAENIKELGRLLYAKL

SEQ ID NO: 65308 - protein, 398 aa, Zea Mays
MYKKVRRKSSLLKILLPIILCVLLLMLGALVWTCKSRGKRQKKRVQKRRMLEYLSSTDDAGDKNINFPFISFENIVTATDNFSESNLLGKGGFGKVYKGMLEGTKEVAVKRLSTGSGQGKEEFKNEVVLIAKLQHKNLVKLLGCCIHEDEKLLVYEYLPNKSLDYFLFASARKSMLQWPTRFKIIQGVARGIMYLHHDSRLTVIHRDLKASNILLDKEMNPKISDFGMARIFSGDQLQANTNRVVGTYGYMSPEYAMKGAFSVKSDTYSFGVLILEIVSGLKISSPYLIMDFSNLITFAWNMWKDGKPEDFLDSSVTESCSLDEVSRCIHIGLLCAQDNPSCRPLMSTVVSMLENKATPLPTPKQPKDFALRDYNPGNEGVHRELSVNDTSLTMVEGR

SEQ ID NO: 65309 - protein, 285 aa, Zea Mays
MATYDHAATPTPQSPGVGGVPFSSCIGDLLRFVLSSHAAAYPGDDTVAFPLSPSYCARLLNDGELFEKLEACIQQCLEEGRLPGPPAVVGIPAEEEGPEERGWKLLLPEKGAELKRMYDAVEFELHVQEPYFTQLRAGVKKVEGRLATGNYNRITQGSLLLFNKCLLLNVEAVRKYNSFSEMLKGEKISNVLPGISSIVEGVKVYRKFYAEEKENSYGVLAISVSKPTSQPYITMNNILAGLGYDGLGRLLGMAKTTGTVPDGLPPPRSALLSSCMGLVQPNAVL

SEQ ID NO: 65310 - protein, 622 aa, Zea Mays
MESASDVQMQHRAEDSETTIEIKIKTLDSQTYNLRVNKCVPVPLLKEKIATVTGILSEQQRLICRGRVLKDDELLSAYHVEDGHTLHLVVRHPGQSATFGNAATEANTSNSGRRHGPTVARSVVLEAVNVDPGSSELPAFVAQILQSVLGTINAQSTGTPTSSDTGSLDPSQSSIPNTIRVELDQQQAPLLFQSEPAHESSQPNVIPDALTTMSQYINFMRDSFRREGFSLNGQTEGNVENRTAEPESASVLGLHNASLLAENMHSTRQIIVEQAGALLSSEAVVNSGPALYISPSGPNPLMVQPVPFPGRSVQMGTLFSSLGSQGSVLHPRDVDIHVRTSGSVPGASTNPSDSAGAQAHQNVNRPGDASHANIGEAFSGVAGGTPFSVESGVRLLPLRTVVAMPAGISRAPSGSSSGGLGIIYPFLTRVRQRANTNGNDERNGQSPNESARSSTHLNQQSIPQSSQTHEAGNLRSPVDVNVGDGSETSPGQQNGLVTLSQIMDFFGSMLPGENVRGNTSSQQPPMASTEQGEGRNLATPEVSGASEEALRFAGMVRQIMPFISQVETQNQSAPPDSSSTPAQAASGSADRARDVPNDSTSSRQHNRDQIDEPNSKRQRTSD

SEQ ID NO: 65311 - protein, 105 aa, Zea Mays
MAPPCMPAALARRRCLIGAIFCVDPVADPAEPCLELGRQREMIGPRRTGLVRWGEPGAGRRIVVVSMIRWTYHFGAGVRGGAPAAGGPVTAEGHGTVGSGRPVSF

SEQ ID NO: 65312 - protein, 295 aa, Zea Mays
MRDTLHTPNSSCYLSMLVLPKALDSNACHYESFDDTVARANAWFYSSQAAGIPIDFMNVQSEALLTKISGETASASVNSSSLSDLSNVTNATLYGFEDYHGVDIGVVKAARLWYSCVGGELLLEIPLEEGDTRLGFAISRTEEGFIYISSVVEDDKESEAPSTRSGLCDLFNRAKEASKLLIISRVSNEKVLPWMISSSGAVRCFDTISLSQKLSLHRLAVRPIQLHLLAWEKPSAPNPAERAVRSPKLTMPSTLLPHLQQNLVETIEGGVDAEEEYVGNLSFRIDDISFESSWV

SEQ ID NO: 65313 - protein, 140 aa, Zea Mays
MGRSVEHMVLAVWFVRVDNFSVGRCREDGGRGEAGAEELLGGASQEPHRRCHDAGLPRCQSRQGATCRSGQGGCPKILFLLPSDEGTSILELGAGIGCFTGELAKTVRNVFALDFIESAIKKNESIKVCSWILHSERLKR

SEQ ID NO: 65314 - protein, 1650 aa, Zea Mays
MFHKKRTIPEYNTVSLNTGDSITDTSALKQTSKSKSILPLLKKHMLTFPDKVSFSVPKLDVKFRHLHEGLSVDNNITGIQFTCAKSLPQDDFEEATPHFDVQIDLSEIHLIREGSSSLLEVLKVFTIASLDVPVDPFLPIRAEIDAKLGGTQCNIMLSRLMPWMRLHSLRTKGMKLSKRNSNQEISQKKEMKPILWTCTVAAPEMTVLLYSLNGLVLYHACSQSSHLFANNIASKGIQIHTELGELLVHMEEEYRELLKENIFGVDTYSGSLMHIARMSLDWGYRESDVQDMVETSRNALVFSIDISDMEVKFGFKHLESIVLNLMSFRTLFKSLQLSGGSAKEKNLERKGEKKMKGVKKLKLSLQKFSITYCGDANIISMPIADPKRVNYGSQGGQVIVSVSADGTPRRASITSVLPDCHLRFSASLVISHLSMCIDKERKTTEAELERVKAIYEELPEDRSGVRVTLLDMQNAKIVRRSSGHAEVAVCSLFSATDIYLRWEPDAHLALYETFIRFKHFLHHNVSQNSEKMINTEVASTKSNEHGNITAGFINSQKSNRKGSIFAIDVDMLRVSAELADGVEANMHVQSIFTENAKIGVLSEGLSLTFNGARVLKSTRIQISCIPFSTGSLLDAKIEPSSKRDWVVQGLDVHICMPYRLPLRAIEDAVEDMFRALKLVSSAKRSIICPDEKEKSRKVNSGGSKFGSVKFVLRKLTADIEEEPIQGWLDEHYHLMRNKICELGVRLNYLEEAISGSVDPSNHSSERKVLYNGVEVDIHDTTALQKLQEEIHKQAFRSYYVSCQNMVLAEGSGACSEGFQAGFRQSSRRASLLSLSASDLDVTLTRIDGGEIEMVEFIKGLDPVCQEQNIPFSRLYGSDVSVVAGSLVVQLRDYTSPLFSSLSGKCQGRIVLAQQATCFQPQIHQELYIGRWQKVTMLRSASGTTPAMKMYSNLPIYFQKGEISFGVGYEPSFADISYAFQVALRKVNLSTRASCSGLAVQLPKKERSLPWWDDMRYYLHGKIILYFNETKWKFLATTNPYEHVDKLQIVSEYMEIQQTDGRVDVSAKEFKIYISSVESITKNRRIKVPSRVPRPFIYAPLFSLNVVIDWQCESRNPLNHYLHALPVEGEPRKKVYDPFRSTYLSLRWNFSLRPLQSQYGNGPPPPFYGNNSMLRGIMSGSPCKMTDDDFPTMNLGAHDLAWVFKWWSLNYSPPHKLRSFSRWRRFGIPRATRSGNLSLDKVLVEFFFRVDATPCCIRHAPLSEDDDPAFGLTFKMSNLKYELCYSRGKQQYTFDCKRESLDLVYRGLDLHRPEVYLMRDNNLSSVENVSKVRTMVQQSHGKFVHDRCNMGNFQEKHEDGFLLSSDYITIRRQTRKADPERLMGWQDTGRSHEITYVRSEFEDDSESDHTLSEPSDDDDDFNVVLADNCQRVFVYGLRILWTIENRDAVWSWVGGISKAFEPPKPSPSRQYAQRKMIEERNAEGSKVPQDSSSSIHVGSPSVQHLDASGSSSSLHSKANRSSDVAVNHDIFDDSDKGGTAQYMVNVITPQFNLHSEEANGRFLLAAASGRVLARSFHSVVHLGKEILEQALGTSSAQILELQPEMTWNKSELSVMLKDVQAHVAPTDVDPGAGLQWLPKVLGSSEKLKRTG

SEQ ID NO: 65315 - protein, 65 aa, Zea Mays
MFSYINLYGKYPPGLFSSECKEGKQGLSCADVLERDSATASSGHHAQISLLALITVLSVVVALFH

SEQ ID NO: 65316 - protein, 221 aa, Zea Mays
MGPRRDLPPITSFTTATRLAHSMEVVGLPRFVSCHSSSSSPVSLSIHPIPPGEKRDKSNLAASWALSAGAMASNSAPGAGYECGSDNDGGLHKPLLPNSGSCQRTGSRQPSLNAAGTSSRAVLRESHVSAFLCTLIVALGPIQCGFTSGYSSPTQDGIIRDLNLSISEFSAFGSLSNVGAMVGAIASGQMAKYIGRRGSLIIAAVPNIMGWLAISFAKVWC

SEQ ID NO: 65317 - protein, 559 aa, Zea Mays
MALPFMHIPRHLQAHLLRKNPLTYHRSFKKDISSPNSVLEPHSEELHKIHLGLSSGVEDATKWEHINIKSIEPDGAYVIASQLNLVEEQQGGSYVASLELELQQARDRVSKLEAERFSAKKQLNHLFKKLAEEKAAWRNREHKKVQAILEDMKADLEHEKKNRRQLETINFKLVDELKEVKMAAKQLLQEYDNEQKTRELTDEVCNKLVREIEEHKSEIEALKQDSVKLRGDLDEDRKLLQMAEVWREERVQMKLVDAKLTLEAKYEQLSKLQEEVEAFILTFSSSKGDSTIVEAAHNIVQAIGSARDQEVEFTYEPPRASEDILAIFEELRPSEEMEKKETEPCLKQEIQEASPTADIFLENRARLFPDGSHSDESDKEDGSSWETMSHEEMQGSSHSPYESEHSVNKIFDRISWTSGNDSEGEQANKLCDDLSSVYLTDMEQSKKKESAISKLWKSSPLKNCEFRTKDVADMINGRLSSASLPNGVYSTAKGLNLDMGDSTPSTTQWSSPDSMNSQLNRGFRGCMEMVQRQSLKAKLLEARMESQKIQLRHVLNQKT

SEQ ID NO: 65318 - protein, 401 aa, Zea Mays
MGSTSATGTTSSSSSAAHGGGAAHVLLLPYPGAQGHTNPLLQFGRCLAYHGLRPTLVTSRYVLSTTPPPGEPFRVAAISDGFDDGGAAACPDLDVYWRQLEAVGSETLAELIRSEAADGRPVRVLVYDPHLPWARRVAQAAGLAAAAFLSQPCAVDVVYGEVWAGRLPLPVVDGKELFARGLLGVELGPDDVPPFAAKPDWCPVFLRASLRQFEGLEDADDVLVNSFHEIEPKLEELGNGLYNSGKPFIWVVRSNEEHKLSDELRDKCKERGLIVSWCPQLEVLAHKATGCFFTHCGWNSTLEAIVNGVPMVAIPHWADQPTISKYMESMWGLGVRVRKDEKGLVTRDEVERCIKDVMDGDSKDKYRKSATMWMQKAKSAMQNGGSSDKNITEFVAKYSLS

SEQ ID NO: 65319 - protein, 435 aa, Zea Mays
MAERLAASLLPAASPSPSARRATVAAAAAASFPSPCSARAGLRLRSRPPLFSQKAAGRGCGLRVVRCMAASDAVQLKAAREDIKELLKSTYCHPIMVRLGWHDSGTYDKNIKDWPQRGGANGSLRFDAELSHGANAGLINALKLIQPIKDKYPGITYADLFQLASATAIEEAGGPKIPMKYGRVDVTAAEQCPPEGRLPDAGPRDPAEHLREVFYRMGLDDKEIVALSGAHTLGRARPDRSGWGKLETKYTKDGPGEPGGQSWTVEWLKFDNSYFKDMKFLSQLPWKEQKEQDLLVLPTDAALFEDPSFKVYAEKYAEDQEAFFKDYGEAHAKLSDLGAKFDPPETEEPTLVAVGAAVATATADDNNGAAPQPEPFIAANYSYGKRELSDAMKQKIRAEYEGFGGSPDKPMQSNYFLNIMILIAGLAFLTSLLGN

SEQ ID NO: 65320 - protein, 278 aa, Zea Mays
MASVAGSGGGASAGAGGLKTYFKTPEGRHKLQYEKTHSPAVVHYNHNGKTVAQMTVAYLKEKPAGQGSTPSTPSAGSGMRSAAARLLGTGNGSRTLSFGSNGTSRAVSGSSRMGGGIGVSTSASGSQGMANYDGKGSYIIFNTADTLFISDLNSHDKDPIKSIHFSSSNPLCHAFDPEAKDGHDLLIGVFSGDVYSMSLRHQLQDPGKKPVSYQHFVNKDKDKDKDPSQVSAPVLHGFRSVKEFLLLVMLMGICMCMTNSRMEILIGHFQLLRIKARC

SEQ ID NO: 65321 - protein, 514 aa, Zea Mays
MGLLSSLPPHRRGAFSGGGWQWSFLDVVWGVFLIAVVVFLALVFTPRRGDPILTTPSVARAGGTVPPCAASEVDLLPCEDPRRSSRLSREMNYYRERHCPTRGEALACLVPPPRGYRIPVPWPESLHKIWHDNMPYGKIAERKGHQGWMKHEGSYFIFPGGGTMFPDGAEQYIEKLSQYVPMKTGVIRTGLDMGCGVASFGGFLLKENIMTLSFAPRDSHKSQIQFALERGVPAFLLMLGTRRLPFPAQSFDFVHCSRCLIPFTAYNGSYFIEADRLLRHGGYLIISGPPVRWKNQEKEWDELQAMAGALCYKLITVDGNTAIWKKPAEASCLPNQNGFGLDLCSTDYDPDEAWYFKLNKCVSKISVAEETAIGSILKWPDRLSKPSARASVINNGANLFEVDSQKWVRRVSYYKKSLGVKLGSTNIRNVMDMNAFFGGFAAAIISDPVWVMNVVPGQKPLTLGVIYDRGLIGVYHDWCEPFSTYPRTYDLIHADAIDSLISGPISGTSRLLLC

SEQ ID NO: 65322 - protein, 319 aa, Zea Mays
MPKFGWRWLLALSAVPSFLLLLFYAITPESPRFLCMKGRTTEAVDILEKMARLNNVQLPSGRLVSDKNIELDEVSGSSESTTLLAGAEESDNLNEDQGSDFGGIKSVGKLLAPKLIRATLLLWMAFFGNAFAYYGIVLLTSELSNGNRICAKEDVESVHSTNASLYKNVFISSFAEIPGSFLSAMIVDRFGRKRSMASMLFTSCVFLLPLVFSRTDILTRISLFGARLCISASFTIVYIYAPEIYPTAVRTTGIGIASSVGRIGGILCPLVAVALVHSCQQTTAILLFELVIFLSGLAVSFFPFETKGCRLNDTDVDMN

SEQ ID NO: 65323 - protein, 1108 aa, Zea Mays
MDRPPHLVIDLNEAPPPPSSDTPPAQAPSPPQELAPPVQAPPPPPPPPPPPQFPPLLPPQLPLGAPNQQVRLQQEALDVVLRVHRPLELRNTPFGPIGNVPAGLLPGLGLPLLPLQPPAPHPGEAGWGNPPAPCSSCGRQEILGGTLVCDACDRGFHPNCVRVWPPLFPPPPPPGPPGARRPRAAANEDWICPACERRGARSTRWKLGAVELDINAAPPEDPVTVIANDIRRQNITDGPQLTVANLPHFEGGHLQNTTLYDGMQFMPAFDLAQCFGMRQNFTSMDQDLIADGNVPQRSAHLRRRRDLPQTSTLPKVAVNHELGSAGTSMDPSFFNNTIKQSPSENRSSLKPPIFLMENSNHQPHHHTVALPVQYSDFFITSLGEIDNRTSYHNSYQIWPVGFTSYWHDRVTGSLFECEVHDGGNFGPLFKMRRLPCSAFQLPDASTTVCLNVVRNADTIETKEGSDLIEDTANDANDNISMLLSDFSETNQDFLSCLGNDLEGKESLGCSNVETKDMTVPDVLSDPGSFSWAPTNDANMYDKIGDFSYEGTSPSSVWRMISCAMMEACEKMYKEHGHLVLFCTHSSEKSPFDYESGPQRTDGPFNLLAKFCSSNGPKVPQFIEKENDVQSTCALLKEWLYPDRIGFDLEFVQEFVESLPKSGACSHYQFLCNRTGINSSLTIASGTLVAVNKNSPMHARHGSVVSGPQDHAQPSSSSIRELPPGNPISRKLAPELAGDVFQILEFLGRFAEIIGLKELPSIEQVEDELIDPWPMHPNKNDIHNYMDHNPPMNSPANVSSSYSNGESGITSIEEMVYVSIPVETSSAREAAQNKLAAQTLGRCSGLVLPEIHIALLKVLFTELVSRVAIFVDPSIDLKESKSRRGRKRDTDTLTRELKIDMLTANNLTWPELARRYILAVSSMSGCMDLSDISSREGVKLFRCLQGDGGILCGALPGVVGMEKDASLLAEAETLICNSSANEGNTVFMMDYKDTDIVDSPEEPASDTTLPDWVKSLEPVRKLPTNVGTRIRKCVYEALERKPPEWARKILEHSISKEVYKESCFIRLDRGMPYKSTPEYRKTKKREKYYLHLRGCPEKVPYCPAACYFL

SEQ ID NO: 65324 - protein, 130 aa, Zea Mays
MASSAVDLRSCPGIVAQRAPPWICAAPIHAVDLRSRGHDSSLASCIPPHRTRRARQNVAACCTLNCAVPIALSSPRNKIPGNLVEKKVQFNTPYVFDDMLKPLVVVVLAKKNQVGSGCGTLVDHVMRKSS

SEQ ID NO: 65325 - protein, 356 aa, Zea Mays
MRSAEDIAYAVLRFFAKGGSLVNYYMYHGGTNFGRTGASYVLTGYYDEAPMDEYGMYKEPKFGHLRDLHNVIRSYQKAFLLGKHSSEILGHGYEAHIFELPEENLCLSFLSNNNTGEDGTVIFRGEKHYVPSRSVSILAGCKNVVYNTKRVFVQHNERSYHTSEVTSKNNQWEMYSEKIPKYRDTKVRMKEPLEQFNQTKDASDYLWYTTSFRLESDDLPFRNDIRPVLQVKSSAHSMMGFANDAFVGCARGSKQVKGFMFEKPVDLKVGVNHVVLLSSTMGMKDSGGELAEVKSGIQECLIQGLNTGTLDLQVNGWGHKAALEGEDKEIYSEKGVGKVQWKPAENGRAATWYKVS

SEQ ID NO: 65326 - protein, 765 aa, Zea Mays
MATAPPCACGAPSPSLRCPLALPLPFATSHPAVRLAAPPLLARRLAVSPRRAASALEALVLESDDEEEESGIGLFQGEEWAATADERDAVRSPELEVFELEELPEQWRRSRIAWLCKELPAYKHSTFTRILNAQRKWINQDDATYITVHCLRIRHNAAAFRVYSWMVQQHWYRFNFALATRVADCLAREGKVEKCREVFDAMIKQGRVPAESTFHILVVAYLSVARGGCLEEACTIYNQMIQMGGYKPRLSLHNSLFRALVSKTGGTAKHNLRQAEFVYHNIVTSNLEVHKDIYAGLIWLHSYQDVIDRDRIKALRDEMKRAGFEESTDVLVSLMRAFSKEGDIKETEATWHWLLRSGCELPAQAYICRMELYARTGEPMKSLEMFKEMKNRNIPPNVASYHKIIEIMTKAREIEIAEKLMDEFVESDMKHLMPAFLDLMYLYLDLDMHEKLEHTFTKCLGRCRPNRILYTIYMESLVRIGNVSKAEEIFDEMHKNGMIGTNAKSANILLRGYLLAENYQKAESIYELMCKKKYDIPVESLEKLQSGLLSSKKVVKPPKPVSTQIESHAQKGVYIVNFKFQEDSHAHSALRVHIHERFFEWLPSACRSLNRESEIPYRFSTIPHAHFGFFADQFFQKGQPVLPKLVHRWLSPRVLAYWFMSGGVRLQSGDIVLKVSGGDTGGVERIVKSLQAQQSLACKVKRKGRFFWIGFQGCNADSFWKIVETYVLDSFASSTEESHNVGSDGLQDYTYYESDTQRHGRESEE

SEQ ID NO: 65327 - protein, 262 aa, Zea Mays
MPLLFPATPPLPLCRAARVSRRATASVASAARSSSSSSASFDAAAFEAERLRLDAAARAGMESTAAAAEAGPRAWKWAIRKRVWDALEAEGIARDPRPVHHRIPNFDGAPAAADALGRLDIFQKSHCVKVNPDTPQKQVRFLTLSGDKKLLTPQPRLRTGFFSVMDSQMIPVGCIPEACTSVGAAKYGRPIGLDESLKVDLIVIGSVAVDPSSGARLGKGEGFAELEYGMLRYMGAIDDSTMIVTTENQGLMDVRAFGCCSP

SEQ ID NO: 65328 - protein, 194 aa, Zea Mays
MVFFKANLVLLYFEFSSSWCWLLCFRGTPPPRSDHAAACHADRYLLIFGGGSHATCFNDLHVLDLQTMEWSRPKQQGLTPSPRAGHAGATVGENWYIVGGGNNKSGVSDTLVLNMSTLTWSVVSTAEGRVPLASEGMTLVHSNYNGYDYLISFGGYNGRYSNEVYTLSLKSDFKSTTKEETVSDLGSSNQRLKW

SEQ ID NO: 65329 - protein, 413 aa, Zea Mays
METISSCPICNIQVLTAELEWHANSHFDDDQLQMDMELAHQMSVAESSTDAMNDPKHYSGSFTSDSNALGALSSHSGYSHHYSELLDEQISCLVRAQIRSKVQEVEGGILSLLRSCLESEAGSSTSMISCYIDHHQSLSSEDKGWGCGWRNIQMLSSHLLKQRPEAREVLFGGSGFVPDIPSLQRWLEIAWDKKFDTIGSSHFHNKIYGAKKWIGTTECAALFRSFGLRARIVDFDSTESSDLHSNNGSRAASQVRGPMDKFLIKNKPPKSSSELCREDAESTRGQQALVDWVWNYFASERSDRLATQRVTVSNKTPLYFQHQGHSRTIVGIQKKPDRRGSQEQYSLLILDPGHRTADLERCLRSKKGWQRLVKRGVHTLRKPQYQLCYVDPGIASSEEVERLKTIDGTLVRF

SEQ ID NO: 65330 - protein, 554 aa, Zea Mays
MTGRLGLKRLSLQEANILLMGIYQYQTQMKQRCEEYLSFIGTLPQDVEVVNSVDSTVPEKPRLELFKHDCSSSGKCSEYSNTESSDDVGKQEISELSDGDEFHFYDTRQSFSEFASSPADPRKGCLNNGNEDHKSVESLTVDKAEKYMLSHSKRRLQLPEPIEKEKGVSLWSMIKDNVGKDLTRVCLPVYFNEPLSSLQKCFEELEYSYLLDRAYECGLRGNGLMRILYVAAFAVSGYASTDSRPCKPFNPLLGETYEADYPEKGIRFFSEKVSHHPMVMACHCEGKGWKFWGDSNLKSKFWGQSIQLDPNGVLTLEFDDGEIFQWSKVTTTINNLILGRVYCHHHGTMNISGNRRYSCKLTFKEQSFLDRNPRQVQGVVKDAGGSKVATLTGKWDESVHCVINNDASKVNSHGPHQSSGSTLLWEKNEPPVNPTRYNLSAFAITLNELTPELEEKLPPTDSRLRPDQRHLENGEYEKANAEKLRLETQQRMARKMQESGWKPRWFQRDSEDGTYRYVGGYWEAREQRTWVGCNDIFGNLSSSQKLPPSALYTS

SEQ ID NO: 65331 - protein, 459 aa, Zea Mays
MTGTFARNIQYLFSESDLAVVLNTLKAIYSPYETFKARYGQMERAILSAEMTSIDIRGAVPRGVGAQGIELSETVRRMEESIPEMIVLLEAAVERCISLTGGSEADELVLALDDVMLQYISNLQETLKSLRIICGLDSDALKKDAGLEKKEVQRLVDVSEEEEWSIVQGALQILTVADCLTSRTSVFEASLRATLARIGTNFSVSGFGSSLDKSPAATADENADLSFAGRAALDIAAIRLSDLPDKSKKFLTVLEQSKDPRFHALPLTSQRVAAFSDTVNELVYDVLISKVRQRLSEVARLPIWSSVEEQGGLPLPSFSAYPQAYVTSVGEYLLTLPQQLEPLAEGISGNEAGNDEAQFFATEWIFKVAEGATALFMEQLRGIHYITDRGSQQLAADIEYLNNVLSALSMPIPPFLSTFHACVSTPRDQVRDLIKSDGASQLDLPTTHLVCKIRRITLD

SEQ ID NO: 65332 - protein, 58 aa, Zea Mays
MNTRRILLEVWRKEGVEGLFRGAGPRMGRAGPSVGIVVSSYEVVKHLMHKNTSNAADL

SEQ ID NO: 65333 - protein, 238 aa, Zea Mays
MLKCKDSQGADTAVLLSGATIVDRAVIITPAENYQLPPEAHKQLSGANVSTESAVRKAEDVVSSMLAKGFVLSKDALNLARSFDERHNILSNATATVASLDRQYGLSEKISLGRAIVGSKVKEVDERYQVSELTKSALAAAEQKASVAGSAILSNQYVSAGASWLTSAFDMVTKAAGDMTSMAKDKVERAEEERKAIMWEERSGLVSEYAKIHLDEPSSWEPAVLPLESVDEQKLQAV

SEQ ID NO: 65334 - protein, 497 aa, Zea Mays
MLGFCAPAAGSPPDEAMPEPFCSLQIATTAAAAATTKKKRRPAGTPDPDAEVVSLSPRTLLESDRYVCEICGQGFQRDQNLQMHRRRHKVPWKLLKREAGEAARKRVFVCPEPSCLHHNPSHALGDLVGIKKHFRRKHSGQRQWACARCSKAYAVHSDYKAHLKTCGTRGHSCDCGRVFSRVESFIEHQDTCNAGRARADPSPACGAGSTGVAAASAGSQPQAPPPMSLSRTASSTSPSSDIVISPVAAWPGSSAPTIPSPATAAFHRFEQVPSPRTPPSDHHHRGGHNLELQLMPPSGSGVVGRGAPGVAEYGVAPRTPAAPPQSHPATMQLQLSIGVCGGGGFGDEAMLAAAREKEEVEAREQLRQAVAEKAAANEARAQARRHAELAEQELASAKRMRRQAQVELSRAHALREHAVRQVNATLLQITCLGCRHKFRARPQLLDAALGAPEVTCSYMSSVVTEGGDAEADDEPPLDGRDGMLQRRRHAMAMDVIL

SEQ ID NO: 65335 - protein, 381 aa, Zea Mays
MASLFGNGGYIYSSGSEGEDEDEGTEGYRKGGYHAARPGDRFAGGRFVAQRKIGWGNFSTVWLAYDTLHSRFVALKIQKSARDYAHAALHEIELLSAVAKGDPTNSKCVLRLLDHFKHAGPNGQHVCLVTEFLGDSLLRLIRYNRNKGIGLSRVKEICRSVMVGLDYLHSELGIIHTDLKPENVLLESTINPAKDPVRSGFTPILDRPVGNQYGGTVISFSEKMLKMRARRAVAKISQRRVSLGGVGAELEKERCLDGISLKCKIVDFGNACWADQQHAGEIQTRQYRAPEVIIGSGYSYSADIWSFACIAFELATGDLLFAPMNRQGCSEDETARYLVYSSTKLSNTPLQLFGHLKIALTQIYISGSGGTSEFKTIYSIL

SEQ ID NO: 65336 - protein, 199 aa, Zea Mays
MTKKSTQMALRKTLQPEKVFHPLEEDSCSVTSSTTSTRAGRTKMTVPVAPSFVCANRADKRKEFYTKLEEKHKALEAEKDEAEARKKDEQDVALKQLRKSLVIRAKPMPSFYQEGPPPKAELKKVPPTRAKSPKFTSSRRRSCSDTPLTPGGENTNATSTRPHRHSIGSPRDANRVQQCSPKSGVATKTRSVKAELKAL

SEQ ID NO: 65337 - protein, 179 aa, Zea Mays
MAHCSSSSPSRFPARVLQSPSSAASQPLCSLANSPQPPESPSCGASSSPTQIVLPPLGAPSARPHGAGRVPLRRSLLLALPCRGNRPAAPALPAERFSAPARRTPLLAASCSPSAVHGAARAQLFLSLPLFLPRCALRCSALQRRCPARQGRVCFSAALCSRSSFATFISLLSLITDFV

SEQ ID NO: 65338 - protein, 411 aa, Zea Mays
MGRLTEEQAAREAGSAGTNAMSLKLTHRALSDVSCLSSFKNLEHLDLGFNCLVTLEGLSSCANLKWLSVKENKLVSLKGVEGLSKLQVLNAGKNELTKMDEVTSLTSLGALILNDNNISSICKLDQLQQLNTLVLSKNPVFTIGNALVKAKSMKKVLSELRYLRNLNLQGNPVSKKDSLVKKVKKSVPTLRILNAKPLEATSKSDKRSTKENPPSKDEDLIGIDAKKKDKRKGSKQEVKGLEELEVQSVSTGITTSNPGKLEVPDSKEKKKVKEAKTKKSEEPYHANNSSLKNKEVQSFVYDTSTKDKKEAKRKKFVDEEDVDAEGIDNTEISFADLMFSNVGNPETKLKNISTLEAAPDGKSVGGLVIDHTKKRKKPKGVVTITDSSALKMFSSMPEVGAGGLGLSGWDE

SEQ ID NO: 65339 - protein, 320 aa, Zea Mays
MLVRLSVRSVHKLQLSVQPIMTLINFILQKKSAQNDKDVFMESLICRLDDNCEKLLICKLDLECKKTLHFDSEISMSQIQGRSYRHRIATYQNDFSHAYTCGKSPFPPLDGFIESIASFGNVSGKIRSWFWFSQESLIIYNMLRSRYCENIGREHKGNHVFYIVDFQRAAYYQKCHDPDCRGYRSPLRPVPWDVIPELVESDQIEYQGHAMETNIENSSMSGKSITGAGAEDPEWWEQVVEFADSIENMDHSLATLEVKSDASIENMDHAPSLCASEENGCFEADPEWVMHAERAMEQYEEQSGGSQSHATSQVFDLEDV

SEQ ID NO: 65340 - protein, 256 aa, Zea Mays
MAACVLGLAPTLVSMWPLRCATACSAATEASTTAAHASRRGVGAVSSALSGLRGRHSLSSAQFMDGLRSNLQVERNLTLSPKSPMSRSDDSAITCKGFCTILWNLKADLQDGCLIFITGDPLTLGCWESNMAVQLAPSVESNNIWTAEIKVPYGVHFKYSYFVREEMSSSSDIIWRPGPVYSLSIPSDGQKKQVIIVKDLWMKTSLPGLPTPTWGSWLMEADSLEGELFDGGNNQNIVKDHSVRDTRNQGLSVVDL

SEQ ID NO: 65341 - protein, 336 aa, Zea Mays
MPSYAHHHSSPLVRNGAGRVVRRRLRGTERDSLDVFLCFLYLYREINKKKNPETKKLFFLNRPASPLVLGICDFDIRPVWVFFRPVKDDTRMDALKCNNNSAPPEETAEDADAAGALVEKDGFSVEDLLDLEEFGEPDKDGAEPEDDDAPPVPAAAEERSKDDSQPLSVVTYDLPSPPPEMVELPSHDVEELEWVSRIMDDSLSELPPQAQPPPAVVASLAGRPPLQPLWRAEDPAVARGARGRKDAVQCVRRPLQVGPAPARVPPGVQPHLREQHPLQLPSQGPRDAPQEGGRHGRHRRAGRGVVLSCTRCQQGRWPPSGGCTFFFLAIMALYRT

SEQ ID NO: 65342 - protein, 711 aa, Zea Mays
MARRRMRRGGGGGGGGGGGVVDVVRVRRLLLLSLTCCSSIWPGGRIFAAADTDPNDLNVLNTLFTSLNSPGQLTGWQANGGDPCGQSWKGITCSGSGVTKIQLPNLSLTGNLAYNMNNLGSLVELDMSQNNLGGGGQIQYNLPNMKLEKLNLAGNQFGGNLPYSISTMPNLKYLNLNHNQLQGNISDVFSNLYSLSELDLSFNSLTGDLPQSFTGLSSLKKVYLQNNQFTGNINVLANLPLETLNVANNHFTGWIPSQLKKINSLQTDGNSWSTGPAPPPPPYTAPPPPPNHWNADGSSSSSSSGGRSGIGGGGVAGIIISLLVVGSVVAFLVIKRRKRKAAMKEHFEQHQPFTSFPSNEVKDMKPVYEATTVDIESLASPASVNLKPPPKIERNKSFDDDDDFSNKLVAKKSNITPINATVYSVADLQMATDSFSFDNLVGEGTFGRVYRAQFNDGKVLAIKKLDSTVMPFQSSDDFAELVSNISKLHHPNLNELVGYCMEHGQHLLVYDFHRNGSLHDLLHLSDEYSKPLSWNTRIKIALGSARALEYLHEICSPSIIHKNFKSSNILLDSEFNPHLSDAGLASFIPDAEFQAAEQSAGYTAPEVDMTGQYTLKSDVYSFGVVMLELLTGRRPFDSSRPRSEQSLVRWATPQLHDIDALDRMVDPALKGLYPAKSLSRFADVLALCVQNSGHQCQRWCKHWFDLCRGPT

SEQ ID NO: 65343 - protein, 482 aa, Zea Mays
MSFVNYHDQEKVSKEIVTDAIESCMKKQADNLLNSLEVISGRLSQLELYCYKLERSIGELRSDVMDYHNEANLNFQCLDKQLKEVQKSVQVVQERQELAETQKEMTKLQIVHEDSAQKSERSAPSVFINRENEIALVPLHQVNSVQSPAVQFQSCSGLILQQLVPVQDQQRSNQTAMYCMRGQSHLEHRQAQMFQAAAQPVQTHTTRKTQAHTVLEVPQVTTRQTPEFYAQPQHQWQHQTGQQLQSQVRQPQPQVVQQQQQYNNIQQGPAQMVQPQTSSPHAHSTPQITLVYPPYGAHQSACGNAEARTGSIVVPPSHSTISSSQRKHHEAAPIYVQSNTVSVPLTEQHQQLHSLGNGSFVPQPSKVSPCGVASYTVQGNAQAYSPAYGSPSSNPATIVAVLNQQAHCSAPMVLHHLGPSQSVQNHPIGIADKVARMGYPKDQVVDGLALRMVDAGQPAECNTLHDRLSSVTHAVAPQAWSG

SEQ ID NO: 65344 - protein, 229 aa, Zea Mays
MASTLNIVIGSHVWVEDKDLSWVDGEVSRIDGKKAHVRTTKGKTVIANISDIHPKDTEAPPDGVDDMTRLSYLHEPGVLDNLAVRYAKNIIYTYTGNILIAINPFQRLPNLVDARTMEKYKGANLGDLDPHVFAIADVSYRQMINEGKSNSILVSGESGAGKTETTKLLMGYLAYLGGRSGTGERTVEQQVLESNPVLEAFGNAKTVRNNNSSISGNLIAALVKVMWHT

SEQ ID NO: 65345 - protein, 768 aa, Zea Mays
MAAVPEDLRCKRSDGKQWRCSAPSMPDKTVCEKHYVQAKKRSASSALRASLRRSSASSLAPVFPFSSSPSSAARLRAADEDPPMAVARPLYGRVAGEAVYVAEPVPAPARREVAYEGLPRGNAAGGRTAAGLVGRGPLWFPGGGSEGIRSCHQCRKAGGVIWCTSCDRRGYCARCISRWYSDIPMDEVRNVCPACRGICNCKVCLQGDNLIKHSLTLLLIGPKTDVLRAKITSDEQMCCDFCKVPVFDYHRYCPRCSYDLCLDCCHDIRHSRANVARGEYTEGYVEDKGRDSFNRRARLEPSAESVNDKSLSWPIDINNIDIKSLFPTWRVNNDGSITCGPHEAGGCGSSKLVLRRIFKINWIAKLVKSSEEMVNGCKVHDLEDGCLSCSDGRRSEFTGQQNLGLSKCSNSDEIGRNCLYSPVLEDLKYEGIIHFRKHWKNAEPIIIREAFEPSLSSSWDPLSIWRGIQEIMDEEMDEDVIVKAVDCSNQSEVDIELKQFIKGYSDGSKGGDGPLVDAEIERVAPTQWGLLNLAAKLPPDALQPELGMKLLIAHGSHRELGKGDSMTNLMINMSDVVHMLMHATEVHYQCPKRVRVQSDVSEMIANGTSVHVNAHTPVQNLNLDIEEQSHKHSKSHIEEPNTNNSEGSLAGAVWDVFRRQDLPKLNEYLAAHREECAARCQAVSSVKYPIYDQTVYLNDYHKKMLKDQYGIEPFTFHQHIGEAVFIPAGCPFQLKNLQVMHLVVIFKLCHAQSFCSYFCKKWCLNFQP

SEQ ID NO: 65346 - protein, 494 aa, Zea Mays
MFKFLKEVVAGSGSGLKDFPYTIGEPYASAWGSWKHHRGTSKDDGSPVSIFSLSGSNPQDRHMVAGRNGVKRLRTVRHPNILSFLHSTEAEAADGPAMKYTIYIVTEPVMPLSEKLKELNLGGTQRDEYFAWGLHQISKAVSFLNNDCKLVHGNVCLASVVVTQTLDWKLHAFDVLSEFDANNEASGSPMLQFEWLVGTQYKPMELSKSDWASIRKSPPWAIDSWGLGCLIYELFSGAKLARTEDLRNTASIPKSLLPDYQRLLNSTPSRRLNPSKLIDNSEFFQNKLVETIQFMEILNLKDTFEKDSFFRKLPNIAEQLPREIVLKKLLPVLASSLEFGSAAAPALTVLLKMGSWLPADQFNIKVLPTIVKLFASNDRAIRACLLHHINQFGESMSAQIVDEQVFPHVATGFSDTDGTIRELTLKSMLVLAPKERAHTHNNLPWHALMEYFWDFRSSIPHALISISCQKLYLQMTDCLVRYCSYLSVQSQDLS

SEQ ID NO: 65347 - protein, 1439 aa, Zea Mays
MGDDAELEEGEACACGDDTAFVDPDVALSYIDEKLQDILGHFQKDFEGGVSADNLGSKFGAYGSFLPTYQRSPLPQTRSPPKDLSQKPPAVAVSSTPQSNGPVVPFSGDSIKKEIRPSTKSERGSVSHDSYGPSKCSDQNRLKVRIKVGSDNVLARNNAAIYSGLGLDISSPSSNEDSPDGRGSLSPEVNNVPHESPQTILQIMTCFSVPGGFLLSPLPANILQLTKKVVSSSKKWESNVDVENVQESYEGHVAKRVKSDGNKKRLIDAKNSKNKNDISAVMKKEIDMELVAGQKIVSEALKISLLSDPRAMDAKGENRLEEEPAENNLVGIRDARLKERCTKTDSMTVKVEPAKAEVMECLENSSFGSSEMDLSAVKGKSKPKTEKGEATLEDRNTTNDKDLISDRKQKKKIKSGSKYNASNFEGSISNVINEGASAVFHMGKISGLEALPYDTNGENNSKSEVKKMQREQKANVSTSSDFLEEEKHIHSSAAVKERSDMQSKPIHTGKKPKAKSHRDVRDNNFPEGSYGSKEQDSLENKSAFGDPRPKEKPWKFDSEDSDAPGISRKDSSYVKLDKHLATEEQKMHILPPATASTANAAFIHAAPVVIEEHWVCCDICQKWRLLPYEMNPSDLPKKWKCSMLQWLPGMNRCEISEEETTNALNALYVPAPANGIPSVGLPHVASSGLVTSSTPNMNGHIEQSRKRKNVLSDGNFVAEGSHQTQGSGHPMSNQHAPNKSKTHTDGIQYPIDRDSVSKSVDPTIKKQRSKSKHHSSYSDGVDLVERPKKHSKVKSKRDLDRDEYKASKKIRKEERHFDRDRNLGSGLASRDVPDEAKAFPVKSVTSKGSGERSDLSSSKQKNVSHHNHLENSKKARQDYVGFPEDESKEYFHQSDVQRSDLSSKKRIVKKWEESQYNPVAQVSKGAIKETYRDQNLKEAKLMSLNSEELFSMTSSKPPKAQHADQVLFYDGGRTNSELVEDNTHFSGKTGLPEQENSLSDKALDLGKPASDVAYIQTSAVTSSSSKASVSQKKKQTTQAMKTSSIESLSLSPQRNSNIDNVSASHSRVSGKDGSLNANSSTVPAMAKQLNTQVGVAVNDQWSSEPILVGSSRRKSDRDNGQVQLTQGHASDGIHPERGLNEDLQPESGRKDSNIKNSHIPKSSNHLHSGEKNNYNTDGSPMQPGKHLVDPKTPVLDKGDSSMHENKKSANSLQDRNGSTHCPPDGNPLLGLPSGKEKSYLKNNRQDSQKPKPQISPLKESKLDSHSTPLKPNGSKLTPQSRQYNAENGGRHGTAKQAIRSPADTFSPARKDNTSTAYALKEARDLKHKANRLKEEGKELESTRLYFDSALKFLHVASLLEPPSFDGLKQGDAAQSMYSDTAKLCNFVGHAYEKCKKMAAAALAYKCVEVAYLKAAYCKHPTASKDRQVLQAVVQTAPDK

SEQ ID NO: 65348 - protein, 216 aa, Zea Mays
MRWPLAISTRRRPLLLFILLVVLYTIPVTLDTVEIFSTHEWFGKPTVVFGCNGENKTDLPDVREVHTLYTFKGEESWQPLTELPEKKCKRCGLYEEDTITPDDVFDEWEMCSSDFKGGKYTRFKEGQFNATFLCPNCTASTGHGNREPSEDLETKKTSVVVIIIVSVLASVLLTIALFGGYKYWQKKKREQDQARFLKLFEEGDDLEDELGLTNEL

SEQ ID NO: 65349 - protein, 587 aa, Zea Mays
MVFKGRFFSSRHKSSESSSSPDGSNSPRTPTSAPASVSAASPASSSSSKSDKKKTKLETPKKRDKLFGSAATAPKSAASSAPSSLAGDGRKGPVLHHRDAGGGGGGGASAAALSPILASSLGLNRIKTRSRPLPQEGQRMAAALASSNLSHGQGQAEPSAGSAGDGGRKGVSSSADTSSSSRGIVKTTELAMRSAPGTNFGAGGKNAVKVKPSAQRNHSGDLRTPTHIPEAACVYDPCETPKESESPRFKAIMQATSAPRKRLPADIKSFSHELNSKGVCPFPFWKPRGIYNLKEVIKVIQMRFEKAKEEVNSDLAVFAGDLVSVMEKYADSHPEWKETLEDMLILARTCCVMTPGEFWLQCEVIVQDLDDHRQELSMGVLKKLYTRMLFILTRCTRLLQFHKESGFAEDEVVIHQRDKIIQSADRQVLTQPGADGTISRASKSEARKSYSQEQHNLKWKRSQEIKPVKLLPPLDTDVKKDAVSPSKERISSWKPFPSPNTKVPKESIPTKSESPNKKTDAHSTVSSHVELSSQVESLPQQQLPDKHQHKTSWGHWSDQPNISEEGSIMCRICEEYVPTHYVEDHSK

SEQ ID NO: 65350 - protein, 378 aa, Zea Mays
MALNMKTLTQALAKASAVIEKTVSTTVQEVTGPRPLQDYELLDQAGSGGPGLAWRIYTARPRDGAPSAPYPVVSVWVLDKRALAEARARAGMSKAAEDAFLDLVRADAARLVRLRHPGVLHVVQALDETKAAMAMATEPVFASVANALGCLDNVGKVPKEVKGMEMGLLEIKHGLLQVAETLDFLHNNAHLAHRAISPETVFITSNGSWKLGGFGFALSVDQAAVGLSLTSSQLFHYSDYDVEDTALPLQPSLNYTAPELVQSRDSKVGSACDMFSFGCLAYNLVARRPLLDCHNNVKMYMNALTYLTSEAFSNIPSDLVLDLQRMLSMDALSRPSAMAFTGSSFFRDDTRLRALRFLDHLLERDNMQKTEFLKALSD

SEQ ID NO: 65351 - protein, 98 aa, Zea Mays
MRYFNVMILGPAQSPYEGGVFKLELFLPEEYPMAAPKVRFLTKIYHPNIDKLGRICLDILKDKWSPALQIRTVLLSIQFSACICSSRVSTYLYGYSIS

SEQ ID NO: 65352 - protein, 695 aa, Zea Mays
MLEVHTTRSWDFMGLRLHMHTEQSSQRHLKFGDDVIVGVLDTGVWPESKSFRDDPHYGPVPSSWKGTCVVGDEFDPAAACNRKLIGARYYLAGFESELGPLNTSDGSEYRSPRDRVGHGTHTASTAVGSVAPNASYFGGLGGGAARGGAPRARLAVYKVCWYRDLTGRCSDADILAAFDDALCDGVHVVSASLGSPPPLMPLLSTSTEIGAFHAMQRGVVAVFSAGNDGPDASMVQNVSPWGLTVAASSIDRRFPTVITLGNNASIVGESFLVKAMKNGLVDSSSVFTDGTCTFEQLINRTAAWGKIVLCFATMGGVSSDGAALAVYAGNGAGVIFADTISRKSSQDSFWPTVHVDLYQGTQILNYIRDSRKPTVRISPSKTVVGETPAPAVAYFSSRGPSSVSPKILKPDVTAPGVNILAAWPPKSSPTVIPLDKRLTEWNMDSGTSMSCPHVSGIAAVIKSVHPTWSPAAVKSALMTTAYMYDGTSDVMQAGGTVKAADAFDVGAGHVDPLRALDPGLVYDAGARDHVVFLCSLGYTEAAIRNMVLPQPALDTSCPRGGGGGGGPEADLNYPAIVLPDLGGTVTVKRTVTNVGANRDAVYRAAVASPQGARAEVWPRELAFSARPGGEQASYYLTVTPAKLSRGRFDFGEVVWSDGFHRVRTPLVVRVTNLPDDGVKVVQAANATGDGSQAAA

SEQ ID NO: 65353 - protein, 88 aa, Zea Mays
MCNQVRCPFALLSCYSRRGWYRIVGCVMFSCLLASHSCPIVMIEQAVSTVGHRTDLRPLHSIEIRSSVCCMESSSWSNLFWLPKFLRC

SEQ ID NO: 65354 - protein, 932 aa, Zea Mays
MWNHARCIFSKKNQIKSVDDVEGIDALRWDDQEKIRNYVGSASAGTSSTAAPPEKCTIEIAPSARTSCRRCSEKITKGSVRLSAKLESEGPKGIPWYHANCFFEVSPSATVEKFSGWDTLSDEDKRTMLDLVKKDVGNNEQNKGSKRKKSENDIDSYKSARLDESTSEGTVRNKGQLVDPRGSNTSSADIQLKLKEQSDTLWKLKDGLKTHVSAAELRDMLEANGQDTSGPERHLLDRCADGMLFGALGPCPVCANGMYYYNGQYQCSGNVSEWSKCTYSATEPVRVKKKWQIPHGTKNDYLMKWFKSQKVKKPERVLPPMSPEKSGSKATQRTSLLSSKGLDKLRFSVVGQSKEAANEWIEKLKLAGANFYARVVKDIDCLIACGELDNENAEVRKARRLKIPIVREGYIGECVKKNKMLPFDLYKLENALESSKGSTVTVKVKGRSAVHESSGLQDTAHILEDGKSIYNATLNMSDLALGVNSYYVLQIIEQDDGSECYVFRKWGRVGSEKIGGQKLEEMSKTEAIKEFKRLFLEKTGNSWEAWECKTNFRKQPGRFYPLDVDYGVKKAPKRKDISEMKSSLAPQLLELMKMLFNVETYRAAMMEFEINMSEMPLGKLSKENIEKGFEALTEIQNLLKDTADQALAVRESLIVAASNRFFTLIPSIHPHIIRDEDDLMIKAKMLEALQDIEIASKIVGFDSDSDESLDDKYMKLHCDITPLAHDSEDYKLIEQYLLNTHAPTHKDWSLELEEVFSLDRDGELNKYSRYKNNLHNKMLLWHGSRLTNFVGILSQGLRIAPPEAPVTGYMFGKGLYFADLVSKSAQYCYVDRNNPVGLMLLSEVALGDMYELKKATSMDKPPRGKHSTKGLGKTVPLESEFVKWRDDVVVPCGKPVPSSIRSSELMYNEYIVYNTSQVKMQFLLKVRFHHKR

SEQ ID NO: 65355 - protein, 1043 aa, Zea Mays
MACHICPLFNLRLLLLLGAVLGNGGLGRGGGAEASDRADPDPYSILMWHDYSPPSPPLPPPDPPSPTATCEGDLHGKGDFHTRCEVSEEVELDGDVYITGNGSLVLLSGASLTCEKYGCVISANFSGEVRLSRGVRVTAGRVSLVATNITVADTVVVNTTALAGDPPDRTSGVPTGTHGDGGGHGGRGASCFVKEGQTQEDSWGGDAYAWSDLEHPWSYGSKGGSTSVEKDYGGDGGGIVWLFAEDLVMNGTVLANGGDSNEKGGGGSGGSIFIRAASMHGGGKISASGGDGLAGGGGGRVSINVFSRHDDTQIFVHGGRSSGCPDNAGAAGTLYEAVPKSLIVSNNNLSTQTDTLLLEFPNQPLWTNVFVRNRAKVAVPLLWSRVQVEGQLSLLSGAILTFGLTRYPYSEFELMAEELLMSDSTIKVFGALRMSVKMLLMWNSRMEIDGGGDSIVATSLLDASNLIVLKESSVIHSNANLGVRGQGLLNLSGDGDTIEAQHLILSLFYSIQVGPGSVLRGPLVNRSSDDVAPKLNCEADSCPVEIIHPPEDCNLNSSLSFTLQVCRVEDIDVWGLVQGTVIHFNRARSVTVHTSGTISASGLGCRTGVGQGKMLSRGICGGGGHGGKGGDGFYKGNLAEGGAIYGNADLPCELGSGSGNDSTELSTAGGGIIAMGSWEYSLPSLALYGSVESNGGSYTNGSVGGPGGGSGGTILLFVHTLSLAESSVLSSVGGFGNAGSGGGGGGRIHFHWSNIPTGDEYVPVAAVKGSILASGGVSKGLGYSGGNGTVTGKACPKGLYGTFCKECPLGTYKNVTGSSKSLCFPCPPGELPHRAIYINVRVLSGGSVLFFGGHGCHELASVLGTLSNVEGFAFQRDVSYTAFLDRVHGEEVALNKLGLWRVPHPWLNMFVPRSRIADFDRGVFKGILQGTDIVGPLIVYPLNKSMWDDGMSAATPSEDVFYAVSLLFSSVAPNDLARLQEQNRRILRFCDLAGIQYKTYLARHTDRSDWVRHFGAAKWNRFVEMKNKYDPKRLLSPGQDIFN

SEQ ID NO: 65356 - protein, 680 aa, Zea Mays
MATESAVRLIGGTGARDWSKGFGAFDSSVGALSGEDLGFVDNDAGVYGGWSKSVPNRSGSAPPSMEGSLAALGHLIGQQSGSFEASLATLDNITDSSKSEEQVLADPAYFEYYGSKVNLNPRLPPPLISRESRRLMNRVGKAKEWRVVSQDNSNKDSIYIPRSTLSTHKEEPEDDKSPRLDLSSVEDAQIISSASNFQSQDFMLYTGGNQYNTMGPRFTVVNPTESFDPQKMIHQAAYPSDQRLPLPRTGFPNSPTSRRGGTVPNYQGISSYVGGPMTYPTSPVFQGQTLPGVLPPDRRNDPVGFQSPSRNITDSPGIQRQRDRQKFDESKTCSFLEELKSNRARRVELSDITGRIIEYSADQHGSRFIQQKLENCTAEEKAYVFAEVLPHASSLMTDVFGNYVIQKFFEHGTREQRRDLATKLVGHVLPLSLQMYGCRVIQKALEVMELDQKIDLVHELDGHVMRCVRDQNGNHVIQKCIECVPTEHIGFVVSAFQGQVASLSMHPYGCRVIQRVLEHCGGTSQSQCIVDEILQSACVLAQDQYGNYVTQHVLERGNAHERSQIIIKLAGQVVTMSQNKFASNVIEKCFQHGDMAERDLLIRQIVEQTEGNDNLLAMMKDQYANYVVQKILETCNENQRELLVSRVKGHMQALRKYTYGKHIVSRVEQLCGDGTAEPDS

SEQ ID NO: 65357 - protein, 135 aa, Zea Mays
MDTRGLPKGLVLGSCTVLEAAGQGALGPLYQLLESTVVSGRGRGMPAQERVILLHFGANSGSHRFALENRAVNEATFRCPDELGWKPQRTPIISSDGNILHARQVHFNNCFQKIIMSISFGKLAFHIMLFTWCPT

SEQ ID NO: 65358 - protein, 65 aa, Zea Mays
MCSSIFKMHLGIRLRPRAIRGRQQKRVFPYINLLVVFPYINLASCVFSFFSRISQQYKGFLNSKK

SEQ ID NO: 65359 - protein, 262 aa, Zea Mays
MHISERQKSLQENYYFSCQCSSCSELNLSDLVMNSFCCPQSNCLGAISESTYYRSKENFVNVSLGGSYVCKLSLPDVSKVDMDMENVAKSLLQNSGVSLNIDHGCCMSCRSCIDLSSALATSHREESTIDRLKKHTFLDKTLITEALQSLKQLKKLRHPYSKALAQAEDTIAEAFAKVGDQELARKHCEASIQILEKLYHPKHIIIAHELIKLVSILLSLGDGASAAATFAQAEAIFSLYYGSHVEKVLTYMGALKKAVIDV

SEQ ID NO: 65360 - protein, 1361 aa, Zea Mays
MSWLVVSKRLQGTIVRHDVCTTEIAVAFTLQQTEEGDYEPYLKQQPVFAFLPLRNYGLKFILQGDFVLPSSREEVDADSAWNQWLLSEFPSLFVSAQESFCALPCFQRCPGKAVTAFLSFIPLAGEVHGFFSQLPHLILSKLRLTRCMFLDGSTVQWVYPCNTLRGWDEQTKMLFSEGLLHEHLGLGYLSKNIVISDKLSRALGIHDYGPNILLDAISSICRIDGCIESLGLEWLCAWFVNLYLTLLSHSSQNVSSARNLEDILLDKVRKIPCIPLSDGSFTSISDGRIWLPYDVASSIPECSSIPNFPALYGNLRTVSPNLLSACCKNKYLMEEVRINDLADMLQRIGVRKLSGHDIVKNHIMVSLRNGLDANVADIVIREYVSFIMVHLQSSCTSCNFERGEIVSELRKSPIFLTNHGYKSPADEPIHFSKDYGNSVDVTRLLQNVEISWIELDSSYLQHHGSQSSSFAREKWRQFFEEMGVTDFVQVVKVEKTLSQVDSILAGGLSLADVSTKQCTVYDWESPELSRILSIFSSKRCKENCVYLLEVLDRFWDDHYSAKSRIFTDATHCGENRAVESSFMKCIQSFKWIASRMDEDLHYATDLFYDCENVRSLFGSVAPYAVPQVSSSSLKKAIGFKTEVSYCDALMVLKSWITSKVPFRASMSQMCKFYTFLSEGVADAKIDIKREFMSSPSIFTPLQRPRASEVIPGRFLAPEDLYWHDPTGCSEITEDFVATKNRSMFPRKMLSAAYPNLYELFTLTCGVPKAPTTSNYVEMLLRLSTIALPSQAGNHVFCVFVRWAKCMHSESDKMNDILYLKESLQKLETTILPTSADKWVSLHPSFGLVCWVDDDELKQQFVNSNDVYFIQFGDLSSEDKQMLYGRVAALMKSLGIQALSKVVYREAIFYGTSENREKVSLICWLLPYMQRYIYKMHRDTYINFQKNDIMKISNLQVVVVDKLFHKYVLRGLESSSKKRFQCHCLLQGDTLYATQEADSHSVFLELSRIFFDGSHDLHFANFLHMIKTMAESGTHAEQIETFIVNNQNVPELPEHEAIWSFSSLSAAKHGSANQGGADTQGVDFQPVHEFSIPNHQKAQVMVSSWPLNYWRTAPVFRTPLINQHASMQEAKVNDAGPSSNLNMPAMYGHTEDSLLSADLERDWIIEENPRTETTLFGDSSSEILDEPQMVMSAEPFHAPAYLNLEAGNSSPTVHVELTNSDEKLANLAEDKNQRLSDANQLRTGRLGEELVEKYLAKQLGSNNVRWVNNRIETGLPYDIVITHPEGFTEYVEVKTTVSSRKDWFDVSAREWQFALEKGDSFSIARVILGTKKASIEMLKNPHKLCKQKALRLALLISRSAAT

SEQ ID NO: 65361 - protein, 317 aa, Zea Mays
MPGFIQVVYYYFFSSQVHRSVVYGDQPRNRLDLYMPTSTTGLKPVVAFVTGGAWIIGYKGWGALLGRRLAERGIIVACIDYRNFPQGTIGDMVEDASQGIAFVCKNITSYGGDPSRIYLVGQSAGAHIAACALLNQAIRESGEGDTSSWSVSQLKAYFGISGGYNLLNLVDHFHRRGLYRSIFLSIMEGEVSLQKFSPQMMIMESSARSAVSLLPRIILFHGTSDYSIPPAESQAFADALQQQGARADLFLYEGKTHTDLFLQDPLRGGRDKMLEEIARVIHSEDPDAAAQHLVVVPVARRLVPEFMLKLAGRVSPF

SEQ ID NO: 65362 - protein, 112 aa, Zea Mays
MITKSSIMLGLGETDEEVKQAMMDLRAIGVDILTLGQYLQPSERHLTVREYVTPQKFQFWKEYGESVGFRYVASGPLVRSSYRAGELFIQNLVRNNKTESSMDPYAEITKSN

SEQ ID NO: 65363 - protein, 546 aa, Zea Mays
MAASLEAERQENEAIKRSLVEAQERNDALFKKVRDSEYRAHQLQDTVQKLQVDAISRLSSFVMERQDGDGVKNAHTEVHGTNEDLMRRNENLLKRNDDLVKKIEDSAILVTELRGNLERLEGKAANLEAENQLLRQQAIATPPSTAKSSQAACSKISMIHRCQESGHILNGNVAYAEMKSSTGQTEMRPSMGSSLDLINHKVYENGQSLFNDVYQHQQPQNHQQLLLKYITQYLGFSGRKPIAASLIYYCLLHWRSFEEAKTTVFDSIIQIVNSATEAQHDTRSLAYWLSNLSTLSVLLQRSFKATRATASTPHRRRISCERIFQANQTSSSGLACLSAQSVDGGTVFHQIEARYPASLFKQQLVDQVEKVYGVISDKIKKELNPLLELCIQDPRTYSNQAKALMSPSSGLGQQDQLMHWLSIVKIFNSYLHVLRANHVPSILVHKLLTQIFSVVNVQLFNRLLLRRECCSFSNGQYIKDGLTQLRYWCNDVSQEFADSAWVALRHIRQAVDFVVISLKPIRTWEEICNDICPFAAARADSRYVLG

SEQ ID NO: 65364 - protein, 111 aa, Zea Mays
MNGGASLDGTDHGSEHSATSGGSVHGGWRRRGARCRRRRVKVDGGSQTRRVNPKPRLDELWKVWAVVGPDQQARIALKLLADAPTRPIVSSRHIWRDCFVTAFAREITQPT

SEQ ID NO: 65365 - protein, 326 aa, Zea Mays
MVRALRLGGRAAAAARWCTCRRAAVALCVANLVAALLVARALYAPGSFAFAPKRGELKYSREQMRWVEESIRIRRAAEPVELIEAKLRKAFTREEKTRKGLPLELKQKVSLEILQRLHDLGEGSNTTEQQEAVEAWRVGKLKDMRSASSKNLSNFGLSSEDSRMLKRALEFNWQRILEDIGLWIPPTIYHIEHDDKPENEPEDEEIIPGPPLPPECNTELHTDYGGTAVRWGLTHHKESAADCCQACIDQAKRARPGALKCNIWVYCPSEYGCYSPDKYEHKHQECWLKQADHPRLNFKDRYPEPYRDSHPTAPVVVPWMSGVITA

SEQ ID NO: 65366 - protein, 249 aa, Zea Mays
MPTAPAAVLPRTCMDSLIAFLHHHLRALLADPAALHATRRRCLALLTPPRRHHCRKNLSGAQEEEENEDDAVLAALHGSIDALLPSPVDGAAAVCLAGVEEALQAPALLPEHGETAGLDNRRVAACAYFYLALVRCAQGDAWQMSMDLLQAVAVCPAAVAAGREDGARRAGLAPRALWEGLFDDGVLARAGGAGEEDAARRAARRYKDWLMYYKVVAAAPEQNGGYLQAGRSGSSVISRWLSSSEVSAI

SEQ ID NO: 65367 - protein, 128 aa, Zea Mays
MDSSSVGEPFYVVRKGDVIGIYKTLSECQAQVSNSVRDPSVTVFKGYSLRKDTEEYLAARGLRNALYAIDATDARDELFDDLVPCPFQQPDGAASSTLKRSQEIEIGPSKKHPKVDEQEIQGKPVLEQ

SEQ ID NO: 65368 - protein, 347 aa, Zea Mays
MGALSRPEEVLALVKLRVAAGQIKRQIPPEEHWAFAYSMLQKVSRSFALVIQQLGPELRNAVCIFYLVLRALDTVEDDTSIPTEVKVPILQEFYRHVYNRDWHYSCGTNHYKVLMDKFHLVSTAFLELGQGYQKAIEEITRRMGAGMAKFICKEVETVDDYDEYCHYVAGLVGYGLSRLFYAAGTEDLAPDSLSNSMGLFLQKTNIIRDYLEDINEIPKSRMFWPREIWSKYADKLEDFKYEENTEKAVQCLNDIVTNALIHAEECLQYMSALKNHAIFHFCAIPQIMAIGTCALCYNNVHVFRGVVKMRRGLTARIIDETNSMSDVYTAFYEFSSLIESKLLHALS

SEQ ID NO: 65369 - protein, 447 aa, Zea Mays
MPTRNHNAAAAAAPQHHHHNRGGAPALGKSKAVPGRADAMNRRAPLGDIGNLVSVRPAEGKPQLQEQINRPITRSFGAQLVKNVQANAAIKNAAILPARHAPRQERKAPAKQPPPEDVIVLSSDSEQSRTQLESSASSVRSRKKVINTLSSVLSARSKAACGITDKRRQVAVIEDIDKLDVNNELAVVEYIEDIYTFYKIAQHDRRPCDYIDTQVEINPKMRAILAGWIIEVHHKFELMPETLYLTMYIIDQYLSLQPVLRRELQLVGVSAMLIACKYEEIWAPEVNDFILISDSAYSREQILSMEKGILNSLEWNLTVPTVYMFLVRFLKAAALGNKVEKENMVFFFAELALMQYGLVTRLPSLVAASVVYAARLTLKRAPLWTDTLKHHTGFRESETELIECTKLLVSAHSSAADSKLRSVYKKYSSEQFGGVALRPPAAAVEIK

SEQ ID NO: 65370 - protein, 160 aa, Zea Mays
MNGLSATFRFPGSGSRGSWPSARGRTLAGQGRAWSRDTARGIFVGAASLGRAGSGAAWRVGGSASWVARLGAGWRGVARLRASRLLRAVSWRGRSTRGAPRGCSAPVERSAAARLGARPAGGGRRAAWRRAGWPERHWVREESRGGERNGRGEGERSRGG

SEQ ID NO: 65371 - protein, 140 aa, Zea Mays
MVVPRAPEQTQQDQDEEMLVPHQDAIEGLQKDVLEGPQPMEEFASAVENQIIPDTSTSRFTWYIENFSKRNVRKHYSDDFTVGGYKWRVLVFPRGNNVDYLSMYLDVADSNLMPPGWSRNAQFSLAVVNQLDSKASLRKG

SEQ ID NO: 65372 - protein, 74 aa, Zea Mays
MASLTLVGGGWGRQEEPKRTNGQAVTADLVDWGRGPDRRQQQLPQALSFPPFPSSPTRQLSPCFLLSHAAACQQ

SEQ ID NO: 65373 - protein, 195 aa, Zea Mays
MAHWQSIIKILTNSLDVLKSNYLFNSLLLRRECCSFSNGEYVKAGLDELEHWCFWLTEEYAGSAWDELKHIRQAVTLLILDDKHSRSLAEITDDFCPVLSMQQLYRISTMYCDDKFGTLGIPSEVVSSMRTKMIEGSSSSPSAHDDINSFLLDDDFSIPFSVDDFTKLIVHVDVADMDLPPLIQESSGGGSKMGH

SEQ ID NO: 65374 - protein, 57 aa, Zea Mays
MLHQHSGDSPRRRQRVAKEERSDLREDRGEEQVLGGATREPLWADSRPRRRSRDVRG

SEQ ID NO: 65375 - protein, 318 aa, Zea Mays
MPHLHMLLERWLRSQEGDCKAIINLYKEQLLQALQADNELRRIAQDISIQGRYKSRFSTMKKLVKDGRKPEEVKDILGLRVILEPRCGGNSSDWGPRACHRTHEIIQAMWKEIPGRTKDYITHPKRNGYQSLHVAIDVSEPGKVRPLMEVQIRTKEMHRFAVGGEASHSLYKGGLTDPGEAKRLKTIMLAAAELAALRLRDLPGSDHVVGNCKNPAFCQLDKNGDGRISIEELTEVMEDLGAGGEDATELMHLLDANSDGSLSSDEFESFQRQIEVMRNLEDDDNHYRKILKEKLHTIDSAGLIHVYRKELSDKLLVG

SEQ ID NO: 65376 - protein, 54 aa, Zea Mays
MPSVSTPPPCFAGEERTAVDERGRGRERERARDGCSEIDGLIILISGRRPKQDM

SEQ ID NO: 65377 - protein, 64 aa, Zea Mays
MRRRECPRPCIGCSSGGAAQELPRRIGQAIRGIISRGTVIERWDFSPGSGGWRGVPLIGGSRVY

SEQ ID NO: 65378 - protein, 745 aa, Zea Mays
MATGVAPAPLPHVRVHHGGVGFTRSVDFAKVLSAPGAGTMRASSSRGRALVAKSSSTGSETMELEPSSEGSPLLVPRQKYCESTHQTRRRKTRTVMVGNVPLGSDHPIRIQTMTTSDTKDVAKTVEEVMRIADKGADLVRITVQGRKEADACFEIKNTLVQKNYNIPLVADIHFAPTVALRVAECFDKIRVNPGNFADRRAQFEKLEYTDDDYQKELEHIEKVFSPLVEKCKQYGRAMRIGTNHGSLSDRIMSYYGDSPRGMVESALEFARICRKLDFHNFVFSMKASNPVIMVQAYRLLVAEMYNLGWDYPLHLGVTEAGEGEDGRMKSAIGIGTLLMDGLGDTIRVSLTEPPEEEIDPCQRLANLGTQAANLQIGAPFEEKHRRYFDFQRRSGQLPLQKEGEEVDYRNVLHRDGSVLMSVSLDQLKAPDLLYRSLAAKLVVGMPFKDLATVDSILLRELPPVEDAEARLALKRLVDISMGVLAPLSEQLTKPLPHAIVLVNLDELSSGAHKLLPEGTRLAVTLRGDESYEQLDILKDVDDITMLLHNVPYGEEKTGRVHAARRLFEYLQANGLNFPVIHHINFPETIDRDGLVIGAGANVGALLVDGLGDGVFLEAADQEFEFLRDTSFNLLQGCRMRNTKTEYVSCPSCGRTLFDLQEISAEIREKTSHLPGVSIAIMGCIVNGPGEMADADFGYVGGAPGKIDLYVGKTVVQRAIAMEGATDALIQLIKDHGRWVDPPAEE

SEQ ID NO: 65379 - protein, 87 aa, Zea Mays
MLCLYTIRSLILLKGSRLLRLASVECREYYPSMNDACTVLECVWIKDKFVLHEKVKDISQETQVENQKCRDPESTVQYETLALISEG

SEQ ID NO: 65380 - protein, 512 aa, Zea Mays
MAEQERRDAEAGGDAAGAAVASHTSSMQRVKVYRLADGGKWDDQGTGHVSIDYIEGSKELGLTVLDEDDNETLLMHNITSDDIYRKQEETIISWRDREAATDLALSFQEAAGCSYIWEHICEIQRNLQFSNLGAPEVGRRQSSESLEASRIMHSNDDSFRSANGEFRELPPVELSNLPFILKTVLEGGITDQIHMAELITQDRDFFPKLVDIFRMCEDLENIDDLHMIFKLVKGIILLNSPSIFDKIFSDEFILDIIGALEYDPEVPRVQKHRAFLKDHVVFKEAIHIENVSVISKIHQTYRIGYLKDVILPRILDDATLGSFNTMIHSNNASVISMLKDDTPFIRQLFARMRSSDISMESKRELVLFLHEFCTLSKSLPVVQQLRLFRDLSGEGVFEIISDVLQSQDRKIVSAGTDMLILFLNQDPNLLRSYIVQQEGNSLLGLLVKGMVTDFGEEMHCQFLEILRILMDSFTMSGAHHPLVPRGACLDQDLTLYVLVETLKDIISSLRFC

SEQ ID NO: 65381 - protein, 699 aa, Zea Mays
MLFLLPMVAASTERISHPPVAEPRECDWYNLEKSKRVKSFRCGEYDECIEKAKALARQQKRTHAEGRYVRREDAILHALEIERSHFSNNCDDFEEETGNDLCASQNMCSAKSININGLSKKSRGARSLYDTEENSAQESCQTLTLYKKPQNLSSSSTRYASSKRKKRKGHKNHEDDTVQGFQRMRDLREIGTNNVPKQKSGAGIVSDVPLLESGPSFDYDLSSANGIKKGKQSQTSIKKKRSNIGQSCDSLSKKDRHHPLSMLCEDSEVSGTYYHWDRSGQSSSEYLGGQIPNLFESSRAKTSLSTDVNNCSYSSGTSSLEILLDTSHIKHKGSVNAVTLKVADPCTTRILNDDCPDCDEFLAADTLEGDVLEEGHLDTYGSCASIKDQISKLGNQSTGCAIGGTPSTWHNRNSEKKSITSVNLIPKESHKRDKNSLLQCEGIIKSEGTILRPAELEDNTKHTTPEHDESSETISNHSNSEKGTKSLPNYFPLQVLPPPGQQPDLKLPRCPVTSPTKRTSPTKRAHAGYRLYDVELTVQRSYKGHHVPLVSLISKWTGKPIVGYPVTVEVLEDSRPTTSRNEHRPPMGSLGSLPKSRVAEPRQARSSPASRSKSKPSGRKKASEHDLDKSWRPHIKKPASSPRKMRRLSSFAGSRRESADQKPVVVKAGGPAVACVPLRLVLSRINEALSFPLRQENPT

SEQ ID NO: 65382 - protein, 422 aa, Zea Mays
MAGKGDGPAIGIDLGTTYSCVGVWQHDRVEIIANDQGNRTTPSYVAFTDSERLVGDAAKNQVAMNPINTVFDAKRLIGRRFSDASVQSDAKLWPFKVIPGSGDKPMIGVQFRGEEKQFSAEEISSMILNKMKETAEAYLGTTIKNAVVTVPAYFNDSQRQATKDAGVISGLNVMRIINEPTAAAIAYGLDKKSSSDGEKNVLIFDLGGGTFDVSLLTIEEGIFEVKATAGDTHLGGEDFDNRLVNHFVQEFKRKNKKDITGNPRALRRLRTACERAKRTLSSTAQTTIEIDSLYEGIDFYTTITRARFEELNMDLFRKCMEPVEKCLRDAKMDKSSVHDVVLVGGSTRIPRVQQLLQDFFNGKELCKSINPDEAVAYGAAVQAAILTGEGNEKEHHHPDKEGAGLLHLLRQPARRAHPGVRR

SEQ ID NO: 65383 - protein, 224 aa, Zea Mays
MVLLLGVGIASVTDLQLNLLGSIIAVLTIAATCVGQILTNQIQRRLKVSSTQLLYQSSPYQSAVLLVTGPFVDKLLTKRDVFAFSYTTQVVVFILLSCSIAVCVNFSTFLVIGTTSPVTYQVLGHLKTCLVLSFGYIILKDPFSARNVVGILIAIFGMGLYSYYSVVESRKKTEDASSLPVAAQMSEKDSAPLLGAKSSPRTENKAEETFDYMPRTAKSAFTGR

SEQ ID NO: 65384 - protein, 641 aa, Zea Mays
MGVLFSCPVEEEEDVPAGAAAALPAPCNAAVEPPALKPSLQGSGKLRFERSLGSLIRREQQSPSARLHVDVDVDVDAAAKQVPATSTVAPVPPVMPRELARTRFADAAPAPAPESPKHEAAAVTVQKVYKSFRTRRRLADCAVVVEQSWWELLDFALLRRSSVSFFDIERQESAVSKWARARTRAAKVGKGLSKDDKAQKLALQHWLEAIDPRHRYGHNLHYYYDCWLRCESKEPFFYWLDVGEGKEINLERCPRLKLLSQCIKYLGPKEREEYEVVIEDGKFMFKKSRQILDTSDGPRDSKWIFVLSTSKNLYVGQKKKGTFQHSSFLAGGATSAAGRLVVEDGILKAIWPHSGHYRPTEENFQEFQSFLKDNNVDLTDVKMSPDEDDEEFWSRLRSISSDCCAVADKPEEDQQAAAQETSNSCQAPQVTESTTPDEVSPSPSQQEETSKSLSPTATVTRQDSSEDAETSTTSHRALFEDGQEEDHAAAATAADDNTAVPREKILQRISSKKETKSYQLGKQVSFKWTTGAGPRIVCVRDYPSELQLRALEQVHLSPRSGGAAAAAGAGRAASSRFASPQRCGSPVAARGRREPLASAGCGRAASSRFASPQRSSSPMARARCEQLTPREAFRTHLMARG

SEQ ID NO: 65385 - protein, 69 aa, Zea Mays
MCSARQTAPAPLGTVTASVAGARRCKCAGVFMLSLEELRKKVCLVANAIDALELPKGSAIAIDMPMDVT

SEQ ID NO: 65386 - protein, 678 aa, Zea Mays
MAEADLTLHDAGGGARDKPDRKADVFADLGSPVSPLRLRPAATPSTSSSSSGSAKSPAPGNAAAGRGGRGNHSGELAQESTNPPGHRRAGSGPLIFSGASSSTTASSPLTNALPTGNICRVAGAAAAAAATQPPRARPAVLGSGTGHYGHGSIMRRGGGATPARTSGDAAPLLHGHGSNSSRSRSPASCPAPAPPATSGGLQEITRAGNEWYKKGRHADALRHYDRAVALCPDSAACRGNRAAALIGLGRLAEAFRECEEAVRLDPASGRAHGRLAGLCLRLGMVEKAKTHFTLAGSANQSDPAEWQKLHEVEIHQGRCMDARKIGDWKSALREADAAIAVGADSSRLLLALRSEALLWLHKLEEADLTITSLLKLDDASLPSTPTRVSGMSADSYVHIVQAKVNVTFGRFDSAVALAEKAKLIDGVSSEVEVILNNVRLVALARARGNDLFKAGKFAEASLAYGEGLKYEPSNPVLYCNRAACWSKLGRWAKAVEDCSEALRVQPNYTKALLRRAASYAKLERWADCVRDYEVLRKDLPGDTEVAESLFHAQVALKTARGEVVSNMKFGGVVEEIISLEQLQDVIRSPGVSVLYFMATMNKQCAQITPSVDSLCSECPALNFLKVNVDERPLVASAENVRVVPSFKIYKDGTRVKEMVCPSLQVLRYSVRHYAVSSS

SEQ ID NO: 65387 - protein, 731 aa, Zea Mays
MLNIVIGSHVWVEDKDLSWVDGEVFRIDGQNAHVHTTKGKTVIANISNIHPKDTEAPPDGVDDMTRLSYLHEPGVLDNLAVRYAKNIIYTYTGNILIAINPFQRLPSLVDALTMEKYKGANLGDLDPHVFAIADAAYRQMINEGKSNSVLVSGESGAGKTETTKLLMRYLAFLGGRSGTGERTVEQQVLESNPVLEAFGNAKTVRNNNSSRFGKFVEIQFDKSGKISGAAIRTYLLERSRVCQINSPERNYHCFYFLCAAPSEDLKKYKLGDPSSFHYLNQSACIQVDGINDAEEYLATRNAMDTVGITDQEQEAIFRVVAAVLHLGNINFAKGREVDSSIIKDDKSRFHLKTAGELLMCDCEKLENALIKREINTPEGVITTTVGPNSATISRDGLAKQIYSRLFEWLVNRINASIGQDPDSNKLIGVLDIYGFESFKTNSFEQLCINFTNEKLQQHFNQNVFKMEQEEYTREQINWSYIEFVDNQDVLDLIEKKPGGIIALLDEACMFPKSTHETLSQKLYEKFKTHKRFTKPKLSRTAFTIQHYAGDVTYQSDQFLDKNKDYVVAEHQELLNGSKCSFVSGLFPPATEENTKSSKSSIATRFKMQLHELMETLSSTEPHYIRCIKPNSVLKPGIFENTNVLQQLRCSGVLEAIRISCAGYPTRKQFHDFLHRFCVLAPEILKEKNDEKVSCQKILDKMGLQGYQVKNTSLTNLLNMYWKRVFRFPNWW

SEQ ID NO: 65388 - protein, 338 aa, Zea Mays
MYGSPVSKDLNLPVQPPMASSGLLRFLADHHIRDDKPSPLASAAVHFPTETDTASQQQQQQMMFHSQQQQEMVSAKSGLYRTVNSGVETAAAAGAGGASSSDNASNLIRQSSSPAGFLDHLNMENGYGAMLRAGMATADSLAGGGSRLKGQLSFSSRQGSLMSQISEMDSEEVGGSSPEASGGGGRGYIPGYPMGSGWEDSSALLSDNLSGVKRPRDSSEPGQSGLTHQFSVPKTSSEMATIEKFLQFQDAVPCKIRAKRGCATHPRSIAERVRRTKISERIRKLQELVPNMDKQTNTSDMLDLAVDYIKDLQKQVKVLKESQDNCTCSASKNQQHSC

SEQ ID NO: 65389 - protein, 170 aa, Zea Mays
MSSAAASSSPAAGSEGSGGAVEGREIAYVSYGGEHHLPLVMSLVDEELSEPYSIFTYRYFVYLWPQLTFLAFDARDGKCVGTVVCKMGEHRGAFRGYIAMLVVLKPYRGRGIATELVTRSIRVMMESGCEEVTLEAEVTNKGALALYGRLGFIRAKRLYRDDQKMDSPYL

SEQ ID NO: 65390 - protein, 535 aa, Zea Mays
MLQPREADLPALFLVFIVLPVVAYFLLGRWHDAASKKARVSVLAQRAAEEAYREETMACPDIILPGSSLRTMPYFRPMPALRQEYHECATCHAPAKTRCSRCKAVRYCSGKCQIVHWRQGHKETCQKWLGSGSSSFGGSSTEATEQMPFLTNLNSPLPGGDIHLRDLNFDTLSEPSFPTTDGYNLDTDPFLADRSNMNKSNQGIHMSENGAVGVSFEKNNYNADDEIHSPENLSRNKVSNNYFGSDAISGNGDAIYPAKSNAQQPSSCAPDMRKQPKASITVYQPDIGVYLTSDMVSSCEGSYASASEPLQRSLSSGRTIGKANAVNKRPPYPSSKVVSAQKPQDRVSTSYQNDGHEKNPCNKNDQRSTPKCESSQSTSSNLQKFGASKVEVLKKPSKFLKTSLVGLINDNKRNKVLFPYEDLVKFFQYEARGISPRGLFNCGNSCYANAVLQCLMCTKPLMIYLLLRLHSKDCSSKKWCLMCELEQYASTLRESGGPLSPSRILSNLRNIGCRLGGGTQEDAHEFLSLLGWAGW

SEQ ID NO: 65391 - protein, 1105 aa, Zea Mays
MAFFSNSGSKADSGGYNLNEKAEDEGIYESVQDGNVDLSSRQWNLNEKADDAYHCEAEQYEAGQSGLYSSEKASGQHIQKGGRSSGGPWGTNFLKDSRSKQMAEDVPSNSGRGMNAASLHDGLDDSGEDDELNRANGEVPAEEMLSDDYYEQDGEEQIESLHRGGTKQSSCSTSEDDPADVDFEPDSETDKATDKDKFMDSENSDGDDDDGLELSDDDDDFVENRRQPKRLKIVATKTSKGRKLPMPAQRKRGVSHSDEEYSSGKDSDLPSDADFKHRSKRPDRLHQKSVGRSDVAPINSHNELRTSGRRTVKKISYVESEESDDSEEKSTKQQKEELEEEDGETIEKVLWHQPKGVAEEAIKNHQSAQPTVVSLTSDFDQQWDELEFYIKWKGQSYLHCQWKTLSELQSVSGFKKVINYTKRVAEEQRYKRALSREEVEVHDVGKEMELDLIKQYSQVERIFADRVSKADGDDLVPEYLVKWQGLPYAESTWEKDTDIDFAQDAIDEYKAREAATSILGKTVDFQRKKSKASLRRLDDQPEWLKAGKLRDYQLEGLNFLVNGWRNDTNVILADEMGLGKTIQSVSMLGFLHNAQEINGPFLVVVPLSTLSNWAKEFRKWLPNMNVVIYVGNRASREMCQKHEFFSDKKGGRHVKFHTLITTYEVILKDKAVLSKIKWNYLMVDEAHRLKNCEASLYTTLLEFSTKNKLLITGTPLQNSVEELWALLHFLDPVKFNSKDSFVERYKNLSSFNETELANLHKELRPHILRRVIKDVEKSLPPKIERILRVEMSPLQKQYYKWILERNFQNLNKGVRGNQVSLLNIVVELKKCCNHPFLFESADHGYGGDSIGDRNKVERIVMSSGKLVLLDKLLVRLRETNHRVLIFSQMVKMLDILAEYLSLRGFQFQRLDGSTRADLRHQAMEHFNAPGSDDFCFLLSTRAGGLGINLATADTVIIFDSDWNPQNDLQAMSRAHRIGQQETVNIYRFVTCKSVEEDILERAKKKMVLDHLVIQKLNAEGRLEKKESKKGGSIFDKNELSAILRFGAEELFKEDKTDEEAKRNLESLDIDEILERAEKVETKGGEGEEGNELLSAFKACDVYANC

SEQ ID NO: 65392 - protein, 236 aa, Zea Mays
MGASGKWIRTLVGLRPAAERERPGAVAKGRKWSRLWRSSSSQRGSSAPASEAPSEASSTADMLSSSVVAAVVRAQPRDFRVIRQEWAAVRIQSAFRAFLARRALRALRGIVRLQALVRGRHVRKQLSVTLKCMNALVRVQERARERRFRISADGRHSQDILDDRSGLADPVKEAEAGWCDSQGTVDDLRSKMHMRHEGAVKRERAIAYALSHQFKPQWKTQLPCCISQESWNWQKQ

SEQ ID NO: 65393 - protein, 59 aa, Zea Mays
MKTRSQTSPKPLKTVAMAPRPSSTKRKPRPKPAGKGDPRAPKKPPTAFFYFMKRSSIMI

SEQ ID NO: 65394 - protein, 435 aa, Zea Mays
MAADALSIIPGAVLRNLSDKLYEKRKNAALEIEGIVKQLATFGEHEKISAVISLLTNDFTYSPQANHRKGGLIGLAAVTVGLTSEAAQHLEQIVPPVLTSFLDQDSRVRYYACEALYNIAKVVRGDFIIYFNKIFDALCKLSADSDANVQSAAHLLDKLVKDIVTESDQFSIEEFIPLLRERMNVLNPYVRQFLVGWITVLDSVPDIDMLGFLPDFLDGLFNMLSDSSHEIRQQADAALSEFLQEIKNSPNVDYGRMAEILVRRAGSTDEFTRLTSITWINEFVKLGGEQLVPYYADILGAVLPCISDEEEKIRVVARETNEELRAIKADPAEGFDIGAILSIAKRELNSEHEATRIEALHWFFTLLDRYCAEFLAYLNDIFDPLLNALSDPSDAVVLLVLEVHARIAEESHHFHHLVSYLIRTFHNNHFVLEKC

SEQ ID NO: 65395 - protein, 85 aa, Zea Mays
MRSANSSWSESRSTWKFMVLLFFYVQTVSCFGKENKKNGYVLGELETPKKNGYVLGQRVRASLDIIQMDLDVSMLRSTTTPVWHA

SEQ ID NO: 65396 - protein, 72 aa, Zea Mays
MIKDYLNWPHALEMGQGKLEPGYSIHEKTIAHWEWRDGESDTYPPGKGPPKKGGVLSGGADLFMQWRIRGNG

SEQ ID NO: 65397 - protein, 75 aa, Zea Mays
MLAGRSSLARSPMPRAAKLALCVHLSAPALLPRELALARIRRSAPVSLLLSLCPRLVQSAPSLLQLAPRPLCMRS

SEQ ID NO: 65398 - protein, 291 aa, Zea Mays
MPKPPPPTSDPSLPTTTTTSTPKSSSRPAPAGLLDPLAASGRSLLASARRSPVTTLAGAFFLLALVMYGEDARTIAELSIDDYLYPDADLYNVSGLPPLALPPPTCDLSSGRWVFDNASVPAYREKDCTFLTKQVTCLANGRPDDMWQYWRWQPSDCSLPTFDARRFMEAMRGKRLMFVGDSLNRNQWESLVCLVQPILSKGRKKIVKRGSLNTFYAKEYRATLEFYWAPFLVESNSDNPNFHSIKERIISPERIEAHARNWKDVDYLIFNTYIWWMNTADIKETELEVLV

SEQ ID NO: 65399 - protein, 355 aa, Zea Mays
MSNEMYSTIARVTDGIYEGIAIGGDVFPGSTLSDHILRFNNIPQVKMMVVLGELGGKDEYSLVEALKQGKVQKPVVAWVSGTCARLFKSEVQFGHAGAKSGGELESAQAKNQALKEAGAIVPTSYEALESAIKETFDKLFEEGKISPVTEITPPLIPEDLKTAIKSGKVRAPTHIISTISDDRGDEPCYAGVPMSTIIEQGYGVGDVISLLWFKRSLPRYCTQFIEICVMLCADHGPCVSGAHNSIVTARAGKDLVSSLVSGLLTIGPRFGGAIDDAARYFKDACDRSLTPYEFVEGMKKKGIRVPGIGHRAETTGISVCSFYRNMLTHISLQSSTWNTLFRLRPTPCQKPTIWL

SEQ ID NO: 65400 - protein, 260 aa, Zea Mays
MGKQQEGKRRRGEKDGKRKGRGKTAAAAVPEDAAPVAGCWIRFPRLRGCMPSRAKVDSSTSARGGGRDDISTCVETKPSTDDACQDQSVPPASGSATTSNTGSISPSSIVGEELKLAFQLRRFTFSELKCATRNFRPESLLGEGGFGCVFKGWIEENGTAPVKPGTGLTVAVKTLNHDGLQGHKEWVAEVDFLGNLQHPHLVKLVGYCIEDDQRLLVYEFMPRGSLENHLFRSKYLLILPLLVLYVTYMLLLSYFFISIS

SEQ ID NO: 65401 - protein, 70 aa, Zea Mays
MVLSAGGLGLLISLRNKAHDISVENSIVEAVGSIQEEPLLEHHMCMQKDQGYIRSYSTESLALVWGSNKN

SEQ ID NO: 65402 - protein, 228 aa, Zea Mays
MERDFLGAIDRAWKCGEAAKEESRSEPDSPAATRWQFAARSGVAPAFMSFRTEATGEGSEAFSVSELRPAGDAFDGIKKQSSMLSIYQQQRQFGHNSSQATAQQQYPAAAHRQRSQVADYGAAAPHRLPGGGGGGCRLVQPVSVRHPVPFHQANLMVRSSVSQSFHNQQQPFTMSNNGFGGSTAGVYGARNPRNQASTQLTIFYNGSVNVFDNVPVDKGVCSWCYPVK

SEQ ID NO: 65403 - protein, 1038 aa, Zea Mays
MEAASCCRVFSTQRCRFPLRRLSAPPWPQPFCTESSGGLVTPSASKRRSRGPVMAAKKAAEGEKQEDGKYKHTVDLPKTTFGLRANSVQREPELQKLWDDNQVLKRVSERNTGTAFVLHDGPPYANGDLHMGHALNKILKDFINRYKLLQNHKVSFVPGWDCHGLPIELKVLKSMDKETLSALTPIKLRQKAAKFAKATVDAQMKSFKRYGVWADWDNPYLTLSPEYEAAQLEVFGQMVMKGYIYRGRKPVHWSPSSRTALAEAELEYSENHISRSIYAAFKITNPSKSGMLDDFFPNVSLVIWTTTPWTIPANAAVAVNPKLIYAVAEVQSVFESESTSGGKQRKVGNILSSEKGKLFVIVASDLITTLESKWGVKLVVHKSFPGSALEHCRYAHPVNSNECSVILGGDYITTESGTGLVHTAPGHGQEDYITGLKYGLPIISPVDDEGNFTAEAGQFGGLSVLGAGNAAVVKYLDEQYSLILEEPYKHKYPYDWRSKEPTIFRATEQWFASVDGFRDAAMDAIRRVTWVPSQRTWGVPIPVFYHVDSQEPLITEETIEHIKAIVLKKGSDAWWYMTTEELLPDRYRDKASEYRKGTDTMDVWFDSGSSWAAVLAKRDGLNFPADIYLEGSDQHRGWFQSSLLTSIATTGKAPYSSVITHGFVLDEKGFKMSKSIGNVVDPEKIIVGGKNHREEPGYGADVLRLWVSSVDYTTDVLIGPQILRQMSDMYRKLRGTMRFLLSNLHDWKPDNSVPYNDLPKIDKYALFHLETVMTSMKDSYESYQFYKVYQILQRFATVGLSNFYLDVAKDRLYVGGRVSFTRKSCQTVLMAHLLYLVRAISPIMPHLAEDVWQNLPFQYTLQDGSLANFVFDLKWPEKNEEWLSAPKDDVDFLGVILELRSEVNKILENARTGKLIGSSLDAKVYLHTESSDTVLKLKELSSASNDADALHRLFITSQVDILPILNEEITSSVPYTGKFSNPRTGVIWIGVTRADGAKCERCWNYTQDVGSFHDHPTLCVRCYGVIELQTQPAAAAVS

SEQ ID NO: 65404 - protein, 816 aa, Zea Mays
MLPAVAAASPGLSHLPRYHHLGRRFHLRRHRLLPAIPARLSCGATHARRLLLAGAFAKGEGSSGQDVDHSAGATNSGSAYLGLFVRLLGLDNDTRDREHAVCTLYQYSLGGRKSIDEIMQFPGCIVLIISLLKSESILACEAATGLLRNITSVHIYRKMAGESGAMEEIINLLCKSTITPKILEQCLCTIWNFSIDEKWRYKVLKSDVLMKIVGYLDEEDIQVKEAAGGIISNLALSSSSHGALVEVGVIPKLVHLLQTKEDDYKIIRKEAKSSLIQLATDDCYYSLIIEEGLVRVPLVGSAAYKAFKPLPHSWPSFPDGSKIQRSSHPSKYGATELLLGLSVNENDTKPDEAKINAMIGRSNQQFLARVGAIELDDQGQEESGSEKNDMYTILPWVDGVARLVLILGLEDVSAIKKAARAMGDASINEHMRTSFKEAGAVKPLLQLLKHKDVHVREAGAYALEKLCVSATVCHNIKTEGGLELLVNIVKDRHTPVELLEKIIYILSRMFDMGICMVAVPDTEGYKDSENSAKTSVNQEMSSELIFDFDAISHLTEVLKEASPRLQAKVCCVLDHIAASEQHATAMTAACTGSVIEAILEIGVIHGTRSDSENFEIPSVVIKELSEAVSAAVRLLSKLLNFDLFIRSINGEKITSLLRRTLKSNFPLQSKDCLAACLIKLESRAGLSGDHGVSSIDMEITIYETIPRLIEQMMISLSFENKRSAVIELNKIISGGVLEYTRAVADSGGIFPLVKMLEEADGDALEAILSILYNLSMDPENHPAIIAAGAVPLLKRIVRTEAPQWSSAIQLLRTLPV

SEQ ID NO: 65405 - protein, 410 aa, Zea Mays
MSDLASTSKDKLAYFRIKELKDILNQLGLPKHGKKQDLVDRVLAELSDEQGQRHHGWGRKNALTREAVAKVVDDTYSRKMQVCAPDLPSRSHSGSDFNHFRPKEEATDFYYVETKVRCLCNSTMLNDKIIKCEDGKCQLWQHFTCVLIPDTPTEGAGPDIPPHFYCELCRLNRADPFWVTTANPLLPVKFISSGVGNDGASAPQIVEKTFQLSRAERETVQRPEYDLQVWCILVNDKVQFRMQWPQYAELQVNGIPVRVMTRPGSQLLGINGRDDGPLVTTCSREGINKISLSRVDARTFCFGVRIVRRRTVPQVLSLIPKEGEGESFEDALARVRRCLGGGGATDNADSDSDLEVVTESVTVNLRCPNSGSRMRIAGRFKPCVHMGCFDLETFVELNQRSRKMHARFAK

SEQ ID NO: 65406 - protein, 370 aa, Zea Mays
MAASLLSRAAAAAAALRGAARPNHLLARASLPKGRVGWAARAAEGAGGPRCGPSPLLGAFGIAARCNATSSSSAVSEATGVHTVPPTEPVVSAEWLHANLKDPDVKVLDASWYMPAEQRNPLQEYQVAHIPGALFFDVDGISDRTSSLPHMLPSEKAFSAAVSALGIYNKDGIVVYDGKGLFSAARVWWMFRVFGHDKVWVLDGGLPQWRASGYDVESSASSDAILKASAAGEAIEKVYQGQLVGPTTFEAKLQPHLLWSLDQVKENINTQTHQLIDARSKPRFDGAVPEPRKGIRSGHVPGSKCVPFPQVLDSSQKLLPSDELRKRFEQEGISLDQPLVTSCGTGVTACVLALLQLLFSLFIIGRPCSS

SEQ ID NO: 65407 - protein, 138 aa, Zea Mays
MLPNLRASKTSLKFLIKQESDAQNKPGKLYTQLVSAQLKIQDIKSQRSALLLEISRIKQILEQEKNIIPGFPAALQQMDMKSLEEEYKALQGDKSGEVEYFQSLDETINGMKGILDPVKCQCGLEYNLKLDGEAMDIS

SEQ ID NO: 65408 - protein, 57 aa, Zea Mays
MAMMWPTNGPFHLLVFLQQPCASAFSFNDIYGMAGRIKTRKRACAGAGAVNRKQAIS

SEQ ID NO: 65409 - protein, 457 aa, Zea Mays
MDDDRDHDQDPDASSPAAPWRRSVKRKLGAEAGDEAGPAARVEAEDERAALREAAAAAQSTASALRVEVEEERLAAASAASEAMAMMLRLQRDKAEVQMELRQFRRFADEKMALDAAEIDQLRALLAQRARRLLRLRSRLREYRLQCLHLGIPLPEGEDLVAQNAAEEEEEDLLLLEGEEGYIVGDGGYYYPELRCNDGEYYYEDGREEEDVVALDLERRICLLEHDQEPRLLEPPHEKEEGTHLYTDEVLPDMSEHELGGLYADEMLSKEDVETMNNLHNDDEELPESPTAGNDDGEEASEADGADSVSGSGSDRVYTIDKVHQGAAMPIARVVDKYQGEAVEPDIKKLYMRLEALEADRESMRQALVAMRTEKAQLVLLREIAQQLAKDGVPVGPGAGAGPGVHHLPRKHAVGIVERRFTEDKKAILVKTFSMAALFKHNLVQQCQRIALSEFCL

SEQ ID NO: 65410 - protein, 50 aa, Zea Mays
MAMIRALRLCSGELGKEEVGASGGESTTHPAFNHEDEATELGAEKIGASL

SEQ ID NO: 65411 - protein, 333 aa, Zea Mays
MELFPSQPDLSLQIGLPASATPHDHHHGAALSARFLAAAAGGGGNGIPGNPAVAMAPSLQLPMPMPLPMPMPMPPNAAAAAGAAGGLYYHPDAAAMLRPIRGVPLYQHPHTHAVPPTFPPHAAGAAGPCFCEPCHVAAGAWRRAGCGVGTRVVAGFPTAAKRAARAPRMRWTSTLHARFVHAVELLGGHERATPKSVLELMDVKDLTLAHVKSHLQMYRTVKNTERPAASSDLADGFENGSAGEICDDNSLDLHGAGRPESGAARHGREDWTGFPSESNTGRMSMHSRSLKDQTMQSKSLEILSDMNSSCVSETTSCASELNLEFTLGPRIRH

SEQ ID NO: 65412 - protein, 918 aa, Zea Mays
MILHLAKMCAPCFPAPREVIFLLARMFLHTSWHFLGIQSSNQPLISMKAQDNLTRVLTMVMIVYSSDPNDVNERNLNKANVYQCQKCNLTFGDRTSYAQHHLAYHEMSVKRRRTGKFGEPVVGKDGKFECPICHKTFEEEPQYFGHVGSHARYEGLAPEAFLDKATSRRAANDSLAEIPFSLQELTESHGQNNKVSYGEKGFQHHNHSNKHGDNNLTAIDLFGTNYSDNFIRPNKTWGSPEEGPSCNDAPSVSRYTNFTGHADVIVSERASISNNQSVSNINGFIFSDQPGGNHVVRPTASVTANHYEDQIIDRGRAAPNADNNTVKARDVNLNSCASASTISFPIAYANNETSAALNEANRSSSTAKCFSGSFNNNDGACSASSSCGPTNKISSSFGTSSKTQAAGSRSIGASYEPYGEDCSALKANPFASKNNTSVYQYNLATQPVYAVAARADCFASGSEQTKNSDKELASSAKQRIDNVENRTSKEAGFVAEAYNSGAFNGGITEKGFAQISNSFTHIKSNASGSCSLPESKTPTNGSDSNCIKGSLVNRGDDSFTKVSIVNRPINNNESNVARLEAMGKLNDEMQNRYNYHAPGIDPHVAASASRNANGFMPMQANFGCMSSTVQSVVDVSVSSTSQDQCDLQLGFGAQKQQIFSNHGELRTATPGSPLPGSIARKDSVPTEPSHFGSMNGPKSFPTGTSQFGGFAKPTFVPAAPSQFGSMAQANYVHSAQSSQFTSWVQPNSIPPAESSQFGSKAQSSSVPPANTSQFRGMAGQNSVPPAQSFGSTVRPNYVTPESSQFGSMARPNSVPPQYVNMPSQNFVSSSEPTLVLGYAPQIGSGPPPQVQLGWDLSLPRMVTGGSMVTCLCIWCNSQFHHFGPVDGQQPSSFGFICPTCKDRMSGHHSVPNNGSWQP

SEQ ID NO: 65413 - protein, 809 aa, Zea Mays
MEAATAMDFHTLSRRELQALCKRNGVRANMTNAAMAEALQGLTSVDGVDEIGTTLCLPTATPGRSAMKSAAKMVAVEEQQHGSPLPRGRRVSVKSPEAIRMEVGGEDEMKENVKTPGVVLRSTRRGIRATPAPLPTPVPASSARATARRTAVRRTGEVAPTPATRRRAASRKAAGAVEVDRPAEDVSEDKTSKMTRALDQEAEVVAVASKEEKGQQDEPRAALSDVKCDDPKGEEKVQQEEPKEQEEVVQFLEGDNKVEEVEEGEEGSAAVLGKSCNDPKVEEVVVVMEEQFTEPHEGIVKEQEPISVERSASVEVMDDSPILGVIEKKQDASVEDCEDLAEFSPAREMTDEAIPVTEDKEVAISEESVTEDNEVAISEEAVTEDKEVAISEEAVTEDKEVAISEEAVTEDKEVAINEEAVTEDKEVAISEEAIEEDGFANTVETDPTPKEILLTEGEIILIEGKEGAANEMPQAGETSEEDEEDYLAELKEGAADQVLQAELADNETSKEDEDDLSEKREGTAAKMLQGELTDDETSEEDDLDEDEEWVSDDDENTEEDYLAELKEGVADQVLQAELANNETGEEDEDALSEEREGTAAKMLQGEPTDDETSEEDDLDEDEGWASDDDENTEEIGSTDETDEDPDETNEESYTSDAVQMMQGSGIAEDANEDASTEDDDFSGDLPPEFENIMIFSGAETESDIAPPVLEENKDAVVSATKTAKSLDDSALKTGQEEEGPEEVDNVVKSLDEEVESKEMQKQQPQDYNSMSLRKLKATHKKYLIAAKEEVTEGKRLPLEEVDENACIDH

SEQ ID NO: 65414 - protein, 577 aa, Zea Mays
MPSSVLSSDSMHIGLLAAAAHAAATNSRFTIFYNPRASPTEFVIPLSKYIKAVFHTRISVGMRFRMLFETEESSVRRYMGTITEVSDADPVRWPSSYWRSVKVGWDESTAGERPPRVSLWEIEPLTTFPMYPSLFPLRVKHPWYSGLAALHDDSNALMWLRGVTGEGGFHSLNFQSPGIGSWGQQRLHPSLLSNDHDQYQAVVAAAAASQSGGYLKQQFLHLQQPMQSPQEQCNLNPLLQQQILQQASQQQMVSSDAQNIQSVLNPGAIQQQLHQLQQMQHTHNDQKQKIQPDQQYQVASSAVLPSPTSLPSHLREKFGFSDPNVNSSSFISSSSNENMLESNFLQVSSKSVDLSRFNQPVVSEQQQPQQQQAWKQKFMGSQSMSFGGSVSLNSPTSKDGSVDNKVGRDVQNQSLFSPQVDSSSLLYNMVPNLTSNVADNNISAFPSGSTYLQSPMYGCLDDSSGLLQNTGENDPTTRTFVKVYKSGSVGRSLDITRFSNYAELREELGQMFGIKGQLDDPDRSGWQLVFVDRENDVLLLGDDPWESFVNSVWYIKILSPEDVHKMGKPGNDPRYLS

SEQ ID NO: 65415 - protein, 218 aa, Zea Mays
MHQGYPKETLVRFLKAREWNVAKAHKMIVECLNWRIQNEIDSVLERPIVPVDLYRSIRDSQLIGLSGYTKEGLPIFGIGVGHSTYDKASVHYYVQSHIQINEYRDRIILPRLTQQFGRPVTSCIKVLDMTGLKLSALSQIKMLTSISTVDDLNYPEKTETYYVVNVPYIFSACWKVVKPLLQERTKKKVKVLTGCGRDELLKVNIFFLACCLFTCHFW

SEQ ID NO: 65416 - protein, 1182 aa, Zea Mays
MDPRRAPPRGGGANGLSYSTLFNLEPLLNFRVPVPEDLARYENSSSNGSPSSEGQGSLLDQYNGVNDASHGLHRKRKRHLDGASDDDEADAYSNKITEEQYRAMLSEHVQKYRRSKFKEGAFSSDPPRVATPQLKHKNGGKKNMKRISDFSDDVALDGIEASHEYNGIECIKTHGGFNKLVATLDSTYLDMGDSTRYLVPEGYDKLASSLNLPVSSDIRVEEHFLKGMLDLRTLAAMLGTDQRFEASNRGGISEPLPQFESLKERVKVQEFSLQVTKDPFAIPEGSAGRIRRYIISEAGDLQVHYVRVMEKGDTYEIIERSLPKKQIVKKEPSVIMKEESEKTYKLWQSLATKSIPKHHKNFTALIKKRQVDAKRFSDSCQREVKLKVSRSLKLMRCAAVRTRKFVKDMQMFWKRVDKEQYELRKKEEKEAAEALKREEELREAKRQQHRLNFLLSQTELYSHFMQNKTGGSAPPDEEDVPDEEDPEEAQLKREALRAAQHAVSQQKMKTNAFDSEIVRLRQTSDSALPTDDSSSMDPSKIDLLHPSTMPETSSVQTPELFKGVLKEYQLKGLQWLVNCYEQGLNGILADEMGLGKTVQAMAFLSHLAEDKNIWGPFLVVAPASVVNNWAEELIRFCPDLKILPYWGPERMILRKNINPKRLYRRDASFHILITNYQILVNEEKLLRRVKWQYMVLDEAQAIKSSSSQRWKTLLSFNCRNRLLLTGTPIQNNMAELWALLHFIMPTLFDSHEQFNEWFSKGIEGHAEHGGALNEHQLSRLHAILKPFMLRRVKIDVIAEMTKKKEEIVPCKLSSRQQVFYQAIKNKISLNELLAGSRGSLNDKKLLSLMNIVMQLRKVCNHPELFERNEGSSYFNFAEIPNSLLSPPFGELQDVHYAGKRNPIIFEIPKLVYEGIISNMENSGNICGFQNGYLNRLFNIFLPSNIYRSAIPEVSSSKESLLSSGAFGFTRLSNLCPVEASFLATASLFERLVFSVMQWNMNYTAEILDEFLDSEDTGIQSSHNDSTKVRAVARLLLSSTKVKPSLLRTKIGTGPIDGPYEALVLSHRDRLASNIRLLRSAYAFIPPARAPPINVWCADRNFAYKFTDEMYDPWAKKLFLGFARTSEFNGPRQPIAPHPLIQELNTDLPIIEPMLQLPYRIFGSSPPMSNFDPAKMLTACLDV

SEQ ID NO: 65417 - protein, 77 aa, Zea Mays
MLVHHSMMTRRRVKDMQLVTIKKGRKDAHLGCGNTLRRRIWSLRRMEKSTNKCGGTATLQDVRQSIELNATMALLGL

SEQ ID NO: 65418 - protein, 559 aa, Zea Mays
MAANAAQQDPRGQRRLCGGGGGGATACVRPRAWCCSFSFSGVPDSPDLRPLPSSAASPPAGRKLPPKSPSAASFYGSPTSYRLAGLIDPRRILSPGRVSPIDHDGAVPPPLPLPPPPPPAAAAADDSAVVIPAERLASALPSATVAPSLVAVREEADAAGMLDLRLLLRGAHGRCVLMELDSSVLCGCSDFFAAMAPREDAAGAGGKRLEVDGVENLDAFCAAVELMYNPDPIGCLAAAGVSRAIDVLEVCSSIMFSKGIKSCLTYIEAVPWNENEEEKLKNLFARFTFDEAMSQDILARLRPHNWKSSDDLTIQLIQSVTGSTSTVARKDMQSLVNGLLSKSSVYQKDSSGLNKESLYQICYSCLESLVDLFEEAREPTDYTGQILVVRGSKPLIERVSRQTENLSWLLDILVNNDIAEEFVELWAKQDRLIRMHEQASAMVRYELSRISAAVFIALGKGKVQCRGNVRSLVFRGWFSTMLLDFGWLQRCPKGLDLRSLEENLGRGILTLPLRQQQCLFEEWFQFYSTKGAECPNLIRAFQVWWRRSFVRSSVEPQRQ

SEQ ID NO: 65419 - protein, 321 aa, Zea Mays
MSRDAHLGVGVEGDAAEEKNAAADGGEGVGFRSGGGGGHKLSLVPLIFLIFFEVAGGPYGAEPAVQAAGPLYALLGFLIFPFIWAIPEALVTAELSTAMPGNGGFVLWADRAFGPFSGSLMGTWKYVSSAINGAAFPALCADYLARVAPAVSGGGARVATIVAFNVALTFVNYTGLTVVGWSAVGLGVASLSPFLVMSGAALPKIRPRRWRVVAAERDWKLFFNTLFWNLNYWDSVSTMAGEVERPGKTLPKALVSAVSMTSLGYLLPLMAATGAIDVAPESWGNGFFADAAGAWYPICSCSILPAEPSPPMLPMPCGPQS

SEQ ID NO: 65420 - protein, 1355 aa, Zea Mays
MAMGATVRAAAADAMVTFLWVLCASALDVSIAAVTSYQGLQEGTGHYALLVTTSLLSVLLFTFDLLYGVLGGASFNFTDFATSYSAGLDSPSLFSVALHFLARTVVVVKRTTLRVARKDAYMAELDLFAKGLHERLVPFLGHCLDKEEEKVHVYRFVQNGDLSSALHKKSREEDEGLQSLDWIKRLKIATGVAEALCYLHHECSPPMVHRDVQASSILLDDKFDVRLGSLSELPAIESVLNAMKSNTNQRVSPIFALVLCPTRELAIQLTAEANVLLKYHEGIGVQSLIGGTRFKLDQRRLESDPCQPDHLLDETNRAGSKIRVERAERSSYTFQSQLDGGAQFCVSQEASRLTSLFLVFMPTAQDNTTTPMELEDFIRLDSIWMRWTLLAEDRTPKPGSQPRKPGDRRRQVENTLGGRSQAASESRGGVAVLAHGGGHSRRRSGMATPTPMPGSEGTLVAVMPRSPSPTPAEAGTSATETPVLIFLYFHKAIRAELEALHGAAVLLATERTGDVAALAERCRFFFSIYKHHCDAEDAVIFPALDIRVKNVAGTYSLEHKGESDLFSQLFDLLELDIQNDDALRRELASCTGAIQTCLSQHMSKEEEQVFPLLTKKFSCEEQADLVWQFLCNIPVNMVAEFLPWLSTSVTSDEHQDIRDCLCKVVPDEKLLQQVVFTWMEGKAAREVAESFATGNLVRNHSAEDVSDHGEIYVCSQQESKLGSKNCAESNGSQADRHPIDDILYWHNAIRMELHDIKKETRRVQQSGNFSDISAFNERLQFIADVCIYHSIAEDQVVFPAVDSELSFVQEHAEEEHRFNNFRCLIQQFQIAGAKSTALDFYSKLCSHADKILETIEKHFSNEETKVLPQARMFFSPEKQRELSYKSLCVMPLKLLERVLPWLVSKLSDEQATSFLQNIRLAASPSETALVTLISGWACKGRDKSKSGEYLCLTSGTARCLSDDVDDQGKCRSFCPCASHNSSDLSLQLQTENGSRPGKRGKDAVSFPGTNGSYCSQTADIDASPCSKKPCCIPGLRVKSSNLGIGSLASVKSFRSLPYNSTAPSIYSSLFSWETDASLSCSDGISRPIDTIFKFHKAIRKDLEYLDVESGRLIDGDESCLRQFIGRFRLLWGLYRAHSNAEDEIVFPALESRETLHNVSHSYTLDHKQEEQLFEDISDVLFQLSQLHDSQGHAQTKVNEVKQSCFHSSNDVDFTRKYNELATKLQAMCKSIRVALTNHVHREELELWPLFDKHFSVEEQDKLVGRIIGSTGAEVLQSMVPWVTSALTQEEQNKMLDTWKQATKNTMFGEWLNEWWKGAGTSDSSAEAPSAPEVIYKISLNKMTRCLSLAGRTYFE

SEQ ID NO: 65421 - protein, 1829 aa, Zea Mays
MDARFPYSPAEVAKVEFVQFGILSPDEIRQMSVIQIEHAETMERGKPKPGGLSDPRLGTIDRKIKCETCMAGMAECPGHFGHLELAKPMFHIGFIKTVLSIMRCVCFNCSKILADEDETKFKQALKIRNPKNRLKRIYDACKSKKVCAGGDDLDVQEQDTDEPIKKRGGCGAQQPNITVDGMKMVAEFKAPKKKTDDQDQLPEPVERKQILSAERVLNVLKRISDEDCLLLGLNPKYARPDWMILQVLPVPPPPVRPSVMMDTSSRSEDDLTHQLAMIIRHNENLRRQERNGAPAHIITEFAQLLQFHIATYFDNDLPGQPRATQRSGRPIKSICSRLKAKEGRIRGNLMGKRVDFSARTVITPDPNINIDELGVPWSIALNLTYPETVTPYNIERLKELVEYGPHPPPGKTGAKYIIREDGQRLDLRYVKKSSDQHLELGYKVERHLNDGDFVLFNRQPSLHKMSIMGHRIKIMPYSTFRLNLSVTSPYNADFDGDEMNMHVPQSFETRAEVLELMMVPKCIVSPQSNRPVMGIVQDTLLGCRKITKRDTLIEKDVFMNILMWWQDFDGKIPAPTILKPRPIWTGKQVFNLIIPKQINLIRFSAWHSEEEKGFITPGDTMVRIEKGELLSGTLCKKSLGTGSGSLIHVIWEEVGPDAARKFLGHTQWLVNYWLLQNGFSIGIGDTIADASTMETINDTISKAKNAVKELIKKAHEKQLEAEPGRTMMESFENRVNQVLNKARDDAGSSAQNSLSESNNLKAMVTAGSKGSFINISQMTACVGQQNVEGKRIPFGFIDRTLPHFTKDDYGPESRGFVENSYLRGLTPQEFFFHAMGGREGLIDTAVKTSETGYIQRRLVKAMEDIMVKYDGTVRNSLGDVIQFLYGEDGMDAVWIESQKLDSLKMKKPEFDNVFRYELDDENWRPNYMLPEHVDDLKTIREFRNVFEAEVQKLEADRYQLGSEITTTGDNSWPMPVNLKRLIWNAQKTFKIDFRRPSDMHPMEIVEAIDKLQERLKVVPGDDAMSIEAQKNATLFFNILLRSTFASKRVLKEYRLTKEAFEWVIGEIESRFLQSLVAPGEMIGCVAAQSIGEPATQMTLNTFHYAGVSAKNVTLGVPRLREIINVAKKIKTPSLSVYLKPQVNQKKELAKNVQCALEYTTLRSVTHATEIWYDPDPLGTIIEEDTEFVQSYYEMPDEDIDPDKISPWLLRIELNREMMVDKKLSMADIAEKINREFDDDLSCIFNDDNADKLILRIRITNDEAPKGEIQDESAEDDVFLKKIEGNMLTEMALRGIPDINKVFIKEGKVNTFYQDDGFKAANEWMLDTEGVNLLAVMCHEDVDATRTTSNHLIEVIEVLGIEAVRRSLLDELRVVISFDGSYVNYRHLAILCDTMTYRGHLMAITRHGINRNDTGPLMRCSFEETVDILLDAAVYAESDHLRGVTENIMLGQLAPIGTGGCALYLNDQMLQQAIELQLPSYVEGLDFGMTPARSPITGTPYHEGMMSPSYLLSPNIRASPINTDASFSPYVGHMAFSPFPSPGGYSPSSGGYSPSSPVFTPEKGYSPLSPSYSPASPSYSPTSPSYTPGSPTYSPTSPNYSPTSPTYSPTSPSYSPTSPSYSPTSPSYSPTSPVYSPTSPAYSPTSPAYSPTSPSYSPTSPSYSPTSPSYSPTSPSYSPTSPSYSPTSPSYSPTSPAYSPTSPGYSPTSPSYSPTSPSYSPTSPSYNPSSAKYSPSHAYSPSSPRMSPYSQTSPSYSPTSPTYSPTSPSYSQPSPSYSPTSPFNTSGGPSPDYSPTSPNYSPSGSYSPTAPGYSPSSTGQGNDKDDKSAR

SEQ ID NO: 65422 - protein, 152 aa, Zea Mays
MRFVVAAVAKPTAQHQRLLAVPVRDTRWLLVSGSVRVYTSKTRGFTTKCQIGLQLYQLFHLAKNQSTSTPSCSWLLLYTKRPNAQTSFHPSQLNVRLEIILMNRPLLGGFYLNLDVTAASLSKRVLGLLLWMVSIFCLYPILGLKNRVVFAK

SEQ ID NO: 65423 - protein, 358 aa, Zea Mays
MRTLRGHTGAITALHCVTRKEVWDLVGDREDAGFFISGSTDCTVKIWDPSLRGSELRATLKGHTRAIRTISSDRGKIVSGADDQSVIVWDKQTFKLLEELKGHEAPVSSVRMLSGERVLIASHDGTVKMWDVRTDTCVVTVGRCQSAVLCMEYDDSTGILAAAGRDITAHVWDIRSSKQMFKLQGHTKWIRSMRMTGETIITGSDDWTARVWSLNRGTCDAVLACHAGPVLCVEYSPSDKGIITGSADGLIRFWENEGGIKCVKNLTLHTASVLSISASDHWLAIGAADNSMSLFHRPQERFGGFSNAGSKVAGWQLYRTPQKTAAVVRCIASDLDRKRICSGGRNGLLRLWDATTSI

SEQ ID NO: 65424 - protein, 488 aa, Zea Mays
MVSASAPPPQAQSDAAGSGEEVSKKVRKPYTITKSRESWTEQEHDKFLEALQLFDRDWKKIEAFVGSKTVIQIRSHAQKYLLKVQKNGTSEHVPPPRPKRKAAHPYPQKASKNGHIFVISEEKMSQDKKAVAETKLTEEEKLLEEKIAGFVESIAKTNTEKITKEILEGLSEDTDDSDSYDMESGGEDSEDRPWRPSHTVFGKSTIKQSHLDNMRGRYFRDMSIVRADIDRAAPAPEEDEVVIFRSFFKAGLRFPLSRFVVEVLSTYQIYLHQITPEAIIRMGIFVWAVRSQGLEPSARCFCSMHELSYETKAWGKEQYHNNFGCYSFVARSGVSYPVPTFRKRWPGDWMKEWFYVKNDLKAREDIKEIIMRPIWSHFGLRKPKVEIDEAVEACRRAFSTICSFVGTRDLLQEHIAYRIWPLVDSWEMPKDTITNPSEGGLVRLKYTFRFEDKFVEPDDDWLKCIENTSDELLGAYSKSEDNALSAAF

SEQ ID NO: 65425 - protein, 350 aa, Zea Mays
MGMAADATTAMTIDFLRARLLSERSVSRAAKERADHLAKRSIVTEPVAAVQVVELEEQLRTVTAQRRKAERAAAEVLAILDSQGFGRLSDAADDSGSEYEADTGDPNAVERDGGGGNAAEDALSGSELGAPAAAAAASAAQAGGLSWRGRAASPECERRRPQHQQHKGRQLRQRHGHGHGHRRGYFYCRAADSSPKYHPGQSCRKIKRKELRSQTEEEEGNDNAVESTEDGQERSDCTVCTDQPADVDGEVNQDGHGSSSNGRGEDRDDLAMVYEKDGEMERVLEKQAELIGQFEAQENAQREWEEKFSLSRDSVMDNVNLLNNKLNQAENACGRRETARVVDKEVVCEQ

SEQ ID NO: 65426 - protein, 389 aa, Zea Mays
MASGGGAAARMDPEVATELVRKGATLLLLDVPQRTLFGIDTQMFSVGPKFKGMKMVPPGAHFVYYCSPNRHGNEFAPTVGFFLTTHQSEVIVRKWDVQEERLIKLSEEEDIRYSEAVRHFEFDDQLGPYNLDSYGDWKQLSDYLSPNVIERLEPIGGEITIAWESSWMDKAPQSDMERRLVEQLREGKFAKNAPVQSGRRGCYYTSIPASVKHKDISGGDLTALNLDKTSLLETILAKNYEGQEDLFLGELQFAFIAFMMGQSLEAFMQWKALVSLLLSCSDAPLHTRTNMFIKFIRTLYYQLKHGFQHTQDSKSGDMGNSLCLDETWFSRDIFLYRLSKDFFTVVFEAPVVDGDLLSWARKLKSLLETTFGWDLEDDAVNLIDEDDER

SEQ ID NO: 65427 - protein, 469 aa, Zea Mays
MSIVPCDVCVCEFSMDRDPWAKFRRPNSEHPAQSEETRTHQHPGVAGARRPNAMPSPSPAPPPVLPISEHEDEIVAAVDANPVVVVIGETGSGKSTQLSQILHRRGYTRRGAIAVTQPRRVAAVSVSRRVAQELGVPLGDEVGYAIRFEDRTSERTCIKYLTDGILLRESLSNPELKQYSVIILDEAHERSLNTDILLGLMKRLIKDRASDLKVLITSATLDGLKVSKFFSGCPVLNIPGTLFPVEKFYSTDRPTNYIESSLRTAIDIHAKEPPGDVLIFMTGKDDIDKMVSKLEERIRNLEEGSCIDALVLPLHGSLPPELQVRVFAPAPPNCRRFIVATNVAETSLTVDGVVFVIDCGYVKQRQYNPSSGMYSLDVVQISRVQADQRAGRAGRTRPGKCYRLYPISIYQNEFLEATVPEIQRSSLAGSVLYLKSLNLPDINILKFDFLDPPSRELRIIILKEEINKV

SEQ ID NO: 65428 - protein, 525 aa, Zea Mays
MALRDVLLSIAQTPHRLRRRALVTWTPTQELNEVRDRSGARMKRRLEWYDLVGLGVGGMLGAGVFVTTGRVARDTAGPAVFASYVVAGVSALLSSLCYAEFSVRVPVAGGAFSYLRVTFASYILSGEFVGFFGGANILMEYVLSNAAVARSFTDYLASTFGVTERNAWRIVVDGIADGYNELDVPAVALILLITVCLCYSTKESSMLNMVLTVFHLLFFAFIVAAGLWNGSARNLVRPHGLAPYGVRGVLDGAAVVYFSYIGYDSACTMAEEIRDPSRALPVGIAGSVLVVSGLYCLMSVALCVMLPYTEISEAAPFSSAFREKVGWRWASSVVGAGASIGIVASLMVAMLGQARYLCVIARARLVPLWFAKVHPSTGTPMNATIFLGFCTASLALFTELQIVFEMISIGTLLVFYLVANALIYHRYVKVGTNRPLHVLLFLLLLTLSSLGFSLSRKIDGWCQWGMTLFGAVSIAITTIFHCTARQDIAGPSLEWSVPLMPWPAAASVFLNVFLITTLKEIKLFR

SEQ ID NO: 65429 - protein, 346 aa, Zea Mays
MQRRVGRAMDMWGRRRHRSMGDDSGGMPVRVQNEAKSIVFEILVRALIGLEEGDKMQYLRQQFQEFIAGLISLPVKLPGTQLYRSLKAKKRMTKLIKTIIQEKRKKMMSEGDDLRGGTHPRDMIDVLLGNGNDELTDELISDNMIDFMIPAEDSVPVLITLAVKYLSECPQALQQLEEENMELKRQKSGAGETLEWTDYMSLAFTQHVITETLRMGNIINGIMRKAVRDVEVRGHLVPKGWRVLVYFRAVHLDAAVHDDPHAFNPWRWKERPDVVAMSGGGGGGFTPFGGGQRLCPGLDLARLEASIFLHHLVTNFRWVAEEDTVVNFPTVRLKRGMPIAVTPRTC

SEQ ID NO: 65430 - protein, 578 aa, Zea Mays
MRSQFHTSTHLQSQKSRRWPAAKTHVGFRRRRQELGDKATPAGATFMRVPPGSHAYTSAAELNAPLRGKLICCSQVPPATAPSANGDCSDFYAGGVAVYSGLLWSTPCRDLPVLLAQPRSLPVIVTYRPNWEGGQYAGEDEPRFEALLLAMELGAEYVDVEFKVADKFMKYLSGKKPQNCKLIISAYDYKTTPSVHELLNLVAQIRATGADIVKIETTAADIVDTSRMFQVLAHCHEKQVPIIGLVRKEHGFISRIICAKYGGYLTFASLENGKESTTEQPTVADLINKYKIRQIGPDTKVFGIIGNPVSHSKSPIVQNQAFRSVGFDAVFLPFLSDDLVQFLYTFSAPDYAGFSCTMPHKETALRCCDDVDPIARDIGAINTIIRRPDGKLVGYNTDYSGAISAIEDGIRASQPTDSITSPLAGRLFVVIGAGGAGKALAYGAKEKGARVVIANRTFARAQELAHIIGGTALTLSELESYHPEKGMILANATSVGMHPNVDETPLSKHALKSYAVVFDAVFVPRETRLLREAAVCGATVIDGLEMLIRLVMVQFKLFTGGMTAPERLMREAILTKTH

SEQ ID NO: 65431 - protein, 109 aa, Zea Mays
MQKLLHFMPCLRPTLPQDKELQNDNPPDWLPARPHHLILDHLTWSLTLWRVLCAWRSSRQQLRRVLCYLDFLSILVITLLKFGECSNFFYLGLVSCFFAYFKCEKLCAG

SEQ ID NO: 65432 - protein, 131 aa, Zea Mays
MTSSVSGSSKSPRKPPVSYRKWMDADNPVCCKCSGVMLELTSWTDSNPSRGFLRCQKDKIYALREANNDLRDRLDESNERVVVQEAEIARLRMQLEKITSDRQTENDFSCSVCCNLVFAHALVSTWGCGRQ

SEQ ID NO: 65433 - protein, 212 aa, Zea Mays
MDGARVLIAAGATAVCCFVCAFWVFRSSSSSSPASPKKHQSPSTNCCGCASCGCRDAKPANGEMAVGGENKKKAPEPDPPEAPSMMEQLVPEITTHALSYLDYTSLCRLSMTNSAMRRAANDDGAWKALYHKDFTVEQGTINPPNGWKAYYAATKAIINLNAEFYNIIREGSLPAMSRFWLNADYVKCIHATGEFCPGMLCRVVQFSYQRVD

SEQ ID NO: 65434 - protein, 161 aa, Zea Mays
MLFVGRAYLSIFGGRTMGDDDDDLDMVFTVSLEEKENLCLYGFPNESWEVNLPAEEVPPDLPEPALGINFARDGMQEKEWLSMVAAHSDAWLLSVAFYFGARFGFNKNDRKRLYSLIDDLPMAFEIVSGKSETKAPAPPSSSNHSNIKPKSNNKKNHRSLR

SEQ ID NO: 65435 - protein, 1029 aa, Zea Mays
MADVGRLEHLEQRRRQKPERTEERIRVYWRLGGFLAGLWLAIHVMTQIEHRGLQKQWTWEPMMGESLILALVDNNDDVRQVGRALLEHVSQARGLTSGLQFLCSSASSLTAVFLGLRYVVQLVGTRSVLADFSSFHHLFFVICKLLKEVVVQRPQIAQPAKPPEGGFLRQPYSSVLASPPEHAVDVSNWEKFCTLLSATLWPFISTCLREGKELIGLKQCQISCVRLLELLPLVYERVNSNCRTLSCSTTTVFQNPMDISWFIHLVHWGKSSLLVIIRHWKQCMLSLLKELKCSHSGTIQCYIEDLDNIISHDAVNINELEERVSNLELVLSKEVATKIERRGLADLPMFKEPIVSVPSPVHERHSGMDSFVDVESTKSSHPPDVHEIILLSDSEDNLLAPDVSSEEVLSSVMENDASTASNMLKDATPLEQSTLNDNRHSPLEPQICHPVSNISASSKPVSTDSRDNIAATKGLLRMKKPRPPMNTNNNSTSPKMVKSSVTGTSQQLHPKLLSDTEKFKSIFRDISDDEDDPLDHALDNYRRPQVLSRKPCILVPKRQVVQLPVPVGRKPGSGSRVTSTRRLQPPKLGSWFRNILEMDYFAVVGLSSPEIVRKPALKEVPVCFDSPAQYVEIFQPLVLEEFKAQLQNAYVETPPDDMMCGCVSILAVERVDDFLIVRARPEHSQSIKFRGCTENDLVLLTKDPLKNQGQQVHVLGKVERRESDKNKALIFVMKFFLSSDNARLNKVKRFLVERTLESSYNDSQLQALSIAIGPTSSKANFDLSLIQGPPGTGKTRTIVAIVSALLSLHAGDPYKSQRNEYVGSTDFTKPRAKISQSAAVIRAWQDAALAKQLEKDSQKECPRTTERFVKGRALVCAQSNAAVDELVSRLSEGLYSADGKLYKPYIVRVGNAKTVHSNSLPFFIDTLVEQRLSDQLNINNDGKKSSDAESSSSLRSKLEKIVDRIRYYESRQKLIESDKSEDGSSVPGEGEADEVSDEALGGKLNFLYAQKRVVSAELATAHAREKENS

SEQ ID NO: 65436 - protein, 162 aa, Zea Mays
MVAYNNKKYYIDIVETKPSNAISIIETDCEVDFAPPLDYKEPEPVKPAVPASTEPGTDVPAEEEPKFIPFTGSGRRLDGKPSKDKDVLASSPAKRQANATNGVQPSTATTSQGSSSRKATGKLVFGSGGNRAEKAPEKEAEEPKKEDPKFAAFTGKKYSLKG

SEQ ID NO: 65437 - protein, 77 aa, Zea Mays
MEAAMQQILDAMAHMELRLTYVLAGRGGEHRVEDADSELRSSNSATSSITAPVYDAGVFDSSTAPAYDNEFATSARS

SEQ ID NO: 65438 - protein, 1460 aa, Zea Mays
MGKPCFSGLVAIELCSMGGIAECGVSIDTKASPRRAAIEKAQDELRQEYDVREERRRELEFLEKGGNPLDFKLGHVASLSVQSTSVTEQIAEQNVISEAKGSSAFATSPHGDSVESNDKPGNSLCREGNTADNITLLDGDASSMGVDKIVKRGTKRTNSAQAEQFLHCDGQNNAKEEDSGLYRLGPKSQAYARRRSKPIRENAYSVSVRYPPIPPLSSQQKDVTGLIPETKTEDNGVSSIGDSKPTSPNSKNLVTNASLLNDKVEMETENVQAIPEGNQAPKNELSNSNNGSPAIEISPNSVPDNSRLTVSDQMVTAFVSVESPDAISKVAASRIVCSLPYISNEILKEAQTLEKAGNNPSMVSVVDVHAYGMDNNGAAPYSAVKSASLNENEVDPIHEYAAKAVTEHPDQNENLVPVNADEMADEGLNKILPDDKDDKKDCQLEVSSGPVILNDSSTPVYPEFSNSFYARDGTEVSNNAVDSKNNAEQLASSNQGKGNMEECKDSDGNNASELSVAQKLVSVIVPPASDAGDVSNFVENDVDKSSRDQEKVAKKEYEDSVVAKKDHEDAILRRARYIEANIKRAGEWSLCNISLEKKQKSHWDFVLEEMVWMANDFTQERLWKNTVAAQMSHWISSRGRAVFEEASIQRKQKSVARVLANGIMNFWCSVHTLRASGGIPKPIKIEQPNELEENKLGGFKSGKADEECLEQEKSRQSPIQSFALRFLEYNINASEFLPLAEAPSTPDRLNDFGILKANLFYGVAPGAMQAYRESMDRLLIYNNKKIGDTVLKDDYEPSTYASVTDVPMENAYGDDESEAHTYLLPGAYNGGLASKNSHKKKHHLPQRMNGARSYEIGVDSPYEPLYLESKSGNQQLLSNGKQTDFLSIPIKRIRTAARQRVVSPFPAGASGTPQFTNKTDASSGDTNSCQDDQSSLHGGSFSRKNADIESTVDFDRQLLYDGSEVSTKSKKKKKTKHPGYKALPNVSESCSLRAPGKGNYDHRSQIDMIAQYEQKDYIKKRQETNGNFGVIDLSTVVNGLHAAKKPKLLNQAPDISLEALKPIGPMASLAASQMSNMANPTRVIKISTRGRKSKGLKMRAGHSGPGSPWSSFEDQALVVLVHDMGENWELVSDALNSIIQLKCIYRRPNECKERHKLLTDRSCGDGADSADDSGSSQHYPSALPGIPKGSARQLFQRLQGPFEEGTLKTHFEKIILLGQKLHQTRRKDEIHELRQKNPLHTSHGFALSQACPGNLSGVILTPLDLCDGPSNSDALTGSNTSGLGLSNNNCSVGPTLPTSNMNLRLPGSPGMVLGSNSPLPLNAPSRDVQRYGVPRPTSIQGDEQSRIHYNQMVNGRNLQQPGVPVPGVLPSGVDRGARMMPPAHGVGIMAGLNRGTPITRPGFPRLGSLGNMSPTDGQGLKNTVNVHPGAILGPGSTMLRPRDPMQMFRHDWNYPPALTD

SEQ ID NO: 65439 - protein, 580 aa, Zea Mays
MALADATAFPYGLRVLVVDDDPTWLKILEKMLRKCSYEVTTCGLASVALQILRERRNKFDIVISDVNMPDMDGFKLLELIGLEMDLPVISTKLLQSVSTVMSIDGETSRVMKGVHHGACDYLLKPVRMKELRNIWQHVYRKKMHEVKEIEDGLDERGLFMRADTDTMRKRKEVDKDHADQDSSDGATAKKARVVWSVDLHQKFVNAVNQIGFDKVGPKKILDLMNVHGLTRENVASHLQKYRLYLSRLQKQNEERIMGAARQDFNQKGPSDNLNLRSSFQEQPGNLTNGFQHSSQKVQSQTNILDPHLDDTKTSVPLKVPDKNGTSASDAADHQNITGVSPLGGGGVFSFERMPVNQDTKLSEAMILECQSWSGGVPPKQFMQYPKHNHERCDLLGDYSCLPKPDLEHPIAPSHLYAPPPVISMSCSVEGDVRDFSDVKPDLLGCMKSLSPALTCTVESVSAQLSDSVVSSTNNDKKISSVEGLSSVKDCDFDQERNQAILLTSEEASILCSTDLTCLPDELSGYQLQGVSFGDIGLNSIDLFQCNDTMVLPGLQNNWYDDPDFSNETMEFPLLDGGLFA

SEQ ID NO: 65440 - protein, 830 aa, Zea Mays
MSDDGMASAAVEPPKREQNFLVKVGMEAWTQSFAVAHKVRLVHILKNLHTSEVKIYSDASKEFIGVLDGESGGEVLQEYVQQSPQLGELLEAWRLHRENPGMAHILLLFAAVLGHPDGKLRRHGSVKKSLDGVARMILEDKEKMGDVYLELNSGEFRRQNAALDLLAAIVRRGGGLASEVAERFDFKIPILPQLAGTMKKKGSRDGRNRRKGADFGSTRRSFIGFAMSFLEVGNPRLLRWVLQQKEVYSGVLRGIGNDDAETVIYVLSTLRDNVLVDESLVPPGLRSVLFGSVTLEQLSLISGNLESGEAADIAHEVLVMVCTDPKNGLMPGSNLRGNEKRLLDLMKKLKATEVVHHKKLLLAIVSNRLSLCSAYMNEFPYNIEPRSSPSWFSAISLAADVIASAKCNSIVQTLSSSSHGLVSVDDEEVQVVLKCMVPNVCSRAMINRGLLHSDDLVKHGSLRLVFESVNLLCYITESINCMVSKGRLKSEFIGSEKVTMKIDGFPVLSCSDATDASLVDEVHQGDEMQVKRWTSLREYIQDEVHGAMPDPQVFLKLLSSTSQKHQSYSQSIQKNNAQLSEPPQKKRRCSPSCEVDDIIIGGIDVEQDKDASEEQGLELKNDRTTTLCEIWSLDKQDPKTKDANVVENVFHSKLLDVLRLYLGVMPSSFDGSYDFFKIIPPNPLDLSMDEQQSLLSFLLEYSGQSRGCLDPERVPESMYKYLQPLVYIMLHSQIKNIRDQAYILVKAAMASSGAFDHNFTEIDAWLVFLPGYEAKWCVRENLRIGAPNKLSHIVIPFLCDAISVVGNNLYKYQEHTHKLISKSGQLEEMP

SEQ ID NO: 65441 - protein, 182 aa, Zea Mays
MEAVAAAASLPECGSTGGLLISSRSASLQLPPPTLAQEGVRGALLHGLVEVITENARPPRRPGPILERKQCRYTSNSNQYVMLHHSLLVRIVGLCSTKETYVLMEPGMDEAFVSREELEESLTRTGPWTPYPWTSPGSAWSTRPSRTSSGPCVCSRSMETLGPWSGTRSSWTSCHPSLDVCQ

SEQ ID NO: 65442 - protein, 216 aa, Zea Mays
MLPRRFSNHPGSSSPLPFLVVCGLLLAAAVAFSPVAAAEAAGRGGGGGGGGAGHEGRAGKPEVEAEAEARGDGVAVAEAGGEVVAQGNATEAKEGSLADMIDRALEKEFPESESEQGGGETDPGSFNNTVAEKQGVLETVARRVTKKNETKDNKSFPFKEVFLDRSEQEDVPTLIDRKVQSHPLDGIFCQVTAHVAYMLGIVLWTCCDCFLITVFC

SEQ ID NO: 65443 - protein, 405 aa, Zea Mays
MAPAARTRVCLVALVVALAFLFLLDGGVHAASSAAEQRRRQVRSLLRRLNKPAVATIESPDGDTIDCVDISKQPAFDHPSLKNHTIQMMPSCHPQQGGLYNKSNDVAHSALTQTWHQNGKCPENTVPIRRTREEDVLDIVQRYGRKKWPSSWSNDPNRYDDDVPDAASVLRGHQHAIASAPGDDNYYGTQATFNLWEPTVERNQGFSLAQLWITSGSYANNDLNTIEAGWQVYPGLYKDSHTRLFVYWTTSNQIAIGASNSYFSPVSIYGGSQYDITILVWKDPKQGNWWLQVGGQDLGYWPSSIFSKLSGSAASVDWGGEVASSPDAGQTSTQMGSGHFPDEGFSKASYIKNIQLVDSTNSLKSASGVKLTAKWPMCYNVQNGTSADWGTYIFYGGPGKNPNCP

SEQ ID NO: 65444 - protein, 215 aa, Zea Mays
MHQTIKHMTPVCKNTCILRLFCSTLLLNSTSRLLGRGSKALILARNEKKVDVTFLYELYTLGSLLPKRGLAVLGSSIVLLCIGQDKKFLGQTGGFMCPLARESGEESVGSFRIGSSMLLGHGVTIRVLLFSSMWHLRGRAYAAISRVRSATLPVAASWLRFKNTHVLLMVVLFALFLRKLSGADLPRCLQCCLCDALPDATSCSQGPKGRKCSCC

SEQ ID NO: 65445 - protein, 114 aa, Zea Mays
MRRPWRRPRTTPAWLLRSRSSTRRACMGLRNGRDRESERKDPDYDRSYDRSIELSLFIPSHYCIEISSLIIFSWVSGKEKTRFMLSILDLQRSTEIHQHTSTFHTEQSRRDDME

SEQ ID NO: 65446 - protein, 239 aa, Zea Mays
MVWFQCEDCGENLKKPKLAGHFRSCSAYKLSCIDCGELFSHDTVQGHTQCISEAEKYGPKGQTKPSNGAQGKADKPKPNADVDINVGLSTRPPWFCSLCKTTTTSKQTLLLHADGKKHRAKAKAFHVSQKQKDGAEQTPDVKEAGVVPTKESAQVNGGVSGDHERNEDKDAGKRKRMDDMTIEPGNTKRQLTQSGDEKSENKAKSKADELASGTDCKSVQKQKIKWKKIITKTLKAMEL

SEQ ID NO: 65447 - protein, 285 aa, Zea Mays
MLLLAFVGFLLSIFGLEFLVSVLVIIGWILVTGTFILCGVFLLLHNVVSDTCVAMEEWVAHPTEHTALDEVIPCVEPATANESLYRSRQVTFELVNVVNQVITNVSNRNFPPQLTPLYYNQSGPLMPLLCNPFTPDLRDRNCSRGEVTLDNATQVWKKYECQSTTVSGGAEICATVGRVTPSIYGQMTAGVTVSQGLYQYGPFLIQLQDCTFVRDTFTTINQGYCPGLERYSKWVYVGLVMVSLAVMLSLIFWVIYARERRHRVYSKQHQPYPVEDKPAATVPGA

SEQ ID NO: 65448 - protein, 174 aa, Zea Mays
MTLCFLLPNPVACIASKVNGATTALLQAGFLLASAGLACHRLNNLASGSLPCEAGTELPPALWRAAAWRLRRKSPSFSSSALSLPSPSSSPSSSSAGTWRGGRCWCTCRWCRRSPACARKSPLNPSQPTAAASPSSTRTRPKPHKANQKGHHLKRNPSPPCNEYLPQTLLCSSN

SEQ ID NO: 65449 - protein, 228 aa, Zea Mays
MATGGKSAAPQPPPAASSSSERALESVHFSSGNPRIEETRGVVVLHPDPPAAASWSHVPLGRKPRVCVLAVPNHMTYADFCRFCGAFVPHTLEMRIVRTDGAEDQYSVLINFDTQSSTDSFYKHFNGKQFSSLEGGVCHVRFVEEVHYTELIEHAHTSVTNLAEQPTCPNDLTKILEVFSQQSATILSTARAYQNGQTPHARSVDIVSSNQRNPCVLFAELRRIFGYV

SEQ ID NO: 65450 - protein, 594 aa, Zea Mays
MAGKEQGGGGPPQRPPMPAASMQPPIKKLVRQLDFNSAALAGNPAMAAAAAAVSRALQPRALPAGFQHPQHVRAAVPMVVPQQLHQRALPVMRPHPVVGHVPRHAVPLAVPVPQLRPMPPQPVQRPPVAVPLKPDSPKPWARLYEGKDSTPTKKKCCNCRNSRCLKLYCECFASGTHCDGCNCTNCFNNPENEVARREAIEATLERNPDAFRPKIGSSPHTNRNNEVSSDLPLVGKHNKGCHCKKSGCLKKYCECFQANILCSENCKCMDCKNFEGSEERRNLFQGDHKNAINIQQATNAAVNGAIGTTGFPSPSTSRKRKHIDPSLDHSNKEHAAHRNCHIPQKNAVPDGSIPISQSAHPPTLGPFKVTYRPLLADIVQAEDVKELCKLLVVVSGEAAKTYADRKAKEERVGKKEDERAEQKEDDRAGSLALTNHDREGNNQDPDKKASIDDHSSRGTHTGKANQEESRPNCADDQKSNRPMSPGTLALMCDEQAFEKMCDEQDTVFTASQNAVPQQTVTVNQNQSALYAEQERIVLTEFRDCLRKLVTYGRMKEERYAMEIKSETSGHPGQIFVAPAGATPIPWLYNLELPL

SEQ ID NO: 65451 - protein, 614 aa, Zea Mays
MLLRPSRGLSCLQPFSLHQSRAAMSETESAAAAPVAAAESKPRRLRGHKKGAVTCCVASSARPGVVASSGEDGCLCWFDLRTKDALLTMEAANKPISSICFKPGNEDFVYISAGNEILSFDVRMGTQSKPLETYNYNRDEINQIAVSSKGFLAAADDSGDVKIVNTIQKCLYKRLREAHTSICSSVQFIPWRPWTAITGGLDSKLAAWDFSKGRTLFSIDYVAVSEEGILGGLYKVCAVARGDGAVDVVDLEYELAPAKSKGPPRAAILTTRSKGAELGDGSCNQSRAKRIHLDYTMGGHTAAVSCVAFSAFGEKGKFLISGGNDASVKLWDWSKGFYSETNSKVDLVLDIDVKKKSETLSGCKLLLYPLEQEEEEGSSKLASLPAIAKKVLSYEEGIYAKLSRKWIEEGLRTVSIGRQEPGGFAAVLWRRREMGGLLLPHHRTFPNSLQASIPGPLSLHKGDRKNLHYFAPDVHLFCSLRQGFPRSSWSAVIRSEASGNAVASPGTVIKRSKEELITFFRDIQTSIAECSRKASKRTRKQPPDLFQEVRRREEQSHGGGDSGTDDVSEGPRKVKSLEDMNVAGLRELARARRMRGYSKLKKGELIDRLRGATT

SEQ ID NO: 65452 - protein, 156 aa, Zea Mays
MMDKDEDLSSDSEDEEVEDGPKKKGWFSSMFQSISGNNVLEKSDLQPALKALKDRLMAKNVAEEIAEKLCESVAASLEGKKLGSFTRISSTVQTAMEDALLRILTPRRSIDILRDVHAAKERGRPYVIVFVGVNGVGKSTNLAKHVTPSDLVLLSS

SEQ ID NO: 65453 - protein, 83 aa, Zea Mays
MGVRVGGVESLESSASTVPAESGGGRGASRDHVERVQIVLGSDYLLAWKELLTIDHGRPWNRRAPWAELGVPPVLVRFSPSDS

SEQ ID NO: 65454 - protein, 450 aa, Zea Mays
MEMRAAPDRATPRMVAAMSPPTPERGTLGRRVAAVAVSAGSPRSSPDRGRPALVERSSATALAVELIDAEIAQSFSQQRKQREGGGPTYHETFAYAQGPFARVPEALSSKPGHLSASQQRVYEDFVHVWHPHNQNVGATGSGLSGVATVSSTLGVLRAYSPNSTSASSSNLSTVHMGGLTCITQPTELGSEDTVIAQFLSNPAQVGPSESPVLFSGTVGAASTFSPLASNDLPEISAMVPPPSTSADRLGSILPEPLNTGDALERYKQVAQKLEALIANDGKHVEIQSVIAEVPDMLRRCVSRDEAALVVAQKVFKSLYDNASNSAYVSWLLATLIAIRDVCKLVVKELTSWVIYSDEEKKFNIEIIFGLIHSKLLNLGEYNVHLTKLIDGGRNKVATEFAMSLVQTLITQDPVSISELHNVVDAISKVLAAQVNKEESIANETTLIDPN

SEQ ID NO: 65455 - protein, 61 aa, Zea Mays
MIVDGRSRNVIRRGALRPTSGTHVMPRIEQSRRDDLESLCYVLMYFLRGRVADHQRVSMTF

SEQ ID NO: 65456 - protein, 66 aa, Zea Mays
MQACAAYFFNLVPWLLWSNSSTQKMFLLMIYIYTVTSKTAELLILDHVQRQSRFSADLYSCKHTMI

SEQ ID NO: 65457 - protein, 284 aa, Zea Mays
MAMQQHAASASSSSLGLHLLASPSSIREATHTKVFVGGLAWETSSDRLRRFYERFGDILEAVVITDRHSGRSKGYGFVTFREAESASKACEDPTPVIDGRRANCNLASLGRAQHPVPPGRPRSAGSYLGVPVPKAFYLGGYSHHRPFPLGYYQGFPVPQYSYPSYGTEYIYPQGTLNSYSGQQYLPIYGVSAAANTSNQAFSQLSPSVSGGGNGYLSVHSYNVPGNQYVQLTGSNFSGASPTARPSIQTSFLVGNVVFIPCRSIVGPVYSKETMTCLVPGADPR

SEQ ID NO: 65458 - protein, 570 aa, Zea Mays
MESAAIGSQSPLSFPSSLCKGKVSSSLSIYNVKIKSNCRLEVVCHGMLATRKFMQRKKKEEVFKDGADETEQMNWRRMMREIEQEGSAVPILKTQRNRKEPLPRDVILGTLIRFKQLKKWNIVSEILEWLRTQHWWDFSEMDFLMLVTAYGKLGDFSRAERVLKYMNKKGYQPSVISQTGLMEAYGRGKQYRKAEAVFRRMQTSGPQPSPVTYQIILKSLVEGDKYKEAEAIFEDLLNEKRTSFKPDQKMFHMMIYMYKKAGDYAQARKLFAQMSERGIPLSTVTFNSLMSFETEYKEVSNIYDQMQRAGLKPDVVSYSLLIKAYGKARREEEALAVFEEMLDAGVRPTRKSYNILLDAFAISGLVEEANTVFRAMRRHRIKEDGLKPNVVVYGTLMKGYSKLNNLEKVMRVYERMRIQGVEPNQTIYTTIMDAQGRNSDFGNAVIWFKEMEARGYPPDQKAKNILLSLAKTPEEEQEANDLVGNGPVQLEVKPDGEVDGDDGHEVIQTDAENHRLLDDTRARNHVNGRIRAGDDYNFDEEDDDDDYEEEEDEEFDLVSFKDKRKLNFAS

SEQ ID NO: 65459 - protein, 421 aa, Zea Mays
MYKSRLQELCQKRRWAPPLYEPTREGPAHAPLFRATVVVNGERFSSRDEGEKSLKEAYNLAAMAAFDNLIALPAAALAPAPAAPAPPSSETQLPYKSQLQIYAQKRGKLLPSYRPIHGGSLHAPLFKSEVTIDGQTFESPEYCHTMKEAETVAAKVALMSLPQEANPTQQLLPGNTKKQAEMNAAKSAFEHFKNINHDAGSSGSANPLPVAATKQSVDGNTLRAKLEVNKSHLAEPSTEVEAIYSSTEVDKLPLPGPSMDIEVMDSTLEVDKLPLPERSMDVKVVNSSLKVDKLHFAEPITEAEVIHSSLQVDEPLIPKPGMSSSLENTPAVNGHSAPISPTITPTLISVPTATMPVSNDRCGCYMSTNRIQVYPRHTDMVIPEGAAVLPISDNQWVAVSLPYSMEQRDFCCRNPDCHLGR

SEQ ID NO: 65460 - protein, 734 aa, Zea Mays
MSAPKLDRNPSIRDRVEDTLHAHRNELVALLSKYVNKGKGILQPHHILDALDEVQGSGGRALAEGPFLDVLRSAQEAIVLPPFVAIAVRPRPGVWEYVRVNVHELSVEQLTVSEYLRFKEELVDGQHNDPYVLELDFEPFNVSVPRPNRSSSIGNGVQFLNRHLSSIMFRNRDCLEPLLDFLRGHRHKGHVMMLNDRIQSLGRLQSVLTKAEEHLSKLPADTPYSQFAYKFQEWGLEKGWGDTAGHVLEMIHLLLDIIQAPDPSTLEKFLGRIPMIFNVVVVSPHGYFGQANVLGLPDTGGQIVYILDQVRALENEMVLRLKKQGLDVSPKILIVTRLIPDAKGTSCNQRLERISGTQHTYILRVPFRNENGILKKWISRFDVWPYLETFAEDAAGEIAAELQGTPDFIIGNYSDGNLVASLLSYKMGITQCNIAHALEKTKYPDSDIFWKNFDEKYHFSCQFTADIIAMNNADFIITSTYQEIAGSGHLDDRSKPILFSMARLDRVKNITGLVEAFAKCAKLRELVNLVVVAGYNDVNKSKDREEIAEIEKMHELIKTHNLFGQFRWISAQTNRARNGELYRYIADTHGAFVQPAFYEAFGLTVVEAMTCGLPTFATLHGGPAEIIEHGVSGFHIDPYHPEQAANLMADFFDRCKQDPDHWVKISGAGLQRIYEKYTWKIYSERLMTLAGVYGFWKYVSKLERRETRRYLEMFYILKFRELAKTVPLAIDQPQ

SEQ ID NO: 65461 - protein, 528 aa, Zea Mays
MAAMEYSSLLPLALLAGWCALAAALVLAISAWLQRPRRVAEAFRRQGVDGPPPSSFLSGNLSEMQARAAAAAVAEAAGGRDFQKEGFDDYCMKIFPYFEKWRKAYGETYLYWLRRRPALYVSDPELIREIGRCVSLDMGKPTYLQKGQEPLFGRGVLKANGADWHRQRKLIAPEFYMAKVKGMVELMVDAAQPLLTSWEDKVAAAPGGVAELDVDEDIRSFSFDVISRACFGGDYSRGREIFLRLRALSGLMSETSVIFTIPSLRHLPTRKNRRIWKLTHEIRSLILQLASERKAAAAALAPGRDFLGSIIDSSRDQPRADDFVVDNCKNIYFAGHETSAVTATWCLMLLAAHPEWQDRARAEALGVCGAAAAPDFDAVARMKTLHAVVLETLRLFPPSSFVVREVFRDMQLGRLRAPKGTYLFVPVSTMHHDAAVWGPTARRFDPGRFRDGVAAACKHPQAFMPFGLGARTCLGQNLALVEVKVLVALVLARFSLALSPDYRHAPAFRFIIEPEFGLRLLLRRRLGH

SEQ ID NO: 65462 - protein, 62 aa, Zea Mays
MGERVRWGGGEPRARDGQSTGTCPCRRPPSIQRPRTLVDAAVSPHRRRSPRHLCGDPACRAA

SEQ ID NO: 65463 - protein, 1151 aa, Zea Mays
MFTPQGKGWTGWSTPTPANQRSGGGAPAASAPLGKGKGRVAELEQELHEYQYNMGLLLIEKKEWAAKFEEISEVLTQKEEILKREQAAHLNAISEYERREENMRKALGVEKQCVADLEKALRDIRAEIAEVKFTSEKKITDAQSLEASLEEKSLEIEGKLHAADAKLAEANRKKSQADRDLEEAEARQRRLEKEKLRKAREKQLKEQEESLQEWEKKLKESQNRLNELQRSINEREERANKNDQLFKIKQDELEEARRTVEAAKVTLKVKEDDINKRLNELHLQEKDADSKRSALEEQGKKLDEREAKVTNREKEGLQKLLEDHQVELESKRRDFELELERERKSFDQNMTQKQADLLKREKDVKSLEAKLSKSEQALNDKKKSMENLQNDLDAKSKALKSWDESLKNDEKRLLKEKQQMDHEREQLETYKLELEKIKSALEAEKEKISEEQNNLKLTAQERQEHSLLIAKLKKEIEEYRMRSNSLSEEMEDLRKQRQKFEEEWEQLDEKRALLVEEDKRLNIERMNLERWRDNEEKRLNDMKLKMDEEYKQQLESLERKEKALSDDMKHKQMENDEFLKGERADVQRKLQLKRHELEMEMEQKQATKEKELEEKENELNKKIDFVENKLRHAIELNESKIEKLLLEKREVQMERELLLEERKKTETDKADIRRDIESLHSLSKSLKERREAYNRDRSRLIELFEKYKACKNCGISIFEGLDSLLLKDSAEIEHPSLAVEGDDHALTTDTSGPDTGTLVNSGGRFSLLQKCSRLFKFSPRKKGEQSSEQPSERNISFGARLEEATQSDGDYVPTPVYEIAHDSFNAEDELPSDGETRENEESERHDIADNAQMESSVGVADNSIDILGTKSFDGANDMAVEATIVSVDQNGEDSVVPAEAGVEPETSEQGRRQQNQRGRRKGGMKRTRSVNAVVEDAKMILGEVFEEKTDDQGDTVKVGATRKRRFAGATISEQDEEGSEAHSESVSLGGQRRKRRQTAGAVTDAPGERRYNLRHSRAANAGAATAQADKKKSSKARNKHTVEASADDTEGTSKVVEEPAPESKRVSESADYDASQLHEFSQVEVGDAHAVDGEGAGEEDGDILDGQDALPDVPMTPSGSEFGAEQEDEDDDDSERRNQSISKKLWSFFTT

SEQ ID NO: 65464 - protein, 574 aa, Zea Mays
MNRIPSVSLRGGGANEDAAAASPPPDPAALSRWVRAFCVIRFDLERGQLVEACFPPDALTAPGSGLDRLVAFSSFPDSMSHHLPRHRSSVHDSLFSFRIPDPSSPRRAFLYGFVFNRQRQDERLPRGGEQKSVVILSHAPYSSLFRLLLQILGPLCFDVGPSALAMVASHVAVWPAPAPGHPMELPIGSAALRVHLPPAADDPGPPPALLPANPSVPYGLFHDADLFAAFRGLLLHLWTLWELMVVGEPILVVAPSPAQCSEAVSALVSLVAPLLYSVDFRPYFTIHDPDFARLNVLAEGEVFPPMVLGVTNLFFLKSLKSIPNVVSVGSPNPYSTRVLPVGGQSPGNGMNGTPGKLKLEKLAINKFSPTSLLNSIKLRREGPLSLMTEHKEALWSTYSPTTKPDTSVLNRLIDAGVSPRIEESMSVVNNEILRRHFLELTTNFLAPFGPYLRTTTPSEGTSPFVDPPLLPPFHADEFINGLAARGPGKFLSKRMRSNWLDLYRRFLEGPNFMPWFRQRRAAAEQEQQRLWRQARMNVDIEKLMSNMSEIERIDSFDAVERYLLREMEVHIDGL

SEQ ID NO: 65465 - protein, 244 aa, Zea Mays
MVLEVVVSTEMVETIILVGVVVEAGVEEATIEVVAVTVVLMTTVVAEVAAMGDEIRRTKGVVKVATVLVAMGKLLHKLLLRMVVLRVIMQHLRAPMEATMLMVQILQCRLLIATVVAQAHTHQAMVPRLHTNMVVPQGGKGVCLLHMMVDMVVGPCLGVEDLGVHHRLIMVAAAVILVVLTLNQLEKLSSAMKIVTRHVTTQGFTSQICLLMSLLRNYKSYLEESARSEGSSKSVVTKISGLGT

SEQ ID NO: 65466 - protein, 2452 aa, Zea Mays
MDLAGMKRRELQALCKRHGLPAGGTNADLVGRLDAVLSGPAVVEEEVAGVPARKGCLKQTGGGATEAKKVTFGAEVGKARRLRSRVIWSPVVAKTRGKSARADVGADVPVRRSRRNSFNPAEAEEAGEAVAVDRKPKRKNQENDEGVAVIAQARVTRRSNLEWSATVLPPAVEKKRGRQNAAESDVQKSALVEVTARTTRSRSIVPVVVPPTVVENKRRKTGDPQTTVELTMLSDVPRSDFPATRSLRNKIVHVNNSVVDETHTTRQLENKMRPSTRRHQQVASSPEDKGQKIPATSKSPLLRWSRRNYSEANSANSVNIKLAKDSSTAQPLAHHNSHSEDLEKQPAVKEPIKRSTRKSIALAALEKEKDVIEGKNPEAHVRRSTRKSVVQVKDTKSIVEETQYANSEDVAKQPATKGPARGLRRKSVITELHEKEKSLIAEKNMETDEAILTRKPVIPVKNIKAVGEGIQIGKGKDVDKQFVVKQPTRRSSRKSVLPDMLENNSGLLAPKMNAEMNVRRSTRKSVLPDMHNEKQDHHKMARNENLQSGKYQDGEKQQKVKDSIRQSRRSIATVLLEGQNNDEGKKFKNPTRRTTHKSHALNAVEEVSMDHIEVGEEGLKLRKRSRFLLEISSSANVSWKHQNAQISNEKDNTEGSQQASNCTTSKRRSSKKRRTTAPEEVMPFKVANDDIVIMEETKDTLEYNNESSSKVQEICQVNAAREEFSSGPLLVTVAPSDEICTVQSVAVVIPGSESGDDANQSSDKSKQPQEHSVTQTVDDHLSETRSGKLDQSTCITGLVSDNCVVSEDKTLMSEGEGDFVGPKSPNGLSISFIVADREEQSPVSGEQRVSLEANANEPEEKNLANVTSTDLHTKSLQHDIDRIAKETDKDVLSLVFPIEEHEEKYGVSPIAVEKCVCREASACESARKPLTVIFSNNLHTKHLQHDCDVLIKETGEEVLAQENCNDQPVPAQTDQEIKLNDELADPDVLAQENCNDQPVPAQTDLEIKLHDELADPDHEEQSPVSGERRVSLEANANEPEEKNLANVISIDLHTKSLQHDNGRIAEETDKDVLSFVFPIEEHEEKYAVSPIAVEKSFRQEASAIESAGKPLTVIFSNDLHTKHLQHDCDVLIKETGEEVLAQENCNDQPVPAQTDLEIKLNDELADPDVLAQENCNDQPVPANEPEEKNLANVISTDLHTKTLQHDNDRIAEETDKDHEEQSNVFGERRVSLEANANEPEEKNLANVISTDLHTKTLQHDNDRIAEETDKDHEEQSNVSGERRVSLEANANEPEEKNLANVISTDLHTKTLQHDNDRIAEETDKDVSSLVFPIEEHEEKYAVSPIAVEKSVSREASACESAGKPLTVIFSNDLHTKHLQHDCDVLIKETGEDVLAQENCNDQPVPAQTDLEMKLNDELADPEVLAQENCNDQPVLAQTDLETKLNDELADLAMESGCSITERNEGLVAHNLDQEGFLEATPECKQECGLPEETVISSKETGSLLCADQSPIGLESLFSQESIVESVGHCALASATTHTENGFDDSKDCHNKSALENVHVPEPCSHNDTKGGIFKNVDCMHTSQRDDRMEGVPEANTDEEHVLSAFLLDANHLNVVINSEEVVCEGEDSKELLHSEDCKASSEKTDVNDGNVYGISDAVVRCALHAPADDNYEIFLGPNTDVPRQVYNDGCSDVKEDRFASKPWTIDIIEDASVKERSNLKDWQLDSKLEGTEIVESGLYFNKDIGNILHSGSIGEITPSGSGLSKDSSVDYRGEVLDGFSMEASLERSSTRGEQNGCRLDAIENPSITLATSGYKHEGALSEEAVYTKKNYAGTCLSNPRELIMELQSHFSKENINESDPHDSLVFPTAENSADEQLVKVHHGSNLSQLGLTDLLDGPIGCSNTDVLCQCDNHKNQSNEDKVEEVEAVSAAKYIESEVVLLPSQERSNLNNEQLNTKLESPNIMGSCLNCDNDVCNTSDNGSVFVIGKRTPSASGLPEDYPKDSDLQQPVLDSFSVVSSFQDNISGKKTVSGVAGSEILSLSLATPDYKHEDGFSEEAVCRTKNYTGTSSVDPRHLDMEGHSIYSEGDTYQGPCQDLGRHEEQESCMSIPMQAKESGGVLRSSHTKGSVTAAQIDLAGDAHLIVSDNAAAKQVFSEEKEETKSISSSDIDILHEKSYSSGHDDHAACAAETQFYHPQKASISDGLHLGPSSLQVESLDALDSDILYVNTGVLEQHHKEGYYEPSVYQITSGICTMSEAEPFEVLETGKDVKTPSKLDEQLNPGLDGDEAEKHSLDCGTDTSPVMSKRTLSSPGSGPCQQYVNESTTSTQSTDNHPNDLPAPRSPEQSACFQNDNDSGSVGICQSSRRRGIDELCGKLQSFKVSSAVKGSYVAMGAPRPKPGDSTSRSAAALLRNIENTTAVKAGRPPVKPNADGKDSSRRALQPISGRPDSR

SEQ ID NO: 65467 - protein, 85 aa, Zea Mays
MSTSVFPASFPLLSHLKIPLHTSGSRRLSCIRPNHLTVVGQAFLQLLLLLTYHIYYRSRLDPFLYGHKFNRAYAFPRLLYAEHTT

SEQ ID NO: 65468 - protein, 327 aa, Zea Mays
MRRVVLLEDLKGNMIELSLSGKRALEFDGDQVLDVGQQHHVIAIFVGTLVKLYKGEYTFLSGTSACRWYINENDIAEIKAFQKSLPSEPVPIKKTYLQNDDATHKFEEKSLEQLKHVDPFLDMGQRYQCTATIIGITENQTWCYKACKICNSAIIQKENGYKCTKEGCPSTQFEWKYKIPFIASDHTYNLEFMFFEKKGMELIGKSASTLRKQYEPKEIPPDITSWIGYKFTFVVRVLSKKSVKTIDPSFEVLMIKEKYQKEPIISFISSSGVVPAESSSSTMAEYKELPLLVPITSKDIEKKERSTSQPEHTEETQDMDIEPSGYD

SEQ ID NO: 65469 - protein, 301 aa, Zea Mays
MPRTTELESPGCPPLRALTTDILGLVKVVEAHARPAGAAKVVETWGAPDASCAIVAASLADRATDPVLAVARMNGVVELLNPLNGDTLAAVKAVGPAPNDGGAEGDPLTALHLFTRQASDSILGTFLACTEQGKASIRSITKENAASGSHIEPSATWDVCGGANVQFCSVDHGENYVMFGGKGIEVSLWDITSCSKTWSAKSPRTNSLGIFTRPWFTAGTFLCKDDHRKIVACTNSHQVRLYDTALQRRPAISVEFKESPIKAVAADPNGHDVYIGTGTGDLASFDMRTGNMLASCYMFSS

SEQ ID NO: 65470 - protein, 139 aa, Zea Mays
MALPSSSTPTASAPASLGERWPPLESTPAVFNQFVWSLGVPEDDVEFHDVYGLDADALDMVPQPVLAVVLCFPDPPQDASYPSEQLLISGEKDQVYFIKQIESLGNACGTIALLHAVGNASSKVNLGDLKRLYAAHRIL

SEQ ID NO: 65471 - protein, 331 aa, Zea Mays
MSGDSTARIWTIPDGPCGSNMQSSPPGVHVLKHFKGRTNEKSKDVTTLDWNGEGTLLATGSYDGQARIWSRDGDLKQTLFKHKGPIFSLKWNKKGDFLLSGSVDKTAIVWDTKTWECKQQFEFHSAPTLDVDWRNNNSFATCSTDNMIYVCKIGEQRPVKAFSGHQSEVNAIKWDPTGSLLASCSDDWTAKIWSMKQDKCVFDFKEHTKEIYTIRWSPTGPGTNNPNQQLLLASASFDSTIKLWEVEQGCLLYSLSGHRQPVYSVAFSPDGEYLASGSLDQCLHIWSVKEGRILKTYRGTGGIFEVCWNKEGSKIAACFSNNTVCVMDFRM

SEQ ID NO: 65472 - protein, 144 aa, Zea Mays
MRYFLQCFPLQSLVCSLQSPSLFYSNGGLSCHSLPGADTYIVAKCISLLSDNPHLQMCPVCLCSYKLAPIELSVFLHMKVVNKSVCCPRKVRWIDCFCGYMKGLRLALWLVIKMVILMEATGYSGPTLPQVGINPKQWLQVISS

SEQ ID NO: 65473 - protein, 388 aa, Zea Mays
MYSEKIPKYRDTKVRMKEPLEQFNQTKDASDYLWYTTSFRLESDDLPFRNDIRPVLQVKSSAHSMMGFANDAFVGCARGSKQVKGFMFEKPVDLKVGVNHVVLLSSTMGMKDSGGELAEVKSGIQECLIQGLNTGTLDLQVNGWGHKAALEGEDKEIYSEKGVGKVQWKPAENGRAATWYKRYFDEPDGDDPVVLDMSSMDKGMIFVNGEGVGRYWVSYRTLAGTPSQALYHIPRPFLKSKDNLLVVFEEEMGKPDGILVQTVTRDDICLFISEHNPGQIKTWDTDGDKIKLIAEDHSRRGTLMCPPEKTIQEVVFASFGNPEGMCGNFTVGTCHTPNAKQIVEKECLGKPSCMLPVDHTVYGADINCQSTTATLGVQVRCGGGKKGA

SEQ ID NO: 65474 - protein, 276 aa, Zea Mays
MAKARKQKGDGSGTGGGATVLHQKLCLSIDMENQLIYGYTEIKALLAENDTFALHADNMTIRSILVDGETVEFDYSPHWKNETDQPNWSSISCLNTVADAACSTYTSSLNREATPNLIVSSERSIKSMIEQQLDENSEKYEENSGRLEKHGGKTIQTSYDQIVNGCNGSAVEEGIENSAVEEGKKKEKEKEKEEKNGNEKSKENGNETENEKVKNIKLVHIDYILEKAETGIHFVGNVMHSSNQIRRAHCWFPCVDTATQRCPIYSQHRFHRCQQR

SEQ ID NO: 65475 - protein, 470 aa, Zea Mays
MTASRIQIAGRFKSCAHMGCFDLEAFIEINQRSRKWQCPICLKNYSLENIIIDPYFNRITSLIKSCGDDTSEIDVKPDGSWRVKGRPKLKDLTQWHLPDGTLSLSTDTAAKPGMCIVKHEVKEEPLSEEVGCHLKLGLRKKSNGQWEISKRVDADLVPSSGNDHDHSGHDENKNCITHSSNIDDTNIADEGYNLEPATNGYPMTHVHDLDSSSADENGPPASTGQDIVVLSDSDDDAIMVLSPGAVNCGSMHNTGNLFPPNTPENLGVCSGETGGCPKETSFLALKEDFGDPGLSFWESHGSPRDASTSQIPDASTKAVDNPGEVDNYPANDQSKQGQVSGADFGVAANPVPLEDGHDSALQPCSMSERDSAMGLASLGADTQSCVDVHSDNWTSVSISGRDEVLTAAKIASRKRSNPGDRIEDLDDDFESAPIVPTVSSPSLCHCTNLHLWEAQTKMSAAEGDVQFDRD

SEQ ID NO: 65476 - protein, 372 aa, Zea Mays
MATHRHWLLLLFLPWALLSRRGAQPPDALYPVVLLPGNTCSQLEARLTDAYEPPPESPQCGAGSNERGRWFRLWRNATAMDDPAVAPCLADQLRVVYDPAARDFRNEPGVETRVLGFGSTADFLADTEANKPLHGEARRGAAAGRVPRRRDAVRRAVRLPPGSRGAGAAVPCLRAVHPAAQGARGARQQGERRQARRHRVAQPGRLLRAGVPEPEPAALAPEVRQALRHGVHGRRRVPAPPAEPRVRAPRRAGGPRRARGAAVAGGVRSRHAAAGRHARQELHGAGHPGVPGGDRSAPARGHAVRDAGAPPAARLPGAGGAHDLHQRRRPAHDGAARVLGRQLQRDAAGGVRRRRWILTRGEHSGPRHRHRW

SEQ ID NO: 65477 - protein, 1844 aa, Zea Mays
MASKGPRSRLDHDTRARRQKALEAPREPRRPKVHWDHVLAEMLWLAKEFDSERKWKLSMAKKIAQRANKSIVDQAAKGERKQKEEEHRMRKVAVNISKDVKKFWIKIEKLVVYKHQLELEERKKKALDKQLDFLLGQTERYSTMLAENLVDMPYSQNLETETSQINQPSHQEVVAEENLNATIPDDLDNMEVDDDYGSSLDEEPEDDEHTIDEDEAQITEAERNEELAALEAEADLPLDVILKMYTKTKVTPNQANGCDHELAHSSSDEGNSSEEVDDGHSYAEFVKKNHEDEDYIAAEEVKDDEATLSEEEQLAKKEDPDHLEEIKLLQKESEIPLEELLARYREDGCADHETAELENSPHFVEEVNTDKSLNDQSVNILEAKSDIFVDHQSRDVLETEHTTLQSEIASEPCAQQNFVEENNLTDVKTVNEDKSDDVIADAAAAARSAQPTGNTFLTTKVRTKFPFLLKHSLREYQHIGLDWLVAMYEKRLNGILADEMGLGKTIMTISLLAHLACEKGIWGPHLIVVPTSVMLNWETEFLKWCPAFKILTYFGSAKERKQKRQGWMKPNYFHVCITTYRLVIQDSKVFKRKKWKYLILDEAHLIKNWKSQRWQTLLNFNSKRRILLTGTPLQNDLMELWSLMHFLMPHVFQSHQEFKDWFCNPISGMVEGQDKVNKEVIDRLHNVLRPFILRRLKRDVEKQLPKKHEHVIYCRLSRRQRNLYEEFVASSETQATLASGNYFGMISIIMQLRKVCNHPDLFEGRPIISSFDMAGINMQLSYSVCMLLDKSPFSQVDLSDMNFVFTQNEFSMSSWEADEVISAFPSSITSRDCDLDIFCSNKDHQGSNLTNIFEDIQKALQEERIKESRERAASVAWWNRVRCQKRPVYGTNMRHVLTVKHPVSNILNKRNNPLCHMDYSSRLADLVLPSVERFQKMLYFVESFTFAIPAARAPPPVCWCSKGKSPVFIDPAYREKCMYKFSPILSPIRSAIVRRQVYFPDRRLIQFDCGKLQELAILLRRLKSEGHRALIFTQMTKMLDVLEEFINLYGYTYLRLDGSTPPEERQTLMQRFNTNPKFFLFILSTRSGGVGINLVGADTVIFYDSDWNPAMDQQAQDRCHRIGQTREVHIYRLISESTIEENILKKANQKRALDDLVIQRGSYNTEFFKKLDPMEFFSGHTSLRVEGQEKNCSTSVGASNDVDLALSIADVEAAIRQAEDEADYMALKKLEEEEAVDNQEFSEEVAGRPEEDELVNEEDGKPDEHINEDHKYYSSDVEKEKHITLSTNRLNNEKALTLAVGDEDTDMLADVKQMAAAAAAAGQACSSFENQLRPIDRYAMRFMELWDPVIDKAAVNHQVNVEEEEWELDRIEKLKEDLEAEIDEDQEPLSYQSWDVDFATTAYRQHVEALTQKQLLEEQERQAQEAAKELEENNDNMSHRRKSNKNKKKTGKFKSQKRPRLSSESEVILEETSVDTMSIDDNAPSPELISDESPHHYSNKRKKIMSATEEDSNSRSLKKFKKTKSSFISELSPRPKEDLNDSDPKSVARTKSDGRLSIPCMPVKRVIVIKPERLKKKGIWSRDCASDSWTSEEDAVLCGTVHEYGPLWELASDFLHSLPGGSSYRGRYHHPLHCCERYRELFCKYAISATDNSNSEKAPSGTGKAVLRVSEDQAQMLVNVTSELPNNELLLQKHFMAVISSVWRSKCCRHPCCFRNKPGGSSENWPMVNFRPSVNLVREALAAGQAKFTLTVIPPPSRNQEYSRNYLELELDFLKDQHAYEEDFPSVLNVSILEPESSKQAPEPVEQSLLSELSCRQAENRLRSVLMQVFIAVMMVAAVAVILV

SEQ ID NO: 65478 - protein, 563 aa, Zea Mays
MEAAADLLEYELQREISGILIQNYVCGLRQEYEMKLWEHRNCISALNRNWAEKVSEITALRDELRDVLCTSEPATHHHHHRSHGSLEDETIIAKTEGDSEPPVTEKSSESTLEIPDFSLLKHMHGEEITSFLRTEWLKLRRQHESELHEKTEELFRVKREHAKEKASLPLKKERELELHRSKLLQTIARLGEIASRKEESCSDCNEDEEMCRLKDRIGVLLQENNRLRGLLADKKQEVKHLSLQVSDSRSKIAQYSLPESKLSNNCEKLRAELEDFKIERHLNDLLDSSVFREVCHNYEDQICDLNQEGSFLRDLLDEKEDQLSIMYEDRQKLKHENDQLVSIAGSIIQHHDQANLVHDELMIYKEKLCEQELLILESKGEYNSMKRCLYEAMQQIQVCKQEILGLTENLTSMSIALEKAKEQNASLDATIREMKKTPGQSIGSHWGQTGEFDLTSMEKLSKTCSDFESRLVETMKRNETRLTSIVCQFSPLVQQVALLRKKEFWYKQILEIKCSNLWKAEAEVDVLGDEVDTLLSVLGKIYIALDHYSPVLKHYPGVRLQRF

SEQ ID NO: 65479 - protein, 554 aa, Zea Mays
MQMKEHPYLRTQLCWRKVTEEFSVPCKSVVTDSSSKSCSSTVVQDEDAAIAAVIDAAELKSEQLPSKKGQGSGRFTSGRNYGSLEGEAPPPGYVCRSCGVPGHFIQHCSQENKIPPPGYICYRCRIPGHFIHRCPSIGDPKCDNNKMLCSLVPVVTPVNGILDSLVPASPVSAVDDLPAELHCRLCKKVMRDAVLTSKCCFDSFCDRCIRDYIITESKCICGVKTLADDLIPNQTLRSTISNMLGTQTISGGSGTTRHRSSSGSNPDPKIQSHTASTREVKQSRDHQLPAASALDDVLQVATEGALVNQPREKLVPSAKILGKDGGNFAQVSAEKTVANAEALKVKDGTESTSKATTVSGAREHNVTRTDQPKKWKKAVLTKNFQPNNVGYGYNVPFDPAYCNPFINGYPWATEPYMPETEPMHRGGTAAAPSKRPERSDRPKDTRHQPQSREHERQLGSSHVSESRTRNRTRSSSEGRDRGHSDRASVDHHEDHSTRKRTRDSSPKYGDRQSDRRSSHGSRSMMTPEEDASDDECNFKRRWGRRSSGGVDTRH

SEQ ID NO: 65480 - protein, 481 aa, Zea Mays
MKKETMEGHVPLPLPLLPDGETAVGYSKDDASSPLQEEISSLRSRQRRVDRRRREALDRLVELKGSVRVFCRVRPLAHTNSLHAQSSPVTVEQERITVKQPGSRGSSALIGFSARSPRKEGTGGNKLGVVPRAIQELFSRASEDGSCAYSFSMSMLEVYLGSLRDLLAAPRQPLFRRTECKAAACSSSLSILATKGGAVEVEGLTDVSTPDLKNASQWYRRGRRARSTAWTNVNDASSRSHCLTRITIRRRMRHGGGGGVSKLWLVDLGGSERLLKTGASGLTMDEGKAINLSLSALGDVIAALRRKRPHVPYRNSKLTQILSDSLGDGSKVVMVVHVSLSEDDVGETVCSLNLAKRARSIEPNREIPQDLKTLKQKRVAELDREIRAAEEELKRLDEQIRRAEEKEISLEEEEEEEEEKKLFASSVCQALSDDEKGSPRSTLVVVGHTDAAESPRATTEKAKGRRPPPARGHGTRRRLLS

SEQ ID NO: 65481 - protein, 741 aa, Zea Mays
MEPSGSDKPTATDANESVVGLDGEDTLSERESVGAKDGPALPNGSGKEAHASSPSAANKRKHNDLGSNQMELNEPGTPSSSSGDSTWSINGLDDCHQLSLSRNKNDDSEHSVTSAGVTVIRQPRGVLRLRKLAQNVSTESWTGGHNTSQANGVPRSSQHPRRNNKRESIPSQENRVSGDEPVSCLRTENGTCDQDTGTKFCSKTEFLAEKQSHLSGEPPKAVHVDKGVYDYVKDDDGDSLEENAAWMLCSLSDNKCAGSPRKGTDRLSKRSFSQNSNHFKNSYEKIKDICSPARLLRKRDGKVPFLKRRQRRHFYEVSPSDVDPFCIVKERIRVFWPLDETWYFGMVKEYNPVTRLHHVRYDGKDEEWINLQNERIKLLFLPAEAPNKSKCTNSRSAFESKHEQGDREDMHRSGSNTESFESGPISSWLARSNQAKSAALCDINKQDHSHSNTVPVSFDQKQCRASDAKESIDSAPCSSLANGGVEVLKDRTIPEDGRFHFVYSRKRFCRKKNDFLSISEQHSNCQRRASSMVLASCPDMKSSIATGASVTYVIPALSLPLKPVYKLLCEACCVSVSNAFFLLQCGTMVALWPVVHLDILLIDSALGLKRFLLDTCMRSAVSLFCLLAGSFKQCSRQRTTKESRIPCTSVRFQISGGHGRSQVVFMFFSFVGVEKWKWEHLQGKLQYQCSKRELSKDSTKCTGRRALPSMGLFSKSLIIQISNLPFVVWMTGVNSLKVFWT

SEQ ID NO: 65482 - protein, 260 aa, Zea Mays
MSSLPGGFLCVRVLRGIDLVSCDAKGSDPYVVLSLDGQKLKTSVMKKTVNPLWNEDLTLAVMDASAPIKLEVFDKDTFSKDDMMGDAEFDVEALAQIVQMDLEDIRSGTVVRTVRPGGTGSCLADESHIIWDKGHVVQDLLLRLRNVDSGVIHLQLRWVATPPEGSQLEANKKAMNIQARSACRPSSAPPPRPSAKNMRRRGIPRTTSTSASPTSRTSKQQKHMLCSAKRQVLHIYIYAVCQLMGSRLLLMRLLRSCCPV

SEQ ID NO: 65483 - protein, 783 aa, Zea Mays
MFSTAGGRSMAISVDALQRAKSLLGDSDLVVSPNGSIGRSLASAIENLPKPTISPKGDVSNLSYGTRAIGYAVPDTPVTKTSANQFHMGREYRPVNEIPKVPKPPSRCLSEGDNASNSKDKTQWHHMPAGPLVDITNYMATCSGNTDCLANGKRIIGGRNSVSPFKRPRSSRFITPIKNNKLSSAGESIVPPMQISPCRTMLSVRYPFQHQRKNYKEYFGGPPCFKYLTEHVTDDVKLMDARRAEKFRFQHMDTGAEEFQKMLLTCGASLSCATKEWVSNHYKWIVWKLASLERCYPTRVAGKFLTVDNVLEELKYRYSLDASLDVALLEQLEKRKLFVGQKLRIWGASLCGWSGPVSFHEVSGVVKLVVHINGTYRARWNDALGFCKHVGLPLAFRCIKVSGGRVPRTLVGITRIYPILYRERLPDGRFVVRSERMERKALELYHQRVSKITEDILFEQQENCDSTDDNEEGATICKMLEHAAEPEFILAGMTPEQLKCFSSYIEKQKIVKQNEVSEKVEKALVVAGLSSRDVTPFLKVRVIGLVNKHSASTSSNKEGLITIWNPTEMQKDNLVEGQAYSVMGLVPSNYCTEIMYLHARGSSTTWKPLASAQTTDFKPFFTPRRAIELLKFGEVPISSEFDIAGLILYVGNTYLCNNKKKQWLFLTDGSKFVSGQGCEEQDCLLAVSFSSATTDEDSTLFSYTLSGNTVGFSNLVKRQKDETRQVWVAEATESSSYTLSNEIPRKSHLKEAAVLAERWASRSYHKIQELKERVLCIVGNAGV

SEQ ID NO: 65484 - protein, 2155 aa, Zea Mays
MGAGGAAKQIVDSLLARFLPLARRRIETAQAQDGQYLRPCDPSYEQVLDSLAMVARHTPLPLLEALLRWRESESPKGAHDASTYQKKLAVECIFSSACIRFAECCPQEGITEKLWIGLESFVFDWLINADRVVSQVEYPSLVDLRGLLLDLVAQLLGALSRIRFSSVTERFFIELNVRRIDSLALRSETLSIINGMRYLKLGVKTEGGLNASVSFIAKANPLNRPPNKRKSELQHALCNMLSSILAPLAEGGKNHWPPLGVEPALSLWYDAVARIRVQLMYWMDKQSKHVAVGFPLVTLLLCLGDANAFNSSFSQHMEILYKYLKDKNHRSMALDCLHRLVKFYLNIYADYQPRNHVWDYLDSVTSQLLTVLKKGLLTQDVQHDKLVEFCVTLAQSNLDFAMNHMILELLKPDSLSEAKVVGLRALLEIVVSPSNQQIGLDVLQVFGIGHYIPKVKSAIESILRSCNKAYSLALLTSSKTTIDNVTKDKSQGSLFRSVLKCIPYLIEEAGRNDKMTEIIPQHGISIDPGVREEAVQVLNRIVRCLPNRRFAVLKGMANFILKLPDEFPLLIQTSLGRLVELMRLWRVCLSEEALAKDMQSGRRLSIGGDALQRSPFHRSRDVSEFRASEMDAVGLVFLSSADVQIRLTALELLRCVRALQNNLRDYSANEWGDNKLKLEPEPIFIIDIIEENGEDIVQSCYWDPGRPYDLRREMDPIPLDVTLQSILESVDKNRWARYLSEIVKYAAELCPSSVQDARLEVIRRLEQITPADLGGKAQQPQDSETKLDQWLIYAMFACSCPPDIREEFSIKSAREVFHMIFPSLRHGSEAYALAATSALGHSHLEVCEIMFGDLALFVEEVSSETEGKPKWKNPRSRREDLRTHVANIHRILAEKVWPGMLSRKPVLCQHFLKFIEETYRQITISLADSFQDLQPLRYALASVLRYLAPEFVDAKAERFDNRIRKKLFDLLLTWSEDSGSSWGQESSSDYRREIERYKSNQHTRSRESFDKLAFDREMAEQLEAINWASMNAIASLLYGPCFDDNARKMSGRVISWINSLFMEPSARAPFGHSPVDPRTPSYSKHTDGRFGGRDKQKTSHLRLLLAKTALKNILQTNLDLFPACIDQCYSPDPQIADGYFSVLAEVYMRQEIPKCEIQRLVSLILYKVVDQTKLIRDSALQMLETLSLREWAEDDTDGVGHYRASVVGNLPDSYQQFQYKLSSKLAKDHPELSEHLCEEIMQRQLDAVDIIAQHQVLTCMAPWIENLNFVRLKESGWSERLLKSLYYVTWKHGDQFPDEIEKLWSTVASNTRNIIPVLNFLITRGIEDCDANPSAEITGAFATYFSVAKRVSLYLARICPQQTIDHLVFELSQRMLEDDEEPVRLGKVDVSANVVLEFSQGPTASQVATVVDSQPHMSPLLVRGSLDGAVRNVSGNLSWRTSAVTGRSVSGPLSPLAHEVSIPNPTAGRSGQLLPALITMSGPLSGVRSSAGNLRSRHVSRDSGDYYFDTPNSTDDILHQGGSGIHGINANELQSALQGHQHLLSRADIALILLAEIAYENDEDFRENLPLLFHVTCVSMDSSEDIVLEHCQDLLVNLLYSLAGRHLELYEIESSERENKHHVVSLIKYIQSKRGSLMWENEDPTLFRIELPSASLLSALVQSMVSAIFFQGDLRETWGSEALKWAMECTSRHLACRSHQIYRALRPSVKSDSCVLLLRCIHRCLGNPVPAVLGFAMEILLTLQVMVENMEPEKVILYPQLFWGCVALMHTDFVHIYCQVLELFCRVIDRLTFRDRTTENVLLSSMPRDEFDINGYASDLHRLESRTTSERLLSVTGTGKVPAFEGVQPLVLKGLMSTVSHGSAIELLSRITIPTCDSIFGSPDTRLLMHITGLLPWLGLQLTREAPPSLGSASPLQEQNQKAYYVSSNISAWCRAKSLDDLAEVFRAYSFGEIMSLEDLFARASPPICAEWFPRHSSLAFGHLLRLLERGPLDYQRVVLLMLKSLLQQTPVDPSQIPQVYNFVSQLVESTLCSEALNVLEALLRSCGGGGQGEEAGFGDNGGHGSGEKVLQSMLLPQSSFKARSGPLQYAAGSGLGSLMGQGGGGSSSAADSGLVARDVALQNTRLLLGRVLDTCALGRKRDHKRLVPFVANVG

SEQ ID NO: 65485 - protein, 893 aa, Zea Mays
MVQDGSSGEVYKVSMEREERRLTELAQKILETFVLSHIFSGIEVAYQEAVALKRQEELIREEEEEAGLLEHQMKGKRGGGANEKDKRAKKKQTKQKKNNRKAKDKERDVKCEVKILERLHDETVIDNSDGLPAKVEVIAKVDALEEGSSDGSDMPNSVTGGSGRNSSGCCTAPKLDQDTVLLTLRDKLRKLGQRLQEKNIEGQKLLKAHFEARDTKVKVEESSDSSNSLDRPPDVPESSMHSSEDTVDLKVNGTPNKDASVVNPVLEESVSGIPVTAKNESLPSARTKEGPVSNKDNASSLKMKTMASCLKLHPADVDKDAPFPSKSPRINRAAPVPSKLPSADKATPVLPKSSLSVNKAALVRPKSPAVDKATPVCPESPAVDKVTPVRPRSPAVDKATPVRSQSPAVDKATHVCPQSPSVDKATPSIDKATPVRPKSPAIDKVTPIPPKSPPVDKASPAPPKSLSGAKDVPVPSRSLQIDRFIPAPPRLSQVDKAALPSSEQPHISPATNSEAQGATTSRKVTASSVLEVAAASRPSSAPVLPTPRSTAPVASHIQTSTLLSRSMSEAAGRRSVNDPSFSAPSYTPQTYRNAIIGKTGLATTSANLAYQSYSLGQDTAPSQPLSAYASSTAVMMPPAGRSDQSSARHGFKSGSGKLEAHDSWQQWKGDNNVDMHLWRDHTTYQQMTRGQAYDQSRRDDTYQQTCSRGTEKFSRHAGLQARQFQTETPASHVWHQQQGQVAEEFPHLDIINDLLEEDQINGSIPESFHQDYNVFGLPFSPRGNVSDMGMASVRSPARFNSTKYEYDGGFSGAYDINAVNGLRERQFPSLDSYSNGLSDVSASKPWLNGSPSPSVMSLGVNTNGYHPQVADYPSLGNGVNGVSLWRRHANGRW

SEQ ID NO: 65486 - protein, 61 aa, Zea Mays
MRNNYGQLLLFRKIGEVLKSRHRLECMMAILLGRGAWSIFYPLNDTSSAGDDDVIRKINSL

SEQ ID NO: 65487 - protein, 72 aa, Zea Mays
MSHRRPGARRPQRALPECQQAWSRACSRTCQPAPGCQERTGAGVGRDPKASVQHVMPRNWWRGPRSFIINSR

SEQ ID NO: 65488 - protein, 1708 aa, Zea Mays
MGAPRELELSDEVEGEEDGTTDFVFRLAGDPIPLLPTDSNPLPLFDLLSPPARPLAVSDRHATVFLAHPSGFIAVRTKELIEASKEAREKGKSSTRCAQDCCVADVPLPGVSLIALSHDESVLAACTHTEIQFFSLASLLTHKDVVPSSSCSLERAVTVKDFKWLNHASAAYIVLSNGGLLCHGNLGEGLKDVMENVDAVDCCKEGNHIAVARGNKLTILSPDFTETCSMSLLFQLWSDGSDSKGTTIKVDSIGWVHGDSIVIGCVRLNEDDNEEGYLVQVIRTEESTFCESPGKTDVYTYNDFFHGIMDDVLPPGAGPNLLLGYLHRWGLMVASNKKSVDEHIALLKWPSAHDDEKTVTYLEMLEDKYSPRIDLQENGDDNVILGFGVENVSLFQKITVPVGPEQKEVAPQHILLCLTGEGKVAVYYLARISDPSDLPHATVSTNEDYGEKHISPATVSEKELTPSVAGSVYKSTLTEHGAEPSSAQTGSNQQESINVKNSSSASKEQETTDNSLFISSNKKPLDTKQVNVTGPPAALRSLALTGNTKPTIFSSFSTEGMNPTGGNAPNELASSLQPSSRSFGNNQTGKEGLDSVQSVGIFGGSQNSNKDGNVYGFKSSLFTSSGSVPAKIGERNEVGFGVPSLQTSYTADRKVFGAPVALSSVPSSSISPAKPSPIGYSSSGFRTANSEAPQSLRGSPPSQQSMGKSHNSRTQAPAEYSRNSKKGTGFDSEQDLSKKFYSINEMTKELDALLAYIEKDGGFRDACITIQQRPLSMFEDGLQNFLQLLQVFKGKVEEQCSKIEDLRNNMFQVSARQTYMKGIVSQSSDNQYWDIWNRQKLSPEFEVKRQNILRANQDLTNQLVELERHFNNLEMNRSSETGRVASNRRAVYSNKTSSSQTQLSSVYSALNSQLAAAEQLSECLSKQISVLNIGSPSRKQGMVTKKLFESIGLAHTTDATKFSGSTPKPVKRFPSVNEHSKGILGSSKGGEPETARRRRESLDMSLASLEPQKTTVKRITQQQRLKISSDLPFRSNKKIFDSQMAAISQEKSSDSSNSSIVESYVSRLRSLSEDVNDKLSGPQQNPLFKWVKESTGSSQTSEQKHFELPGQMKSTAQSSKLTPSSPPSFSYTRMGAQDSINPSSVPSFGTKHTVSKPNTLTFKTTISPKSNANTEPNILPSITAPKTSLSPLSVKTAGESGDLPTLTMKNRQDGQSMPSLGNIKGPGASLQNKGGIFRDLDKSSFNSEHSKPAALHEKTDQLSGVGDAVQNTVKDTSKMAPQPSAFLPAPVTQTNSYSLRPTVSSSATSGAKTSDVLSSSMQKVSPIVPGGTVSSSVPTPAKDSSTGLSQNASKPETLISKVTSTIVSASSTSVISVTESKPSVPPTTGASLPSTHVSAPQTAPTTSESVFTSTGKNVGPNTDTISTDEDDMEEEAPSASAELNLGALGGFGLGSQPSSSPQKSNPFGASFGTSGNKSSGTPFTLTTSPGQLFRPASLSIPSAQPAQPSQSTSSSSFSNSFSSGLTGFGQPAQIGSGQQSAFGKPAQIGAGQHAGFGQTAQIQSGFGQPAQIQSGFGQSAQIGTGQQSGFGKPAQIGAVQSGFGQPAQFAAQQTLGSVLGSFGQPPQLGGIGSGGFGGFSSASTSAGFSSLSSASSGGGFGGASQGGGFGSGGGGFGSFGGNQGAGFSAFGASGAGRPAADFLTQMRK

SEQ ID NO: 65489 - protein, 747 aa, Zea Mays
MPMPPPPRKDFPAFPFAPYPIQSEFMSFLYAALSSGPGALALLESPTGTGKTLSIICSALQWLLDHREAAVVAATALAHPSGASGSGGDDDEPDWLRDFKPAAAVKESTKKKAKPPAMRKTLVSRKPDGFGEEDGGDDEGEFLLEEYESDSEDVARRGVGKRAHCGSSSSSSSEDDDEMTPKVFFTSRTHSQLSQFVGELKRTEFAGRIRTVCLGSRKNLCINKDVLKMGSGNRINERCLELQKNKKSTKIKLKAVLSCLDEYLDRFYNVLGAGNRRYIQTLTVLTKSFIRVLINNQDGASTMSSMTINQFLFSLDIDNINIVKLCQFVKESNIIHKVCGYANKLSSIQNQFDLQLHDEGSSIACFQALVDFLRSLLNSNDDGRIIVAKQKLGGQPDEAYLKFVMLCAEKIFSEVTQDAYAVILAGGTLQPIEETRLRLCPSLPPTDIKFFTCNHIVPPESILPIAVTRGPSGKAFDFSYNSRSSPSMIEELGRFICNIITVVPEGVVMFFSSYDYERRVYDAWMTTGTISRISKKKHVFREPRNSADVEAVLNKYKEAIESCSNFSQDTGVNGALLLAVVGGKISEGINFSNGMGRCVIMVGLPYPSPSDVELIETIKHIESISSSFSVGDDKALSRKYDDECELQPGYDILRKCTRGGREYYENLCMKAVNQSIGRAIRHINDYAAMLLVDSRYAQTSSTKSFSCPADKLPQWIKARLSCAQNYGEVHRSLHQFFKFNKKNVEIL

SEQ ID NO: 65490 - protein, 1991 aa, Zea Mays
MATPSYAAVKCLNTSSSSRKRFSFKSFSQRVEEIDIDVYRSLHTLKAEPSSGSSFFLDAIVEWRELNTAEDFISFYEEMIPLVQTLPQIVLHRDKLFSALLQRVNMSARLSLEPILMLIAAFSRDILEDFLPFLGRHASALLSLLNDGGDRDPEILEQVFTSWSYIMMYLQKYLVKDTVQILRITAALRYFPKDYVREFMAESVSFLLRNAPNNQLTQGLLKVLLEAAKQPSPARIDGVVSLLWHVMKGTSTKLHSKAGQVLKFLLSKSIVSTLRDKFPDDKVKMIKLVELLVSRYVFPGSNITGSSSIEVLGSILDFMLSVLDVPTILGNLSIISPFYAPVFKLKNPRVIVFIKKLLVKGPQVAQHFESQILRVSSMEVTKEFDPQNLLELFSIFAFNLSSPTKDVRILTLRILSYFVKMDQRLITDEERPHKRQRTEVSGEEAVAKYANVVDILLIIESMPISVSTSRKIAIFISRIQMSLSSKMVHDDYIPPLLHGIIGILYNRFSDLWPQTLDCLAVLIRKHKELVWGQFVPFIAIHQSKGLTVKNQEKLEAATQPQSIFDCFNLYLAMDFDCTPAVTVATLLLQSLQRIPDVAESRSRQLIPLFLNFMGYDDSSIFSADSYMPEKCKGKQWKAILKEWLNLLRLMHNARSLYQGNFLQEVLTKRVLDDSDPEIQAKALDCLLNWKDEFLIPYSQNLKNLIDVKTLREELTTWAVSHDSLSILKDHRSRVVPLVIRVLAPKVRKLKLLGSRKHTGASHRKAILRFLLQFDSNELELFFSLLLRSLIPGSLQLKMFGSQPDNLLGSFSDIVGTSTEICVENFTWKKANGFIHLVEEIFGTFDMPHISPFLNVLLIIVARLLESCMRNLRNESDGKYPCNQTNDHGNGCSINSEVGNSVNVDECFKEMHLEGHMETSVSIKQLKDLRSSCIRVVSSALSHYESHEFGENFWGVFFSSVKPLIDCFTQEASSSEKPSSLFACFMAMSRSPKLAPLLGSNNLVPAIFSILTVKTASGSITTYALEFIENLLRLDIDLQQQDEHLVKKVLLQHMDVLIHSLHDFVNHRKELNRRSGTWLGQRELRLFKLLLNYITDPSAADNFIDLILPFFSKKDLNSDDCLEALCVVRGIIQNLRCKVSEKVLNALNPLLAIVGLELRLCICDIYAGLSLNDPSMLFLAGLIGDLNAVSASELGELDYDTRLNTYDKVRPQLFLGLTEEHVGAILSHCVYDMSSEELILRQSASRALQSFLDFSASVMNNDVSKYSIDDKFRENNTRSICTMGCIQKILEKTYLHNMGVAMTKDVSIQKEWIILLREMVSNFNHLASLSSFRPLCKVDIEEDFFHNITHLQAGKRSKALLLFRQGIKENNFSEDITMKVFVPLFFNMFSDDITMKVFVPLFFNMFSDVKAGKGEQVRDICLDTLSAVAAKVQWEHYRTILKRCFRELNLRPDKQKIILRLICSILDAFHFMKPANDASGNSDALSEDIDSSLTFSLVTVSSDKQQYMQKVVFPQVQKLLGSDPEKVNVNINLVALKILKLLPVDYFESQLSSIIHRICNFLKNRLESIRDEARSALAASVKELGIGYLQFVVKILRAILKRGFELHVLGYTLHYLLSKNITADMYGRLDYCLEDLLAVVDSDLLGDVAEQKEVEKLASKMKETKKRMSFETLKLIAQSITFKTDLLKKIISPVSLHLQKQLTPKLKTRLEMMLHNIALGIECNSSTETSNLFIFVYCLIEDTITGSRSECKENTQSSPDQDSTVRKTFLGLGESGSQNSYILTKFALDLLRNRLKSIKLDKEDEQLVKMLDPFVDLLRKCMSSKHASVLSATFRCFALLVKLPLPSLRDNAITIKNVLMEILQRAGNSNGHLVTSCFKLLADLLRGFRISLSDNELQMLVHTPMFVDLQTNPSPVALSLLKTIVRLKLVSHEIYDIVVKIGELMVTTLTESIQQQCIQIMLQFFLNYPLSEKRLQQHIDFFLANLRYDEYP

SEQ ID NO: 65491 - protein, 339 aa, Zea Mays
MSASEFRIPYQQVSPSQPAENVNQFKTCRCGEGDPNSTSETGDSPPASCPNCQVLKSGHLLLSSKGIGWTSWKKRWFVLTRASLVFFRSDPSLTTAYKFGILIIPRVEISVLLYNPSHYQNVPPPRGAEPIVTLGGIDLNNSGSVVIKEERKLLTVFFPDGHGERTFTLKAETTGDLNEWRNALESAIAQAPSIANTMGQNPIFSTDVEAESAESPAEHFVCGAAEDRSVIGRPAKFALVDADGSPSFLEKALKFIEDHGIKVEGILRQSADVEEVKRRIRDYEKGKNEFSPEEDAHVIGDCIKYVLREMPSSPVPASCCTALVKAYLTRQEDLMRLIE

SEQ ID NO: 65492 - protein, 945 aa, Zea Mays
MFKSRWRGGRAKAVFKLQFHATQVPELGWEAMVVVVTPQDAGRPTARSEPAEVTDGACRWAAPVMEATKLPTGKDKIYQFLVYETGSSKAALLGEATVNLAEYADALKPSVVTLPLKGSPGALLHVTIQRVVGGAGGCGDDASGENGDALPAVAKTPKRRTTLQSQLSKFEDEDSEKARAAADAMSPVQDGLLIRKPPDMRFPSRRNVPMSADPVGHLHNGSSFDAVSVSGSDGSSGRYTPKISASTHNSFLQDSSNALSPFANNRTVRNPLTSSGDWSGSSAPDASTDGSTSNSGEAGLRGEEDDVDKLRSEIATLTRKVDVSDMELQTLRKQIVKESRRGQDLFKEMSSLREERDALRRECERLRGAKNMIHDSNGSEKRLSDGDDPWSQIEELKQDLSHEKNLNSDLRLQLQKMKESNSELLLAVKDLDESLDKKNREISILQEDTQEDQQEAEYEHALSNVHNSGQKLALSETSSYQEKEDELMLDALAKKRDDISTSELEKKVLELSNEIELYKKDREDIEMQMEQLALDYEILKQENHDVSSRLEQAQLREQLRMQYECSAHLAIISDLEANVESLDNELQTQAKKFEADIAEITSAKVEQEQRAIKAEDSLRKIRWNNAATAERLQEEFKVLSSQVSSAFSANERHLVQARKEVAELQLQKSQLEELLQKAQGDLGSVQDQHRAKVQQLITLVDFKSKEIDRLLTELKSKSDEFHDQKRCDEARLNALSEEMDLLNAKIDELSSERNDLSEKNAQKDKELAGISEKDMQLQDKTAEITSLNKELVSLKDQVKTHLDELHDLKCLKDRKEETIGKLQIDIGSLKLQCDNLKTSLSKKESEKDNLASQVLELRRSLETREEGAKANGQNSDAKNNPHTNNKRMKHNTGSTGSIAALPGTNGQGEDDGDCNGHDMRNAAADGAQQGGGGGAEGAARAVLGD

SEQ ID NO: 65493 - protein, 389 aa, Zea Mays
MLAARENGHSTRAPKHEVALLPLHQVNGTMHSPAVPVQVQTSNGFVLQHLVPVALSTQQHEQQQLNQAPVFYVQSRDRAKCTEGKAALEPLVQVVQPLAHSPDAVVQVELPQKASQAAAAELYPQPQTQSHRLQTPTQQVDLHTWHPQQPMVQVQQQQYSIQQVSRHMVVAQQPSSSPQSQLSAPQATPLFPPFSSVKPSSCNTETITRRMAGQPPYSSSQQQYQQQQHEVAHSFYGQGNTVLLPVADHNAQHQQPQPVQLHSQGPSCPPQPGKPSHCSAAPYAVQGNGQTYSSAYKNPSNCPATAAVVALLPQPPAIACMAYHPLGPQVVHNHPFGNTMVETSRSSVVGYPRDQFEMLPAITAAQPVLPVDKLNAGSNVTSSPREWSA

SEQ ID NO: 65494 - protein, 285 aa, Zea Mays
MRIRTSVHTAAFCQPRPATRSRPTPQPAAALATARIRGFHPEISVAIASRNRHNPPNLALPCALRPPHFTQPISAPCAVFVREVGADDGGGGADSDFCGGQVGDTGDARRGASGGSRVPRLAARVRGPPRVLGLLPLRAVERAVEPGTPQPQPEQPCEIGARTIALFAMEPPALVLDVQNNMLLSQDRHLAFYGVEPGSSDLTGPFNQGIMQPELMCTIANPVDVLHGAIHDASTMNHVILQSDVLTYVYAVPYVLPKLSSVTHAHIVVGGEHASHREFDLHSTY

SEQ ID NO: 65495 - protein, 757 aa, Zea Mays
MTGKSQGSSDGISMYLSIEKLESPSKQKSSDKIALETIKIVSDALPKIVPYVLINHREELLPLIICAIEKHPDSDVRDSLTHTLFNLIKRPDGEQRRIIMDACVELAKSVGEMRTETELLPQCWEQINHQYEERRLLVAQSCGELAVYVRPEIRDSLILSIVQQLVEDAATVVREAATHNLALLLPMFPNLDKYYKVEELMFQLVCDPSGAVVEVALKELVPAVVRWGDKLDQISRVLLAHILASAQRCPPISGVEGTIDSHLRVLGEQERWNIGVLLRMLTELLPFIHQKAIQTCPFASADPTSSTPENFSASCLKSYATGDSEWSAFEWMHTDCLPDLIKLACLLPVKEDNLRTIITKYLLEVSGLYGKDYLEHIMLPVFLVAAGDIDSGDFTYFPLSIQPKVRGLRPKTSTAEKLAIMCVFPLLLSGILGSPSSRQQLEEYLRKVLIQNTKDGSFSMHHTTEIINAVRFLCLFVEHHSVIFNILWEMVASSDTSLKINAAALLRALVPYTDVKIASTHILPALVTLGSDQNLKVKYASIDAFGAVAQHFKNDMVVDKIRIQMDAFLEDGSHEASVSVIRALAVAVPHSTDRLREYLLTKIFKMTCITPVGNDIERRRERANVLCEALRALDATDLPAMGIRDLLLPSIQNLLKDLDALDPAHKEALEIISRERSGGTLESISKVMGAHLGIASSVSSFFGENSLLTKKEGGEEHDPAGPTAPEQNLQAQPESTRFGRIMRSGFGDILRGQSKGQ

SEQ ID NO: 65496 - protein, 263 aa, Zea Mays
MARPPKEAIDTFISITGADEAVAVRKLEEHGGDLNRAINSHFNDGDSILNGISQNAMPASRDDMMDLDGPLDNTFQRSLLPESFRAPFALMDPNFQDQFFDRVGSTDGVIREPLVSHPREVREIPIEVKDGDPQTGSSGQDVTGNESSNGPEVPETIIIDDVDGGLLSAPSVPHPIIPSNTSTVPTAPPLVHVNDYDEDIEEEMIRAAIEASKKDSEGLANIVEQGGQHQEEVNLRDHSSDKAGMETANGIVERTSFRKGWNI

SEQ ID NO: 65497 - protein, 1110 aa, Zea Mays
MQNVRPNSIVHAVRTEVYLWPKAQKLPGEDKPLRPPGAFRKKTDLSIKDGHVFLMEYCEERPLLLSNAGMGARLCTYYQKTTPTDQTAASLRNNSDGLGTVLAIDPADKSPFLGEIHSGSHQSCLETNMYRSPVFPHKVAPTDYLLVRSAKGALSLRRIDKLYVVGQQEPHMEVFSPGTKNMQNYLLNRVLAYVYREFRARERPDAIPQIRADELPIQSPLTEAIVKKRLKHCADLKKGPKGHFFWTQRPDFRVPSEEELRRLLTPESVCCYESMQAGLYRLKRLGILKLTQPVGLASAMNQLPDEAIELAAASHIERELQITSWNLTSNFVACTNQDRENIERLEITGVGDPSGRGLGFSYVRVAPKAPASNSVLKKKSAAAKGTTVTGTDADLRRLSMDAARELLLKFGVPEEQIDKLTRWHRIAMVRKLSSEQAASGITIDEIPVSKFARGQRMSFLQLQQQTREKCQEIWDRQVQSLSALDGDDNASDTEAHSDLDSFAGDLENLLDAEEFDDEDTSTADLRIDKADGMRGLKMRRCSTQAQINKEIEDDETEASLAKKLLEDDGNDVKRKKQPVELTNCGTSLVANKMKQSKTGQTIKSSGYAGALTPKENTPREGKEVENSFVEGGLSSKLKPKMALDVNETVLVKKKSVPGKDGPKEKKQGARGDSLVCGACSQVGHMRTNKLCPKYREDPEMSEMDANSVKPNSMDINHLQAKTPKRLITKVSSEVTETEGPEGIEKTKSVPVKFKVGAPDKSLERNMSVSVSLVSDKRVMDVTDSRSTGKVNKIVIPNKMKSDDFPPDTPKPSVVFRPPAEEKDVPRKKITIKQPKGIDQQRHVESRSVQEPTRKTRKIVELSSFEDKSREDDHWVGGEPSQVNSSHGRRLGLEGKISKATMENERSWRDFEERREMPQARLFDATIYASREEDHLKAKKKNKKKKKHEFKDDDLLDHRPYRNDRRVPERHRALKRSSPAPVVGYASSAKRRRGGEVELSNILEKVVDHLRGLSGSLLFLKPVTKKEASDYLDIIRYPMDLGTIRDKVRKMVYRNRDEFRHDVAQIQLNAHIYNDTRYPHIPPLADELMEVCDHLLYENADLLTEAEDAIE

SEQ ID NO: 65498 - protein, 136 aa, Zea Mays
MAECDSHRYQPRAEGTHEVVQGSRSNLKCSPSTSGTNQSALLGNAQYPAPQQVQEDLSLHECKPVNCLSLFGEENSAAKERFHGENHKSVEDESWSAAVESDLDLKLSIGPSSHSPETPRWLFSGSRERNPSGQHR

SEQ ID NO: 65499 - protein, 1364 aa, Zea Mays
MMNAKVVLTWNKLRTACIELLCTAMAWGDLKAQNHTELRAKIISMFFKSLTCRTTEIVNVAKEGLRQVVQQQRMPKDLLQSSLRPILVNLANTKSLSMPLLQGLARLLELLSNWFNVTLGAKLLDHLKKWLEPEKLVQTQKSWKAGDEPKIAAAMIELFHLLPPAASKFLDDLVTLVIDLERALPEDQFYSEINSPYRAPLAKFLNRYVLEAVDYFLARLSHPKYFRRFMYIICSDTGDLRDALARSPQKILASAFSQFYSQSEASAAQLSSVKDEALTGAVSESITVQSSSNMVTTSESYFNGLELVSALVKLMPEWLRNNRVVFDTLLLAWKSPARLARLQNEQDLSLPQVMESKRLIKCFLNYLRHDRTEVGALFDMLSVFLYRSRIDYSFLKEFYVIEVAEGYSPNLKKTILNHFLNIFQSKQYGQDHLVVTMQILILPMLAHSFQNGQSWEVVDPTIIKTIVEKLLDPPEEVSAEYDEPLRIELLQLATLLLKYLQTDLVHHRKELIKFGWNHLKREDNSSKQWAFVNVCHFLEAYQAPEKIILQLKLIVRHADLFYSCRAHFVPQMVNSLSRLGLPYNTTAENRRLAIELAGLVVAWERQRQSEMKVAQESESQNQLGDMLNPSVIGGDPKRSSDVPSFADDLSLPDEEYKPNAAMEEMIITFLIRVSLVIEPKDKESSSMYKQALDLLTQALEVWPNANVKFNYLEKLLGNLSPTPQSKDPASALAQGLDVMNKVLEKQPRLFIRNNINHISQILEPCFGNKMLDAGKSLCSLLKMVFSAFPLEAATTPQDIKLLHQRVQELIHKNLAAVTTQQIALELNNAHSIISFSLFVLNALAEVQKNFIDPFIGLLFRVLQRLARDMGSSAGSHIRQGQRPELDSSVNSRSTIDSTVISNMKTVLKLISERVMSSSDHRKSMGQILQALLSEKGTDSSILLCMLDMIKTWIEEDCRLASSTGSVSSLNPKEIITYLHKLSLVDRKSFPPAAQEEWDAKYLQLLYSLCADSTKYPLSFRQEFFHKIERQYMLGLRAKDPEMRKRFFKLYHDTVGKTLFSRLQFIIQLQDWEAVSDVFWLKQGLDLVLAILVENEPITLAANSARVPTLMIAGPVPDRITMPQQVPDAQESMDGTTLSFDSLAARHAQFLNDANKLVVADIMAPLKELAFADPNVAYHLWVLVFPIVWVTLHKEEQVALAKPIIALLSKDYHKRQQGCRPNVAQALLEGLHLSHPQPRMPSELIKYIGKTCNVWYIAIALLESHIVHMNEAKCSESLAELYRLLNEDDMRCGLWKRKSITAETRAGLSLAQHGYWQQAQNLFYQAMIKATQGTYNNTVPKAEMCLWEEQWLSCASHLGQWEVLA

SEQ ID NO: 65500 - protein, 71 aa, Zea Mays
MKTATDPRPVLTAPMLIPREELAAAGPTCQWPAWHSGRGKGSWAGQRGSWAEKQPIQPMAQVYPFSFIFIF

SEQ ID NO: 65501 - protein, 65 aa, Zea Mays
MASTVLEATRVAHEDLERLERLAARELQWEPDNPRDRFFQSHRVRHMLDLVVSTSCKLFHMLVRL

SEQ ID NO: 65502 - protein, 58 aa, Zea Mays
MVCIGEDVRPTDLRLHLMKEVSGMSTSLKEPQQAAASPASSGEPSSSGTMKGDKNEIS

SEQ ID NO: 65503 - protein, 101 aa, Zea Mays
MHLSSLFRVRQLSLLIRVMTSFVVVQLASSSLFRHLDANPYMTSPNYDRAVKRIPKKDVQRFDGGVREVRVAPTNRSTNCLNRKIITDLADSSQLLEGYDN

SEQ ID NO: 65504 - protein, 352 aa, Zea Mays
MILMRTLRNDYAKYARDDDDIETLERDVNEESGWKLVHGDVFRPPCNLVLLSALVGIGTQLAALILLVILLAIIGMLYIGRGAIVTTFIVCYALTSFISGYVSGALYSRHGGGAGKNWIKAMAMTASLFPFMCFGIGLVLNTIAIFYGSLAAIPFGTMVVVFILWAFISFPLALLGTVVGRNWSGAPNNPCRVKTIPRPIPEKKWYLTPSVIALMGGLLPFGSIFIEMYFVFTSFWNYKVYYVYGFMLLVFLILIIVTICVTIVGTYFLLNAENYHWQWTSFFSAASTAVYVYLYSIYYYHMKTKMSGFFQTSFYFGYTLMFCLGLGTLCGAVGYLGSTLFVRRIYRNIKCD

SEQ ID NO: 65505 - protein, 95 aa, Zea Mays
MNVCVTGERRGQAVVAMPIASIDVRLVGIASSICTNFQSILTHLPSIKRSLPCRSLPGQYHGIGSSSASSMPTYNSSSRRRVLRPEKEAARICSQ

SEQ ID NO: 65506 - protein, 374 aa, Zea Mays
MAPAPAAASAGRKSHVTVLLLYVVCGLILLLLLASYSPRLQPHAHGRSLHRRLKLHPKSSLPSDASSGGNGGQQKTQHQNHHAASFDPTIAELERRLDDKEWEREHYSLLHGGEPDDHMKEWEEFLKEEEDFINDDDRFNIADRIRALFPKIDVAPQDGFVSLDELTAWNLQQARADQHHRSAREMELYNKNGDEIVSFEAFNALRQESHGEGNMLGFEWWKEDHFNASDANADGFLDKTEFNDFLNPSDSDNPKIINLLCKQEIRQRDKDGDGKLNFEEYFTGLHDHIHGYDDENADISQIGNITVAKDRFFKLDKDNDGFISEHELEPVLDKLYLSERYYSRQQAIHAISEIALDPSDSQSMVTILKQEEVC

SEQ ID NO: 65507 - protein, 129 aa, Zea Mays
METFPSVKNILLLDSEGKRVAVKYYSDGWPTLSAKLAFEKSVFAKTQKANAGTDEIVMFDGQIVVYKFIQDLHFFVTGGEEENELILASVLQGFSDAVERLLKNMVDKRTALENLDLILLCLDEIVDGG

SEQ ID NO: 65508 - protein, 231 aa, Zea Mays
MPASLHHKLPCPFFFGFLRQPESKRIIRLEISHGPGSLPPFVIIFGVCTLFCSSSSVSLVLLLEGRVGEDVRQELRAPEGVGERQVSLGRVVRQLPQELVGEGPVVVLLHLRVQLPHPADPDEEAGEVAPRLLPEPPLHAVPEPAAAVLLPEPVDGGEVLGRDELDLGEEDVPSAPRGLAGEVDDQRPRGLVRLPVVARGELAAEEVERGAFFFFFVPCRWCRCRGNWSRS

SEQ ID NO: 65509 - protein, 289 aa, Zea Mays
MDLEWFHWLTYASDSDGEEEEDDRSDASADDKPTTKNPTSSPPGSRANDEDLEIIIVRDVNEGEEVYNTYGTMGNAALLHRYGFTELDNQYDIVNIDLALVTKWCTSIFSGRHTRARVSLWRNLGYSGCTSQDTEYFEIAYDGEPQLELSILLYIINMKPDVYDKLICVAHGFVSDEEHETICNVFKFVKATSSNQNSEVNGLEKLPDVKKLLHSESVCSALLSLADMRESLYGSNTLEDDEEELHACCVVNERKLYHSLVLRVSERRILRRLREFASSGSKGRKRKHP

SEQ ID NO: 65510 - protein, 97 aa, Zea Mays
MSMLEAAHENDIELEGACEGSLACSTCHVIVMDVNYYNKLEDPADEENDMLDLAFGLTETSRLGCQVIAKPELDGIRLALPVATRNFAVDGYVPKPH

SEQ ID NO: 65511 - protein, 478 aa, Zea Mays
MGGLCSKVSAVDKSPSDTALGRNQVADHEPGASLELEKPPVSRESAAPAKRLDEQLQSFSFLESVVPGVAFHAGANTGGEAGSRTSPQLTRSLSQRAGVGKAKAGAAKVSEVSSILGRASTAGLEKAVEVLDTLGSSMTSLNSSSGFVSSSAAKGNKISMLAFEVANTIVKGSNLMRSLSEPSIKHLKEVVLHSEGVENLISKDFDELLKMASADKREELEVFTREVVRFGNRCKDPQWHNLDRYFEKLASERTPQSYLKEKAESVMQKLVTCVQNTVELYHELHALDRFEHDCRLKQKEQDGLSSRGDNLDILKQELKVQSKHVKSLKKKSLWSKNLEEVMVKLVDIVHFLYLEIYNAFGRPVKSHKNLPNTIIDWDQQALHCIMLISSIRLTILFLDHVQCLQMQGIHYIIAYHLPSNLLSVLSYNLLKSRKSLQLLGSKQKWKRLCVGLSLLLVTQIGHTMASVGLESGQIQDLN

SEQ ID NO: 65512 - protein, 462 aa, Zea Mays
MAGRDRRGAFLASSSSSGSGSGRRAPEHEWWPRSPAWSRPLSDSGGARGRKSGSSTSSSSFRSLFRSIGVWFSSLSTASPSPASSSMKQKSRDAGAKKPPLPGYAGTKTSARGLYSGGGGGRQHRPSFQNSVFSIEEILSATNNFSPALKIGQGGFGAVYKGVLPDGTVVAVKRAKLRMQNPHVDVEFRSEIKIMARIEHQSLVRFYGYMECGEERIVVVEYVPNGTLREHLDRCNGRFLDFGTRLDIAIDVAHAVTYLHMYSDHPIIHRDIKSSNILLTDSMRAKVADFGFARLGAGLGAGGEATHVTTQVKGTAGYLDPEYLKTCQLTDRSDVYSFGVLLVELASARRPIETKREMKERLTARWAMGRFIGGASADVLDPHLARTPAADRALEAVLELAFRCMGPVRQDRPAMSDCCRALWAIRKTYRDMLAADATPQFSDRRATTSSSSADSSGDLWRI

SEQ ID NO: 65513 - protein, 55 aa, Zea Mays
MFSQGASSNMEDTPHKTDTLSSPLTPLTPQGSVATTKYLETVDAGDTGCVTTQSS

SEQ ID NO: 65514 - protein, 492 aa, Zea Mays
MMGPSTMAARAAGCCSSAALAFFRLHPLRCAVRPAAALVGGCSSGLRGGCRSRLAHSIVDLVMEELRSRRRVRVSAKIGLQGTKELPDNKIVKRTLQKGLLLEFQKDPERSLLAVVERPDGKKNWMVTDQNGVMSSIKPQQVTYVVPGIMNFDYSKIDEFLEKTQNLLDPTILECAWMELSEKDKSITVEEFAEIVYGTKESLESYCAHLLLSRDVVYFVKVESRDYSMYQPRSPAQVEELLRRKLAKEAADKELEEFVHLLKSAKALPMESKPPKASWLVEEKVRQKIESLQAYAVDACDDEQRRLAGNILKAMGFTRTSSAALKLLINVGYFPVHVNLDLFRYDVRIRYTDEVLSAAEELLVDSPDTDMHIRKDLSTLKVYAIDVDEADELDDALSATRLPDGRIKVWIHVADPTCLVKPHSIIDRSFLLFCSLLSITALGICYKTVSLVGREAMHRGTSIFLPTTTFPMFPERLAMNSMSLQQVLQNIL

SEQ ID NO: 65515 - protein, 737 aa, Zea Mays
MVPGHNYIGSEHLLLGLLREGEGVAARVLESLGADPNNIRTQVIRMVGESTEAVGAGVGGGSSGQKMPTLEEYGTNLTKLAEEGKLDPVVGRQDQIERVTQILGRRTKNNPCLIGEPGVGKTAIAEGLAQRISNGDVPETIEGKKVITLDMGLLVAGTKYRGEFEERLKKLMEEIKQNEDIILFIDEVHTLIGAGAAEGAIDAANILKPALARGELQCIGATTLDEYRKHIEKDPALERRFQPVKVPEPTVDETIQILRGLRERYELHHKLRYTDDALIAAAQLSYQYISDRFLPDKAIDLIDEAGSRVRLRHAQLPDEAKELDKELRQITKQKNEAVRGQDFEKAGELRDREMELKAQITAIIDKSKEMIKAETESGDVGPLVTEADIQHIVSSWTGIPVEKVSSDESDRLLKMEETLHTRIIGQDEAVKAISRAIRRARVGLKNPNRPIASFIFSGPTGVGKSELAKALAAYYFGSEEAMIRLDMSEFMERHTVSKLIGSPPGYVGYTEGGQLTEAVRRRPYTVVLFDEIEKAHPDVFNMMLQILEDGRLTDSKGRTVDFKNTLLIMTSNVGSSVIEKGGRKIGFDLDYDEKDTSYNRIKSLVTEELKQYFRPEFLNRLDEMIVFRQLTKLEVKEIADIMLKEVFDRLKAKEINLQVTEKFRDRVVDEGYNPSYGARPLRRAIMRLLEDSLAEKMLAGEVKEGDSAIVDVDSDGKVIVLNGGSGVAEPLEPALST

SEQ ID NO: 65516 - protein, 491 aa, Zea Mays
MDATMAFTSGSPTPTRFYSSALLSLRTPKSLSVYGPWRWRGRGRPLLALRHRSQAQAAAAAAGAAEASHHDVVVVGAGIVGLAIARHLLLHTSLSVAIADAAVPCSGATGAGQGYIWMSHRTPGTDTWELALRSKQLWEELATEVDGQGGGGAREKLGWMRTGSLLVGRSSEELGTLDERTKALSQAGIHAEFLSASSLHALEPALSVGKDGGAMFLPQDCQIDAFQAVSLIEKTNNSYSSEGRYREFYNDPAMSLIRSDVTGKVEAVQTSRNILYGRKAFVIASGAWTRSLLHSFVEPALTLDIPVKPRKGHLLVLEKFDKVKLNHALMEVGYVDHQITKSNSTHIASESSEDELGALSVSMTATLDTKGNLVLGSSREFKGFSREVDRSVVQCIWERAGEFFPAMKNVSFDIDQNTQIRIGHRPYMPDGKPVIDFIPNLSNILIATGHEGSGLTLALGTAEMVTDMILGNPGKVSYSPFSIKRRFSVFD

SEQ ID NO: 65517 - protein, 78 aa, Zea Mays
MGKYFASDDMCLEDGILAIVKQDERPLELLAKAYAINSFDIDPQNPSDVVFTLEWESVGVLPCGEKKDNFYYRGTSEF

SEQ ID NO: 65518 - protein, 912 aa, Zea Mays
MTAEGTACNGAGEAPKAEFVPEKVVTASLEEKAAGEREGEDVGGPFVVVNGGDSDGHSDRGSDLGKASGEESSSEEEDVPGSNVAPDLAVGGDHGSARGEVSAQGAALGASSADGSGRASDGAEGGADEGKGEPSSDFDAEAAPQEDVGEEDGGAAALASSGCEPAITGADSEAAPAVDDEVEGKEGTVDGSAVADVAEAVVHQEVSTEHDDALTLPKSSASMESEVIREDNKEQSTADIVGPHEQGTCGASALVENEHLCADMRADSFVAVTEPDSQEDYAVESCMRDDVLICTESGSADIESEVNGKDSKQEQSNADVVEVIGQGVVRADALMANGHLCADIQADSSEAATKPDNIANESKLTEVAESGEDAAASGELDAIDASSQTNGHIYVASGADSFIIASESKSHSFETDGQETDQQEEEVPQTEAELLDGVLKPTERNCARSVEELIGEEVDTDGHPSVDGTADASGEQEAKPMQVEGEATCGILEFEEVDKDGEDSLCNDCMVGVVSSNEETELPMKERTDEAVPSVNVGESEQVTEDTSQDIMQGGLARGVFIGTIFVKPVSDPHVESSLVHKVKAEVHLVDEITAADLKAENMVEVKRTDREVDEIEVKAPGTHEIGNSSEVEPKEEFEMEVDDAVSLHEAAASASENGSEEKSSNIAVDQVEPVNLNVDELAVDDDQPSFNPGYGSAKSSDVAETKNVEAQVTEQKGNAHHASGEWHGDHTQVIGPQRIYIIKVPKFAGDDLWDKIQAAQAHLDQLTQERDAINRRRQKQKAICDEYREKFEAARQEEREARAAHGDKKNDLNSVRSVLEKLHQANSVEELDELIAKKERIMQHETISLKEEKLLIKEINELKSQRKQLSATMGSKAEINEAFDQKDHIHERHKQPESPRGEHKKDSKIFC

SEQ ID NO: 65519 - protein, 293 aa, Zea Mays
MDRYQRVEKPPPEPAAIGENEVRITTQGLVRNYVTYATSLVQEKQVKEIVLKAMGQAISKAVAIAEIIKKRIPGLHQDTIISSVSITDVWEPIEEGLVPLEMTRHVSMISISLSPKEHNKNSPGYQAPLHSDLKPQRYQQPQQYQQYQPRQHQVQTDSYGRGRGRSRGRGRGWGTRGGYGGGYGGYEYDNNQVGYGGYEHHGGYGHQGGYGNQGGYGHNQGGYGHDQGGYGGYGYNQGGYGGYENGGWNYNRNRGGGGRGRGNWGYGDCCKIRKPLVAKRGLKEVCEVVLVVR

SEQ ID NO: 65520 - protein, 305 aa, Zea Mays
MEGDEMLRVKLGRQGLEVSKLGFGCMGLTGVYNAPVPDQAGIDIIKHAFEAGITFFDTADAYGPHTNEVLLGKALKHFPREKVQIATKCGIAGFDASGMRVKGTPDYVRACCEASLQRLATDYIDIYYQHRIDQSVPIEETMGELKKLVEEGKVRYVGLSEASADTIRRAHAVHPITAVQLEWSLWTRDIEEDIIPVCRELGIGIVPYSPLGRGFFAGRAAVERVPSESLLSKHPRYSGENLEKNKVLYTRLEMLSKKYGCTPAQLALSWVLHQGEDVVPIPGTTKAKNLDENIGAVKAIISSSY

SEQ ID NO: 65521 - protein, 746 aa, Zea Mays
MWNRVSPQLSSPNQPYSLREALAQAQSSRIGSTARALRESLHPVLRQKMELWEENLSTAVSLEVLGITEKFSVAAGARSITTDYAKLDCVTSILMGLLSRNQSLAFWKAFLPVVYNIFNVHGATLMARENDRFLKQIAFHLLRLAVFRNDSIRKRAVVGLQILVRNSFNYFKNTTRLRVMLTITLSELMSDVQVTQMKFDGSLEESGEARRLRKSLEEMADVRSKDLLKDCGLPVTALEAAPEGSSDNRWSWVEVKHLSKCLVQALDAGLEHALLGSVVTVDRYAAAEGFYKLAMAYAPVPDLHIMWLLHLCDAHQEMQSWAEAAQCAVAVAGVIMQALVGRNDAVWSKEHVASLRKICPIVNTDVSAEASAAEVEGYGASKLTVDSAVKYLQLANKLFTQAELYHFCASIQELIIPVYKSRRAYGQLAKCHTSLTNIYESILEQEASPIPFIDATYYRVGFYGERFGKLNKKEYVFREPRDVRLGDIMEKLSHIYEAKIDGSHTLHIIPDSRQVNADELQPGFCYLQITAVDPVMEDEDLGSRRERIFSLSTGTVRARVFDRFLFDTPFTKNGKTQGGLEDQWKRRTVLQTEGSFPALVNRLPVIKSESLEFSPVENAIGMIETRTAALRNELEEPRSSEGDQLPRLQSLQRILQGSVAVQVNSGVLSVCTAFLSGEPATRLRSQELQQLIAALLEFMAVCKRAIRVHFRLIGEEDQEFHTQLVNGFQSLTAELSHYIPAILSEL

SEQ ID NO: 65522 - protein, 2335 aa, Zea Mays
MWNGVPPPPPPPLQMAAAPPPPGTTVPGAGQPPPPPPPPAGASQGGKPLTPMELEAQLVEKARKWHQLNSKRYGDKRKFGFVEAQKEDMPPEHVRKITRDHGDMTSKKYRHDKRVYLGALKFVPHAVYKLLENMPMPWEQWGTMWIMMRREKRDRRHFKRMRFPPFDDEEPPLDYADNLLDVEPLEAIQLELDEEEDAAVYEWFYDHKPLMKTKLINGPSYRKWHLSLPIMATLYRLAGQLLSDLIDRNYFYLFDMESFFTAKALNMCIPGGPKFEPLYRDMEKGDEDWNEFNDINKLIIRQPLRTEYRIAFPHLYNNRPRKVKLGIYHTPMIMYIKTEDPDLPAFYYDPLINPITSTNKVDRRERKAAEEEDDEDFCLPEDVEPLLKQTELYTDTTAAGISLLFAPKPFNMRSGRTRRAEDIPLVSEWYKEHCPPAYPVKVRVSYQKLLKCYVLNELHHRPPKAQKKKHLFRSLQATKFFQTTELDWAEAGLQVCKQGYNMLNLLIHRKNLNYLHLDYNFNLKPVKTLTTKERKKSRFGNAFHLCREILRLTKLVVDANIQFRLGNVDAFQLADGLQYIFSHVGQLTGMYRYKYRLMRQIRMCKDLKHLIYYRFNTGPVGKGPGCGFWAPMWRVWLFFLRGIVPLLERWLGNLLARQFEGRHSKGVAKTVTKQRVESHFDLELRAAVMHDVLDAMPEGIKQNKARTILQHLSEAWRCWKANIPWKVPGLPVPIENMILRYVKSKADWWTNVAHYNRERIRRGATVDKTVCRKNLGRLTRLWLKAEQERQHNYLKDGPYVTPEEAVAIYTTTVHWLESRKFSPIPFPPLSYKHDTKLLILALERLKESYSVAVRLNQLQREELGLIEQAYDNPHEALSRIKRHLLTQRAFKEVGIEFMDLYSYLIPVYEIEPLEKITDAYLDQYLWYEGDKRHLFPNWVKPADSEPPPLLVYKWCQGINNLLDIWDTSDGQCVVMLQTKFEKFFEKIDLTLLNRLLRLVLDHNIADYVTAKNNVVLSYKDMSHTNSYGLIRGLQFASFVVQYYGLVLDLLILGLTRASEIAGPPQMPNEFLTYADTKVETRHPIRLYSRYIDKVHILFRFTHEEARDLIQRYLTEHPDPNNENMVGYNNKKCWPRDARMRLMKHDVNLGRSVFWDMKNRLPRSITTLEWENNFVSVYSKDNPNLLFSMCGFEVRILPKIRMTQEAFSNTKDGVWNLQNEQTKERTAIAFLRVDDEHMKVFENRVRQILMSSGSTTFTKIVNKWNTALIGLMTYFREATVHTQELLDLLVKCENKIQTRIKIGLNSKMPSRFPPVIFYTPKEIGGLGMLSMGHILIPQSDLRYSKQTDVGVTHFRSGMSHEEDQLIPNLYRYIQPWESEFIDSQRVWAEYALKRQEAQSQNRRLTLEDLEDSWDRGIPRINTLFQKDRHTLAYDKGWRVRTDFKQYQVLKQNPFWWTHQRHDGKLWNLNNYRTDVIQALGGVEGILEHTLFKGTYFPTWEGLFWEKASGFEESMKYKKLTNAQRSGLNQIPNRRFTLWWSPTINRANVYVGFQVQLDLTGIFMHGKIPTLKISLIQIFRAHLWQKIHESVVMDLCQVLDQELDALEIETVQKETIHPRKSYKMNSSCADILLFAAHRWTMSKPSLVSESKDVFDQKASNKYWIDVQLRWGDYDSHDVERYTRAKFMDYTTDNMSIYPSPTGVMIGIDLAYNLHSAFGNWFPGSKPLLQQAMNKIMKSNPALYVLRERIRKGLQLYSSEPTEPYLSSQNYGEIFSNQIIWFVDDTNVYRVTIHKTFEGNLTTKPINGAIFIFNPRTGQLFLKVIHTSVWAGQKRLGQLAKWKTAEEVAALVRSLPVEEQPKQIIVTRKGMLDPLEVHLLDFPNIVIKGSELQLPFQACLKIEKFGDLILKATEPQMVLYNIYDDWLKSISSYTAFSRIVLILRALHVNNEKAKMLLKPDKTIVTEPHHIWPTLNDEQWLKVECALRDLILSDYAKKNNVNTSALTQSEMRDIILGAEIAPPSQQRQQIAEIEKQSRETTQLTAVTTRTTNVHGDELIITTTSPYEQQAFASKTDWRVRAISATNLYLRVNHIYVNSDDIKETGYTYIMPKNILKKFICIADLRTQIAGFLYGLSPQDNPQVKEIRCIAMPPQHGTHQMVTLPANLPEHEFLNDLEPLGWMHTQPNEAPQLSPQDLTSHAKILENNKQWDGEKCIILTCSFTPGSCSLTAYKLTPSGYEWGRSNKDNGSNPHGYLPTHYEKVQMLLSDRFLGFYMVPDNAPWNFNFMGVKHDPQMKYNMKLGMPRDFYHEDHRPTHFLEFSNIEEGEAAEGDREDTFT

SEQ ID NO: 65523 - protein, 303 aa, Zea Mays
MIVSAFIFLGNSTSDTTGEEVEYVSRWLIVATGENAEAVQPDIGGLQEFPGTIMHTSAYKSGSAFTGKRVLVVGCGNSGMEVCLDLCNHSAEPHIVVRDAVHILPREMLGHSTFGLSMWLLKWLPVHVVDRVLLCIARAMLGDTARLGLKRPASGPLQLKSLSGKTPVLDVGTFAKIKSGDIKVRPAVRQVSGRAVEFADGELEEFDAIVLATGYKSNVPFWLKDRVLFSEKDGLPRKAFPNGWKGEKGLYSVGFTRRGLMGTSVDARRVAHDVEQQWRKAKGTHRDGVPLPLVAVVYHGDGL

SEQ ID NO: 65524 - protein, 481 aa, Zea Mays
MALARLRLLDRYGLLSPALSATALRSLGDLRALCTLSTTLRSGAGEDEIERIRREFDDAKRNYLSIPAAIKDMPKMNPQGIYVNKNVKLDDLQVYGFDYDYTLSHYSEHLQCLIYDLAKRHLVNELKYPESCLQYEYDRTFPIRGLYYDRLKGCLLKLDFFGSIEPDGCFFGRQRLSLSEIKELYGTRHIGRDQARHLVGLMDVFCFSESQVFRFLKMLKEKGKKLFLLTNSPFYFVDGGMRYLLEDQHFDGNSWRELFDVVIAQANKPTFYNSDHPFRVYDTQKDTLTFTAVDKFLPDQVYYHGCLKSFLQITKWKGSEVIYFGDHLLSDLRGPSKAGWRTAAVIRELEDEIEIQNGDSYRFQQAKLSIIHDLLGKVHAAVVSTEKGQVYKALLNELNAERRQCRSGMRDLFNTSFGATFLTDTGRESSFSYHIHQYADIYTSKLENFLSYAPESWLHPPHDIKIMPHNAKVPASLFSTS

SEQ ID NO: 65525 - protein, 1025 aa, Zea Mays
MVIAVEGNGFVHDDEEDDGDRPIRYLPLGHIYSSSTPAPAPRPPAQKKPRFDDGRPPMKVYYRRRRKKLRVDESLSPPSPTTAPLAPPERDEKAGPSRRKDSLKHELLSLGPASPALDGEEPERRLGRTRRCGGAEKTVCFSEPERRRQPARPKGSVGRRWVELDIQTADPNAFVGLVCKVFWPLDDDWYKGSIAWYNEATKKHSVKYDDGEAEDLSLADERIKFFISSEEMKSLNLKLGISNQDKKGHDELLALAVSFHDYQGLDPGDLVWAKITGHAMWPAVVVDESNVPATRALKSIRLDQSILVQFFGTHDFARIKLKQAVPFLNGLVSSLHLKCKQASFSRSLEEAKEFLHTQQLPEIMLQLRKSVQHDVSDVNSYEGKVDSCSNLSEALALQNGEDAEMTQIELGNLRVSNLGRIVSDSDHFHNKKDIWPEGYTAFRKYMSIEDPHAVTLYKMEVLRNSDTKARPLFRVISEDGVQIDGSTPNACWKEIYRRIKEKQCTELERNVCQSSGSYMFGFSNPQIRQLIQELPNARSCLKYFENGGDTILGYRAVQVNWKDLDYCNVCDMDEEYEDNLFLQCDKCRMMVHARCYGELKQLDGGLWLCNLCRPGAPRVSPKCCLCPVTGGAMKPTTDGRWAHLACAIWIPETCLKDVKRMEPIDGLSRINKDRWKLVCSICGVSYGVCIQCSHPTCRVAYHPLCARAADLCIELENDDKIHHMYLDEDEDPCIRLLSYCKKHRQPSAAERPSLESDPPEPIQVVQTDMASSSGCARTEPYNLHRRRGQKQPQVVATASLKRLYVENRPHIVSGYCQNRVGNTCGESIQPFGLSDAVQQEAIGNVSSMVEKYTIVKATFRKRLTFGKSKIHGYGVFAKVAHKAGDMMVEYIGEIVRPPISDTRERRIYNSLVGAGTYMFRIDDERVIDATRVGSIARLINHSCEPNCYSRAITILGDEHIIIFAKRDIDPWEELTYDYRFFSSDQRLPCFCGFPKCRGVVNDVEAEEQSAKIRVKRSELFEKSEK

SEQ ID NO: 65526 - protein, 143 aa, Zea Mays
MYNGIGLQTARGSGTNGYAQSNKFLVKPRSTSGWGPGGRHRPLPLEAAGADGGGMRKPNKEILEHDRKRQVEVKLLVLRDALEEHGYTEDEIEERVAEARKAAEAEAAVAAEEAGSGRGAGRPPLPGRERSWRRSTASARERT

SEQ ID NO: 65527 - protein, 213 aa, Zea Mays
MPVRVVDTATPSSQPSPGQEANTGHPSPPRCSLLSAGRSFAGTQNVSSLQKDEAWKVNVRIHGCDLEQGYLCGTMEALNVPLADTPVVTFWEGEIVDAKNYTFFTGKWEASPEDDIRHWSKFPSFMPLLSQIETDGGKSLDFSNYPYIFMYFVNVGVDCGLTIAGFYYVCFSCSDGSISGFYYDPNSSPFQKLELKCTNEKSSGFTFSSYELQ

SEQ ID NO: 65528 - protein, 710 aa, Zea Mays
MTTTSTHLDLEAARRGGGGGGGGGSSSPPGYEQAEAGNDLRKDLALAYKTLGVVFGGLVTSPLYVYPSMNLSSPTKDDYMGLYSIMFWTLTLIGVVKYVGIALNADDHGEGGTFAMYSLLCRHADIGILPSKKVYLEEEPLLRNQSAAARRPSWLGKFFERSITARRALLFMSILGMCMLIGDGILTPAISVLSAIQGLRGPFPSVRNSVVEALSAVILIGLFLLQKYGTSKVSFLFSPIMAAWTFTTPIIGLYSIVHYYPGIFKAISPHYIVRFFLRNKKEGWRMLGGTVLCITGAEAMFADLGHFSKKGIQIAFLSSIYPSLVLTYAGQTAYLINNVNDFSDGFYKFVPRPVYWPMFIIATLAAIVASQSLISATFSVIKQSVVLDYFPRVKVVHTSQHKEGEVYSPETNYILMVLCVSVVLGFGAGNAIGNAFGVVVIMVMLITTVMLTLVMIIIWRTPPVLVALYFVPFVVMEGSYVSAVFTKIPEGGWLPFAVSIILAMVMFGWYYGRQRKTEYEIANKVTVERLGELLAKPEVQRVPGLCFFYSNIQDGLTPIVGHYIKNMSSLHAVTVFVTLRYLLVAKVDERERVLVARLGPDGVYGCTVQYGYADSLSGGDLTAQVTGSLRRHFGTAEAGAEEAARLEAARTNGVVHVRGKMRFYVGEDAGWFDKVMLGFYEFLHGICRSALPALGTPLQQRVEIGMLYKV

SEQ ID NO: 65529 - protein, 754 aa, Zea Mays
MGGACQQLSVDGDARTPANDRDPAGLLQHDDTENQQQQQACWERFLLKETLNVLLVESDDSTRQVVSALLRCCMYQVISAENGQQAWAYLEDKRNNIDLVLTEVFMPGVSGISLLSRIMSHNICKNIPVIMMSSSDAMSTVFKCLSKGAVDFLVKPIRKNELKNLWQHVWRQRCHSNSWTKLAVEIDSPQAMSLDQLADPANSTCAQVIHSKSEICSHRWLPGSSNRNCKKQKYTNDDFKGKDLEIDGPGNLYMDHQSSPNERPIKAADHENNSKESMMGNLGDATVRAADLIGSMAKNMDAQQAARAADTPNFSSEVPEGKGKNDDFKGKDLEIGGPRNLYMDHQSSPNERPIKAADHENNSKESMIENLEEPTVRAADLIGSMAKNMDTQQAARAAEDTPNFSSKVPEGKGKNDQHDNYVLPSLELSLKRSRSCGDGANDTVNDDEQRNSALRRSNLSAFTRYHTSAASNQGGTGLVGSCSPHDNSSEAVKTDSTYNMKSNSDAAAIKQGSNGSSNNNDMGSTTKDVVTKPSTNNERVMLPSAIKANGYTSTFHPVQQWMVPDNATAGKAKADEVANNAGRNSHPGDVQSNLTQQHRPTLHYVHFENSGSGALQCGSSNVFDPPLEGQATNNYGVKAGSNSGSNKGQNNGSTAGASTAAANAGRTDTEIRAIDKSGPGGGSGSGNDTYVRRLAASMTPRQEQLKKYREKKKDRNFGKKVRYQSRKRLADQRPRVRGQFVKQAVQNQEGDGER

SEQ ID NO: 65530 - protein, 181 aa, Zea Mays
MVKELVREYTKEIKWRDEDYVPKTLKEHLKVSLISIGGTLVLCSAFVGMGDVVTKKIMEWVMSDAELVKSFGIFVRLSNDIVSTKREQREKHCVSTVQCYMKQHELTMDEACEQIKELTEDSWKFMIEQGLALKEYPIIVPRTVLEFARTVDYMYKEADKYTVSHTIKDMLTSLYVKPVLM

SEQ ID NO: 65531 - protein, 177 aa, Zea Mays
MSAAACLFAAAVSLSFPSTSAPSSARRRRLRSPTTLLRCSPTRRRGPVRRTLDERLLEAAPAETEDVQTAVDVEDGGGIAEGDEVGTEEMEELEQRPPTRAFVKSRRQRQEEEEAAAGQDRFKLINGKEIFQEKAYLVGVECKRTGGNLFGIEESLKELEQLADTAGLLVVGSTYQK

SEQ ID NO: 65532 - protein, 86 aa, Zea Mays
MHQIKCSITFHSQGCLVQITTCWKALFVYFQVHQESMTETKRGVQKLPREFHSPLELLSIPLFKQLATTKELGFLFDVSLAFATSL

SEQ ID NO: 65533 - protein, 111 aa, Zea Mays
MGTFRPSIMYLKLLCRSHPFRKDKRCLFFWGGGGGKCYCGTSSTAKLEEFTHPAIASSLVRMLEYTGIILMLFMARFEHMDLPSLPLRDSLMSCFSWHELNDCVTVLWALA

SEQ ID NO: 65534 - protein, 122 aa, Zea Mays
MAGAFAFRLVPRLAAEPAARGKGGGGGANRDAGSRALVSKKPNKQQHLWIRKETAGSGKKALRLIDAVTKWLMSKGQVLTWTTYDTLLLALLMDKRVDEAESVWNTVIQTHTRSVPKRIKRR

SEQ ID NO: 65535 - protein, 337 aa, Zea Mays
MEYTLLPDLAPHKIHAKIQVHVSRKWLFRGATDSGPLQHVDMVLSDREGNAIYAEIPGNLAEQKATNIEEGGVYDINRFRVCAAKTVFKIVDGDKMIQFTFHTIVKCATSPPTTFPLYVYRLTSFDLIEPHVQTTNNFVGVYLSGGPACRWYFNPTIPEAEPYLTSQSTKRIVLQLPQNLQHPPAMETKPIVEHKSLYELLTVNPYDFPETGFECTITIAEIPAEHKWWFPSCTKCNKATIPHTTGYHCESCNWDGYKFNANKSNINSPEKDDGDKETAQNFDICSLIQYPLTKEKDQQIQLNRHLKGSNKGRYASEKKWTSNPPRTKVSLRSSSTF

SEQ ID NO: 65536 - protein, 409 aa, Zea Mays
MEVVNSGFQAAFMVPTEVLAVQHYEHLTSLLEKFDGDEKPNIALLTGSTSTRESRIIRDGLKTGEIGMVIGTHCLIADKTEFSALRISVIDEQQRFGVVQRGRFNSKLYTSSSKLSGENTSSDEASDSETFMAPHVLAMSATPIPRTLALALYGDMSLTQITDLPPGRQPIKTLALEGNDVGFEAVFQMMRDELIDGGKVYLVYPIIDESEHLPQLRAATAGFDSIKQKFEGYPCGLLHGRMRSDEKEETLNSFRSGETRILLSTQVIEIGVDVPDASMMVVMNAERFGISQLHQLRGRVGRGERKSRCIFLASTSSTLPRLKVLEKSSDGFYLANADLLLRGPGNLLGKKQSGHLPEFPIARLEVDGGILQEAHLAALKVLVASNDLALYPRLKVELSMRQPLCILGD

SEQ ID NO: 65537 - protein, 606 aa, Zea Mays
MSEAVAILSLSASAVVEDVLRQHGCRLSDRDLASRRAEEAAGRRNEAAGWLRRTVGAVAARDLPEEPSEEEFRLGLRNGQILCGALNRVHPGAVPKASAPCADGAALSAFQYFENVRNFLVAAQEIGLPCFEASDLEQGGKSARVVNCVLALKSYGDWKQCGGTGPWKYGGNLKPSVSGKSGHGRKNSEPFRRSQSINEGEVPYEEAGFNGDAHFDSSDMSTSRPLKMLVSAVLSDKRPDEVPQLLESMLSKLVEEFENRLNSQNELVKAALKSGIDNTKSFSKSKVLVETPPNTSGRKMDTGDIYCNHKKTKKEASREVALKQHLILQQQSKNVEELKSDLITTRAGMEYMQMKYSEDLNLLGRHLFSLAHAASGYHKVLEENRKLYNQVQDLKGSIRVYCRVRPFLPGQASPSTVGSIDEGNITIVTPSKSGKEGRKTFSFNKVFGPSATQAEVFLDTQPLIRSVLDGYNVCIFAYGQTGSGKTYTMSGPKNMTEQTQGVNYRALGDLFKLAEQRKGTFIYDIAVQMIEIYNEQVRDLLVSDGLNKKLEIRNNSQNGLNVPDASLVRVASTMDVMELMNVGQKNRAVGATALNDRSSRSHREGI

SEQ ID NO: 65538 - protein, 535 aa, Zea Mays
MADEGSEAEALEKDGGKASSPSGPGSWSGVPAALLPPVSSEEAANSTLESGVKATTQPPTASFTAISGLEDEELQVQDAVASGSKRSKDSAAAAAATRSANVSSPSVVHSHHAILPAPAQRIPEVKQADSETTPAREREWKPLCDVTSNRRIDWCELDGDVRVVGANASVTLVAPPGADNRTFRAESWRIKPYPRKADPNAMRFVRVLTVRSVASGSGEAACTDGGDDDVPALVFSDRGYTGNYFHAFTDVILPLFLTARRYAGEVRLLVADLQPWWVGKFLPVFRSISKYELVDLDRDPRVRCFRHVQVGLTSHADFSIDPRRAPNGYSMLDFTRFMRAAYGLPRGDVVAAAPARRPRLLVVARARTRRFVNTEEIVRGAEAVGFEAVVSEGTHEVAPFAELANGCDAIMGVHGAGLTNMVFLPTGGVVIQVVPLGGLEFVAGYFRGPSVDMGLRYLEYRIEPEESTLVDQYPRDHPIFTDPNGIKSKGWESLKDAYLDKQDVRLDMERFRPTLQEAIAHLRKAKAKANGDGNN

SEQ ID NO: 65539 - protein, 203 aa, Zea Mays
MRQLRMCIVKYWEDNSVGKLTTLRVKQSSGSYCSFSLAFQNDDQKSEGSMELLNSVKAISIHPLSNNKFLVLDSSGVLHVFIFSTTQMVSRGAIKQCSENIHTYRLHYPMKVQLSAVFSVTSIKTQFFWVSDGGHTVHVMSAVETESPNGDNGDVTGERELAPIKLSAIEAIFTSERVEDIVSISKDSVLILGQGNMFLYGTS

SEQ ID NO: 65540 - protein, 403 aa, Zea Mays
MEDRVFQELPDDFWDTPLARTSYKVKFDDSDSDFESALLKENSVGDGDSKKNRSSDVKKRKRMKHVNTSTDRNVLNSQDNVSSVMERHFLHLSSHTTSKSTSKQKENLSHLLHNEVPIRMGERNDLTENFENDSLSDSFSEPQISDTLCVEAQRKFTKTSAPSSSLRQSTMDSLYEFGETSRHEPAGKKEQDNVELRKTSRSFLPFDMSGQEPPFCTQEQVDKCSFGTLADDEMGYDNKPMEKSSNLERQTELSCVICWTDFSSTRGILPCGHRFCYSCIQGWSDCLASRGKVSTCPLCKASFTWISKVDEAGTLDQKVYSQTIPCEASTDVFVLGSEGYDFSGPTSGQGACYQCHFREPEELLLSCHVCRSLWVHSYCLDPPLTPWTCMHCRDLRVLFHRYR

SEQ ID NO: 65541 - protein, 165 aa, Zea Mays
MPDSSSSAGTGGMAPSSSAAASIAALAAAAASGDGSDDSGAANNNGALPLPLPPPHGVEDNNSPAELAGAGGTSRAVARRVAAAGASPAAAARRGAAVNAQAAGGAGPSCQVERCSADMGVEKRYNRRHKVCDAHRKASVVLLAGLRQRFCQQCSRLQLFFLGHG

SEQ ID NO: 65542 - protein, 699 aa, Zea Mays
MDVASTIPFQGLAYLITGEVRENAVYSMLGVLRLWRLRRVKQFFTRLEKDIRFSYFWIRSARLVAVTLFLVHCAGCLYYLIADRYPDRQKTWIGAVIPNFRQASLRIRYISSIYWSITTMTTVGYGDLHAQNNVEMIFNIFYMLFNLGLTAYLIGNMTNLVVEGTRRTMEFRNSIRAASSFVGRNHLPPRLKQQILAYMCLKFRAESLNQQQLMDQLPKSICKSICEHLFVPVVKDVYLFRGVSREMLLSLVTKMKPEYIPPKEDVIVQNEAPDDVYVVVSGEVEVILFDGIYEQVQATLGARDIFGEVSALSDRAQAFTFRTRTLSQLLRLKQATLKEAMQSRPEDSVVVIKNFLKHQVEMHGMKVEDLLGDNTGEHDDDANVLTVAAMGNSGLLEDLLRAGKDADVGDAKGRTALHIAASKGYEDCVLVLLKHACNVNIRDAQGNTAMWNAIAAGHHKTFNLLYQFGRASNPRAGGDVMCLAARRGHLGALQELLKLGLDVDSEDHDGATALRVAMAEGHADAARFLILNGASVDKASLDDDGSGSGSGSGAARLAMSPTELRELLQKRELGHSITIHDSPAVVPNGGSSGHSRPGRLQSTSSDSQRWPRVSVYKGHPFLRNRTSEAGKLINLPGTMEEFRAIVGEKLKVDAEKALIVSDEGAEIDSIDVIRDNDKLFMVTEEDLRRLASMDWLSCE

SEQ ID NO: 65543 - protein, 116 aa, Zea Mays
MAMKRPARSDPHLPPEEAARVEAEVRSYFDSVAPRRPAKPPRSDPSVDTFAEPAAVDAGDHDLPELRKLRDLEAKPQKLVLDGGGGDVDGGEDYVETRYYDGLIGIDKQHHTKRVW

SEQ ID NO: 65544 - protein, 521 aa, Zea Mays
MPRKASSNSDARAKSRKRKRAAASASPSKQPDDHSDDSDTAAAANGDDETSRAASVNGGGGTLAGVGGDDDPVLDLRAAEVLSSSAEPVSAFPAAVRRAVSRPHPSVLAVIAAERAAASSDDAPVTPASVPVLENISHGQLQVISAMLPDHPSLSYDPDKPSTYVCTPPPLMEGCGVHKQFYDKLHIVPRHSDWFVPQTVHRLERQVVPQYFSGKSQGQTPEKYIMLRNKVIAKYLERPGKRLVFAECQGLVTSTPELYDLSRIVRFLESWGIINYLATGSVYRGPRTASSLIKEETTGELQLVSAPMKSIDGLILFDRPKCSIQANDISSLVSTSSAPFVVNHDGDSANLDEKIWERLSESSCSFCSQPLPSMHYESQKETDIALCSDCFHNAKFVTGHSSLDFQRVDAMKDGSDTDGDRWTDQETLLLLEGIEKFNDNWNHIAGHVGTKSKAQCIHHFIRLPVADGLLENIEVPEASLPSGMQSSGFLHSDSNGSTSANLETRFHSLILLIQSCHWLHF

SEQ ID NO: 65545 - protein, 241 aa, Zea Mays
MDRGERLGRALDAFGGNLWALVDAALDAAARDRPDELRARRDSIVERLYAAAAGCSNCAGRPPSVAALAAAGLEEEDGEEAAPASPWAEADAQAGGAEAQTEVLGAGEPDLESKIVAIRDFLEDPNQPENELVSLLQNLADMDVTYNALQETDIGRQVNGLRKHPSAEVRRLVKQLIRKWKEIVDDWVRLDNSGGDGSASVMTDGDSPHKIQGRSHQSPRVSGFQYSPSPQRFMCSLLLKF

SEQ ID NO: 65546 - protein, 147 aa, Zea Mays
MKTAAAICLHWSCEKAMVQIVQQINHDGEVNRARYMPQNSFVIATKTVSAEVYVFDYSKHPSKPPLDGACNPDLRLKGHNSEGYGLSWSIFKEGHLLSGSDDAQICLWDIKANSRNKSLDALQIFKIGKLYFLSLMSTSRKTICICH

SEQ ID NO: 65547 - protein, 398 aa, Zea Mays
MANPLAGLQDHIKLARDYALEGLYDTSIIFFDGAIAQINKHLTTLDDALVRTKWMNCKKAISEEVESVKQLDAQLKSLKEAPGTRRSSSPPIRSNKSFVFQPLDEYPTSSPAPFDDPDVWAPPRDTPTRRPTRGQSSARKSSQDGAWARGSSRTGTPSRSSKPNGSKGGSVVKSSTASNSSVRKGKPSSSKADSASSDAEEGKSKKGQYEGPDMDLAAMLERDVLDSTPGVRWDDVAGLSEAKRLLEEAVVLPLWMPEYFQGIRRPWKGVLMFGPPGTGKTLLAKAVATECGTTFFNVSSATLASKWRGESERMVRCLFDLARAYAPSTIFIDEIDSLCTSRGASGEHESSRRVKSELLVQIDGVNNSSTTEDGQPKIVMVLAATNFPWDIDEALRSG

SEQ ID NO: 65548 - protein, 488 aa, Zea Mays
MAEDNDRKPLHIVHICSEMYPVASCGPLSAYVASLSCEIQKKANLVEVILPKYTSINLDGIHGLRRSEAEYESYFGGLWHKNKIWTGTSSGVGLVIIEPSQLSYFSRDMLRGYPDDFERFSYFSRASLDYIVKSGKRPDIIHIHNWETAIVAPLFWEIFAHQGLGNTRILLTCQDLNSECLEEPNKLEMCGLDPRKLHRPDRLQDTNKTHLVNILKGGIVYSNKVVLMSSTHSKDALIQGSRHELQSTLAAHREKILVASYGLDGELWDPFKDIYLPRRYSANDIEGKSICRQALRRRLRFNGDSSIIVGCICDDNSDVHSLKEAVHVALHRNTQVIIMETLGSVVNSILQALKGEIKGDKIAFVEAYDEALAHLIYAGSDIILCSSFQDPSLQIAMKAMKYGSVPVQLNFSSDESRESKGHECRNTVMSQYIISTYGDLSLSQALDDFKNDPSHWDRQIKDGMARGSSWDAKCYSLHWEAYSSITKL

SEQ ID NO: 65549 - protein, 349 aa, Zea Mays
MLEKMKDAERLNEANAMYEEMVLKLKTAGVGGIQLNAQQETDGIIRRSEAGYIETPIPSTCTITIRAHDGGCGALMFEHNSDKLISGGQDQTVKIWGASTGALTATLHGCLGSVNDLAVTNDNKFVIAACSSNKLFVWEVSGGRPRHTLTGHTKNVSSVDASWVKSFVVASSSSDRTIKVWDLQTGFCKSTIMSASNPNSLAFIDGDTICSGHRDGNLRLWDIRSGKCTTQIAAHLDVTSVCVSRSRNFVLTSGRDNVHNLFDVRTLEICGTFRAMGNRVVSSWGKPSISPDENCIAAGSSDGSVYIWSRLKNGTPTILEGHSSPVLASAWCGLGALATSDRNHIYIWS

SEQ ID NO: 65550 - protein, 809 aa, Zea Mays
MAAAAPAACKGKRKRHLSEDDVWLLLHRYHPGTILTALQEVAQHADGRRIDWRAVVAKSATGITSAREYQMLWRHFAYHHDVDESVDADDQPLDDDSDLELELEPDPNLTKEALCEASALAKALISGSSQASGHRINLDTHVLNTRNEKIVRVPSEKQLAQSHRVTNVAGPVSNSKQLAHIGPSAGLLDPNGPSKKRKKPKAWSKEEDADLAAGVQKYGEGNWEDILHKCNFDNTRTPDQLSQRWALKRPGGSTKPASTKHASVGLEERSAALKALSLAVGPMRGSSALRSGAYPQSIQHKSTVFAPKMPELRSAVTPSPAPAVPVPVAMPLRVAAQVQAPPHQGHQAPAHAAPPKLLNASNKTRKKQAAQPNPTISPSSIQAAAIAAGGRLATASTAANFLKVAQSKNAVHIRSLGATSLKPSASFKASIVVEHGTQPGGSQHLEPLNASAVHDVSGVAAVNQSGPLAGACSETKKALSTALAPVPCDSEEKEDDSEFCVITIDDLFPEDAKQPETVDTKAKQPQTTGLKANQPENADPKVMQQETMDPKSKQSDTVEVEIVDPKDKDMLEFDQYVASQGGHLNTDDLNKSKCTNSVSQAQGLVGSQQKLIPADGKGSPVTVVGKGKPVTAGVAATGRKTKFPVSHLAAGTPRGIVDTVNANAPNKTLVRRAAIPAPVPAGCQVRKDAMNSKGNQMTPGNAGSGVPASSQTSVAAQAASKANLPSSSSQAKPNNMVVNGGNRLVVNPPSSSQASAAVNDANRAATPQSSNPVNGANNREVNPPPSSQASTAVNGAANKGNVPAAARPP

SEQ ID NO: 65551 - protein, 52 aa, Zea Mays
MHILQYSAHGSRISWCPEWINKQTREYLTSLITSACRRRRQGSEGLRESRRG

SEQ ID NO: 65552 - protein, 84 aa, Zea Mays
MAPQAQEPHGDRARCGARQMQQPQYPTPRVPSARGRAGRRGGCVPTAETPRRSDVATETGSSARRVRAAVARQDLARDRDDRPR

SEQ ID NO: 65553 - protein, 1878 aa, Zea Mays
MKTESSPAGDSEEPLVHFKWRYMVRLIQWHLTEELLVPSVLIEWLSNQLQERDSDDVLELLLPIILGLVDTITLSQTYVRMFVELLVRRLNVDRPKRFSVSSVIAELLRYMVLAVPDTFVSLDCFPFPSFVVPDVYGRGALLKITSGGGILCSKRRDAYRYLSCGYAVSSIQKRAHDLAAVANPSLQARGAAKVVQALDKALVTGNLSVAYFSLFNDLSDALMEERWIKEVNPCLQSSLMWIGTVELSLICSIFFLCEWATCDYRDCRASPSQNVKFTGRRDLSQIHMAVSILKNKMDEMNNLSRPKSSTRITLNKVAKGSLNDACLTAAAVDDSSGLRSNAKNVDEKKDTNDIFESPGPLHDIIVCWLDQHEVSNVAGFTRVDVLIAELIRNGIFFPQVYVRQLIISGITDKNDTMLDVERKRRHHRTLKQLPGSSLFDVLEETRTAEEQQLYEMMSTYSSERRLVLSELSCGHSFYASGRGEYTSSSCIRKQSDLPVASEGDKHGRVLEQVEDVKALLSSLLGFTYPPLVESKLCEIKTSFQESVTSTLTQVETGEAKSGCEDCMRSKGQKLDDSATPFQGFPLIQSGEEDIWWVKKGTKLQESFNVEPVQKSVKQTSRGRAKVVRKTQSLAQLAAARIEGSQGASTSHVCESKMSCPHHEPNNDGDNVKDFDHTRAANVTAIGKSLKRLRLLERRSVSSWLLKSIRQLVDGNGMTASKATNSISILPLQPDDKTASKWRLGDEELLSVLYVLDTCCDSVSGVKFLIWLLVKIRGVGSSGQPGRTYMLMRNRDHQVCQVNEALVFSSLLRYENILLATDILPDVLSALVNRNSMSATTRHPGSTAFAYVRYFLKKYRDVASVAKWEKNFRTTCDQRLLAELDNGRSIDGDLVSSSGILAGEEIDEQVRQKLNGRSSRLVQNMKEIVQRQADGIQRSLKEKKVLAGAAPRNPLTFEKEDSYQIAHDIVLGLVECIRQNGGANPDGDLSIVASAVSAIVVNAGHMIAKHLDFAGGNYQGVNSVATSLNFVRHTLLIHINSLCLLKETLGDRFSRAFEIALAVETSAAVTAAFAPPKMHRNQFQPSPEAHDAYGNHTSELSNSGKGFVGRTAKVSAAISALVVGAVVHGAVSLERMVATLKIKDGLDIMQLLRGLKSNTNGVSHPTGGFRIENSTEVSVHWFRILLGNCRTVYDGLIADILGDPYIIALSRLQRMLPLTVIFPPAYSIFAMVLWRRYIFNCEDPQLYQSFSNAINDITRHQPFREIYFRNTHRLYNLLASDVGDSKFAAMLESHSPDRNSKILPFIPLRARLFLDAIIDCNTPTIQGDGASEPCDPKDNELKLSERLMQLLDTLQPAKFHWQWVEMRLLLDEQALMEKVAAGKTTLESLRSLSPKAEGFALSDSEKGFTEVILSRLLARPDAAPLYSELVHLLGKLQESLVMDVKWILQGQDAILGRRSTRQQLVHIAQRKGLSTKAQVWKPWGWSSLLSDAIPNKTAKRKLEVTSIEEGEVVDDTVDAKRTTKTPPHSVDRSFEGIRSINKYLTEKALAELVLPCIDRSSADIRGNEVPSNKSSGRRGIRGGSPNIGRRAPVGNDPSPPSASALRAALWLRLQFIIRLLPVIMADRSMRHTLASAILGLLATRMIYEDADLPLPPTNATALRRDVDSLLEPPLDVLLDRPGESLFEKLLCVLHALLGSYKPSWLKSRSASRSSIKSQRDFSAFDNEAAEGLQSALDHMELPETIRRRIQAAMPLLPPSRRPCMQCQPPQLSLAALSPLQSSTSGVGPQQKSSCVSWVPTNVSVRSKAALPSHDPETEVDPWSLLEDGTNCPPSTASGSNGSSGVTGDHANLKASSWLKGAVRVRRTELTYIGSVDDDS

SEQ ID NO: 65554 - protein, 159 aa, Zea Mays
MFGLWWMGSWSCPALGILQSLHKYPSYTNNTMHASGNNAPKAQGNVSAKNRSSSKPPLGKPNRKDHRKRNRPEDDELDPMDPSSYSDAPRGGWVVGLKGVQPRAADTTAAGPLFQQRPYPSPGAVLRKNAEVATHGKKRGGMAPITKRGDGSDGLGEAD

SEQ ID NO: 65555 - protein, 135 aa, Zea Mays
MSLDVLVDVNFVIYSCLIPGCSATISTYGSTCTFSESILGSCGFHTGLFTSPHLMDVRERFQLDGENFEVLLVVLEQVEAYFRFLALLAFKIFSAEQVDVAILEVGLGGKFDATNVVVSSRECPVVSKYKASVRT

SEQ ID NO: 65556 - protein, 608 aa, Zea Mays
MAQGRDPEELFEELWRACAGPLVELPQTNERVFYFLQGHLEQLQEPTDPALLAEQIKMFQVPNKILCKVVNVELKAETETDEMYAQITLQPEPDQVDLPQLPEPPLQETSRPVVHSFCKILTPSDTSTHGGFSVLRRHANECLPALDMSMPTPTQELITKDLHGSEWRFKHIYRGQPRRHLLTTGWSTFVTSKKLIAGDAFVYLRSETGQQRVGVRRLVQKQSTMPASVISSQSMHLGVLASASHAIRTHSIFLVYYRPRLSQSQYIVRLNKYLESSKIGFDVGMRFKMSFEGDDVPIKKFSGTVVDKGDLSPQWQGSEWKTLKVKWDEATNLNGPERVSSWEIEPFDASAPAITMPVQPSMKNKRPRETAEGLDIHALEPAQEFWLSGRPEQHEKTSVSSSEPKHQVAWTSERAGYSAMSSSICQNSAVTGSWFKGFNSSGSHPSLPEISQKLFQVTSNDARVPPWPGLSAYHADEPSSKLSCNTALCSYQTEEVAPRFSNAVEEEKKEPGMFRLFGVNLINHARSSATADKTSVGAGETSARAAGSFEDSAQLSRVTKDHTHMVNGSPREIQSHQSCSGRSRIKVTSFKFLSFYLSCRVTCVFDLC

SEQ ID NO: 65557 - protein, 93 aa, Zea Mays
MRRPVALFSIVKTSSTSSLHWGCLTILISCWGRKARCLVVLPLVLVPSWLIVLAALLLLLLLLRKLPLILLLMLTLMLVSLGVTLLELLGWIA

SEQ ID NO: 65558 - protein, 267 aa, Zea Mays
MLCFGLASSLRDALAAARPDHISLAERSPVEAPCRCLALLPPHGLLPHGVGIPPSDGCAPQACSTRALPDLQLPCARPRHMVLCCPWPQLSSSLHGRAGAPSSSDACFLSLATTPSCSRCPCLFFLRAELHSWPCPGSPVRGLGPRLSLVGLAVSSTPDICARCRLAVLGSPVDNTTSTLTGCLLFLRSPIRDVVHPRRQAAQRSSTFGAMHKSESPSFLQTPIEFVYGTKEDDRASDVVPPTRCSRWTNQGRMDITSGCSPSEYLP

SEQ ID NO: 65559 - protein, 945 aa, Zea Mays
MMASSQEKATSGVLRNAAALLDEMQLMGETQGAKKVINSELWHACAGPLVCLPQRGSLVYYFPQGHSEQVAATTKKIPNSRIPNYPSLPPQLLCQVHNITLHADKETDEIYCQMTLQPLHSETDVFPIPTLGAYTKSKHPTEYFCKNLTASDTSTHGGFSVPRRAAEKLFPQLDYSMQPPNQELIVRDLHDNMWTFRHIYRQPKRHLLTTGWSLFVGAKRLKAGDSVLFIRDEKSQLLVGVRRATRQQPALSSSVLSTDSMHIGVLAAAAHAASSGGSFTIYYNPRTSPSPFVIPLARYNKATYLQPSVGMRFAMMFETEESSKRRCTGAIVGISDYDPMRWPNSKWRNLQVEWDEHGYGERPERVSIWDIETPENMVFSSPLNSKRQCLPSYGVPGLQIGSVNMSSIPRAQGNPIGNLQHMPGMGSELALLLLNQSGQNIGSPIACQQSSFSSIIQNAKHSYFPPKTFGASTASMKQESMPSTEAQPQLNALGIQRSDRVSCEVQTASDSNPAQEMSVKPRAPRSTDSHSSQSISDQNSKGEPRTKTRRSKKSSYQKTISDKSELCSVPSQICDDKKHGSEPRLADCEAEQATCGNNEESSGALTHGDFAGELQVQQQVEQHELLAPPKIESSKSPDGGKSVSSFPNQGCIPQFFEGLDWMIPPSYYQDSNGIQSVTASDNIFNPSEGIPSTMNADALDAFQTSCLSECFPSSIQEFIGSPDINTLAFMSPEMQQLDAGSNLPSTSNSYVQMSFSEESHSASLSGLHMEAIHINSSSCSQPLATGSFDAGAFPKLSNIRECQPLPLQEIHTSSMGTPSCSMDAAAEYGTDRSAKQMKPPVRTYTKVQKLGSVGRCIDVTRFRDYHELRSAIACMFGLQGKLEHPGSSDWKLVYVDYENDVLLVGDDPWEEFINCVRCIRILSPSEVQQMSENGVHVLNDCIQIA

SEQ ID NO: 65560 - protein, 252 aa, Zea Mays
MDSPPSSTCRGTTTSGCAARAAATELGVDTGPRTIGDLGIIPLFSWYHKSFDKEKDVSSVRVPSLEMACKDFHACQWPSDLTNDDEALALYFDKLNDKNHDATEEVKSSSKQILTFSHFVPRQELCPEKRMLYYPYLPKVIGSDFLERRLRDIHSNRKDGGACHVFGHTHFCWDSVVDEIRYVQAPLAYPRERKRRMNGEGWLPFCVYRDGFNPEIYPALWSDYYNKNKREPENTQLAPWVASHFARYHKFH

SEQ ID NO: 65561 - protein, 119 aa, Zea Mays
MLEKGAFDKRTADFLWMMIFGAISLLSFYLPWAMLLLDVIFGSSLMPGLLGIMVGHLYYFFAVLHPLATGKSYLKTPKWVHKIVARFRIGMQANSPVRPPANGNSGSGVFRGRSYRLNQ

SEQ ID NO: 65562 - protein, 278 aa, Zea Mays
MDRVLLSSHLPSHAHANTRLQQGPGGLNSIGFAVIKKGCLKLRCYAIGDELGGPGRFNFFVSDAEGDPDKPTDGFSSIDQAIGALREGKFVIAVDDENGDNEGDLVMAATLVDQKSVAFMIRNGSGIISVGMEEEDLTRLMIPMMSPITEIEDITAAASTVTVDARVGISTGVSAADRAKTILTLASSDSKPSDLRRPGHIFPLKYRNGGVLKRAGHTEASVDLVALAGLRPVSVLSTVMDPRDGSMAGVTVLQQMAMEHDIPIVSIADLIRLVYPKV

SEQ ID NO: 65563 - protein, 427 aa, Zea Mays
MSVLLQKNGEIYCYGVDSIDIETQKVVRFISKVTLLASGGAGHIYPTTTNPPVATGDGIAMCHRAQAVISNMEFVQFHPTALSDEGLPIKPKTRRENAFLITEAVRGDGGILYNQSMERFMPMYDDRSELAPRDVVARSIDDQLKKRGEKYVLLDISHRPRDKVLAHFPNIAAECLRYGLDITRQPIPVVPAAHYMCGGVRAGLQGETNVKGLYVAGEVACTGLHGANRLASNSLLEALVFARRAVQPSIDLMVDADGDARPSLVARWARPTLPRSVLGDSVLSDIVGRTRQARMELQSVMWEYVGIVRSTGRLKQAEWRIGDLESEWEEFLFRRGWKPTTVGVEVCEMRNLFCCAKLVVRSALARRESRGLHFTEDFPYLEESRRKPTVIFPAAVQELTWSSKPLQRQLQADDNACSSSGWALGIR

SEQ ID NO: 65564 - protein, 122 aa, Zea Mays
MPEDEAAKYCAENQITSMIPKIIKTGFAAIHLIYFFTAGPDEVKCWQIRRQTKAPQAAGAIHTDFERGFICAEVMKFEDLKELGSESAVKAAGKYKQEGKTYVVQDGDIIFFKFNVSGGGKK

SEQ ID NO: 65565 - protein, 145 aa, Zea Mays
MRSESSSHGLDEFLAEVQSLTKVHHRNLVSLIGYCWEEDHLALVYEYMPQGSLFDHLRGKNGVSEALNWRKRVQVVLEAAQGLDYLHKGCSLPIVHRDVKTNNILLGQNLQAKIADFGLSKTYLSDTQTHISVTPAGTAGYMDPE

SEQ ID NO: 65566 - protein, 633 aa, Zea Mays
MELLSGGALAWQQYRALLRKNATLTWRNRRSAALQLFSSLVFIFLIFCIDRAVRSRFSSTTAYRNVPDPEALVAPPIPPCEDKFFIKSPCYDFLWSDGGSARIRGLVDAIRRNNPGRPIAPEKVLGFRTPDDVDAWLFQNPMRCPGALHFQDINATQIKYGIQTNSTPVARRGTYEDPTFKFQIPLQVAAEREMARLLIGDPNFSWTVGFKEFAHPATETFSTIAQAGPTFFLAIAMFGFVFQISALVAEKELKLRQAMSTMGLYESAYWLSWFTWEAFLTTLSALFTVLFGMMFQFDFFLHNNFGILFLLFFLFQLNMLSFAFMISTFVAKAASATTVGFAIFIIGFLTQLVTTFGFPYSSDYKKLYRTLWSLFPPDLFAKALNILGKATATPEDKGFSWNQRGECPSFETDCVITIDDIYKWLISTFFLWFVLAIYFDNILPNVNGVRKSVFYFLMPSYWTGKGGKMEEGGLFSFFGSSRPADDATPTDEDVLAEQNLVKEQAANNAVDPNVAVQIHGLRKTYPGTFSIGCCCKCSKSKPFHSVKGLWVNLEKDQLFCLLGPNGAGKTTTISCLTGITPITGGDAFIYGHSVRSTVGMSNIRRMIGVCPQLKSTWNCLPASRDCIQQQSHQ

SEQ ID NO: 65567 - protein, 748 aa, Zea Mays
MATNTKRAYKLQEFVAHASNVNCLKIGRKTSRVLVTGGEDHKVNLWAIGKPNSILSLSGHTSAVESVGFDSTEVFVAAGAASGTIKLWDLEEAKIVRTLTGHRSNCMSVDFHPFGEFFASGSLDTNLKIWDIRRKNCIHTYKGHTRGVNAIRFTPDGRWVVSGGEDNIVKLWDLTAGKLLHEFKCHEGQIQCIDFHPHEFLLATGSADKTVKFWDLETFELIGSTGPETTGVRSMTFNPDGRTLLCGLHESLKVFSWEPIRCHDTVDVGWSRLADLNVHEGKLLGCSFNQSCVGIWVVDLTRLESYATGTSTKLNGHSELKTVSSGTMPLQNDSGSRANIGQSSVLQSSENNLKASSGRLSVSQNSDSAPKETKSTPSSGLVPSTPQRAGFSSNNRSVGNSTFQSGGTTTTLKRSSLRSNSASNVHNFSKADIVPVIVPRASSGGELVTGSRSDAGDVAPVLPKVTRRADPSSDSRKESNDVEPVIPRASSTMEIASDSAPISTSKSGRRLEAAPDSKKESADTAPAVPNPRANARMEMASDSAPALLKTNKKLDSGTDSKKESADAVPVILISDSRREPSAGRVSPFRIQSRYAELRKLAHAKIDRGSKTTGTDDFNCQIFLPRKNGVFQTISSEETRKDVKCGPVDRTEFSNSSEPNASVRSENYVSRMRKPRDNCYIEVSRKGRARSSVCNWEGRDQSPSHEEPMTASSSLAPTGRPNSSVCLKQAINLFLLYVLVLHFFNSQRL

SEQ ID NO: 65568 - protein, 1109 aa, Zea Mays
MTTSPPPAEQEQQEEEEVLVPHGPHQELPNGAQPMEVVPAEPAATVENQQIEDPPISRFTWTIENLSRVSTKKLYSEIFVVGGYKWRILIFPRGNNVEFLSMYLDVADSGVLPYGWTRYAQFSLSVVNQIHNKFTIRKETQHQFSARESDWGFTSFMPLGELYNPSRGYLVNDTCIVEAEVAVCKVVEYWSYDSKKETGYVGLKNQGATCYMNSLLQTLYHIPYFRKAVYHMPTTENDMPSGSIPLALQSLFYKLQYNDSSVSTKELTKSFGWDMHDSFMQHDVQELNRVLSEKLEDKMKGTVVEGTIQQLFEGHHMNYIEYLQLDVKGCQDVYASFDKYVEVERLEGDNKYHADKHGLQVLEPSEASMDHNGRQHAHRYWMSSIPCRCVKDAKKGVLFIDFPPVLQLQLKRFEYDFMRDTMVKINDRYEFPLQLDLDRDNGKYLSPDADRNVRNLYTLHRFKFDDERVTKEDAKRALEEQYGGEEELPQTNPGLNNTPFKFTKYSNAYMLVYIRESDKDKIICNVDEKDIAEHLRIRLENDREEKERRKKEKAEAHLYTIIKVARDDDLKAQIGKDIYFDLVDHDKVPSFRIQKQMTFAQFKEEVAKEFGIPTQFQRFWLWAKRQNHTYRPNRPLCPQDEAHTVGQLKELVNKAHNAELKLFLEVELGLDLKPLPLPDKTREDIFLFFKLYEPEKEQLRYVGRLFVKASGRPQDILLKLRMLAGFSQDDDIELYEEIKFEPNVMCEYIDNRLLFRSCQLEDGDIICFQKPSKPDSADRYRFPDVPSFLTYIRNRQVVHFRSLEKPKDDEFCLEMSKIFTYDQVVEKVAEKLGVDDPSKIRLTSHNCYSQQPKPQPIKYRGVERLLDMLIHYNQTSDILYYEVLDIPLPELQALKTLKVTYHHATKDEVSVHSIRLPKNSTVGDVLNDIKTKVELSHTNAELRLLEVFYHKIYKVFAPNEKIENINDQYWTLRAEEVPEEEKNLGPFDRLIHVYHFTKDTQNQTQVQNFGEPFFMVIREDETLSSIKERIQKKLKVPDEDFSKWKFAYISLGRPDYFEDSDTVALKFQRNMYGAWEQYLGLEHPDTAPRKAHTANQNRHSFERPVKIYN

SEQ ID NO: 65569 - protein, 52 aa, Zea Mays
MYSFVLVFCLCLAILKGDLLDELKLFKWILLFSIFLTSIHPIYLNCLLLNFM

SEQ ID NO: 65570 - protein, 63 aa, Zea Mays
MHFEYIRTCNKCNSSYVITFSFRNEKNIFVKVFRSYLRTVCIECDYCNMHVWWEILGMMSSSC

SEQ ID NO: 65571 - protein, 558 aa, Zea Mays
MELLLFGGGVFAELQWLIARQEYSHSSVLGIQDNRALKLPVCVNFNLQNGGAQEWADESRRLSLSKAGNSNGSTHLGSGIFHHEPLEDFKSSNQSLLHSVRQRMAPNSLANRHVNTELAKHHAIKHAAVAVSALTSVVNDDLKSVKRPKESEVEVHWSNGPKFHSHIPKISEVETSLRFDENATDGYAKDVNECSPEETVQPSRTRAPSSQESLDARKALSTIYDKVLVVDNVMSARSVVQLLTTKYRNYIHACDTEVANINVKQETPVGHGKVTCFSIYSGTKGAEADFGNGKTCIWVDVLDGGPDVLMEFVPFFEDSSIRKVWHNYSFDSHVIENYGIKVAGFHADTMHLARLWDSSRRTDGGYSLEGLTNDHRVMGVVPKELQKIGKRSMKTIFGRKKIKKDGSEGKITAIEPVEILQREDRELWICYSSLDSMSTLRLYESLKSKLERKPWTFDGYPRPGGSLYDFYEEYWCPFGAILVKMETAGMLVDRAYLSEIEKVAVAQRESAADKFRKWASKYCPDAKYMNVNSDTQIRQLFFGGIENIRQEGSKVSHN

SEQ ID NO: 65572 - protein, 676 aa, Zea Mays
MEKLGRPTSVVKLITGRLKDADVVFIDALRAATCGFDFRRIVESHLCIPVVYFLSRDYGVTGDVSEALQRTVWAATYVVRKPLDAGELSRLWKVIKWSKFLLRRAWPEWPRGSRVRPAVVGALLPGSSTVDGRWEDDDDDGREHFRAVRAGRGRRRKLGDRQYHGGRSSGRGGGGGVAVGIGIGRRQPTERLEQMNLTGWQQENDDDDGVFPIHQQPAQQNRPGVQTMDDVQNQQHGRSLFMQPGPQTLNVPHNNPMISPDAGWPSSSNVAAFAGASNTTGPTLLQGVYQAPAARGARAASPAPHAVYAPPAPGLRPPVYQQQQQPMAPLYDFGDMVAPPAAVPLPIPTMAATSGHQPQFTLNHHHQQQQEEEMFAPRRQGGWMGSRRRRETGPIMLSFQQPQAADPFTPMAGSGTAFGASSPTGATDAGAYGAAAVAQAQLQSPNAGAQPADSSFDDVLRAMMEMDYYANNCSAEALMAPATDELAGMQAAAALGSSGNYNAGPFMVTDANGGNGTPFMALALAPQDPAAPTGNQNQVQVELGAPDIYGGSLLVGSHQGGGTSAMFNGDGDMAPMFPSNEYGATANAMFSLDALLDFDDGVPTYPEGHQVAAADSTTASNATGIMSNGGESGGSGPSWNMGAAAADEGLDMLEEFLMEDNESGFLLPQDMNNGLQ

SEQ ID NO: 65573 - protein, 279 aa, Zea Mays
MLGQNLYELLKRNHLRGLKLKYVQAFSKQILDAMVVMREAGIIHCDLKPENILLAPSVTTAAEVKVIDFGSACLEGKTVYSYIQSRYYRSPEVLLGYPYTTAIDMWSFGCIVAELFLGLPLFPGASEYDVLQRMMKILGGQPPDELLREAKNTARFFKHVGSIYPGNEAPTGLCSAYKSLSEEDVEVRDSKKPQMGKWYFPHLKLDKLICTYPWNNSELTETEKMDRLGLVDFLKGLLEFDPNKRWSPLQALYHPFITGKSFTGPYEPVPETTRIVTCC

SEQ ID NO: 65574 - protein, 394 aa, Zea Mays
MTGHASLLLPALAAVLLCCPLAQCGQQNYTSMFSFGDSLTDTGNLLVSSPLSNHIVGRYPYGITYFHRSTGRCSDGRLVVDFLAQAFGLPLLQPYLQSRGKDLRRGVNFAVGGATAMDPPFFQEIGASDKLWTNLSLSVQLGWFEQLKPSLCSSPKECKEYFSKSLFLVGEIGGNDYNYAFFKGKTLDDAKTYVPTVAAAVTDATERLIKAGATHLVVPGNLPMGCSSAYLTLHPGRNGSDYDAAGCLRTYNDFAQHHNAVLQRKLRALRAKYPQARIMYADYYGAAMSFAKNPKQFGAAADVLRRRRAVQLQPEGELRRAGVQRVRGPVGVRQLGRRAPDGGRLPRHRRQHPQRALHQPQAPLIRTPVVEARRPSIGSRSSYNCSGANNVAGL

SEQ ID NO: 65575 - protein, 182 aa, Zea Mays
MPTSAKGQREDEVEPQHLGSILAQNHPVDGGTPQATHLIGGAVTVPATHLIGGTVMVETGHTLHMTEGDHTLLTAGMNHIPLTMAGDHTHLTTADGIVQGPHTATEDAGHLLFRHTTAGTAIPQNPRDQQAILLRKGVKGNPRVADTLARVVIQGKATLIAAVRTPGLCPGSAQLDLRGVSS

SEQ ID NO: 65576 - protein, 246 aa, Zea Mays
MNATLVLPELDTNSFWHDESGFVDIYDVPHFINTLKYDVRIVMSIPKITAQGKTKKLKAYKILPPRDAPVTWYRTTALERLRKYGAIYLTPFSHRLAEKIDDPEFQRLRCRVNYHALRFKPSIMKTSSDIANKLHSEGHFMSIHLRFELDVLAYAGCFDIFTPEEQEILLRHRNKYFPLLLRYWGKYFPGNTPDYRERRLIGKCPLTPEEAFGRGCIWRLSQQPANIAAELHCMAPDSIIVQTNPL

SEQ ID NO: 65577 - protein, 103 aa, Zea Mays
MPHGYHSWPQGTRRLYQCSNISESTVENEAVKHGSRKQGGYGHPTERNCWSVHTGRWSREVTGNRKKDLGNGGRPGTGRSNAAEAVPWFARALGTRHCFVMTT

SEQ ID NO: 65578 - protein, 151 aa, Zea Mays
MLRGWRQPPAASKTGGERRGGGAMAATAAEGVAATALRAVLGRAGMAAERSGCAAEAVRVVAVGKTKPVSMLRQLYDAGHRCFGENYVQEFVTKAPQLPQDTRWHFIGHLQSNKVKPLLAAVPNLDMVEGVDNEKLNLESIPPNVSTLLSM

SEQ ID NO: 65579 - protein, 57 aa, Zea Mays
MGGLLFTHSPPGAEAVLGWMGWGGRELGYKYPGVRSGDQPQQPRGGGSGFCSGGDEE

SEQ ID NO: 65580 - protein, 1648 aa, Zea Mays
MSSIEDRSLLRTTRFARRRVIRCVVASPGCPNRKSRTASPNVKVAAYSNYAPRLLVESSSKKSEHHDSSRHREETIDTYNGLSGSDAAELTSNRDVEIEVDLQHISEEELPGKVSINASLGEMETVDEAEVEEDKFEVDTSGIVLRNVAVREVDPKDEHNAKDVFVVDSSGTAPDNAAVEEVVDEAEVEEDMVDVDILGLDLNNATIEEIDLMEEALLENFDVDSPGNASSGRTYGGVDELGELPSTSVDCIAINGKRRSLKPKPLPIVRFQEQEQIVLSIVDEEGLIASSCEEGQPVVDYDKQEENSTAFDEQKQLTDDFPEEGISIVHFPEPNNDIVGSSKFLEQKQELDGSYKQDRSTTGLHEQDQSVVSSHGQDKSIVGVPQQIQYNDQSIAGSHRQDQSIAGAPEQIQSVAGYIKPNQSIVGSCKQHELIIPEPKKIESIISYNEIDQSIVGSHKQDKSVVSVPEQIQSIVSHSKPNQSTVDSYRQAESIIGVPEKVQSITSYDKLDQSIVGSLKQDEPIISVPEKIQSIVHYTKPNQSIVGLPKQQQSIVHIVEPKQSIDGFPKQDLSIVGISNEFQTKQLATVGTHDGLLMKGVEAKETSQKTEGDTLQATFNVDNLSQKQEGLTKEADEITIIEKINDEDLVMIEEQKSIAMNEEQTIVTEEDIPMAKVEIGIDKAKFLHLLSEEESSWDENEVGIIEADEQYEVDETSMSTEQDIQESPNDDLDPQALWSMLQELAEKNYSLGNKLFTYPDVLKADSTIDLYFNRDLSAVANEPDVLIKGAFNGWKWRFFTEKLHKSELAGDWWCCKLYIPKQAYRMDFVFFNGHTVYENNNNNDFVIQIESTMDENLFEDFLAEEKQRELENLANEEAERRRQTDEQRRMEEERAADKADRVQAKVEVETKKNKLCNVLGLARAPVDNLWYIEPITTGQEATVRLYYNINSRPLVHSTEIWMHGGYNNWIDGLSFAERLVHHHDKDCDWWFVDVVVPERTYVLDWVFADGPPGSARNYDNNGGHDFHATLPNNMTEEEYWMEEEQRIYTRLQQERREREEAIKRKAERNAKMKAEMKEKTMRMFLVSQKHIVYTEPLEIHAGTTIDVLYNPSNTVLTGKPEVWFRCSFNRWMYPGGVLPPQKMVQAENGSHLKVTVYVPRDAYMMDFVFSESEEGGIYDNRNGLDYHIPVFGSIAKEPPMHIVHIAVEMAPIAKVGGLGDVVTSLSRAVQDLGHNVEVILPKYGCLNLSNVKNLHIHQSFSWGGSEIKVWRGLVEGLCVYFLEPQNGMFGVGYVYGRDDDRRFGFFCRSALEFLLQSGSSPNIIHCHDWSSAPVAWLHKENYAKSSLANARVVFTIHNLEFGAHHIGKAMRYCDKATTVSNTYSKEVSGHGAIVPHLGKFYGILNGIDPDIWDPYNDNFIPVHYTCENVVEGKRAAKRALQQKFGLQQIDVPVVGIVTRLTAQKGIHLIKHAIHRTLERNGQVVLLGSAPDSRIQADFVNLANKLHGVNHGQVRLSLTYDEPLSHLIYAGSDFILVPSIFEPCGLTQLVAMRYGTIPIVRKTGGLFDTVFDVDNDKERARDRGLEPNGFSFDGADSNGVDYALNRAISAWFDARSWFHSLCKRVMEQDWSWNRPALDYIELYRSASKL

SEQ ID NO: 65581 - protein, 295 aa, Zea Mays
MTNENNGNGTNPASASGWLGFSLSPHMASAMDEHQHQHQHHNGLFFPSVTAAYGLGGGDGVVAASASPYYTPQLASMPLKSDGSLCIMEALRRSDQQDHHGPKLEDFLGAAAQSQAMALSLDNPAAAASSFYYYGGGGGPGHQHGFLQPCGDLYGGTSAASLVSADDEAAAATAMASWVAAARAESGVLSAAAAAGHHHALALSMSSGSLSSCVTAHPAAPEYGAAAALDGGRKRGGAAGQKQPVHHRKSIDTFGQRTSQYRGVTRHRWTGRYEAHLWDNSCKKEGQTRKGRQGN

SEQ ID NO: 65582 - protein, 1193 aa, Zea Mays
MSHWKEKENAPPLPLYPSGASNPSHLLPCKRPLQSPSPCPPLRRPLVDITGNALEQRGGYGYTTPLPNASRPCGFLLHDDEDDMNEAFLREVDAICEERARSTARKEEKEKEKEKEKKPAEEHKGTGGVALMAAAGTIDAAGTETATLDDAFWEEVSAICEECDAQSAAKSQERTKEEGSLVLSCDDASLPPAISITAEGGEFEDAFWEINAVMEEHNAKAHAKYQEGLKGMEEKDGLLALCGDHDPSVSPVISVAMGGGALVDALLGEVDAAVHDGHADMSAAKGQVEQQDMELEKEEDEACAPKKYNEYLHSLNDRQKEAACNDVAVPLMIVAGPGSGKTSTMVGRVLTLLKEGIPPPNILAMTFTTAAASEMRERIGTVVGKAVAKDIAISTFHSFCLQLCRTHAEKLGRTSEFIIYGHGQQRRALIETERLLENDKNNGVGDTTKQYDGDIKNSFKDKAKKWQKFITQAKASGRTPEDYEKKGDLTGASVLRHYNEILRSCNALDYHDFINSSITLLTNFPEVYKECQDMWRAIVVDEFQDTSAMQYCLLKILASHNHITIVGDEDQSIFSFNGADVSGFDSFRKDFPDHKEIRLSKNYRSTRAIVEAATALIQNNTKRHHPRLVETDNPSGCKITVKECHSEDSQCAFVIDKIIEITSGTAEGCNFGNIAVLYRRQITGKAFQVSFRNRKIPFNIHGVAFYRKKVIKAIMAILRTTLPGCDDGPWRQAFKALLPGDKEEKKKIIYHVQKISLARTCSFLTAASDIFSAKVSGTFKRAQITQGRKVLSTLDSLSKLVEKEQSVSVIISSAGDMLPQKYLLEKRAVVDVDNGKLLNEDSDIRSVLQFLMDDVSDFLSTHFSSSMERSKTDEKGCASTLKAFIDYISLRETENFRSRKEENKNSITLTTIHQSKGLEWDVVFIVQANDSEIPLLHEYNGSVKEAGSTLEEERRLLYVAMTRARKKLYILHVTIDSNRQLLQPSRFLREIPDHLLEVQGEEPLRKMPERPSGDVPFDDSEVDTSIGKPIMGPNEASSYPEQAQACLANDFLRRFDIDDRSVVSHIFHHWGKKQAFQNPKRLLEKISFVIDERLRGKGYKRKDVLRKLKSFLSGDEALGYAQYVIKWEQIPIEKRNHLIRERQEHFQKQRIENSMGSSEPTAKQISYLRSLGCTITPTSRLHASHLIEKYKSL

SEQ ID NO: 65583 - protein, 214 aa, Zea Mays
MLDYLCFYVQHNERGSAGQGGRHYDRQASDYGRQREHLSDRDKQKTERHSLQGKIELDQQKKDGDSTWKHDGFFQLEEAAPLAKKRPPFQEMKIQESADTVTEPDSRSRNYQARGYGNHRPFLRPDDRGFRRGFPDHRSDGQRNGHDIRGRFSVRGGMDRDRFNNSYGGRSNAEQASGDQEEKWKHDLYDQTNRSPPPKTEEEQIAKVEALLAL

SEQ ID NO: 65584 - protein, 188 aa, Zea Mays
MIKLKLKAVYMYAAGFYTYSIFALLFWETRRSDFGVSMSHHIATVVLIVLSYIFRFARVGSVVLALHDASDIFLEIGKMAKYSSCEWLAVVAFLLFVASWILLRLVIFPFWILRSTSYEVLLTLDKEKHQFYGPIYYYVFNCLLFSLLVLHIYWWVLIWRMLVKQIQSKGHVGDDVRSDSEGEEEHED

SEQ ID NO: 65585 - protein, 815 aa, Zea Mays
MPRTRFPQSRNWKYQHEQPVKMRKIDPIMTADGMPIEEMNEDYLCAKLHLVDLAGSERAKRTGSDGLRFKEGVHINRGLLALGNVISALGDEKKRKEGAHVPYRDSKLTRLLQDSLGGNSKTVMIACISPADINAEETLNTLKYANRARNIQNKPIVNRNPIADEMKRMRQQIEYLQAELVSARGGATSDDVQGLRERISWLEQTNEDLCRELYDSRNRSQNDPCEPEIQRTLNGFTKSEGLKRSLQSTDPFDVPMADSVRGNPKDIEDEVAKEWEHTMLQDSMGKELNELNRQLERKESEMKMYGCDTVALKQHFGKKLMELEEEKKAVQQERDRLLAEVESLSADGQTHKLRDAQLQKLKSLEAQILDLKKKHENQIQILKEKQKSDEAAKKLQEEIHFIKAQKVQLQHKIKQEAEQFRQWKATREKELLQLRKEGRRNEYERHKLQALNQRQKLVLQRKTEEAAMATKRLKEILEARKSSARDSSAGSNGTSQGYNMGERSLQKWFDQELEVMVHVHEVRNEYEKQSQLRAALGEELAILKQEDIRAGGSSPQRGKNGNSRTNTLSPNARQARIASLESMVTISSNTLVAMASQLSEAEERERAFSGRSRWNQLRSMGEAKSLLQYVFNVAADARCQVKEKEVEIKEMKEQMTELVGILRHSESRRREMEKQLKQREQTTPMATTPPKSGNGTTKHSADDPNTPLSPVAVPAQKQLKYSAGIVNSPSKGVAAIKKEQLKMVPIAQLSAGKRVSIAGHSGKLWRWKRSHHQWLMQFKWKWQKPWKLSEVIRHSDETITRIRPRPPLLPHKPHN

SEQ ID NO: 65586 - protein, 55 aa, Zea Mays
MSDEQMALARSLLFTSRSVQEVPRSGGLMATIGTLASAVAQSVSGPVDISLVWTT

SEQ ID NO: 65587 - protein, 193 aa, Zea Mays
MRQWFARICARGWCCGGGSKQHSCLWGGDNEAARLKVQDDEQQQRRRRRRPWFRHGSGSAGCAIGIKTKGVTMTALLAKATATALLQHPMLIAGEIEIKGVELQESCSLSFFSMVGIFIGIIQLFSVDVYKKIVSKNKMLLFHEGVIETETVGTRVKESEAVLVEKEVELIDEPQIQESPPVPALLDDEVDFA

SEQ ID NO: 65588 - protein, 137 aa, Zea Mays
MGYFLQKIQRQGGLSRRFSNVSYYGLTTPPYKLDALEPYMSKRTVELHWGKHHQDYMDGLNNQLATSPLYGYTLEDLIKKAYNNDNPLPEYNNTAQDDKLTYVTNFMDHLVSWHTVTLRMMRAESFVNLGEPNILEA

SEQ ID NO: 65589 - protein, 130 aa, Zea Mays
MASPSSSPSRKALSKIACSRLQKELAEWQVNPPAGFKHRVTDDLQRWVIDVAGAAGTLYTGETYKLQVDFPEHYPMEAPQVIFLHPAPMHPHIYSNGHICLDWSTGYAKKFLEILLTNHDSMRWQLSLAP

SEQ ID NO: 65590 - protein, 105 aa, Zea Mays
MPRLLLPSPSPRPCLNDSVRRPPLSKYRFFLPRTRRRPSPRLGVRMAEMTKVGSAGEPAEVGVSMESDPIVGGEAPSRPGWEASRWAPVEAALNRMCTTGLGQII

SEQ ID NO: 65591 - protein, 125 aa, Zea Mays
MAVWRGARATELQTTSRMAVWCGDASRALCGVRPSRARRRSAGKCLENAPAPTRHQAAAATATTTVPPARDAHAHLSDPHPSQLVFHGESNGEGPPPPYLLGPFPAKRSAYKQALELPFSTGFRQ

SEQ ID NO: 65592 - protein, 122 aa, Zea Mays
MAEAPASPGGGGGSHESGSPRGGGGGGSVREQDRFLPIANISRIMKKAIPANGKIAKDAKETVQECVSEFISFITSEASDKCQREKRKTINGDDLLWAMATLGFEDYIEPLKVYLQKYREME

SEQ ID NO: 65593 - protein, 233 aa, Zea Mays
MLVDALIEANDYLGISLHAHDPEDFWKLDDTIIKTIETAPNNELKKAKEIIQRIRRRELYKIHHHLIPYSYLVSTNMRNGVNLPNLRNGPMMHHHILDGFCNQYSVPKDKLEHFKNITAQDIVCSQKSSEVLLKEEDVAVSNVKIDLTRGKDNPLESIKFFKDFGCDEKFPITDDRVSHLLPAYNEDRIVRVYAKKPELVDVVSEAFENLQMRMYGEKTQVHETPKRKRIRSN

SEQ ID NO: 65594 - protein, 1192 aa, Zea Mays
MELDLIKQYSQVERIFADRVSKADGDDLVPEYLVKWQGLPYAESTWEKDTDIDFAQDAIDEYKAREAATSILGKTVDFQRKKSKASLRRLDDQPEWLKAGKLRDYQLEGLNFLVNGWRNDTNVILADEMGLGKTIQSVSMLGFLHNAQEINGPFLVVVPLSTLSNWAKEFRKWLPNMNVVIYVGNRASREMCQKHEFFSDKKGGRHVKFHTLITTYEVILKDKAVLSKIKWNYLMVDEAHRLKNCEASLYTTLLEFSTKNKLLITGTPLQNSVEELWALLHFLDPVKFNSKDSFVERYKNLSSFNETELANLHKELRPHILRRVIKDVEKSLPPKIERILRVEMSPLQKQYYKWILERNFQNLNKGVRGNQVSLLNIVVELKKCCNHPFLFESADHGYGGDSIGDRNKVERIVMSSGKLVLLDKLLVRLRETNHRVLIFSQMVKMLDILAEYLSLRGFQFQRLDGSTRADLRHQAMEHFNAPGSDDFCFLLSTRAGGLGINLATADTVIIFDSDWNPQNDLQAMSRAHRIGQQETVNIYRFVTCKSVEEDILERAKKKMVLDHLVIQKLNAEGRLEKKESKKGGSIFDKNELSAILRFGAEELFKEDKTDEEAKRNLESLDIDEILERAEKVETKGGEGEEGNELLSAFKVANFSSGEDDATFWSRLIQPDPADIIQETLAPRAARNKKSYVEDPQFDKNNNRKRRAVEAQEKPRRRSGRTVETVNSVPLVDGAVAQVREWSFGNIPKKDASRFVRAGTVLDFFGVAVKAYELLARVEELQLLSKRIARYKDPIKQYRIQLPYKKPQWSASCGWTETDDARLMVGIHWYGYGNWEKIRLDPKLGLTTKIAPATLGERETFLPRAPNLDNRASALLQKEYAKFSGNSSKVKGNARQTVNNDSNSGARSMRGRQKDAPDKEDNKPNKDDIQKRKVMMEAEAREEGEISESEAETKYRLDKEEKWLEWCSEVLNEEQETLKRLDRLQNTSVNLPKEKVLSRIRKYLLIIGDKIGEVVRQHSESYRQSRKCSRTSRMTMRLWNYVATFSNMSGEQLHDLYLKLSQDQLEGGVGPSHGANFTSIPSSKGGNSNQLHPTRNHRPTRSLQYNSESLHNNESSGSSEAWKRRRRADPDNQFDTQPLYQPPIMTNGNRLQESSSSAGILGWGPVEMRRYGNERPKRGVHPSHFPTGHGPLL

SEQ ID NO: 65595 - protein, 348 aa, Zea Mays
MDGCDCIEPLWQADDLLMKYQYISDFFIALAYFSIPLELIYFVQKSAFFPYRWVLIQFGAFIVLCGATHLINMWTFTTHTKTIAVVLTVAKVATAVVSCITALMLVHIIPDLLSVKLRERFLKAKAEELDREMGIIRTQEETGRHVHMLTHEIRSTLDRHTILRTTLVEMRRTLGLAECAVWMPSRSGTTLQLSHALHTNAPLGSVVPINLPIVATIFNSNRAERIPHTSPLASVKAQKSKYVPPEVVAVRVPLLQLTNFQINGWPELSAKAFAVLVLMLPPDSARKWRPHELELVEVVADQLHCPMLPFWKSPCKPVICYWSRILLWTQHAERQKWLYVLGMIFLLS

SEQ ID NO: 65596 - protein, 1297 aa, Zea Mays
MVRDHAALRRTPAKASASEAGNDENSPGVVPDVAAVGVAVAATDPGRPPLLAIQPPASGLKRKPESPAPTPSKLPFRTPEKAATRSRFGWVPPRADEAPPRVGVGATPHCAMTTPRAHRGKAVTVAPAASEGGSTHSTPTKSVTKPAHSIGASGSRPPMSGGGPRGAGFGLGFTMAGRGPPTSLGPPTVVNSVEVPHFELREDPSFWMDNNVQVVIRVRPLNNNEKNLHSYYRCLKQESAQTITWIGQPETRFTFDHVACEAVDQEVLFRVAGLPMVENCMAGYNSCVFAYGQTGSGKTYTMLGEISDLEVRPSPDRGMTPRIFEFLFARIKAEEESRRDEKLKYSCKCSFLEIYNEQITDLLDPSATNLPLREDIRNGVYVENLTEFEVGCASDIIKLLMQGSANRRVAATNMNRESSRSHSVFTCIIESRWEKDSASNLRFARLNLVDLAGSERQRTSGAEGERLKEAVNINKSLSTLGLVIMSLVDLAHGKQRHIPYRDSRLTFLLQDSLGGNSKTMIIANVSPSVCSANETLSTLKFAQRARLIQNNAVVNEDASGDVLALQHQIRLLKEELAVLKRQHVTRSLSFSADVFGGDVDDGSENMSVDDKNDNKAHNGHFLKDIRFSNKQVRSLEEALAGALRRESTAENTIKELELQIEQLNELVRQREDDTRSAKMMLKFRDDKIHRMEVLVNSKLPAQSYLLEENKTLSQEVELLRERVDKNPEVTRFALENIRLSSQLKRSQLFFNEGERELLLNEISELRNQVSQILEQRTETEQQNTFSDKTKLKRTSQEVETCRSNRQVCLESNIALTREIADLVEEKTAHAEAEEKPAGLGDKLQEANIHILQSCKHCEAMERELNESRSLIEALESQQIILINEIAELKKGCVEISRLNSELDLHHRQDYLTKEEPKAELLKCFGKEDSPLQRKFKRMQASLEKARNLNTRYQIDQASHCFAEKEMDEVRKQVEVETAKVIQCLEEDLISVQQQLNASNKNDLLAKQSINELQLEIKQLNDKLLEVLKENEIFSSVTKEKEKEIELLSNDWNRLAADIGKCLVDGNAALGEASDQVAFISKSLSQRKWIEKQVRKLCSGISERDELLEELQNRLKEADDIRRDLDLKLRSLRGAMQVVNEEHQQEKCDQEKEIYFLRSQISEQGHVNNHQLEEIHRINLLLDESIETFVQKEVLQQTCVSLQKAMGEEIHRLESQLDQSKIHFAHLLNQTQEKEQLIGKLKNEELNVLLRLMSEVLKTNSTVRELRIGFNTLQSSLYMSPEVIACQNSDLNLEDRVS

SEQ ID NO: 65597 - protein, 228 aa, Zea Mays
MGRPYAVKGRKKKRKLEEAAAASDAAPPVEEAEELPPPETMQILNSDDHANYLRKQNRNPADYRPDIIHQALLAIFDSPLTKAGRLQAVYVRTEKGVLFEIKPHVRMPRTFKRFCGLMSQLLQKLSITAVGKREKLLNVVKNPVTRYLPVGARKIGLSFSAEKSVNLFDYVAKSNDDEPLVFVVGAMAHGKIDKEYTDDYIQICNYPLSAACCLNRICSALEQKWNIQ

SEQ ID NO: 65598 - protein, 331 aa, Zea Mays
MPPPAAMLLLTAASGPPTLSLTLAARRAPLRAPSRRRLRALRPARIRAAAAIGGEFGGLGRRRVVVGEFIERLRNVLPGGSWWRLEDGDEAGDGAGRAEGSGTTAVSALRRMWALVAGDRLVIYVGFASLVGAALSEIAIPHLLAASIFSAQNGGAVFYRNAKLLVVLCLVSGVFSGIRSCCFGVANMILVKRMREELFDSILSQDISFFDEETVGDLTSRLGSDCQQVSRVIGNDLNLISRNLLQGAGALIYLLVLSWPLGLCTMFVCATLSAIMLVHGRFQKRAAKFAQEFTANANNVAQEVITLVRTVRVYGTEKQEFKRQWLMEAGA

SEQ ID NO: 65599 - protein, 879 aa, Zea Mays
MRAGGCTVQQALSPEAAVVVKQAVSLARRRGNAQVTPLHVASAMLQQQAPTGLLRAACLQSHSHPLQCKALELCFNVALNRLPASASPLLGGHGHVYYPPSLSNALVAAFKRAQAHQRRGSVDTQQQQQPPVLAVKIELEQLVISILDDPSISRVMREAGFSSTHVKANVEQAVSSIEANNSASAAATKNPNPSASPPEETKPAGKLLLPLDQARDEDVAVVLDCLASRSKKRVMVVAECAASAEAPVLAAVERIKRGEALRGAQVVSVSVSRFRDLPRDEAERVLVELRCAVKAGGRAGGVVLVVEDLGWAAEFWAGRGESGRARWPSACCYYCAVEHAVAEVRALACRGGDGVWLVGYGSYQSYMRCRAGQPSLETLWGLQTLAVPAGSLAFSLNFVGDSATAMTINHQSISCKMAKCDDDRSGNGSAAPRCLSLLDAGGSGRLTAVSSFCAADCSATKCDATVKSSIPPWLQHCRDHQEPSRCKKSSTCGGSPSHHHRTALNFSTVVSPSSSVSSYEQHYHLRHQSYQPWLLVADGAREAEHPCNKARCSAAVQLHVVDDEDGKPLSAIKVKSHDSSASNGSVECRSRFKELSAENLKVLCSALEKEVPWQAEIVPEIASTVLQCRSGMARRREAAVSSSRPSSTQACAKEDTWMLFHGGDAEGKARVARELARLVFGSRKSFVSIGGSRTTASSPACWSDGSSEQQRKRPRLTEASNHGCRHESLYEAVRDNPHRVILVQDVEQGGCWRCQRDILEAIQSGLVRSRAGDDDAALGDAIVVLSCQSLDAWSTTTSPLTTKKAKAESKEEPEEEESAGDHRRKEAITAAAASPSSSLCFDLNMDVENHDTESCFTDASLLKAVDRTFFFRRPDESSD

SEQ ID NO: 65600 - protein, 371 aa, Zea Mays
MAFWGVEVKPGKPYTHIHHADHGRLRICQATLGNCDAAARTVLQCNVGNKIPIKLCSLNPKLAETCHLEVEFEEVDDVIFSVIGHSSIHLSGYYVCASNRSNVGDDESESYGEDIGHSSTDEEHDTSEDSYESDFIDDREVPLSEKYGSGSIDDSDDECTQRCHRQKAEKTTQNAERRRRLKKHQVGSTDYDDDDTPVMKHVAKRCAPKISDSGDDDTPVTKPVVKRRASIFDSDSDEDDNVPISLALGKKDNAKVAEETEHQNGQANGITKKRIIDVKKRKQSSISEDPASSMDMTDANAPSVSKQVDEIKKKSKKKMRNQSGENNEKQSNIRTLDDGLVVEYLSMGNNDAKVASDGCKISTDNVLLSVI

SEQ ID NO: 65601 - protein, 302 aa, Zea Mays
MIANGLRKSSAASSQVSKLVKYIASAGSLQGGHSLSEPSARHYSSEPSLQATEENGFKGHSMLAPFTAGWQSTDVHPLVIERSEGSYVYDSNGKKYIDALAGLWCTALGGNEPRLVKAATEQLNKLPFYHSFWNRTTKPSLDLANDILSMFTAREMGKVFFTNSGSEANDSQVKLVWYYNNALGRPDKKKFIARSKSYHGSTLIAASLSGLPALHQKFDLPAPFVLHTDCPHYWRFRLPDETEEEFSTRLANNLENLVLKEGPETIAAFIAEPVMGAGGVILPPKTYFEKVIYNNSGSSEEV

SEQ ID NO: 65602 - protein, 282 aa, Zea Mays
MNWTSRDVLEIMFIFSVMHEYINCYYYCVLFWSTFSWTFLQKNIPLDNYDLLELFFVFSCRYLNEGSDGDNAPETSSDVSNESDNDNDNERSIGRTTQCLVENICTDQERLSSDDCDSSNQEPPPVFQYMEHDAPYGRQPLADMISVFACKFPDLNTYKSCDLLPSSWISVAWYPIYRIPTGPTLQDLDACFLTFHSLSTTPDGTISGCPETNNLHNSKVASVPGKITLPLIGLASYKLNGSLWTSNQHHEQQLTTSLLKAADDWLCQRQVDHPDYRFFLTH

SEQ ID NO: 65603 - protein, 362 aa, Zea Mays
MHPRSKVGRSSTDLKNMDREVELKNASISRSLFQKLQEEYDFDDKWLPLIDYLCTFGLKESHFTYIYERHMACFQISQASAEERLDFLLNAGVKSKDMKRILVRQPQILEYTLGNLKSHVDFLVSIGVPNRRIGQIISAAPSMFSYSVEQSLKPTVRYLIEEVGIEESDVGKVVQLSPQILVQKIDSAWKSRSLFLSKELDAPKHSIVKMVTKHPQLLHYSIEDGILPRLNFLRSIGMRNSDILKVLTSLTQVLSLSLEDNLKPKYLYLVNDLKNEVQSLTKYPMYLSLSLDQRIRPRHRFLVSLKKAPKGPFPLSSFVPTDERFCQRWAGTSLEAYHTFRQRLLLTSFAEKSGRKTLVSRR

SEQ ID NO: 65604 - protein, 52 aa, Zea Mays
MAVVMPCAHVTSAIRPLLRRSCWHVWSLHLALPRLRSNSELRGIDDQASATK

SEQ ID NO: 65605 - protein, 304 aa, Zea Mays
MGMAAPRAPLPLPQLLLLLVAALLAAAPLPRAARADEFDVRRHLSTVTRYDVARESSSVISMPSIPDGCRVIHLNLVARHGTRAPTKKRIKELDRLAVRLEALLKEANQVLDSDSLKKIPSWIKGWESRWKGRTKGGELISEGEEELYNLATRMRERFQDLFDDEYHPDVYSIRATQVPRASASAVAFGLGLLSGKGKLGQGKNRAFSVLSESRASDICLRFFDSCETYKAYRKRKEPDVEKQKEPILEHVTAALVNRYHLKFTTRDVSSLWFLCKQEASLLNTTNQACGLFNEAEKCCLDIMP

SEQ ID NO: 65606 - protein, 153 aa, Zea Mays
MWLKLDTVTKDRAHGVIEGHEDSSDKRVVVEEDAHGDPEHQGSGGGSVRVVRPACGGKQVSVGEDARGRRGGGSRARSWGEQSGAREEASALVVHGRGAVLQGGRATGVGAALASNYDNIGELGVGVTPGECSGGAGVHGRSCVETRSRRRAL

SEQ ID NO: 65607 - protein, 262 aa, Zea Mays
MRCSERSGNSSFCSYENFVAWGGSIRRTEGFKMSNSLNASRFPFCAVVMASTNQRIVLLQQVEGPKSPEEMITILQRVVEECATSLVAARIEAEERLNNQRLREEQDAAYRAALEADQARERERIEEQERREREAVEAEKKRKEEEEAVARAAQEAAEKEAALARRRQEKAMALGAEPEKGPGVTRVLIRFPTGERKERRFHSSATVTSLYDYVDSLDCMKAENYSLVSNFPRVTYGPEKHSLTLEEAGLHPQASLFIEIEQ

SEQ ID NO: 65608 - protein, 227 aa, Zea Mays
MEVESFENEEVAKLLNDWFVSIKVDREERPDVDKVYMTYVSALHGGGGWPLSVFLSPDLKPLMGGTYFPPDDNYGRPGFKTVLRKVKEAWETKREALERTGNLVIEQLRDALSAKASSQDVPNDLAVVSVDQCVEKLASSYDPKFGGFGSAPKFPRPVEDYIMLYKFHKYMEAGKEIEALNIKKMVTHTLDCMARGGVHDHIGGGFHRYSVDECWHVPHFEKMISDQ

SEQ ID NO: 65609 - protein, 647 aa, Zea Mays
MAAFAAPSLSSLILLASPHSAPTLLRLRRAGGRSLELSSRRGGSARLRVVRRAVTEEESEAARGDEEVEEAPEEPVAGRDLVTLAACLVGLLTGVSIVLFNLSVHEIRDVFWDGIPLRGASWLREEPIGEVWQRVIFVPVSGGVIVGGLNALRSQIETNSDAPVSKIKSAFRPFLKAVAASFTLGTGNSLGPEGPSVEIGSAIAKGFGDVFEWDGGKRLSLVAAGSAAGLSSGFNAAVAGCFFAVESVLWPSADSSSLANSTPMVILSSVIASVVSEIGLGSDPAFTVPEYDFRSPTELPLYLLLGVFCGLVSIALSRCTSLAMKAVESLQRTTGLPKAASPALGGLIVGLLALLYPEVLYWGFENVDILLESRPFTSGLSTTILVQLIGVKILATSLCRASGLVGGYYAPSLFIGAATGMAYGKFMKFTFTGPEPLLHVPFLDVASPQAYGLVGMAATLAGVCKVPLTSVLLLFELTQDYRIVLPLLGAVGLSSWIASPQRFSKRIRSKLDSWEDKSSIPQQANDMLTENKEATSMDAADLSLELYKIESSLCVYDANDSNMFKNLTVGEAMKTNYFSVSMTTPLIEALDLMLAEKQPFVMITENNTSARGLLALKNIQDFCKAAKTTRSQAERRLWTLMMWITYL

SEQ ID NO: 65610 - protein, 470 aa, Zea Mays
MNEGLATIPVQCLDECILVTGAYGTQKTDINISLTSVGLLWTATDFIVKGLVSKPIEQASHMNDDVQSCEMTEEANSKQVPPKLVDYSILFFSVFSVLQKLGSDDRPEVRNSAVRTLFQTLSIHGQKLSKSMWEDCLWLYVFPMLEHVSHLASTSSRDEWQGKELGTRAGKAVHMLIHHSRNTAQKQWDETIVLVLGGIARLLRSFFSYLQQLRKFSSGWVLLLSFIKNSILNGSKEVAIAAINCLQTFVGANCPKGNLESSYVKSVLDIYELVLQTSSNFKNDSTDKVKQEVLRGLGDLYVQAQSLFTGDMYLRLMAIMHLMIKTTLNPTDYDSELGSIPAVQRGILEIIPMLRPTVVLSPMWTHLLLELLCYLNGHEGPLQKNNEQTPDHNSQALVDGAKHALVERSNLNGGGTKLDMVGSGWGILFVEKLVPIIANLFLEAPPNERFSVSPEVIQGLGRYLLFMIYI

SEQ ID NO: 65611 - protein, 357 aa, Zea Mays
MGSRFASHQLSNGLYVSGRPEQPKEKAPTICSTAMPYTGGDIKKSGELGKMFDLHVEKSRKSGPLGNAPSRNTSFGGTASNSGPVSNAGGRSNYSGSLSSSVPGAGGSARAKSNSGPLNKHGEPTKRSSGPQSGGVTPMARQNSGPLPPVLPTTGLITSGPISSGPLNSSGAPRKVSGPLDSAASMKMRATSFAHNQAVTNLNTEDGYSIQGSFPKPILWAVILLFVMGFIAGGFILGAVHNAILLIVVVVIFGFVAALLIWNACWGSRGGIGFVSRYPDADLRTAKDGQYVKVTGVVTCGNFPLESSFQRVPRCVYTSTGLYEYRGWDSKAANTEHRRFTWGLRSMEIFSPGFEHW

SEQ ID NO: 65612 - protein, 1012 aa, Zea Mays
MTEMHSSAKLATPASVGATHEDSNMHISSDVNMMDKRKQLFPVINDRAGIDKEDNKMLNPAGTEADVAELHTTSRSSMMEETSLEEASLVIETIRREEFGLDQALSDTENSLLKKQHARLGRALHCLSQELYSQDSHLLLELVQNADDNTYPEDVEATLAFILQEDGIAVLNNERGFSAENIRALCDIGNSTKKGSNQGYIGNKGIGFKSVFRVTDAPEIHSNGFHVKFDITDGQIGFVLPTAVPPYSTTSFSRMLSVEDDKDAHSLWNTCILLPFRSKFRECTGMCSIVSLFSDLHPSLLLFLHRLKCIKFKNLFDDTLLIMRREILGDGIVRISHGIETMSWLVVSKRLQGTIVRHDVCTTEIAVAFTLQQTEEGDYEPYLKQQPVFAFLPLRNYGLKFILQGDFVLPSSREEVDADSAWNQWLLSEFPSLFVSAQESFCALPCFQRCPGKAVTAFLSFIPLAGEVHGFFSQLPHLILSKLRLTRCMFLDGSTVQWVYPCNTLRGWDEQTKMLFSEGLLHEHLGLGYLSKNIVISDKLSRALGIHDYGPNILLDAISSICRIDGCIESLGLEWLCAWFVNLYLTLLSHSSQNVSSARNLEDILLDKVRKIPCIPLSDGSFTSISDGRIWLPYDVASSIPECSSIPNFPALYGNLRTVSPNLLSACCKNKYLMEEVRINDLADMLQRIGVRKLSGHDIVKNHIMVSLRNGLDANVADIVIREYVSFIMVHLQSSCTSCNFERGEIVSELRKSPIFLTNHGYKSPADEPIHFSKDYGNSVDVTRLLQNVEISWIELDSSYLQHHGSQSSSFAREKWRQFFEEMGVTDFVQVVKVEKTLSQVDSILAGGLSLADVSTKQCTVYDWESPELSRILSIFSSKRCKENCVYLLEVLDRFWDDHYSAKSRIFTDATHCGENRAVESSFMKCIQSFKWIASRMDEDLHYATDLFYDCENVRSLFGSVAPYAVPQVSSSSLKKAIGFKTEVSYCDALMVLKSWITSKVPFRARRGRRKD

SEQ ID NO: 65613 - protein, 974 aa, Zea Mays
MEEATRRRITPTTTLLLALAVLAASVPAGFCAINPQDASALNAIQSQWTNAPLSWSSASDPCDGGWDGIMCSNGRVTSLRLSSVNIQGTLSDSVGQLTQLMYLDVSFNLGLNGRMPATIGNLAQLTTLILAGCSFTGAIPQQLGNLQQLSFLALNSNKFTGTIPPTLGLLSNLFWLDLADNQLTGSIPVSTATTPGLDQLTHTKHFHFNKNQLSGTLTGLFNSNMSLIHILFDSNQLTGPIPEELGGISSLQVLRLDRNSLKGTIPPNISNLVNLNELNLASNQLTGPLPDLSSMTKLNVVDLSNNSFAVSAAPNWFTTLTSLTSVSISSGKLSGAVPKGLFRLPQLQQVVLSNNEFNGTLEVTGNISSQLQAINLMNNGIAAANVTPSYNKTLVLLGNPGCVDPELKVFCSLKQERMIAYNTSLAKCSSTASCSSDQRLNPANCGCAYPYAGKMVFRAPLFTDLTNSATFQQLEASFTTQLSLRDGSVFLSDIHFNSDNYLQIQVALFPSSGVSFSVADLIRIGFDLSNQTYKPPSNFGPYYFIADPYALLAGASSRGSKKSHISTGAIAGIAVAGGILVIALIGMVLFALRQKRRVKEVTGRTDPFVSWGVSQKDSGGAPQLKGARLFSLNELKNCTNNFSDTHEIGSGGYGKVYKGTLVDGTRVAIKRAERGSMQGVVEFKNEIELLSRVHHRNLVSLIGFCYEQGEQMLVYEYVSSGTLRENLLVRGTYLDWKKRLRIALGSARGLAYLHELADPPIIHRDVKSTNILLDDHLKAKVADFGLSKLVADTQKGHVSTQVKGTLGYLDPEYYMTQQLSEKSDVYSFGVVMLELVSGRQPIESGKYIVREVKLAIDPNDRDHYGLRGLLDPAIRDNARTAGFRRFVQLAMLCVDESAAARPAMGEVVKDIEAMLQNEVSGPDGATSSAGSSANDFDGAGGGARSHPYSDVEITRGSYGDNASDYMPYFEVKPK

SEQ ID NO: 65614 - protein, 123 aa, Zea Mays
MARIFLCMSLAAACCCFSIALLPPPAQGRPGLPAGGRINHLPEPTTEPAAAAEQEQQQRGVQVRKTRPAWSPAAAAEGSVRPEMRAVPGGPDPLHHHGGSPSRRPAAGTHPVTRPAGQPAWLG

SEQ ID NO: 65615 - protein, 474 aa, Zea Mays
MTRHCAEAAAATAPSLLRVLLALHCGVLFLQCSAASAMGGDVSALMAFKRAIIEDPHSVLSDWTDADGNACDWRGVICSAPQGSVISLKLSNSSLKGFIAPELGRLSFLQELYLDHNLLFGTIPKLIGSLKNLRVLDLSVNRLTGPIPSELGGLSSVSIVNFHSNGLTGNIPSELGKLQNLVELRLDRNRLKGSIPGSNTASFSPASNIGSTAHNGLCPSSRLYVADFSYNFLVGKIPSCLKYLPRSSFQGNCFQDEYSVQQRPLQICTSGSTGQQGVIYGSKHPGHKHEKMEQPIWLLALEIATGVLLVVFVITGIVTASRSCKLKPSIRISSWNRSKSWSDEITVLIDSDMLKSLPKLSRQELEVACEDFSNIIGSTPETVVYKGTMKDGPEVSVISLCAFEGHWTSHHELFYQNKVIDLARLNHENIAKFLGYCRESDPFSRMLVFEYAPNGTLFEHLHMEREANFLGSGE

SEQ ID NO: 65616 - protein, 284 aa, Zea Mays
MFLTPGTLPFERLWEKFFEGHEGRYTIYVHASREKPEHVSPIFVGREIHSEKVTWGTISMVDAERRLLANALQDMDNQHFILLSDSCVPLHNFDYVYDYLMGANLSFIDCFYDPGPHGNFRYSKNMLPEVTEADFRKGSQWFSVKRQHALMIIADSLYYTKFKLHCRPGMEDGRNCYADEHYLPTVFHMMDPDGIANWSVTHVDWSEGKWHPKAYRAKDVTFELLKNITSIDISHHVTSDSKKVVTEKACLWNETKRPCYLFARKFYPESINNLLTLFANYTLI

SEQ ID NO: 65617 - protein, 75 aa, Zea Mays
MPQHRCRPITTEAKKYCKAKHSGQLLCLGWMWLHQLCLPTSSTAAATATSSIVPVFLGILMASGWHFVQLISWLQ

SEQ ID NO: 65618 - protein, 238 aa, Zea Mays
MGVFACRSAENRTSSPDLGDPQERDQRLHGGIRGAAAAERHFPRHQQLHEDGGPRPGGVRQALQVPGGAAAGDAPDRPGGQGVPARRGARHRVQHAQAAAPGDGVHAGGDGGGGGDPGAVPRAQVPGPARLLGGGRQAPAARPPPGAARPGTPRRRLLREQLLGGVLRRLLGRLLHLLVGAHGRRRRRLRLRRRQRRRRRRGRLGRRRPGPGEPGGQVLRRWLRRDLRRLRLAAVAVT

SEQ ID NO: 65619 - protein, 62 aa, Zea Mays
MVNELLESRYSLSRLSREVTRARFSSCKQESASSNVKQAIKTQQNKARIHMSPFQSRAERGE

SEQ ID NO: 65620 - protein, 425 aa, Zea Mays
MSAPEFRTSYQQSPENVGQLKVCQCGSGDSNFQITNKSDGGENSPTTCPNCQDPLILLLQVLKSGNLLLSSKGIGWTVWKKRWFILTRTSLVFFRSDPNVPPPRGSEPIVTLGGIDLNNTASMIVKEERKLITVVFPDGRDGRTFTLKAETTEDLNEWRSALENALAQAPSVVNTAGQLPVVSTDITEPVEAAVEQSENKSVIGRPAEFALVDADGTTAFLQKALKFIEDYGVKVEGILRQSADVEEVKRRVQDYEKGKNEFSPEEDAHVIGDCIKCILREMPSSPIPAPCCTALVRAYRTDKTKRLDAMNRVIYEVFPEPNRQLLQRILKMMQIVGSHKAVNRMSSSALAACMAPLLLRPLLLGECEIDSEFSMAGDGSFQLLQAAAAANHAQAIVIIMLEEYDQIFDVPAFPWTCFSLQACSI

SEQ ID NO: 65621 - protein, 74 aa, Zea Mays
MSRRTQASSNHHSTPRTTGTATAVAFSVGKTSREGQCRDGRWPGRRVGRRGLPRRAPLHDQLLPSANGMSIFTG

SEQ ID NO: 65622 - protein, 528 aa, Zea Mays
MAGHHHNNTHASRMDHVNRFQSEAQPFANGALPSGYVGAPIRPNGIPFSSHTGQSHIQHSDAPGTMLASYSGYPLAGSSSSTYAPHNTHHLPALSYPHRSDDNFILSSHMDDRRVALKRRNPIIYPVDGVNNGSCYAGSSSNPQFPCYMPPNPIPAPEPCPPRITSNMGSSYWTDQPFGSNGGSQRNVRGRHDHNPIHLGHNPGVACATSSTHGPPHHANVIGPQSTAVPQNRAYFSIPPRVTAPGSDGNCSMVFREGTYYSAPQRTNINAPPVLAPPGSSDSLHFVHGGYAPRAAPPNSISTYPAPAFATPNNSVTVTHEPDIPCYRPAVPGYPPATSAAAAAASVHAEGAAASSRHLGHVALGSSGSARSRRLRDSYHAFRPLVIEENNLRGPATERFMMLNQLFIHESREDSDPHWDMRLDIDDMSYEELLALGERIGNVNTGLADEKLSSCVTEIPCCSSARTHDDNESARCVICLEDYKFEDSVGKLKCNHKYHADCIKKWLQVKNACPVCKASAADDGGGTE

SEQ ID NO: 65623 - protein, 111 aa, Zea Mays
MQPPPPVQPPPSPLLSRSAPPVRPPPAPPPLACYCSLVVRPPCPALPLSARRPVPLSACCCSLVVALLSRTPTAPLFLACCCFSSCSNKQLCVCSCSCCSLAEEGVLTNAG

SEQ ID NO: 65624 - protein, 498 aa, Zea Mays
MGFCSIISWRIMIGAIFAPSIVYFALLVYYLPESPRWLASDGKISEARVSLQWLRGKKHDVSGEIAAIVEGVDIISDSTVGAARAQSFSGTSASHTWPRSTFYWQLSDPLVDLLGSVHENMSEGGSRRNSFFPVFNSFSFPEHEHMNEHRDGNSDQQTRETYYAGEANNGDGLRASLLSQAASVEVNDTNTSFTSEGSSSYLRRHGTSVLAQEFMASIHDYDIEEEEEEIHGFALPHQSAPRDMESTGRHPFRHQIVRLSETADMKFKWRVLLQPGIRHALCYGMLIQALQQSTGISGLLRCAPEIFEQSGVASLFSDIGLSPHSTSILMSTLNALLILPCITAAMLLMDVCGRRVIVLATTPVLILSLSVMSMSTLVNMGPFESAVLFHFALTICFWSYVIGLGPIPNILCSEIFPTKARATCASFCSLSFWFGGLLSAYCFPVMLSTIGLGGACGIYALVCCAPLFLVYYRIPETKMLNLELIAELFKLSRQEHVQ

SEQ ID NO: 65625 - protein, 218 aa, Zea Mays
MFLSRIVLRDLDSIDSPASMASSKKVVTRDEWELKLRDVKIRKEDMNRLVMNFLVTEGFVDAADKFRIESGTQPEIDLATITDRMEVKRAVQSGNVQEAIEKINDLNPTILDTNPQLYFHLQQQKLIELIRVGKINEALEFAQEELAPRGEENQTFLEEIEKTVALLVFEDVKNCPYGELLDVSQRLKTASEVNAAILTSQSHEKVLWTGILYSGDKI

SEQ ID NO: 65626 - protein, 540 aa, Zea Mays
MSSDPSPHLPSPVAPPGAAEADPHHLPQPAEPHEVMHRTRAVDFLGRRTPIVYQNDNGPCPLLAICNVLLLKNVISLNPDAGEVSQQKLLSLVAERLIDPNIAGQDKDEEYVCNREQNIADAIDLLPRLATGIDVNVMFRKIDDFEFTRERAIFDLLDIPLYHGWIVDPQDTETATAIGSKSYNALASGLAEFKSGKPTEENKYVEEETVDFAAATTAALKIPSPSVSRGRSFDEHTLSNSSTVPHKRRGDLEEEEELMRVLNLSKAKSGDVEVSFDTSHSHSSSNIETPQNESFQSEALELVVATKKEEYGNHATSDHVSMLSVTNVAINGSEVVPEESQENLISKEPEDNGIKNLDIPIQFSETTPYPSHESFASSDHQPAIPTLVEGDKETCKEQFDVQIHGQSNDTEVACDSSVTTCEAVPDHATTELDVKSDSLDNSQSLPSSIQECEPIYQGEEHILGTTNMVYENQEPVYEGEVVLAEQADKIGESSSSGDDKATEHQFSSVYKRDLTKVSFVSSSAITTLTPCSSTTEVYIS

SEQ ID NO: 65627 - protein, 972 aa, Zea Mays
MPPELGMSSRTVAGAVVNRRPRRLFGRSSERKNPLNLQFERQVARLEARQQQQRCVIVTVIPFNFCYDFKSLSLTESASEDPSSRPTSPEENPETSSSPSILFLHLNAQDVSHRRWQDNSSRLLEDKPTTSNSMSDSDFLVNSFTKPSDNARPSRRKSKKKSKKHRQRCRKPTDGSEAKFREGNGAASAADVGDCEDSTLSPKHVGDIRFEETSPSSSVKEASEEAPESDDDEYHCCSGGSVSSASYCDEMELSKSTTSCPALCGQCPSSNLQYLDNTQNSAPTGPSQETCYAGSKANCNHDTKSLFIFRNERGSDPCEATEFCSSSSGFDENWIEKFDYDSGICSPKSVGTYGGDQAAHLCSDTTGDNDFCLVISRKRARKEKKMSLWKSYGAHASTPALDRNKKYVGHSSMQMTNEFNSNDWSHRQNHVSRIHPQHGNALKSSTKNFMQRPSIGCRETQYGFPAKESKLGASLNHSTGPREKTCGKLTGGFDKTAQQLYLDRDLSNALNSSESIRCETRSISSSEPTTPKSLKGNYTSESGESTDITIGALPMQKRRLQDLVRTDDASETISGRSSPCSESSTTELIAGHSTDSSIEGNHGCQGLCNSRTHLAQMLRVVNDACKVQVGADVLLAAGYPISDLEKFICSATPVIGRAPCMISNTCSLDQVVSDSVCQHDISNVSLRRIWEWYEEPGCYGLEVKALSNLSSKTSSSSSSEFFAYFVPYLSAIQLFGLSRNNMHHSFGVQGRELLISSNTASSMSSHPVHAKAHTLLEESNACLPESSLVVEDPGELIFEYFETEQPSLRPPLFENSANVSDHRVFGDTEKLQNAKLCELHPASWFCVAWYPVYRVPRGNFRAAFLTYHSLGKLVHKKCSMDTNDGHTQVVSPVVGLQSYNDKGEQWFQLRCPDLKQLPIEDSLKTSPAEVHKERLRTLKMGALAMARAVVPKGSGESVNHHPDYEFFLSRCA

SEQ ID NO: 65628 - protein, 570 aa, Zea Mays
MNLKISTCHHAKGSWLPANIWLMLNLSYLMRKLGQLCSGNNLSYKVVVDASVANTLKSAPSTVKQILRWAFNDVLHACVPFNNCQLAEHLFTEMQKLGLQPTSYTYDGFIKTVIAGKGIAYANKVINAMERRGIEPYSDTLAALSEGHSNSLQLDLAEEFLERISEIKPKHIGSFNALLSGCAIMNEPERAVRILAKMKHVNMKPTLRTYELLFSLFGNVNVPYEQGDVLSHVDVSKRISIIEMDMFNNGIQHSFVSMKNLIRAFGAEGMIEEMLRYLNIAENTLWNINPHQKSDLYSTALHALVDVKETHRAVKMFKIMRSCSLPTNISIYNTMIECCKWLPCFKSASALLSLMLRDGFNPTVVTFTSLLKVVLENDNFEGALDLLDICKIEGLQPGIQTFNTVLLRAYARGQIHVLEYILECIHRSKIQPDPSTLWYTFCAYEEHELYNTAIESLLVLSMRMISEDAGIPSEKRIVFEDLILSEEPDAEFRIIRAFQAGEEFLATALLNLRWCATMGATVSWSPEESLWAMRLAASYDANKRPHINPSDAPKSWGRNPLNRPYWEANG

SEQ ID NO: 65629 - protein, 191 aa, Zea Mays
MGSVASAAAPPSPHSALPQEGAPPYGPGLAGILPQTSVGEEKKEEKVDYLNLLCPVPFEEIQREALMSLKPELFEGLRFDFTKGLNQKFSLSHSVFMGSLEVPAQGSETIKVPTAHYEFGANFLDPKLMLIGRVMTDGRLNARVKCDLTDNLMLKVNAQLTQEAHYSQGMFNFDYKVDVSDKEVTIEHNSK

SEQ ID NO: 65630 - protein, 85 aa, Zea Mays
MSPNGGADCSARMATAAGRSRCLAPPSRRWRRRSSTSRTIQVADEVAPPSTCASAPLTARLHSSNPHHCVSSSSSPPHRASASAD

SEQ ID NO: 65631 - protein, 154 aa, Zea Mays
MVKLIETFAVFCKSQRTAYREKVLIEAEKQFLHDFTFFKEKLSVDFGQIVDVECIDSTCQVLCDKVRGCCSICKSRCTEAIIDSLKILAEAMTIKHQKFLNSNNLLAKDMDIKSDEKATKIDTNVQPVDVKSNEKGAGVDIVEASHGKAHVVFS

SEQ ID NO: 65632 - protein, 719 aa, Zea Mays
MISAADLYHVMTAVVPLYVAMILAYGSVRWWRIFSPDQCSGINRFVALFAVPLLSFHFISTNNPYTMNLRFIAADTLQKLMVLAMLTAWGHLSRRGRGSLDLDWTITLFSLSTLPNTLVMGIPLLRGMYGDFSGSLMVQIVVLQCIIWYTLMLFMFEYRAARLLIAEQFPGNAAGAIASIAVDPDVVSLVDHGRGDAIETEAEVREDGRIHVTVRRSSASRSDVVYSRRSVGGFSGATPRPSNLTNAEIYSLQSSRNPTPRGSSFNHTDFYSMVGRSSNFGAADAFGAVRTGAGTTPRPSNYEDDASRPKYPLPVVSAAPGVAGHYPAPWSARKAATNGHAKGEDLHMFVWSSSASPVSDFFGGGAPDYNDHAAAAKSPRKMDGGARDRDDYVERDEFSFGNRGAMEDRDAEDPAAAGGDPNAVAAATAMPPTSVMTRLILIMVWRKLIRNPNTYSSLIGVVWSLVCFRWNFQMPDIVLHSISILSDAGLGMAMFSLGLFMALQPRIIACGNKVATFAMAVRFLTGPAVMAAASFAVGLRGTLLHVAIVQVLWGNGGRETREKSCGACRPATAKHQSDTVAAVWIAAAAIHREKNTVEAAASRSRIAAAASRSEQADRRCAMLLFPVASCSLSLALWPFALSGQHKSYLSFPPHLLLTVLWFLLCKKRRNEQAALPQGIVPFVFAKEYSVHPDILSTAVIFGMLIALPITLVYYILLGL

SEQ ID NO: 65633 - protein, 52 aa, Zea Mays
MNSNPVLFTLTCNHSRVTPGSLPSIKRRYKCNLNIIDVCSRLYNDNVNSLMI

SEQ ID NO: 65634 - protein, 289 aa, Zea Mays
MQPYDPDYIRVLHLFGDSEACAFSIHNLLQAGRNYGLAAGSWVGPYAMCRAWQTLIRTNREQADAVDGKENFPMALYVVSGDEDGERGGAPVFCIDVAAQLCSNFNKGQCTWSPILLLIPLVLGLDKINPRYIPLLKETFKFPQSLGILGGKPGTSTYIAGVQEDRALYLDPHDVQMAVDIAPDNLEADTSSYHCSVVRDLALEQIDPSLAIGFYCRDKDDFDDFCSRASELAEKANGAPLFTVMQSVQPSKQMYKQDDGLCCCSGSSMANEDYDLDASGEAGEEWQIL

SEQ ID NO: 65635 - protein, 512 aa, Zea Mays
MEDNPVKPVDSTANSRPASAMAHSRSSYKIKESGIAQSRVRGSHLTPASTDKTKKDRSSTIPRRPDSSLKSSVQSTTLMRRMKLVDSPSTNTKNVERNVGQRDISLASRAVMANNSATAKKSNLTESALVKDIYTTSQAVSAPIVVPRDILEDKTVSNVRRGTGETAAVPDDFRIPVHRRKPSLSGSAADSDSSSRSVFTEPDVCSEGLSSLKFSFGLTPYHKKEEFGDVDNEGIAQIAEKMERTVSLDHSQQLNDDKSFESPCSTTETAKVKYVRGVAVPLGKTKSLVERWEKRETSSTDYSPQTGSCGDRASRNDNHPFHLAEPSTTFEKDLSTVDEAMAPVNLVRNHDEFLNAVKLRLTKLEMMRHVFEQSGIKGAIAAVAKLPDNAVQADVVSALKGKLDLFNLEFFSNFLPVLAGLLCSKTERHAMVSLEMLLDLIKIFGPVIHSALSANLGVGVDIQAEQRLQRCSRCFNHLQKIQQSLNPLILRGGQTAQLAQELSLSLQDLVVI

SEQ ID NO: 65636 - protein, 62 aa, Zea Mays
MELASLSLPASRETLWLVTWLLGGEVACSSHGSTVDHGCLHPRVSLTTGCEGFGAILLHPVL

SEQ ID NO: 65637 - protein, 64 aa, Zea Mays
MVVAYLLISSSSSATARASDLIENWGSDSFPSMANGSIAISFVAFVVFAICSLISAYNLFRRDM

SEQ ID NO: 65638 - protein, 223 aa, Zea Mays
MLQWAIGNSDPDKLREKAAELVKLSAEELLKRQMEIKELMEKFKAPSDAELIKIAIADLNNSSLEDRQRALQELLILVEPIDNANGLLPLIQELGNADEGIRTTSAWVLGKASQDNVLVQNQINGYGALDRLVKMGYSSSGPEAAKALYTISSLIRDNEHGQELFLSENGYAMLQVEKGNHILNIKAKARLKCTNALFVCSTYCQPQTLVFGFRKRLCLYWHI

SEQ ID NO: 65639 - protein, 293 aa, Zea Mays
MVQLLLSYESLEVNAINSQNETAMDLADKVPYGESKTEIIEWLTEAGAKNARNVGKIDEASELRRTVSDIKHNVQAQLSENAKTNKRVTGIRKELQKLHREAIQNTINSVTLVATLIASIAFVAIFNLPGQYFQDVNSGGDIGEAEIAKLTGFRVFCLLNATALFISLAVVVVQITLVAWETGAQKQVIKIVNKLMWTACLSTGVAFISLAYVVVGPQHAWMAFTASAIGGPIMIGTFLFLAYLLLRPRFKFGEDRQRRIKRASGSKSFSWSIHDGFSDLEAFSDHEKRIYAL

SEQ ID NO: 65640 - protein, 76 aa, Zea Mays
MADEAHPHELPAPKQPALEADRPVRHRCVHNFLVALSLPQEQEDALLEAPPSRCSGFTAAVVDVVTFRVMYIIDCV

SEQ ID NO: 65641 - protein, 71 aa, Zea Mays
MNKEEKQEHSLKRTKLDLGEHTSKSPLQVLARAGELVHPQQPTGAEHAVPVEEHEVEREMCPWAISKYFGD

SEQ ID NO: 65642 - protein, 411 aa, Zea Mays
MEAVDKIAEPKDPFVLTAQKVQSSEPPIPIKASCEGNDSQQQEETDLPDDGEESFRSMDSSDEGVRSSFSGASHPPEPIDMDIMKTVYVAIDEKSEPPVSLVRGVSVKGPFIDDLSIRVTGAKANLVVGAGGAEGMAEERKVSASAVASVTTARSSQATSLPQDSEEKECVWDASLPPSGNVSPHSSIDSMGVVTAMSTLNSCTSTYKSETIAGEAMLNVERNCESVKGVRGDLLESAKTSMSRASDSSVVSDDSSWSHITGGASKPHKGNDPRWKAIHAVRTRDSVLGMSHFRLLKRLGCGDIGSVYLSELSGTRCYFAMKVMDKASLASRKKLNRAQTEREILQLLDHPFLPTLYTHFETDRFSCLVMEFCPGGDLHTLRQRQPGKHFSEYAARSTSSSGVSTHVGSGL

SEQ ID NO: 65643 - protein, 796 aa, Zea Mays
MIVRTYRRRSRSISEGGGGVSSSQEAFDFDADVDVLGSSASQPLPPSQESSSMWDFDEDPPPSPPRPGKEGRRSGRGGARRGGGLELAEAPAMAPTVTLMEAEEYGEMMESVDDVTFALDGLRPAAQKRTRRASLLALLGICDSAERRRVLRSQGLVQQIIDAILVLDIDDPPCAIAAGALLFVLASDVQDNNLLSSETCVHFLLKLLNPPVNVVDAKAPSIGSKLLGISKFQMLNGSNKDVDSCSEDILLKVEEILLSCKEIKPADRDYKRTTRPELCSKWLALLTMEKACLSAVALEDTSDMVLELGGNFKETLRQLGGLDDIFNVMVNCHSELEKLVKDASTTVVEGKEGAPLQSTTLLLKCLKILENATFLSDNNKTHLLSMSRKLSPKCRSLSFVGVILNIVELLSADSRGLSLLNHHCKCNNSKKKSILLNRRCQYCSSTKSEASHVTLSSSSDVSQSERILNCSSFSSNGTSSGSFGVKHINGASLKLNVRMDRSKAYPVRGSTGWISMKAQTSDWNSREMAKKRRLSENVRTDLSNGGDDPFAFDDIDQEPSNWDLFGPKRKSPQKRAKRTNGEVLDDCGTALMGSPKLCQPEDIYQSVATSGSKVVDESNLLEDCLLASVKVLMNLANDNPSGCEQIASCGGLNNMASLIIKHFPSFDFSMNSNNQMNESVSSGDPLSSQNSKSPQIKTKQLRDYELDFLVAILGLLVNLVEKDSLNRVRLANARVSVNLSQNPDSKEVQRDVIPLLCSIFLASQGTGETAEAISPAMVTDWTVHLSSLLRVDTFAW

SEQ ID NO: 65644 - protein, 408 aa, Zea Mays
MDALSRPAVVIDNGTGYTKMGFAGNVEPCFITPTVVAVNDSFSGSAQPAVRGTPARGNWLAQHSAGVMADLDFYIGDEALARSRASSSHSLSYPIRNGQVENWDTMERFWQQCIFNYLRCDPEDHYFLLTESPLTAPETREYTGEIMFETFNVPGLYIAVQPVLALAAGYTTTKERGENIPAEESFDVARRIKEMYCYTSSDIVKEFNKHDKEPSKYIKHWTGTKPKTGAKYTCDIGYERFLGPEIFFNPEIYNNDFTTPLQVVIDKCIQSSPIDTRRALYKVLMIRVSLFILRHYIESEGFPMAQNIVLSGGSTMFKDFHRRLQRDLKKIVDARVRASNSRLISGDAKAQPIEVNVVSHPIQRYAVWFGGSVLASTAEFYEACHTKAEYEEYGASICRTNPVFKGMY

SEQ ID NO: 65645 - protein, 124 aa, Zea Mays
MIAVASSFPSRAHAAPFGSGTLPPPSTRRSTSLRHPRVSALGGGLEGEPGKILDPRATPFQILGLDAAAGYSAAELKAAFRARVKEFHPDVCKDPENADLIMRRVIEAYQCECGLKGFRIVKEL

SEQ ID NO: 65646 - protein, 680 aa, Zea Mays
MSSGTVAASDPGGGETKLVAGDDVTISEAAGDMPAFAADLKVEEKATLTMDVAHERGDMAVSDPLYATESAGMVGTEGHGDEPVEDVDAVNGEDGGEEGTQEAGAGGLLTETERKPVLVVDVPAAAGSAAPEHAEAGEQFPDSGNSPDSNLEAASLGNVDQGARYRLPPLDKGRFQVADLVWGKVKSHPWWPGEIFDPTDASELALKHRKKGSHLVAYFGDSTFAWCDESQLKPFVTNYSQMEKQSSSDGFVGSVNNALEELSRRVLSGLSCSCLAEELADNGMSYTVDNAGLKDGVTCSAVNRPEILNCFSPENLLNYIKELALFPGQGGDLLELVIACSQLTSFYRSKGCPELASFQTSDAWVEDDLDGIDTLSTQNVMVEEPVINEVQPTQDKPKRGRGRPRKQKAGHDQVVMEKRSTSNQVNDTSYNEKKRNLKSFEDSEKSSAPTGGGSFKIGECIRRAASQLTGSSSIMKAQNEPTVYNNAAEGENGEFDVSSDDAGDELTVEKRAKRRRLHINHAADPRELLSQLCLVATEPMNGYSFSAMIIGYFNDYRNYIVSTTTEANIVDKGTSRRGRKRKEVIPSPEVETTDHMQDSYWSGLSLYNHPVHDLKRESPTTRPRRKRRSSRHAYIPLSELGEPVPKKQIQVMERSIIHVDEKMVDELKPTALVLTFGRQV

SEQ ID NO: 65647 - protein, 420 aa, Zea Mays
MRRPLASAALRLRFFSSTSPARLLSPCPFLLSRRDDDGGREASSSPLPPLPPSGSAFSPRPLLFSASAAAGLFSLHGGWWRQALPPAASRPLGSVSDAAPVRLTISRSYSLRVAKGKKKAHFDDEHSHRAVNMALWCNFLVFSLKFGVWISTSSHVMLAELVHSVADFANQALLAYGLSSSRRAPDALHPYGYSKERFVWSLISAVGIFCLGSGATIVHGVQNLWNSHPPENIHWAALVIGGSFLIEGASLLVAIKAVRKGAEAEGMSIWDYIWRGHDPTSVAVMTEDGAAVTGLAIAAASLVAVQMTGNAMYDPIGSIIVGNLLGMVAIFLIQRNRHALIGRAIDDHDMQRVLEFLKSDPVVDALYDCKSEVIGPGFFRFKAEIDFNGVVLVQNYLERTGRGSWAKQVPYLENTFIYSH

SEQ ID NO: 65648 - protein, 487 aa, Zea Mays
MSNVLPAVLILEFLSGTNLIVQTFALEVVAPAMPPFQDLSRPPVQHTRHLATAAPAHVDADPPDAASNSSAAPLGLVQPPVSPHSGCCAPNMVQKRGTRDCHCVYPVRIELFLRNVSLTSNWSNKFLQELASQLNLRVNQFEIVNFYVVGASGLNITMDIAPYTGISFAADQVKAMNYSLTLHTVRIDPVLVGDYNLLNLTWFRSLAPAPAPAFTMAPRASPSTASTFPRQSEGPSKNRHASLITVVIICVGSLIGVLLIVLTICFCTFRKGKKRVPHVETPKQRTADAVSTVESLPRPTSTRFLSYEELKVATNNFEPSSVLGEGGFGRVFKGVLGDGTAVAIKKLTNGGHQGDKEFLVEVEMLSRLHHRNLVKLIGYYSSRESSQNLLCYELVPNGSLEAWLHGTQGASRPLDWDARMRIALDAARGLAYLHEDSQPCVIHRDFKASNILLENDFHAKVSDFGLAKQAPEGRTNYLSTRVMGTFG

SEQ ID NO: 65649 - protein, 351 aa, Zea Mays
MLAEDLGLQTIRSIADTDDLHCSTASHECSSGMGPKIRQLEVKIGRKACNGASENERRSHYQTTMKGNSLRGSTLMKPTASQLAKQNRPAQLKNLTQNKKSVGVIRERSTISSNDCNYQSTKRQRLENGHLNKAAATAIQHEFIHKNHEKNVMNQNMDQPTVLPRLKITIPRSPDLATKLRAERSKAQRAVPTLPKQLNDLIQRVAPSAPTVQVAPTRKQVVQPFWATGHQHASRQHEDVGSNVAACTSNHARHLKSVDNKTEDTRHGLFKFKARPLDRKMLENKGDGVFRCAKRNTTVPKEFNLSTGRKANPAPLSELFNKLSLTAGAHQNRGVGRQIRDLPNYITTKRT

SEQ ID NO: 65650 - protein, 241 aa, Zea Mays
MESKCVNDQDTLIDLESGNGTAVINHSNDLESGCVCACANGCPRDDRNNQHMDCSSPASDAVARSGDDRKSEGEEKLGLGLLDSSGGDKAKKKRSKKKPPRPPRPLTPTPLDVSDQKLLNELSELAVLKRARVERMKALKKMKNAKQGFSGGNLCPLIVTVIFCVVILWQGFFSGHGPAVSFHGSPESSIRGTRSSLISIRFYKNHSNTRPPPFSETTAAPEYVWIGVVPRQPHYGIRLRT

SEQ ID NO: 65651 - protein, 460 aa, Zea Mays
MSTASGDGADAGGDGAAASAPAGRRIPPASSMPWVRNLRRFVGTGAGLGSEALMELETKRILLEIFKERQRKSAEAGSIPSFYKKKPEEGSISSRVQRLAKYRFLKKQSELLLNADDLDAMWVCLRENCVIDDATGAEKMNYEDFCHIATVCTEQIGQKCKRFFSPSNFMKFEKDDSGRIAILPFYLYVMRTVSLTQARIDMSELDEDSDGFLQPHMYCRIAARKFFFFCDPHRRGKACIKKVLLSNCLQELMELHQESEEEVTDTEQAENWFSLTSAQRICDMFLALDKDTNGTLSKQELKEYADGTLTEIFIERVFDEHVRRSKVGGGNSREMDFESFLDFVLALENKDTPEGLTYLFRCLDLNGRGFLTTADIHTLFRDVHQKWIEGGNYELCIEDVRDEIWDMVKPADPLRISLSDLLSCKQGGTVASMLIDVRGFWAHDNRENLLQEEEEQVEEA

SEQ ID NO: 65652 - protein, 158 aa, Zea Mays
MLSGHAVTLSERSASGTRLIEDVACEAGDEEEADAAARVVYRASFQELMPNYLQYDTIIWALISLLLVLAWGIGLLLLLYLPYKRYVLKKDILSRQLFVTESKIVYKVLATRPSYMPFMGIVKKEIKVPLHLIVDVIIEQGDCVVPISVSTFGNYLFM

SEQ ID NO: 65653 - protein, 248 aa, Zea Mays
MSMAASRRLLHLLPRLELCLRSRALSIPLSSRAQGMARRKLVTCRQGAFEQGNAARDKAVPIPDKVLRHCKYANGRALDLEPIEKNFANESMQFSFEEETDDMVCEISESVVRDVEKAAIELLAARGLLNDGFYAESFSRSRWLTSTWGPRRIKQALHQKGVPEAEVDQATRRVFQDGDDYGKEATFGMSEASMDHLFAQASKQWQRAQSLTLESRRARMVRWLQYRGFNWAVTNAVIRKLEAQHPPP

SEQ ID NO: 65654 - protein, 118 aa, Zea Mays
MEKNLAAVHGRRLVTVARLCARYKTFRKKRMVNVLDVLETIKSSSTTPKNIAKTSEAHTETFDAEASKPQSETEAGPSEPAKVKSLEAEKTKIAEQILAEETSAAAPEASSKVLDYIV

SEQ ID NO: 65655 - protein, 544 aa, Zea Mays
MARSPPPPPPSPAQGNGNGSGSGSLTARDALAYIKAVKDNFQEKRHTYEQFLQVMRDFKSNRLDSAGLIARVKTLFHGYPDLVLGINAFLPKGHAIRPQDLSEDKEPVDYPRAINLVNRIKIRFQQEEHVYKSFLGILSMYRMDNKPIQDVYDEVTLLFHGHPDLLEEFTHFLPDTPIPPPEAGTTSKVRNDDKNAITHSAMRAQTVQSERALPSAADSDSSVDRLDLEHDIQKECIEKDKVRNACHDQHRGDYKRNRMNDEYENEDLDAEQSGPKSQRKVEGTGDDTPGVVTMSSFNCNEGDNDPEEESKVRNDNKNAIMHSAMRAQTVQRERALLSAADSDSSVDRLDLEHDIRKGCIEKDKVRNACHGQHRRDYKRNRKNDEYENEDLDAERSGPKSQRKVEGTGDDSPGIAAMSSFNCNEGDSDPEKERYNERGKSERVLTFNSKEGAAHEASTFPSKEKYNLCKPISELDLSNCQWCTPSYRLLPKNEVERLSICAKISMKKSCLYVKMTCLSWTCCWNLLVLQLSVLRSWWKVWKATH

SEQ ID NO: 65656 - protein, 313 aa, Zea Mays
MAMALRRLAGVSGSPSASSAAATVLLRSALTRPISTGFREERDTFGPIQVPNDKLWGAQTQRSLQNFDIGGERERMPVPIIRAFGVLKKCAAKVNMDYGLDPTIGKAIIQAAEEVAEGKLDDHFPLVIWQTGSGTQSNMNANEVIANRASEILGHKRGEKFVHPNDHVNRSQSSNDTFPTVMHIATAVEIHSRFIPSLQQLHDSLHSKTIEFKDIIKIGRTHTQDATPLTLGQEFSGYTTQVKYGIDRINCTLPRMYQLAQGGTAVGTGLNTKKGFDAKIAAAVAEETNLPFVTAENKFEALHMTLLLRAVVP

SEQ ID NO: 65657 - protein, 1263 aa, Zea Mays
MELVEDERLESMELAAQNKGLPSMLYLDSDTLQQLDSFRGMLSQFPPTTVRMKLPFSIKPWTGSEDNVGNLLMVWKFLITFTDVLGLCPVTLDEFVQSLHDYDSRLLGELHIALLRSIIKDIEDVARTPSIALGVNPGGGHPQIVEGAYAWGFNIRSWQRHLNLLTWPEILRQFALSAGFGPQLKKRTVEDSYYRNDNEGHDGENVILTIRNGTAAVNAAAKMKERGYTNRRRSRHRLTPGTVKFAAFHVLSLEGSNGLTILEVAEKIQKSGLRDLTTSKTPEASIAAALSRDTKLFERTAPSTYCVKSPYRKDPADSEAVLSAARERIRAFQNVLSDSEAEKEVDEAERDDDSDCDDGDDDPDGDDVNTEVEDDKDPLLAVKSQDEVPSTTTVIGIKANLDGVGNALNSSSSFTKSAKGAPLPSLGRSNAADTSNDLPLGVSSANHEVVPDDSENTQIDESNQAEPWVRALAEGDYCDLSVEERLNALVALVGVATEGNSIRAVLEERLELANALKKQMWAEAQLDKRRFKEEFTSRVQYNSDMGLKPDIYQENNVTEITSTPACDAYRENDEHVGTINNCEMLDQHNQGNAGSLPYERNGVCQEILATPDTSYVQQYAYADKRRSQLKSYIGHRAEQLYVYRSLPLGQDRRRNRYWQFTTSASPNDPGSGRIFFESKDGYWRVIDSEEAFDSLLAALDTRGTREAQLHSMLQVIEPTFKEAIKRNVSIELSAGRYPKNGATDMIRANYHSEVGSSSSTPSATSDSITAYSDSFKVELGRNDFEKTAISKRADIFLKWMWREFYNQELTCAMKYGKKRCSELLHSCNCCYQIYLAEERHCSSCHKTFKSIYNFSDHTTQCEEKQRTEPFWNMQNTDYSVPIGMAYIPSEALQPFWTDVYRKSWSVKLYTTKSIAEIFQLLTVLEGAIRPDCLSSDFETSECLNSQVGSASVLPWVPDTTSAVMLRMLDLDSAILYVQNQKMDRDDGGFMKFPSRYTVAKSKQETTPETAGLDLYDGRWLPGSGRRGRGRGSRGGSRGGRGRSRGGRIPRGVSSSSRIEFKGGIVASDKAPRKNVRRGRGRGRGRRRGRRTVRPRQPSVGRARSIPKENLLGSFSMLSSSKAATIEESPRSSGADEWGLETRTTYTECDENSSGSQSEDNEENGQPMDDDYEDQVPDYSIGYSTGSRHHVMMSMMDHDSDEEDEDAEGDENVEEDADLAVDDADVEMDEDDEIGDDGEDGGVGGEMNADEDPDATSYSSDYSD

SEQ ID NO: 65658 - protein, 228 aa, Zea Mays
MDLAASRGGSDQNCAHAFHACAAGATACRSPMRQAASAVLVAPAATRSAVLRSAAVQRPLRAAPAAAPAAFPAAAARRHQAAAIADPSAAAAALVVAAARTARAPAPAPRAAAAPASSPVRGARLAASALSTGVSAACRRAAVRCDLPAASASRRAARGVRPAAAPARERAAAVRASVPRRRRARSAPAAACAPAPGAKEDAAARPVVVIPAVPVDACARSEYYITTS

SEQ ID NO: 65659 - protein, 197 aa, Zea Mays
MGMALPLPPASQGLLRSRRMSFLASPPLSLKAAGGISIPCPWRLDGRRPRAAPASVPRLASVRSVVLDIEGTTSPISFVTDVLFPYARDNVRTHLDATYSTRETKDDIALLRAQGHIWRTGFECQEIKGVVFDDVPPALERWHASGIKTYIYSSGSREAQRLIFGNTTYGDLRRHLCGFFDATIGYAVHLVSHLSAH

SEQ ID NO: 65660 - protein, 342 aa, Zea Mays
MQGRMRGARRSARGESSRKAAGREVEPFTLCGEMSHLTRATSEPCRRARGAAFARRARPFSAYELVSAREAGRAGGAGFSAADRAYLGRQHIPTKGPWGVDDVESEAYVSQFSADGSLLIAGFRGSRIRVYDAEKGWKIHKDISCRSVHWTVSDIALSPDQRFLAYASLTPIVHIVNVQNAGKESHANITEIHEGLDLTGGDEDEDFGIFSVKFSKDGKEVVVGNNEKSIYVYDLSANKVSARIRAHKADVNAVTFADETGNVLYSGSDDSLCKVWDRRCLSGEKSAENQTLGHQENVFRREIVGSCIIAIYYVGYFFYWTLSFSEICYRTLKIIRTLPSVF

SEQ ID NO: 65661 - protein, 449 aa, Zea Mays
MEPGLSIESGSAIRVAVLPVGGPIPPPRLREYAALVARHARVDLASLRTYYAEHQKSPFQHQPWETGCLRLKFVLGGCVPSPWEDFQSSRKVLAVIGICHLPSSPDLDHVAADFIDAARSYPSALANRCFAFCPTDAQLSAKKRDDIIMFPPSDQQSLELHMLTMIQDLAASLLMEFEKWVLRAESTGTILKTPLDSQSSLGSEEVIKAKKRRLGRAQKIIGDYCLLAGSPVDANAHYTTAIELARLTGDVFWHAGALEGSVCALVVDRMGQSDPILEDEVKYRYYTIIQLYRRATLQDNAQRVSPVSFELEAALKLARYLCRRELAKEVSDLLMGAADGAKALIDASDRLILYIEIARLFGTLGYKRKAAFFSRQVAQLYLQQDNAYAAMSAMQVLTMTTNAYHVQSRKTMKMNHDPSKEPRAGNTDSGKLVFFDHFTHSSHQLVRVA

SEQ ID NO: 65662 - protein, 127 aa, Zea Mays
MGMHQSLGIQLAQLGKDASAAAAARRVSGQRKAVEVESVATAGKQETREVVKKLFRAEFVERQHQGLDEDTDLRALENGFVSVTPLNVHGQVEPEIQAPASDWLSAAVSLEKEKEAAPATAEAHSAA

SEQ ID NO: 65663 - protein, 199 aa, Zea Mays
MRDPWRQSNAAPSPSLAPATPPAPATSSPAALLRPQREAFEHGLLPIPKLIFPEGMLAQTLAQLKEKLAASVPDGRVRAAALAKAQQIPQEQAALALGTLAAMLPAEDPVLGDGAMDGAAADIRDVLLFLYIQSYKRLVHLRVRWLVRSNSRRFMPSQANEEIHQLSFLQKHMANILTLLADSVEGEGDDSLVFTPSII

SEQ ID NO: 65664 - protein, 624 aa, Zea Mays
MCSTAVLLVRTGVVLVCLAALARAPSKVHAAAGTGDGLLAIPTNASLSHCPSWCGDVQISYPFGIGPGCFRQGFELTCDHTAPSPRLFFVSGNSSIQVTSVHIGISRVRVSAVGFNVTMSAGVDTYTQSWKAPPDNREIMERANTPYSACTGLGCCMIPIRGGQGITLKLGRLNSTIPHFGEALSRVKIIVSQYYEFVADDVYTSWVNTSNVDDMLFYIAIMDQPSCASAQSQENKNTYACSSESICDDDLPPVVSQGGYNCFCPGRQIEGVNPYIEDGCIAYYNPEAPSIRNCMRLCGNISVPFPFGIEEGCYANDNLRLNCTSNGTLILDRGYAQYHVTNLSLDDGLLMVTNMLNATSFNNMERVVITNYDGYYHNNFQPTYMAVVDGNYDFSQEDTTIKWVIANITCQKAMQNNATYACVSDNSICKDVMQGNIRDGYRCKCSDGFQGNPYLQNNCTGIVIGLVCGLGSISFALGAIVLTGKWKKGIQRRIRREYFKKNQGLLLEQLISNENATNKTKIFTLDELEEATNKFDATRVLGHGGHGTVYKGILCDQRVVAIKKSKIVEQIEIDQFINEVAILSQIIHRNVVKLFGCCLEDEDCNGSIRSTCLFTLSCCNTNFP

SEQ ID NO: 65665 - protein, 356 aa, Zea Mays
MATSPPQNPSSGEPSDASSLAAAALEAPVRVWRSLVARFPPLPDSSSFLAGVSDLQLRYFGNSRPRRRRRSALPLPLRPVAAHSARIAGEMPKAFVILDDVVQHTLTNLHSIHKSLLFWQAKAEGTNSQKVYFMIFERGPRAFVDATYQTLTRLGSNGRPVQYILHSASDMVSTKLAALTSMQHCLAAFLAEVHSEVDKCREGLTENSDKSLHTLFIVLNTTFSKLEVSLRNACEGQDELFIDDGNLHELFGKLPEVDVESSEWTEALATDGTSLIYQNLQKLDSFLSSQLSSHKRPNKLTIYWLPYTCGAVGLSVCSLWLLRHSSLMGSPDIDNWIRDAKESVAGFWDEHVEKPR

SEQ ID NO: 65666 - protein, 165 aa, Zea Mays
MLGIMPLAERLGYATEQLAVYTGPTVGGLLNATFGNATEMIIAIYALKNGMIRVVQQSLLGSILSNMLLVMGCAFFAGGIVHRNKDQVFSKATAAVNSGLLLMAVMGLMFPAVLHFTHSEVRQGASEVALSRFSSCIMLVAYASYLYFQLSGRSNIYSPIGRRGA

SEQ ID NO: 65667 - protein, 152 aa, Zea Mays
MCIIVFFLRDRSLALFFVNYLTVEQHWHPPWLWWDWEQQSDSHAGYGYKYDQGRGHSPPWVMLGPASPPWMVAVDPVGASSGDAARNRRRCCLQRDFSEMVTVAAADGLFSELVEPEARTFVLSSATIHISLFRCHLQARGVRGGARKGAKV

SEQ ID NO: 65668 - protein, 274 aa, Zea Mays
MLSQQDETIVWKKTNKRECYKSRKFGPELCGHDPESPYYQPLSPCISGTRSQRWIPIEHRTTWPSQARQNSTELDIHGVHSEVFADDNSSWDSMVRNYWSLLSPLIFSDHPKRPGDEDPQPPFNMLRNVLDMNAHFGGFNAALLKSGKSVWVMNVVPTNAPNYLPIIFDRGFIGVQHDWCDAFATYPRTYDMVHADGFLSLEKTHKHRCSTLDIFLEVDRILRPEGWVIIRDTAPLIEAARSVVTQLRWDARILDLDIASDEKLLVCQKPFLRK

SEQ ID NO: 65669 - protein, 296 aa, Zea Mays
MPASPSLSLFHPLLTPPQRHCSFGLVEERYIHPGLDWLVLVLLLNGRICSMDFHSKATNYLVTASDDESIRLYDTQDAVVVCIALCSGKENFLSCSLDRTILLWDHRAEKPQGLLRAQRRPTVSYDAQGMVFAVAYGGRIKMFDIRKFGMGPFATFSVGTDDSEAHVVQFSGDGRRILLTTKAGRVHVLDSFEGNSIASFRAKPILTNSTLEASFCPEGNHIVSGSGDGSVYAWNVESGKVACWESTDVKPPRVRWSPGSLMFVTGTSELSCWVPDLSKLESFTISHTNTRSSSSL

SEQ ID NO: 65670 - protein, 671 aa, Zea Mays
MAAIVAARASAPGRAAVSTIAAFHSHASPSRALPLASSSIGGARRYHHAPACCFATKPTAPAAAELVDQDLATATQEAAKPRRKRRSRKAKKSATAAKEEDGTDDKPVAAAEDEAKRKKEAAGAEDSARALVAGLDDVIVNPVGLGRRSRQVFDEVWRKFSRLGQISSASSTALAEEEQAVLIRGGPMCEFTVPGAQDTTVLVVGATSRIGRIVVRKLMLRGYNVKALVRRNDPEVIDMLPRSVDVVVGDVGDPATVKAAVSGCSKIIYCATARSTITGDLNRVDNQGVRNASKAFQDYYNELAQLRAGKSSKSKLLIAKFKSAKSLKGWEVRQGSYFPNTFVSRFDEGIDASLDFSEDQQAVFSGFVFTRGGYVEISKRLSLPLGSTLDRYDGLLFSVGGNGRSYVVILETGPLADTTQSKKYFARMTTKVGFCRVRVPFSSFRPVNPQDPPLDPFLVHTLTIRFEPKRQRPGEASQNSSDPRNFELKLEYIKALPTGQETDFILVSCSGSGIESNRREQVLKAKKAGEDALRRSGLGYTIVRPGPLQEEPGGQRALIFDQGNRISQGISCADVADICVKALHDSTARNKSFDVCYEYVSDQGNELYELRMQSLRLQEWSGLWSTLSFSVGKVGFGLFCCSSSIRQLTPMVDNQRFSALILLGSRWRLSD

SEQ ID NO: 65671 - protein, 76 aa, Zea Mays
MYRAAGDHIRSLKVNRQKYGRGQPTATGSWVLGATDFSRLLNDGEGGAYLTSPHVGMVVAIKKLNPNDIRFECSIP

SEQ ID NO: 65672 - protein, 872 aa, Zea Mays
MDPIMKLLEDDEDESLHSGADVEAFTAALNREVEASASASASTSTSVPAGSSSQPTDHGAGLLPQEHKSLLNHDPGQWQDPVKNEIVNQESQQQEQTHAFRNDHPSRPEMVSQGSNNCPLPTNTPKECDLLKAKQEPGSTSQQGIVAQHQPMQQMKSEQTPIVSQQQSMQQMKNQQTPVTNQTNSATTTAKAPVVTFHMLIPILSRYLDKARDIEVQSIFAKLRKNEVSKEYFLKTVRNIVGDKLLKQAASQYQMQAQRSPQTNPSNYSLSGQVSGQQTAPSGSVTGDEQKGYPGAHTIPMRQAIASTRPPQFRPSSSGQMRSNTGYPPSQTNLHKANEMGNMSDGKGVHMLQTRPPNNSIPVQTMQHHVQRPQTSSPVFGANSIHARPFPRPLGGPAAPFRPQMADSNPKAQLIQGAVTTVSGSVPTRSIVSGNAPGNQSTRQQSANKEQKTISFTRTAHMNNETVSQNSEFSQNSFAVMHAKQVNQALGSSKVSAGMESQSQQLSAPKPLAATSLSQTQSHGIQEEPKIQIQSSVQAPPAAASKTPQRKASSGQKKPLEVLGSSPPPSSKKQKVSGGFHEQSIDQLNDVTAVSGVNLREEEEHLFSAPKEEGRVSEVARKVVQLEEEKLILQKGPLTQKLAGIMSKCNLKVIGTDVERCLSMCVEERLRGFIRSIIRFSKQRVEVEKSRHHFYPLSSDVRSHIMRVNREAREQWEKKQAEDAERIRKQNDGDGNANVDLEKDRIETRGLSKHAKTYKEDDDKMRTTAANVAARVAAGGDDMLSKWQLLAERNKQRSEGGDGSSGSVPGNMLQHRPSLKSGKDLREEHEVEKRGYSTMLGSGGTMILVVETFLNDKMPILLFVHTDCISNL

SEQ ID NO: 65673 - protein, 909 aa, Zea Mays
MEPKPSPPPAAPSRRRGAATKRKEKAASAVPSGSPSPKRQARERGPVYQPSLPPPQPRSRQPARKPQRKPARNKSPRRSVEPPRAQEEEEGPPPLPPPRPSLEKEIEAVLSRGAGVHVVPTFAGWFSWKEIHPIEKQMLATFFDGKSERRTPEIYLGIRNLIMNKFHCNPEVHLESKDLCELSVGEMDARLVILEFLAYWGLVNFHPFPSVVQEHKLVESKSSAETAEGISQAEKLFQFETVHSYLVPVSKEAEAISPVQFTSLLPEPTLAEDAIGAAESSVEYHCNSCSVDCSRKRYHCRTQVDFDFCSDCYNEEKFDEGMSKSDFILMESADVPGSGGSNWTDHETLLLLEALEIFKGKEWHEIAEHVATKTKEQCMLHFLQMPISEPFLDGDDFNETPQKITKQDSAETGPSDVPDKMDVDGNAEGKESTDEKAYKKADSSSAETRTKLADQNISAKEDTMKLGDDDLVASIVDEPNKSSLVDPAHKKNSANADVSGEHPSNFITNILRSTFEAVDHFLGKEDMGSFAEAGNPVMALAAFLASLVERDDAVSSCCSSLRAISEMSPALQLATEHCFILPDPPSDLKDPASTFSPCAGGESQEGADTTQNVNDTDKNNSEREDSDLALEKESATFTSQKQHLEELSDAKETFIGGPEAEAKSNSTKDSDNPIAKVGSSVASDKMRDGCNANAIPCPATSNHTTEPSSVASQEASPASTKDTAIPEQVERPSSEELLADVSLPQGKVEPKKTEPAPAASSSIQQHGCKQAGNGNTEPKSKENAAADDDPITRLQRAAGTAISAAAVKAKFLVEQEEGYIRQLAALVIEKQFQKMETKMSFLTEVGNLVLRSRDLTERMRKKLLLERSMIIASRMGAAAASRTIQHGAPVTTRLPVGHVHALNPQLRRP

SEQ ID NO: 65674 - protein, 217 aa, Zea Mays
MCIAREEGVAALWKGVIPGLHRQFLYGGLRIGLYEPVKAFFVGGAVVGDVSLLSKILAALTTGVIAIVVANPTDLVKVRLQADGKANTIKRSYSGALNAYATIIRQEGIGALWTGLGPNVARNAIINAAELASYDQFKQMFLKLPGFTDNVFTHLLAGLGAGFFAVCIGSPVDVVKSRMMGDSTYRSTLDCFTKTLKNDLQQSKQSALIRSVLCFDH

SEQ ID NO: 65675 - protein, 268 aa, Zea Mays
MRQVGSPLDLNNLPEEYGKQAVESSTTTATSSSHAVRTGIKKKGDGGKDDAAKVYECRFCSLKFGKSQALGGHMNRHRQERETETLNRARQLVFGNESLAAIGAQAQMTMTFRDVNMAGAAPPTVLGGNFRGGASATGGSSVGDPCLPFRPVHPGLSSQPSYHYLYTAPSTLHPMSYPPATYPGPPRQPAVGDYVIGHAVSAGGGDALMQSTHRSSFSCFGAPLTAPPAAAAAGAAAAAMNVQADKLNCNCSFGCGGHSRNNNVNAST

SEQ ID NO: 65676 - protein, 629 aa, Zea Mays
MLLPILCSSYGTRHLPLLQCFHPISFWRCCTGYSGGCASFCSSGNSIIDGSCSGVACCQAPVPKGLKKLDLEFSNINITNSGIDYGPCGQAFIVEQNSYVFSLPDLNYTVDTKPQYRHVVLEWSVNGSSCEEAKLSGSYACAENAYCYNSSNGIGYRCNCSSGFEGNPYLQGPNGCTDINECITRNPCTNRCSNTIGGFQCTCPAGMSGDGLKEGSGCNGVSTLVIAIVAGLALLVLLLILGFWTHWLVKKRKLAKTRQRYFMQNGGLMLKQQMFSEEAPLHIFTSSELDKATSNFSDDNIVGRGGFGTVYRGILSNQVVVAIKKAQRVDQTQTEQFINEMIILSQANHKNVVQLLGCCLETEVPLLVYEFITNGALFHHLHNTSVPMSWESRLSIAVETASALAYLHLAAKMPIIHRDVKSSNILLDDNFTAKVSDFGASRPIPHNQTHVTTLVQGTLGYMDPEYFQTSQLTEKSDVYSFGVVLIELLTRKKPIMDDIAEDIRSLALQFSMLFHGNKLLEIVDPVVAEEAGVRHVETVSKLALRCLRLKGEERPRMIDVAIELEALRRLMKQHFILKNESLLQESCCNEEMSIDAPSSLFLGVDGISDDEGMEIIPLTCPSKILTSYP

SEQ ID NO: 65677 - protein, 931 aa, Zea Mays
MNPLPPPPGPRRVPTLLPVTAAVVSPVLFTNSEFHCAALLLPPSLSLRVRSLGSHAAAGCGGGGVRGLGFSVWRSLGVCEEEEEEEEEEEERMGTAGKGAWVVPAPAYREVEGWEGAGDDAPGFRCAHSLTAVAPTKGHGPRLILFGGATAIETGASSGLPGIRLAGVTNSVHSYDVETRRWTRLHPAGEPPSPRAAHAAAAVGTMVVFQGGIGPAGHSTDDLYVLDLTNDKFKWHRVVVQGAGPGPRYGHCMDLVAQRYLVTVSGNDGKRALSDAWALDTAQKPYRWQKLNPEGDRPSARMYATASTRSDGMLLLCGGRDASGMPLSDAYGLLMHTNGQWEWTLAPGVSPSPRYQHAAVFVGARLHVTGGVLRGGRAIEGEGAIADILLDDFLVAENAPFQSEITSSMYNVDRVPRGETQNRNNNFHSDSPVHQSTNNRQEAASGFSADKKSIDMLIEASTAEAEAVSAVWRAAKEASAASSEDSLSEGIGSESPLSETSPMPEDFDDGGSLEPDVKLHSRAVVVAKEAVGDLGCLVRQLSLDQFENESRRMHPSNNDQSYPGRRTLNRQRSPQGLHKKVISFLLKPRNWRAPADRTFFLDSYEVGELCYAAEQIFMQEPTVLQLKAPIKVFGDLHGQFGDLMRLFDEYGFPSTAGDITYIDYLFLGDYVDRGQHSLETIALLLALKIEYPENVHLIRGNHEAADINALFGFRLECIERMGESDGIWAWTRFNQLFNYLPLAAMIEKKIICMHGGIGRSINTVEQIEKLERPITMDVGSIVLMDLLWSDPTENDSVEGLRPNARGPGLVTFGPDRVTEFCKRNKLQLIIRAHECVMDGFERFAHGQLITLFSATNYCGTANNAGAILVVGRGLVIVPKLIHPLPPPVNSPESSPERGDATWMQELNIQRPPTPTRGRPQAAGDRNSLAYI

SEQ ID NO: 65678 - protein, 172 aa, Zea Mays
MKSMLFCFLFSYIIIRGWVIYFIVTVLLFSATFMFLTRLTNQGKQMSEVKVVSPPPLNTMEQLLAVQNAISKIEELVQDANIVLLKIRALLLAFPSQATDRAILALVLMALSLAIVPTKVLLLLVFLEVSTNNSPLRRASTERCTRRLREWWFSIPAAPVVVEKEKEDKKTR

SEQ ID NO: 65679 - protein, 197 aa, Zea Mays
MGTQIVREQTSGSLTAIVVDENLCHARAASCMLANLQCKVIVYASPVDALKFLKDHQRDTDFALVEVNMKEMHGFQFLDMSRKLHKSLQVIMMSADTTWPTMKRSVELGARFLIKKPLDANTMNNLWQHLDLKFQRTDKIKALFPGIEGKTGNAFEEGTNKQKGTHLMWTPFLQRKFLQAVELLGEEDTVAHECELR

SEQ ID NO: 65680 - protein, 526 aa, Zea Mays
MLISCVRMNLHLFNQIQRCSAISGSGSAGRRKNLVLHLIRSCRETEMKFLVRTLVRNLRIGAMMKTILPALAHAVVFDRNCAADPAVSLEGIKSQLQSLSTEVAEAYNVTPNLDLLIPSLLREGTAFSASSLAMVPGTPIPPMLARITNGLTQSLKAFHGRSFTCEYKYDGQRAQIHKALDGSVRIFSRQMKESTSRFPDLVNMIKELCKPEVSSFILDAEVVGINRKKGNELMSFQELSSRERGNKHSSISIENIKVDICVFVFDIMFHDGERLLDCPLRQRRKYIHDLFHEKPGYFELAQQLNIEACEASPDNSSTLARMDTFFRNACQSSCEGIMLKTLDVDAGYSASKRCDSWLKVKRDYVQGLGDSLDLVPIGAWYGNGRKAGWYSPFLMACYNPETEEFQSVCRVMSGFSDEFYKEMKEFYSGERILPKKPVYYKTDEQPELWFTAEQIWEIRGADLTLSPVHHAAIGLVHPSRGISVRMPRYIRSVPDRSPEDCGTAADIASMFKAQTRKMDVSSEGQE

SEQ ID NO: 65681 - protein, 203 aa, Zea Mays
MSGGTPAASSSLRAALSYCVRQVRAYDYHHYLCLLHLAPAMRKAAFTFRAFNIETARAMDVVSDPRTCLMRLLWWKEAVDKVFGNKLVEHPVAQALSSVIADHKVSKHWLKRSVEARINDANREEGTIPGTSAELERYAEDTQSTILYMTLQAGGIQSTVADHAASHIGKASGLLLLLKALPHHVNKQGTVHYIPARLCSFHP

SEQ ID NO: 65682 - protein, 631 aa, Zea Mays
MGRGADEVVKVVDSEDGEGEEEEAEAAAAEGSSKETPMLPRMPVRVLLAEGDDSTRHVISALLRKCGYRVAAASDGVKAWDILKEKSFNIDLVLTEVELPLMSGFLLLSTIMEHDASKNIPVIMMSSHDSVSMVFKCMLKGASDFLVKPLRKNELRNLWQHVWRKQLANGGPDVQHIQEENLAERMEQKTGVTKDDNLNSDGPCKNRECSEQESDAQSSCTRSELEAESKQTNNILEYMQSTERHLSIRSHKDLELNGETKTRTKGNNLIPTREDDLLPKKRTCLNDNNSERTSRDMELVHIMDNQQKHDTQRDVDTMRTTSRRNDEKNSIPAHQLELSLRRTDYGKLENHEKNDRRTLNHSTSSAFYLYNCRTASSLGNAGDGQLCSTSETLVDVENRNGDLAALSEDTTETNRPPIRVVPFPVPVQCFTFDGQPFWNGTPVASPFYPQSAPPIWNSKTPTWQESTPQATSLPQKSQQKEPVEMDAKPVENAEEQFVVGPPSASGKQLHVEIPKDDLRHISPVTGESGISTVLDSTRNTLSSSGCDSTSNQITAPTEPSSNVYRGVPETARAEGLRHLSQREAALNKFRLKRKDRCFEKKVRYQSRKLLAEQRPRVKGQFVRQDHSIQGS

SEQ ID NO: 65683 - protein, 258 aa, Zea Mays
MYGTSDPTAAERTAFRRAEKQYKLYKTLNVKGRSRSRSRSGCRPSSGEGGGADLSAVVDFHALLAADGELPDGIGRRECPGFDRPVFCFLDRPGFYFIPGALSTEEQCCWIRESLKTFPQPPNRTNLTAIYGSISDLLIAAENQQILVEAENPDIQERNKQNNCGGKTESKYFKFVDSESQKGEEHRSNAATTLVRKLRWSTLGLQFDWSKRNYDVSLPHNKIPGALASLAKKMAIPAMPSGEEFKPEAAIVNYYGPN

SEQ ID NO: 65684 - protein, 454 aa, Zea Mays
MAAEPREPTSSLDAQLAASSSSAAGVGGPNPCCATQWKNCQKLVRSRTALREAVKLLQAENEKLRKENSELSKVCKEEHLRGDSAEAARATESDARDLLEKEIIELKTQNMSLKQTQNTCKNNDELLRISELEEENRKLIQILGEERKKITSEKKKIEEEKCKTLEMQRIWKSEAQKSEEYRRVADTERKVANDWRASCERLRSEANELRAQLTAQIQKTEEILKRAEAEKQKVAREKKRADSEKSLSEKNRTLVEVEKKKVTEEKCRADNLFAKLEEQKKLNEHLRTSIQVETKNAIEEKKRGDHLFQKLEEMREQTECLQRKANEFSAGRDVISSGKCGRRHIDRISENANVKLLKEKLKLKKEQLKHVKNVSKLDKAKTALIRRELQSLKQDWTQLLGRFNMLDDHLARGVEDIHVLTQAGTVPFGSSIPSEYTSYQLPRESCSRSISGQG

SEQ ID NO: 65685 - protein, 454 aa, Zea Mays
MLDEGCLGQPRAKSICSFLQELNDAVKAKFVEEFPTHLIDTNPSFFSQFTVVIATQLPESSLLKLDDICRKADIVLVAARSYGLTGLVRVSVKEHCVIESKPDHFLDDLRLHNPWTELKQFAKSIDINDKDPVVHKHTPYIVVLVRLAEKWADAHDGNMPSTRQEKKEFKDLIRAHMLNVDEENYKEAVDSSYKVSVTPGISNEIHQIIDDDSAEVNSSSEDFWILVAALKEFISKEGNGELPLEGTIPDMTSLTEYYVSLQKIYQAKAEFDCLALEHHVKEILKQIGRDPDSISRAYIKTFCKNSRKLRICRYRSFKEEFSSPIVSEIQRYFSDEDCSYAMNFYILLRAVDRLAANYSRLPGIFDSEIDEDIPRLKTVAASVLSEMGLNGASLSQDLVTEMCRFGGAEIHPVAAFIGGVASQEVIKLVTKQFVPLGGTFIFNGIDLKSQVLVL

SEQ ID NO: 65686 - protein, 235 aa, Zea Mays
MSIIKDPDLRRKEQWEKSAQAQKGFNYARLFGYGDLGCPSLSAAEEYSLHSRYLTKANSLNLSEIAEMKIIYRGGVDIEGRPVMVVVGAHFLLRCLDLERFVLHVVKEFEPLIQKPYTIVYFHSAASLQPQPDLGFMKRLQQILGRKHQRNLHAIYVLHPTLGLRTAVLAMQMFVDGEVWKKVVYVDRLVQLFRYVPREQLTIPDFVFQHDLEVNGGRGLIVDPRTKHIYQRTSS

SEQ ID NO: 65687 - protein, 321 aa, Zea Mays
MDPEQTFLRVHARLSGTLSQLLTPRIRLVLEYLYLAGAVALFCLLVVMHTNFVQQPGCSSEFSGIEFGEAQLVQIKIISGGLWSSRGASYIMDLQNLGRSAEKILEVNGDKFNILASKFWSTWVGPGARRSLPDLKAAGEGSVHHPLSAKESFKAAVTFLFRKWYLRAVSFWKNIKQLSENTLQLMVRSNWNDFLHIIKDLQLPSMDHLISTIVQWFERRSKAFEPTYLYGVEKGYFLLSEGAKTRHGVRTINITISARNPCFGNRWQQLLINSIVGYDTILTNSLVNSPGHGYLYNFQTKELYDLSYGHEPPEGPTRFGG

SEQ ID NO: 65688 - protein, 694 aa, Zea Mays
MIGAKANAAGPCPEYAEVDPTGRYGRFSDVLGKGASKIVYRAFDEYQGMEVAWNQVKLHDFLQSPEDLERLYCEIHLLKTLKHRNIMKFYTSWVDVSRRNINFITEMFTSGTLRQYRQRHRRVNIWAVKHWCRQILSGLLYLHSHNPPIIHRDLKCDNIFVNGNQGEVKIGDLGLAAILRKSHAVHCVGTPEFMAPEVYEEEYNELVDIYSFGMCVLEMVTFEYPYSECTHPVQIYKKVISVKDPMVRHFVEKCLATASQRLSARELLEDPFLQSDDVVASLDGGNYHVPANYIPQPSYLGHTYSNGSMMSNGFSESIDEDALSEDCEDDDMKGQDGIDLFNENEGELLGNVDITIKGRKSEDGGIFLRLRISDDDGRVRNIYFPFDVEADTALSVATEMVAELDITDHEVTRIADMIDGEVSALVPDWRPGPGIEEAPDTSYCHDCGSIVSSCGSLYAYMSSGRRGCQCAEVHGRFEEITFEADGEQCDLQESAGSSDDGGGPTEHYVKGKESTHVNGLLQMGRRDLSNQLCFSSFQEQSCSSNHYENETNHHTNGFDMKHEVKIAKYKARKMAQLKRAIHPSLDFDNANGVNRMKPSLNKLQSFHIGKNHSFRVPTGDRSPGKVSTDYHSNLNSQLSHSRHPDPGAQRAWHCEVNAAGSSDCMFTARRYYAGAQLPPNLPRTKSVPLHAVDV

SEQ ID NO: 65689 - protein, 2289 aa, Zea Mays
MDLAGMKRRELQALCKRHGLPAGGTNADLVGRLDAVLSGPAVVEEEVAGVPARKGCLKQTGGGATEAKKVTFGAEVGKARRLRSRVIWSPVVAKTRGKSARAGTDSAAEDGISADVGADVPVRRSRRNSFNPAEAEEAGEAVAVDRKPKRKNQENDEGVAVIAQARVTRRSNLEWSATVLPPAVEKKRGRQNAAESDVQKSALVEVTARTTRSRSIVPVVVPPTVVENKRRKTGDPQTTVELTMLSDVPRSDFPATRSLRNKIVHVNNSVVDETHTTRQLENKMRPSTRRHQQVASSPEDKGQKIPATSKSPLLRWSRRNYSEANSANSVNIKLAKDSSTAQPLAHHNSHSEDLEKQPAVKEPIKRSTRKSIALAALEKEKDVIEGKNPEAHVRRSTRKSVVQVKDTKSIVEETQYANSEDVAKQPATKGPARGLRRKSVITELHEKEKSLIAEKNMETDEAILTRKPVIPVKNIKAVGEGIQIGKGKDVDKQFVVKQPTRRSSRKSVLPDMLENNSGLLAPKMNAEMNVRRSTRKSVLPDMHNEKQDHHKMARNENLQSGKYQDGEKQQKVKDSIRQSRRSIATVLLEGQNNDEGKKFKNPTRRTTHKSHALNAVEEVSMDHIEVGEEGLKLRKRSRFLLEISSSANVSWKHQNAQISNEKDNTEGSQQASNCTTSKRRSSKKRRTTAPEEVMPFKVANDDIVIMEETKDTLEYNNESSSKVQEICQVNAAREEFSSGPLLVTVAPSDEICTVQSVAVVIPGSESGDDANQSSDKSKQPQEHSVTQTVDDHLSETRSGKLDQSTCITGLVSDNCVVSEDKTLMSEDREEQSPVSGEQRVSLEANANEPEEKNLANVTSTDLHTKSLQHDIDRIAKETDKDVLSLVFPIEEHEEKYGVSPIAVEKCVCREASACESARKPLTVIFSNNLHTKHLQHDCDVLIKETGEEVLAQENCNDQPVPAQTDQEIKLNDELADPDVLAQENCNDQPVPAQTDLEIKLHDELADPDHEEQSPVSGERRVSLEANANEPEEKNLANVISIDLHTKSLQHDNGRIAEETDKDVLSFVFPIEEHEEKYAVSPIAVEKSFRQEASAIESAGKPLTVIFSNDLHTKHLQHDCDVLIKETGEEVLAQENCNDQPVPAQTDLEIKLNDELADPDVLAQENCNDQPVPANEPEEKNLANVISTDLHTKTLQHDNDRIAEETDKDVSSLVFPIEEHEEKYAVSPIAVEKSVSREASACESAGKPLTVIFSNDLHTKHLQHDCDVLIKETGEDVLAQENCNDQPVPAQTDLEMKLNDELADPEVLAQENCNDQPVLAQTDLETKLNDELADLAMESGCSITERNEGLVAHNLDQEGFLEATPECKQECGLPEETVISSKETGSLLCADQSPIGLESLFSQESIVESVGHCALASATTHTENGFDDSKDCHNKSALENVHVPEPCSHNDTKGGIFKNVDCMHTSQRDDRMEGVPEANTDEEHVLSAFLLDANHLNVVINSEEVVCEGEDSKELLHSEDCKASSEKTDVNDGNVYGISDAVVRCALHAPADDNYEIFLGPNTDVPRQVYNDGCSDVKEDRFASKPWTIDIIEDASVKERSNLKDWQLDSKLEGTEIVESGLYFNKDIGNILHSGSIGEITPSGSGLSKDSSVDYRGEVLDGFSMEASLERSSTRGEQNGCRLDAIENPSITLATSGYKHEGALSEEAVYTKKNYAGTCLSNPRELIMELQSHFSKENINESDPHDSLVFPTAENSADEQLVKVHHGSNLSQLGLTDLLDGPIGCSNTDVLCQCDNHKNQSNEDKVEEVEAVSAAKYIESEVVLLPSQERSNLNNEQLNTKLESPNIMGSCLNCDNDVCNTSDNGSVFVIGKRTPSASGLPEDYPKDSDLQQPVLDSFSVVSSFQDNISGKKTVSGVAGSEILSLSLATPDYKHEDGFSEEAVCRTKNYTGTSSVDPRHLDMEGHSIYSEGGTEKSNLQDNLAFLSAESGKDEPIICHVEKLVDAHASSDTYQGPCQDLGRHEEQESCMSIPMQAKESGGVLRSSHTKGSVTAAQIDLAGDAHLIVSDNAAAKQVFSEEKEETKSISSSDIDILHEKSYSSGHDDHAACAAETQFYHPQKASISDGLHLGPSSLQVESLDALDSDILYVNTGVLEQHHKEGYYEPSVYQITSGICTMSEAEPFEVLETGKDVKTPSKLDEQLNPGLDGDEAEKHSLDCGTDTSPVMSKRTLSSPGSGPCQQYVNESTTSTQSTDNHPNDLPAPRSPEQSACFQNDNDSGSAFVKAAGEEV

SEQ ID NO: 65690 - protein, 961 aa, Zea Mays
MAFSSPASARPQRSPDEVEDIILRKILLVSLTPLANPGPAVAYLELTAAELLSESRPLLALRDAAERLLIDRLSLPDPPAGSPTPFAFLVSAFRRAADEARKISTIRDAALRARLAASIAHLRALILSYARIVAGNPDTFPSQPGAQHPAAELLVFLLAEAADPLDPTPGPGAPPPPGFIDEFFSGADYDSIETAMGELYELLRQSVDKVSALGDFQRPLRVLRRLVGIPNCAKALVNHPKWIPKNQIMFIGEGRVMELYSVLGAFFHVSAIRDREFASKPDVGQQCFSEASSRRPADLLSSFTTIKSVMNGLYDGLKDILLTLLKNLDTREKVLEYIAEVINKNASRSGMQVDPLKCASSGMFVNLSAVMLRLCEPFLDNMESKKDKIDVKYLFCNNRIDFKDLTAINASSEEVSSWIESINNEHAQNNASGEARFVESQEATSSGKNSASSQLRCSKKNFSFVCECFFMTSRVLNLGLMKAISDFKHISQQLARFEDDLESNRAVRDQGGGSPQLEQDITRLEKIVEILSQDKLCYEAQILRDDFLSFIIMFMGSTSYIKNPYLRAKMVEVLNCWMPQRSGLSSTASLFEGHQLCLDYLVRNLLKLYVDIEFTGSHTQFFDKFNIRHNIAELLEYLWDVPSHRNAWRQIAKEEEKGVYLNFLNFLINDSIYLLDESLNKILELKEIEAEMTNTVEWERRPAQEREERLRVFHQWENIVRFDMRLANEDVGMLAFTSEQIPAPFLLPEMVERVASMLNYFLLQLAGPQRKSLTVKDPEKYEFKPKQLLKQIATIYVHISRGDKESVFPAAISKDGRAYNDQLFASAANILWKIGGDPKIIQEFMQLAGRAKAAASEAMDAEAILGDIPDEFLDPIQYTLMKDPVTLPSSKVTVDRPVIIRHLLSDSTDPFNRSHLTQDMLIPNTELKLQIEEFVQSQQLRKRTAAVSEIGQADGADDMAE

SEQ ID NO: 65691 - protein, 251 aa, Zea Mays
MELDRKMMMLLLIYISHLLFCSRDLLKDRQPPALLPVRHRHVEQSQHLVLDPVIVVALAPAPALIRRASSSVTAATARPRRMRHDPGQQLLHFPDDLAVLLVAGLQVPPGEHVGEDELGVGEPGLLDEAEGEVARLVGVRVDHLRLPVHHLRRHEVALLHVRPREVAQDARCLLLDGDVDLAAVRAGALGGPAMERLAEVDLAELLLEQLDLLLGPPAGLVEVQEDVVQRLLGLLRAQVPQRPDGVDGLRQ

SEQ ID NO: 65692 - protein, 102 aa, Zea Mays
MTAPDPTPNTEIQLTAGSATHAYATVIDMGGAFFLHICLYICFELISLVDTGTMFGEPIICKNIPRLVLVTGDGCMVQQELEGLDQDKCRIDSIRVYSMGQW

SEQ ID NO: 65693 - protein, 113 aa, Zea Mays
MFCSGGSGGKRRTRPDFDSKDEYNIPAGLAITVPPVPRGGAARLRLAQTTSNACGARPAHGQAPLQLRTFGVVADGARLHHPGTAPLPLLEKYRLETEVLTLIDQRSYVKLFR

SEQ ID NO: 65694 - protein, 248 aa, Zea Mays
MPSASGTRSGSTICSTSATGEAAAEVSLKIQSKSGPHEIRCVKRDFLLRTLADELPEGTIRYSAKVVAMEEDGVGGAKTLQLHLADGSTIKAKVVIGCDGVNSVVAQWLGLPKPILSGRSATRGLLRHLRLLELHLVPVPRGRRRRGERGQDAEPRGRQAAGRQGPGRGAGGGGAERDERRGVVAAAVPVPAGAGPRQHQPRRRVRGGRRAAPHDAGARAGRVRGARGRRRPGPVPGQGLRPARPGAG

SEQ ID NO: 65695 - protein, 705 aa, Zea Mays
MLLQRRGGLLCCGCGASAVAVAVSGRVPEDDGGAVVDGQPPDAKSVSGTSVSAAVTTANARQLSWAQVEAMTGGFTSAIVGEGGFSTVYLARLAGSLAAVKVHRSSERLHRAFRQELDALLRVRHPHIVRLLAFCDQRDEGVLVLEFAPNGSLHEQLHGGGAGAAPMPWARRVPVALQVARALEYLHERCEPQVVHGDVKASNVLLDAGMGARLCDFGSARAGFSAAVAVAAAGPRPRAVFGSPGYVDPHYLRSGVSPADRSSQPAAAQVKPPRVSLGSHAHTEISPTELNCRCRRATGGTHARSSRMATTLTPTQRYAAGTLLALALRQAQIHQSEPLGSGPDDEERASSASGSSSSTISSTGSDTTSGAGLWTHDSRGLLRPVFRFLEIEPKAWAGMEETAASPDAAKHHIGAFISILFEEDGESSSDRLEQEIALAKAVDVMVMSLGSDTAPDENIKDEFKYSTACTYATLESTEAGSSENLLGIVKLSLENVPVNEHRKMVLLYALLSACIADKPVSQEEEDRKSSHFRKGYDARHRVALRLIAAWLDVKWIKMEAMEVMVACSAMAAAKEQEQERENASPRSKWEKWKRGGIIGAAALTGGALLAITGGLAAPAIAAGFGALAPTLGTLVPFIGASGFAAMAAAAGSVAGSVAVAASFGGWYKCSFGTLMILSGALISSLYITVKICFKLATVTSIICGG

SEQ ID NO: 65696 - protein, 55 aa, Zea Mays
MDQYKDDIKYEEDFFVNSRGKKLFNCRIRSRVQHIHGSSVGFLICAVSVQRRYQV

SEQ ID NO: 65697 - protein, 553 aa, Zea Mays
MDDPSSASNKHKRKRGRKPKASPPFPDRSSPSPSAAPAPAGRRGRKPRRHEAPADADATRPPSPPRRGEPKPVANGGDVVAVAESGPASWDEVVRVVPCMDAVVKVFCVHTEPNFSLPWQRKRQYSSSSSGFIIGGRRVLTNAHSVEHYTQVKLKKRGSDTKYLATVLAIGTECDIALLTVNDDEFWEGVSPVEFGTLPALQDAVTVVGYPIGGDTISVTSGVVSRIEILSYVHGSTELLGLQIDAAINSGNSGGPAFNDRGKCVGIAFQSLKHEDAENIGYVIPTPVITHFIEDYKKSGEYTGFPILGVEWQKMENPDLRKAMGMKPDQKGVRVRRVEPTAPESGCLRPSDIILSFDGVDIANDGTVPFRHGERIGFSYLVSQKYTGEKALVKVLRDSKVHEFKIRLATHKRLVAAHVKGRPPSYYIVAGFVFAAISVPYLRSEYGKDYEYDAPVKLLVKHLHAMAESPDEQLVVVSQVLVSDINIGYEEIVNTQVLAFNGQPVKNLKNLATMVENCKDEFLKFDLEYDQAATQDILTTHCIPSATSDDLKA

SEQ ID NO: 65698 - protein, 239 aa, Zea Mays
MKAVGYSPYDSSGTDDDLPPAQNRGLRGRSFSGNVVASAGAFPYMRANNDLESEIHRVEQDAYTGILRAFKVQSDAISWEKESLITELRKELRVSDEEHRELLNKVNEDGTIRRMRELRQAGGSPSGLHHGNMVLYGAEPGSTTKRQRASHSIPLQSAGLQSPMMPSHSVSSAKWGPLQARGTKARTPIPLALPSVDPSSLINHKVYTRWPEDNNFYEATITRYNPVTVCFNFCYCFDP

SEQ ID NO: 65699 - protein, 1375 aa, Zea Mays
MAAVEQLKELGEKLQAVAPAPADELAKLLEKAVECLHGIEQSPVSSVMEAIQPSLKAVTREELLKHEDDNVKVLLATCFCEITRITAPDAPYNDDILRDIFYLIVGTFGGLNDVNSQSFGRKVAILETVARYRACVVMLDLECDDLITNMFQTFLVVVSESHEEYIVKSMQTIMTLIIDESEDVHESLLRVLLSALGQKKTGAAMSARKLACSVIEHSATKLEPYLKKFLMSSWAGNVSSSNDQIDHQGVVFDLYQCAPKVLKVIVPYITGELLADEVDNRSKSVELLGEIFSLPGSPIVECFETLFTEFLKRLTDRVVEIRISVVEYLKRCLISNPSRAEAPEIIKALCDRLLDYEENVRKGVVAALCDVATHSPDAIPIDTIKVVAERVRDKSLAVKCYTMERLADIYKLYCQRGFDSSTNSDDFEWIPGKILRCLYDKDFRPESINSILCGSLFPPEFPMKGRVKHWVTAATYFDKVEMKALEQILLQKQRLQQEMMKYISLRQLSQEDAPDLQKRIIGCFRNISRLFSDSAKCEENLNMLHQLKDADIWKIFTSLLNCSTTFEKAWSLRADLLKIFGEKHVLYNFVGALAMGCSYLLVNKEYAKEILSEASEQKTSGNTKLISSCMNLLTAISSFFPSLLSGLEEDIVELLKEDNEVLKEGIAHVLSKAGGTIREQLASTSSLDLLLERLCLEGTRRQAKYSVHALAAITKDDGLMSLSVLYKDMVRNSSNKSEWGDSTENCLLKIYGIKTLVKSYLPCKDAHAQPGIEKLIDILKNILTYGDVSPNMVSSAADKAHLRLAAAKAVLRLSKQWDHKVPVDVFYLTLRISQDDFPQVRKLFLCKVLQYIKERALDAKYACTFMFGVNDYHAPPYEEFKYNLTEVVQICQQVKMRQLSVQADMDLLTAYPEYIISFLVHALAHDPSSPEIEEHENVNAFGPIYWRLYLILSILLGEEGLQHSVPGMKKDSFTTIISIFKSIKSSQDVVDGSKTKTVCAICDLGTLIAKRLCQDQTSLSEAQTVPLPAQLYTPLHDNQNENSVENNEQIWLGCEKVLAHFEAVRTANMDKVESPKHKMLIDVTDEFGNEVPLGKIVKLLKSRGERKIGEKQKAPSSSSVNAENDDVLGLVREINLNNQEDLEESHKDKSEKRHTNAKDSNQKPLDFSSPKRKRSISKSRPHSAKGSKSSDERLLHTPNSERTNISLETKMKEKDRDDSTDTELLVSPSTRTPVSKQNKGAKKSNINILSSVPKKSADADSTKRTVEPRSLNGSLKRQKSKPISGLLKCSTQDSSSTDLVGHRIKVWWPLDKRFYEGAVQSYDSSKKKHRVLYDDGDVEVLNLAKEKWILIESNDSSVKRQKKDHLGTNPGSHLA

SEQ ID NO: 65700 - protein, 397 aa, Zea Mays
MEVQVFDLSSDSEGEVTAHSPDHKRPSRQPGADPNRGGGETGSSALDSLFEQAGAAKPQRHPSDALKKGKEKAVEGESAGPPKHSGELLGAAGRVLGSGSGPWSALMSKCKAGDGGNNGAGCWGSWGDRGDQLTNSTPMPRLGSERKGFDETYELRGMPQLHSDSAASSDHWKGILGASPGDVSPLWCSRDTSMKDNEDETFSQRSVSARSCDYFLVEDTSPSWLSKVKGLNFPLPDEHQSRTRQIETDEMFARRLQEQLNQQQLGSQHSEATDTTIAWTLHEQDAEHARFAAREGQSSSSQRDRSMAHLYSYGRHSPVQNFSPWASNRTPIPMPRRGGLQRNSNCPQVEQRNMLISQLTRGCFREDMDLETRLAVLDSLSEAFKNCEDTLSPDSDE

SEQ ID NO: 65701 - protein, 134 aa, Zea Mays
MAFVFSLTLDQAEHYSSPILSFWMMAASTPWRRNLPLLCGGFGPERGGRPTRIRSISPPTRPNSRTLRRRKHSRRCTPSRHRKNNPHCRRCSSSPHPTSLIQSIDAALKSSSPPIAAPSQSTDLDVLHQTLRHA

SEQ ID NO: 65702 - protein, 56 aa, Zea Mays
MSPQSFRQNLMPMPSMIRYLLLYKANQCHVTRFGLSIGLMSHPVLRDKAGCISYMR

SEQ ID NO: 65703 - protein, 275 aa, Zea Mays
MAQEDVHLDDAGLALGLSLGSGSGGASGAARHGGISRRLSREVRLPSPHPLEPSLTLSLPDEATATGSGGGGAAHSVSSLSVAGVKRERVDDAEGERASSTAALPRACAGAEDDDDDGSTRKKLRLTKEQSALLEDRFKEHSTLNPKQKVALAKQLKLRPRQVEVWFQNRRASRARRTKLKQTEVDCELLKRCCESLTEENRRLQRELQELRALKFAPHPQAPPSSATQAGAAAGVVPAPPPPQPPPTTSSTPSPTPPPADDEGRAARSHATQRQ

SEQ ID NO: 65704 - protein, 422 aa, Zea Mays
MASSSGGGGGRRMTPGGDSSASAGGRRIYRTQTAGNLGDSIFDSEVVPSSLVDIAPILRVANEVEASNPRVAYLCRFYAFEKAHRLDPTSSGRGVRQFKTALLQRLERENDPTLKGRVKQSDAREMQSFYQLYYKKYIQALQKVADKADRAQLTKAYQTAAVLFEVLRAVNVSQKIEVDKSILETHNQVEEKKKLYLPYNILPLDPDSANQPIMLYPEIQAAFHALRNTRGLPWPKEHEKKRDAPKEHEKKRDADLLAWLQAMFGFQKDNVSNQREHLILLLANVHIRQIPKSDQQPKLDDRALDTVMKKLFKNYKRWCKYLGRKSSLWLPTIQQEVQQRKLLYMGLYLLIWGEAANLRFMPECLCYIYHHMAFELYGMLAGNVSPTTGENVKPAYGGEEEAFLKRVVTPIYKVIEKRGARP

SEQ ID NO: 65705 - protein, 164 aa, Zea Mays
MGRKVMAGRGRQRREARRKTRGARKSRQESKGRGAEPAICCPPSPPLPRRCNRGKKVRECWRWASRSGPLGRRGLEGRRDDGGRRRGSGGKGREGAAVGRAGDTGADRGAQGDGAGGRRGAPQRQDDVGGRRGAAPGARLPTNRRAVQVQVEEPRQPLQGERNF

SEQ ID NO: 65706 - protein, 121 aa, Zea Mays
MVAVERRLKEIGIPYVQRCVEEGGINVDQIFFHDPDGFMIEICNCDNLPVVPLAGDQQRAPAACRRAPAAVNTVKQQQQGSVVPASSAPVTTAAAQCMPSAATAAQAIRVAEESSSHISCA

SEQ ID NO: 65707 - protein, 612 aa, Zea Mays
MTYFPGEVVEHIFSFLPSHSDRNTVSLVCKLWYDVERLSRRGVFVGNCYAVLPERVVLRFPNVKALTVKGKPHFADFNLVPPDWGGYAGPWIEATARSCLSLEELRMKRMVISDENLELLARTFPKFKVLVLISCEGFSTDGLAAIANHCKLLRELDLQENDVEDRGPRWLSFPDSCTSLVSLNFACIKGEVNSGALERLVAKSPNLRSLRLNRSVSVDTLSKILERTPNLEDLGTGNLTDEFQAESFVRLTSALEKCKRLRNLSGFWDASPIFVPFIYPLCHQLTGLNLSYTPTLDYSDLTKMISRCVKLQRLWVLDCISDKGLQVVASSCKDLQELRVFPSEFNVAGAFTVTEEGLVAISSGCPKLSSLLYFCHQMTNEALTTVAKNCPSFIRFRLCILEPKKPDAMTGQPLDEGFGAIVRDCKGLRRLSMSGLLTDRVFMYIRMYAKYLEMLSIAFAGDGDKGMMDVMNGCKNLRKLEIRDSPFGDFALLGNVAKYDTMRSLWMSSCNVTLKGCQVLASKMPMLNVEIMNELDGSSEMENHESGKATLVCALILEQHGRDSSSSLYQLLPSSSVWSYGHPGPLSPCAFSLERRTESDDFFFLLFTPCNL

SEQ ID NO: 65708 - protein, 86 aa, Zea Mays
MENHESILPTLRTYKTGNLREFLRPGPGLPAYIHAAGAPRTLGYKAIQAGSFCTCPCVSDLSTLGNRTLAANHGPFVSSGIGGRVE

SEQ ID NO: 65709 - protein, 367 aa, Zea Mays
MSPPAMLLPVCSAAPSCSPLCPVTASHVVARVARRVDVGAALRSYADSLVAQVPDRPPLADSSILSPYIAAPDDIARAFGAPASELPPLPSADPSPGLCCTGTDQPLAAVADLAATAVVNSAPTDAAERALSDAPFPSTFPSDASEVEDSVARLIDKVGKQVFQAEDALTEAYDKLRLSAYDALGAWRKTVRDAIGGLKASVDAGKQQAAGGVTDASGALHEKVAGAGTVAVDVLRKAIVAAEDSLGSAATFVVYSYGSAKESLPPNVRDLLSSSEEKASLVLRPIGNALQQVYVVVEGVEKNVGLDPSDPIVQLAVVLGGSVTIGTTYWLFTYSGYSGDLSPESAFDLLKNDDKAVLIDVRPEARY

SEQ ID NO: 65710 - protein, 81 aa, Zea Mays
MKRDPNLTLGFDLNGPSAIQPKGYPHLIVVVTHEIYGPGTKGRIVRLPRRRTSPMRRVYGPSAPTSNPNSSTRCGNKSECG

SEQ ID NO: 65711 - protein, 1401 aa, Zea Mays
MDATTKRRHQPGGAQPTRRKVVEEPFHTAPPTPAAASPSRLVGAIVEKGYSAAAPSSAPRPSVLPFPVARHRSHGPHWVPLVKDAPKDETADNDDEMDMDETDYHPVAAAAAGPVRRKEKKGMDFSRWREFVGDAPPKRRQGKPVQAKKQSDQRIDAGAVASKVGGVAAEGRGLEGGAMRLDSGNASEGPGPVLLVSDVVSKKPMSQVESRDELVNTSEARNLASQAESMDLDGRESSMEAEISAENMARLAGMSAGEIAEAQADIVNKLNPALLEMLRRRGREKSGGTKDVGKDKGLKNSGLQKNKRATPGDWLTAGEHTGHSWKVWSERVERIRSCRFTLDGDILGFQSSHEQQDGKKMPSESVAERDFLRTEGDPAAVGYTINEAVALTRSMVPGQRVLALQLLASILNRALQSLHKTDLMDNVKGMNSKDNIDDWQAVWSYALGPEPELVLSLRMALDDNHDSVVLSCTKVVNVMLSCEFNESYFEFSEKVGNGKDICTAPVFRSKPDLDGGFLEGGFWKYNTKPSNILPHCGDNDEDEADEKHTIQDDVVVSGQDVAAGFVRMGILPRICFLLEMDPSPALEDYLVSVLVALARHSPQSADAILNCPRLIQSVTKLLINQGSMEIRSSQIRGVTLLKVLSKYNRQTCLNFVNHGVFQQALWHWYRKAGTIEDWVRSGKEKCKLSSAMMVEQLRFWRTCISYGFCMLNSILERISPDVTPEDKSYSLPWIPDFVPKIGLGIISNGFFSCSTTVAGRNAEHQPFCCASLVQGLCYMRCHGNVDVSLSSISCLQRLVQLSWSVDRVIQGATKCCSECFNESGTGEAGKLLAEGISSLWHNDLLHLLTSLLPMISSQWSISQNIEMFGRGGPAPGVGFGWGTCGGGFWSLKCLLAQLDSQLVVELIKCFSSVQGSPIILDEGVKLDNVTNTVVTASNWISSTLGLSLIAGPGQIYMLEKVFDMIFEPSILKYLKSSIHKFTSDMELLKPFEWDLNEDEYMLFSSVLKSHFRSRWLAIKKKHSDKYAGDNSSTKISKTPEILETIQEETELSEAVNQPCNTLMVEWAHQRLPLPIHWILSAVCCIDDPKGTLSTSANYILDVSRAGLIFLLGLEAISATPCLHAPLIWKIHALSVSIRSSMHLLQEDRSRDIFCALQELYGLHLNRLYQKFCKPNSIEEVKGVVVGTSEEAMEISSLEILRFQEKIHGSYTTFVESLVDQFAAVSYGDFVFGRQVAIYLHRKAEPAVRLAAWNALSSAYVLELLPPLDNCIGNAPGYLEPLEDDEKILESYAKSWTSGVLDKALQRDSMAFTLAKHHLSGFVFQSSDSGTMLRKKLVKSLIRCYAQKRHHEVMLKCFVQQGIAQDSKSSELDRRFEILKDACEMNSNLVGEVQRLKACLGQ

SEQ ID NO: 65712 - protein, 184 aa, Zea Mays
MSGFGDGYVGTAQDAVKIRRLEKQREAERRKIEELKNKSADGQPGLLQFGSSTSEILETAFKKETVGLVTREQYVEKRVNIRTKIEEEEKEKLQKLQQEEEELQMQKRKKRRVKSDPRLSFCDDIENGSDEDDFENQETKKNGPAKLGKDPTVETSFLPDRVILQRKGGRGTSRTRTTEEAVVA

SEQ ID NO: 65713 - protein, 478 aa, Zea Mays
MGLFSSPAKVYKPAADVDLGPGSDELYISPNVKAPRVAGLLVKIFVWILEMPIVGQIVLYILKKDNLINKLVSDADIPEPPLFTASHSWEDTPEQSVRLTKPDLSAAERVQEAVGCLPARLEAALAADARGIRRWTVRDFSDAYRSGEVTPVQVAARFLAAVRESSGPGVSNMAFFISCDPDDVMRQAEESTLRYQRGAPLSALDGVLVGVKDEIDCLPYPTTGGTRWLGAARRCEADAACVAQLRACGAVLAGKANMHELGAGTSGINPHHGSTRNPYNASTIAGGSSSGSAAIVCAGLCPVALGVDGGGSVRMPAALCGVVGFKPTAGRLSNAGVLPLNWTVGMPGILAGTVEDALIAYSAIVDQSQPSYLRPELNLPQLGSTLSIGNIKLARYGKWFNDSAEDIRSCCDKALQALRANYGWQTVDVTIPEVEEMRLAHYVTIGSECTTSLAKGPRSAGTRGWRSASTAPSAAGRT

SEQ ID NO: 65714 - protein, 76 aa, Zea Mays
MSHIGEKGTNLSGGQRARLALARALYHNSDVYLFDDILSAVDSQVASCILEKAIMGAPTNAENKITKHTQSSGSFH

SEQ ID NO: 65715 - protein, 56 aa, Zea Mays
MNRMDETCTKLLYRRLNLKLYVMMHARPIRPHNSCQHIVAFTFYGGGNPTYSVIDH

SEQ ID NO: 65716 - protein, 1566 aa, Zea Mays
MESPFVPNSFTGKRKSPVGNSAIVQPHVGSRAVHEYQFLPEQPSDTYERATRSHYYDTPVEVSNARIPSITSGSQLLHGSEEAAPSYAFQGHTSGSSLLPPSSRPQVFPAAPTDYEMTQSNSNLSSVPVEGQFDISQVAAFENPPVSSEIIAYHDEDTSRVERKRKHSEEAKIAKEVEAHERRIRKELEKQDMLNKKREEQRRKEMERLDRERRKEEERLLRERQREEERFQREQRREHERMEKFLQKQSRRAEKQRQKEELRKEKEAARQKAANERATARRIAREYMELVEDERLESMELAAQNKGLPSMLYLDSDTLQQLDSFRGMLSQFPPTTVRMKLPFSIKPWTGSEDNVGNLLMYSYNFISGDILLTGLQVWKFLITFTDVLGLCPVTLDEFVQSLHDYDSRLLGELHIALLRSIIKDIEDVARTPSIALGVNPGGGHPQIVEGAYAWGFNIRSWQRHLNLLTWPEILRQFALSAGFGPQLKKRTVEDSYYRNDNEGHDGENVILTIRNGTAAVNAAAKMKERGYTNRRRSRHRLTPGTVKFAAFHVLSLEGSNGLTILEVAEKIQKSGLRDLTTSKTPEASIAAALSRDTKLFERTAPSTYCVKSPYRKDPADSEAVLSAARERIRAFQNVLSDSEAEKEVDEAERDDDSDCDDGDDDPDGDDVNTEVEDDKDPLLAVKSQDEVPSTTTVIGIKANLDGVGNALNSSSSFTKSAKGAPLPSLGRSNAADTSNDLPLGVSSANHEVVPDDSENTQIDESNQAEPWVRALAEGDYCDLSVEERLNALVALVGVATEGNSIRAVLEERLELANALKKQMWAEAQLDKRRFKEEFTSRVQYNSDMGLKPDIYQENNVTEITSTPACDAYRENDEHVGTINNCEMLDQHNQGNAGSLPYERNGVCQEILATPDTSYVQQYAYADKRRSQLKSYIGHRAEQLYVYRSLPLGQDRRRNRYWQFTTSASPNDPGSGRIFFESKDGYWRVIDSEEAFDSLLAALDTRGTREAQLHSMLQVIEPTFKEAIKRNVSIELSAGRYPKNGATDMIRANYHSEVGSSSSTPSATSDSITAYSDSFKVELGRNDFEKTAISKRADIFLKWMWREFYNQELTCAMKYGKKRCSELLHSCNCCYQIYLAEERHCSSCHKTFKSIYNFSDHTTQCEEKQRTEPFWNMQNTDYSVPIGMAYIPSEALQPFWTDVYRKSWSVKLYTTKSIAEIFQLLTVLEGAIRPDCLSSDFETSECLNSQVGSASVLPWVPDTTSAVMLRMLDLDSAILYVQNQKMDRDDGGFMKFPSRYTVAKSKQETTPETAGLDLYDGRWLPGSGRRGRGRGSRGGSRGGRGRSRGGRIPRGVSSSSRIEFKGGIVASDKAPRKNVRRGRGRGRGRRRGRRTVRPRQPSVGRARSIPKENLLGSFSMLSSSKAATIEESPRSSGADEWGLETRTTYTECDENSSGSQSEDNEENGQPMDDDYEDQVPDYSIGYSTGSRHHVMMSMMDHDSDEEDEDAEGDENVEEDADLAVDDADVEMDEDDEIGDDGEDGGVGGEMNADEDPDATSYSSDYSD

SEQ ID NO: 65717 - protein, 369 aa, Zea Mays
MEQDQSPAVDSADSGAAAFDFATGNAPSSAVTSGSAVAPDGGAQAADTSAYQAEHTELNGTTGDMSNYQSAGAAENGTAVTEIGEPVPEPSYEEAVLSAEEARLWSVVTANCLDFNAWTTLIEETEKNAEKYADHEARLDGVNKVIEVYERAVLAVTYSVDIWYNYCQFAISTYDDPDIVRRLFERGLAYVGTDYRSNILWDEYIKYEESLEAWSHLAVIYTRVLEHPIQQLDRYFNCLKELASKHSFSEILTAEEASVYVVTSETSAQAPDGDTHPDDIDKAGQPELSSLADAENLAKYVSMREEMYKKAKEYESEIIGFELAIRRPYFHVKPLDNPELENWHSYLDFIEKEEDINKYLDEASFVMGC

SEQ ID NO: 65718 - protein, 180 aa, Zea Mays
MRRSTSDATPTVAAALTSPKPGATKRQREAAPLGDVTNILPETPAPSKPRRNARRRPFSAPSDASTASSTCSSSASFTPALKTSSSASATPAPKPPPSFTASVTPAPKPSFAAVTDEEGSAFKSPTICTVYARRRTTEAEAEGRSNPTITNRGKQPIGAAASCPPLGKSTRNISYGLSAS

SEQ ID NO: 65719 - protein, 90 aa, Zea Mays
MSVATRPDVRPRANLDGDQPIQDGDARVSGEDEGAVSRRLGNASRLVVNGVVFHRPLTSGLGRSDEWWQVLLMIAFFPTQSFPACPWQTA

SEQ ID NO: 65720 - protein, 928 aa, Zea Mays
MGLLIHIAFLICLNCLFKSFQDSNIIYIGLQLYPYHLADYICRVLRISPFRYYCDILFETMKNEQPYDSIPNFTAADALRLTGVGRNEFIDIMNKCRSKKLMWKLNKSIAKEMLPTQPVDFPVEPWWGVCLVNFTLEEFKKLSEEETTTIDKICKEEANSYVLFDPKVIDGLYKRGLVYFDVPVYPDDRFKVSRLENFVSNKDQSYEDPIEELLYAVFVVSSANATVAELAATLQADLYQLQAAASFACRLGWAAKVMDANSVLNEERLPAFPSSILSDDEEGSNTSIHSEKSGQQLNGMDSDGPRKISGTAHVGFVVDANVTSYLMMGSLSPGLKSHAVTLYEAGKLGASCIAELCSDLASLEGKKFEGVLEEFASHAFSLRCFLECLQSGGVSANEITDNTSEAKTPRSSVHDIDNAADHLSKVNIEGVADNNHNEFSEHNQCVGELDNSDGNIVSPAMVILESVESMVKNDDKNDSTVQLNVSTESRVLKNKRKYKVDILRCESLASLAPATLERLFLRDYDIIVSMVPLPSSSVLPGPSGPIHFGPPSYSSMTPWMKLVLYTAGHCGPVSAVFMKGLRFRLLPEPLAGCEKALLWSWDGSVVGGLGGKFEGNLLKGNLLLHCLNSMLKQSAVLVQPLSIHDLDTSGNLVTVDIPLPLKNDDQSIESVVAQTNLPKEQILDLTSVLKDLSSKFELSTLGYLRLLRLHRIDEPDKFDPENVSYKWVPLSLEFGVPLFSPKLCEKICERVVASHMLQKDDLIEHSDVMQNVRRQLRELCSEYQATGPVAKLFNKRGSSRDSPRALINSISGRWNLSNDPSTPSGGAPSEHERLKFVGRQRPRTEVVSFDGSTVRSYALDPEHNEEQSSIQDVKPDPEETDSKDVVLPGVNLIFDGAELHPFDIAACLQARQPLWLISEASTASSTLL

SEQ ID NO: 65721 - protein, 185 aa, Zea Mays
MPRDEGRTGETLGKPLLPALQWGRPQLCHAPAPSETPTTTQDSRFPSTSVIFPAKLTTPPCTHLPTSSPTCSHSCPRLRSSRRRLRWKSGIARLSSTAPPASLRRVHLPPPQRLTPPPLDPTPCPRPSSPTYSPVTTWAPWPDARHGQQVGRNTFYVDPLLPCSSTHESELGLDPLLPLHAGRVL

SEQ ID NO: 65722 - protein, 255 aa, Zea Mays
MSTASGDGADAGGDGAAASAPAGRRIPPASSMPWVRNLRRFVGTGAGLGSEALMELETKRILLEIFKERQRKSAEAGSIPSFYKKKPEEGSISSRVQRLAKYRFLKKQSELLLNADDLDAMWVCLRENCVIDDATGAEKMNYEDFCHIATVCTEQIGQKCKRFFSPSNFMKFEKDDSGRIAILPFYLYVMRTVSLTQARIDMSELDEDSDGFLQPHEMEAYIRGLIPNLAQLRDMPHCICSDVLPHSCTQVLFLL

SEQ ID NO: 65723 - protein, 108 aa, Zea Mays
MEVMTDPDVPGPSDPYLREHLHWIVTDIPGTTDASFGRQIISYESPRPSIGIHRFIFVLFKQQGRQNVTVPSFRDHFNTRQFAEENDLGLPVAAVYFNAQRETAARRR

SEQ ID NO: 65724 - protein, 136 aa, Zea Mays
MPLNPSELQGVIWPPHINERPNSVFKEKLIEFLIKPFTQEEYDRYFALASDRIPMVKERRTRNTVAYYHWTHEMSKSYFDRYPDLAQQFSLQRNNYTNGLALLRGLFFWLQNIELEDQFRPWSDEFKKYRVVMECL

SEQ ID NO: 65725 - protein, 279 aa, Zea Mays
MSLACGLPLLECVYCLACARWAWKRCLHSGEVDSATWGLASADDFEPVPRMCRLVMANYEPDLSPSAPLLFAPPGGYGIDPACVLRRRTYADTRGRVTPYLLYLDHAHADIVLALRGLNLVKESDYALLLDNRLGKRRFDGGYVHNGLLRAAGWVLDAECDLLRELLETYPDYTLTFTGHSLGAGIAAMLTMVVVLNLDKIGNIDRTRTRCYAMAPARCMSLNLAVRYADVINSVVLQVTVTHSGFLIMSTDYSLLVSTILHLYFPMAGRLLAPDGYSS

SEQ ID NO: 65726 - protein, 335 aa, Zea Mays
MSHSLLRGSRCLLFLLRCPTIDELGCFSKGIQSSSLAISSLTLQGGELYELALVACHPTSSLHLVFGSLQSDCAVWQDNLEDSSPNEFSERGVSATAPHHRVAAMPPPRRKRKAASYEPRRRSPSRLEFRATVDGAWYEARVAVQCGALRVMYEEFLEEQDEWYDPAGLATSSAWDVVKLRARFRVPSTPLEDTQCRDLQAGARLCVSCSLDGGDLKFYDAILDSVYPAAHEIVDGMERCACRFAVQWSDGPRAGSMEEVGIERVCCVQSSPVQDPVLMEFLDGVTKLAGDANVETVSQEIHVAPVVKGGVPANALQTRHRDFNGKFGPASRQAV

SEQ ID NO: 65727 - protein, 338 aa, Zea Mays
MASNADQHAAVVSAAPSDSPVGAKKAGAAAAVWKLPAAAAVPVAEVVENPIMDAHSWPALPGLSSPPPPPPPHAGPTAKASPKAASPAPTGAATSPVSLGNPGAPDASHGNDARVRNPVARRALVMPAADGLEKSAPAPEPSPVYVPNARSNGADPHQNGRPGSHHHGRGGGYGGGNRRGNGGGGGRRGSEHHGGFDGQRRGGGRRDGHGPVHQLRGHQPTYIKAPVVAGAPPPPPPFVSPATPQTPPYGPPMGFHDMSAHVYYFPAPTSEGIQGLPFVPLPASPQAVLIDPSRKNLLEQIEYYFSDDNLCKDLYLRQHMDGQGWVPLSLIAGFRQGQ

SEQ ID NO: 65728 - protein, 108 aa, Zea Mays
MEVAFRVDNSATRCYNYTHDSFNSISAFFPHPQNRLSRILTACCQRRRAWCTLSSAISRKKSLTCKLVSIFLAYSNHSIVQSTPIQFRGFLLCSQAPVEKQGPVITNS

SEQ ID NO: 65729 - protein, 326 aa, Zea Mays
MEQDQSVVVGSADSGAAAFGFATGNPPSLAVTGGSAVAPDGGAQAADASAYQAEHTALNGTVGDMGNYPSTGAAENGEAVPNETGEPVPELSYEEAVLSAEEARLWSVVTANSLDFNAWTALIEETEKNAENNILKIRKVYDSFLAEFPLCFGYWKKYADHEARLDGVSKVIEVYERAVLAVTYSVDIWYNYCQFAISTYDDSDIIRRLFERGLAYVGTDYHSNILWDEYIKYEESLEAWSHLADIYTRVLEHPIQQLDRYFNWNWLRSTVYQKYLLQKKPRCMLSHLRPLLKRLMVRHILMMLISLVNQKFRLQQTQKALQSMSP

SEQ ID NO: 65730 - protein, 2485 aa, Zea Mays
MAAVATARDVEEVVQKLQSDRARVRDEGVKLLGTWLQGDRAASFCRLLGRNTVRFKPGHGNLTGGHSLHLLSVAKQLFVHIWEVIKDGPSLQLEYSIILRQLLNVKEYRYQMKPRTYSNFVSLYMKKVASAFDAKFSNQASSKDESFRCTLTLHVLLENPPSDYPDIMREEVLNGFSAIFLHIREEGKLTRKLMECINTFLLKDGPNLGYKSVKIHNAVQEFIFRCWMTTHDQALKSLFITYVKVQLKIARNIPEILEKLIDVIIKELDKNVNTGPGLLWCEAPRDEKAVSLRCFQEEWMDLSATVFYLACKCTTKTANREKRMKKEHIMNLIVDGLFRGSLFWSGSVCFLIHKYGYHLEKSLLISWFEASCKALRSILIHANAIRFQDSLLWLLRTFKEFSTVLMLDTRDKVQFCLTKGEMSIVEDCWQAIWNSLVHAFPLLSSIDLVADSALILLGGMIMRDQVHTSFLSEDTWNLQIFKKFPSPSALYFVACYFSRIGFQGDLSNSIFVRKTLLRSTLELIHSKEFSLLNEQNVVIIPEAIFSLCAGFSSPVINSSDILQLFGHCKIHSKMSLEDDNWVLKDELPYSVEALSEITLDTCTKVMSHKCHLIHLPGTIQQPMLLELMEFMKGFVASNEQFEKVDLNNLVLVCSLLCNLIHCALLSRTMEEKSSLLQETVDYVTNILKHIVSFVVKKNDELSHGLTNISSALDTMGSAFSSIKSLLSSPIFNLSRVDNGVCSVVIKSITELLDELLVAISQLFCQISSLVSNFDAESTGKMLPTSSINLEDLNPVLDCKSSVADMDLDVMDSSEVDSVTASASGSMGSFLRPLEWKLDLVCIISTFFSVSSLHTWEILYSLVDKEGDVKVRQAILLNLCRNISASSKTVSLVVHFIVDMRDRGASSLLGPAECLTHIHALLKALIAIHGGQNADGKQPGREVFFSENQDILFDLLNRATDISSVDWFSRIKFIDCVSSFVCLFPDVAQDLIGCLLDMLHDADYRVRLYLARQIVVLFQTWEGHNELFNDVCSSIGAKMVKFSNISPVTAREVLAVGPQSVLVIETALITLAHLAVHSEDVEVECLFMISAAAAIEPSQRELAFALFDSISRRLGYASRSKYLDQVMGPILFRWVACEMNLISLVEVQEMFGYGSAEPNNFVEHCSSWLLPFLILRGDGADMNWISKILSQPLSIIIKRYFVPIFGMCIAVRCGTGPEKDLAETVLCESVLQLGEISELERDDLIKKHMVAIVAFLLSVSSSAHGPQIPYFSKKNVALSVRMVVDGFVDTMDDNLADTVVSDKVNIFRADRVFKFLLSIHQQVADASHSRHMGHRLCAIEVLIDVLGHRVVLESTCFYIISIVGNYIQQKPLQGQCCNILSKLLAAFDGNTSAETLQVLGRQLQVVVPKLIFSCLINEKEERSGTEDSSRVLSLLHQLTVEIDPLLYDYIRELEPLPDLDCLKDVQEFHASLSASHSSRNQFLKFVNKAPYLPPELFLLSLRAYHKKLFLGEIIRRSDLSAADTNMVSCWHSDPDVISAVWALVDICSSSSVANEASWVLADFISRAGISDAHQVIFRLPTTTENYSLQLHTGSASKEDKLSTNYGISDDVLVGLLKLLKTYLSDESVEIIDAASQTLRGILSTARGLNALQFLDSPDRSLLMVHSRGVNIQIVEQTISQMEQCAGVSLDDADVWDTDGRTCKQWLCTLVSSLICHCEDTILRLCRSIVFVKVKAAELLLSSTLVNIAGNVDSNTAICKLISTKVEKIIFSDSNHSLKSIHLFLDALNVIRSFYVAEKARTFPSNTLKDGRSARSKSRSPVTTPSSSWKKVYWLSVDYLVAARAASRCSCDFAILMYVELWCEEQFNRLVLGPPEFSNEELLPPHVDLLVAAFTRINEPDSIYGLTLSNEIASQLIRYEHEGDWSSALEYYDLLVRSMPKEHLGTLTGSVLTGPSTVSSRAEDTMLNWKMHKGLMRSLQKTGCSHVLDVYCEGLSHQKGCLQQDAEFIDIQYEAAWRAGNWDFSFFVPYSSWSSTRSRSSCLFNENLHSCLRALQNGDSEEFHAKLCQTKMDLVLALSNTSKESTKYIHSTILKLQILDHATMVWDLRWNLNPNQTSKSPVTKEFSHISTVPKGIQLELLDKEWNLIMFQAERNLDLFEPFLAFRRALLKILGCEEHLVKHLFQSASALRKGLRFSLAAAALYELKELCFHRDESTMTNTYLLARLEDAKLLRAQGQHDMAISLGKYILQKLSDKKNLSDVYRLVGKWLAETRSSNSRTIIEDYLRPSIDLSEFEKSTDKRYMSRQCRTHFHLAHYTYSLFRSYEERLSSNEWQAALRLRKYKTRELEILIKRLRSSSKGVKTDYSVKIQELQKQLALDREEAEKIQDDHDNFLNLALQGYQRSIVVGGKYDLQVVFRLVSLWFSLFSRDQVVKAMLKTTKEVQTYKFIPLVYQIASRLGSTKDAQGSFNFQIERTVHVREALSTR

SEQ ID NO: 65731 - protein, 292 aa, Zea Mays
MRPSAFLAARRGDGSPSLPFPLPPRDAPHRGSVLSGCSLPFWFSAQLHCTRLREFLFFKRQSDSDLPSTACCIGLVFIAAIVLGRLWRRFIGVAASAPLFVLFNILLLWGVYVFVIRRETSSLLDMLINAECALLLWGFYRILSGDPGIVACDSSYLEEAGCKDFVEAIYSSEKLPMLSRVRQCTWCKANIRGYDHHCPAFGTCIGQKNHRLFMALLTGFVVAESTYTMCSTKYITRCISSGTIRSEVSMPISYSLCMNCKAILFGKCMSVPLSQLVFRFLPVFSEPFTWMK

SEQ ID NO: 65732 - protein, 341 aa, Zea Mays
MLTCEEEVELLSSLQFGEEDGWLSAFYSCLVTKHEKEYLVEAKFKELEQEACSISSSSSGETMKNNIDVLVCKAEYYHQSGEYQKCFKLTSSLLERDPFHLKCTLVHLATAMELGHCNDLYLLACNLVKDYPQKALSWFAVGCYYYCIKKYDQARRYFGKATGLDGAFPPAWIGTGIAYAAQEEGDQAMAAFRTAARLFPGCHLPTLYMGMQYVRMHNFKLAEQFFTQAKSICPSDPLIHNELGVVAYNMKEEYQKAVSYYAKALTFPTKSLSAFAGLAYTYHLMDDFEAAINYYHKALWLKPDDQFCTDMLTYALESICQITARRKPGRGLLTATGGVTC

SEQ ID NO: 65733 - protein, 976 aa, Zea Mays
MEAALEAARAKDTKERLAGVERLHEALDAAARRGLAAAEVTALVDTCMDLTRDANFRIAQGGLQALSAAAVVAGDHFKIHLNALVPAAVERLGDGKQPVRDAARQLLITLMEVSSPTIIVERAGSYAWTHKSWRVREEFVRTVASAVGLFASTEISLQRVLLSPVLQLMNDSNQSVRDAAISCIEEMYKHMGSQFHEELQRHNLPSYMLKEINSRLDKIEPKVRSSDTAMQYKAVESRSVSANPKRGSPRTKNIPRESTLYGGDTDVTEKPVEPVKVHSEKELLREFEKIAATLVPEKDWSLRIAAMQRIEALVYGGAIDNPSFLMLLKQLVPPLSTQLSDRRSSIVKQACHLLNILSKELLGDFEPFAELFIPMLFKLVVITVLVIAESADTCIKTILRNCKVARILPRIVDTAKNDRSAILRARCCEYALLVLEYWADAPEIQRSADLYQDMIKCCVADAMSEVRATARTCYRMFAKTWPERSRRLFMSFDPAIQRIINDEDGGVHKRYASPSLRDRVVQPSRASSHSSGTHVPGYGTSAIVAMDKSAAISSDSSFPSNTLRLSQSKTIDRSSERSLESVLSSSKEKVSAIESLLKGVSMSGQNFSAARSTSLDLAPASNVLSLQNSALLDSSLPTIPPSSRNGGSRLLDTMTTHLPTKERSRSPYLSNMSSESMSGLSLPYSRKSLERLQEGGRMDESYDIRSTRRIPQMHLDRNYVDMPYRDSHNNHVPNFQRPLLRKQVMSRASASGRHSFDDSHVPLGDVPGYTDSLASLNDALSEGLSPSSDWVARVSAFEFIRNLLKQGQKGIQEIIQNFEKVMKLFFRHLDDPHHKVAQAAFSTLAEIIPACKKPFESYVERILPYVFSRLIDPKELVKKPCSITLEIVGRTYAIDMLLPALVRSLDEQRSPKAKLAVLEFANKSFSKYSVDSDGYSNSGFLKLWLSKLAPLVNEKNAKLKEASISEQERTPAPQTL

SEQ ID NO: 65734 - protein, 53 aa, Zea Mays
MAPRRPEAPQWQRRYWASPNDETTWPIVTAPCRAKHHPHRTAGAIAGAKEVRV

SEQ ID NO: 65735 - protein, 2535 aa, Zea Mays
MDFASRHAAAEAATSSAASASAPAAVAEEPEYLARYIVVKHSWRGRYRRVLCIASSCVVTLDPTTLNLTNSYDVGSKFDHAEALTATDEFTLAVRTDARGKFKPMRFSSPLRPGILTELHRLRPVQDSFDFPVLHLRRRTHEWAPFKLKVTPVGVELLEASGYMRWCLEFRDMNSPAIILLGNSYGSKTTEGGGFVLCPLYGRKSKAFMAASGTTNTAIISHLTKTAKLKIGLSLSVDNSQSMKADEFIAKRAMEAVGAAETRHGEWSVTRLRSAAHGTAYIESLSLGVGPRGGLGEQGDSVSCLLVLTSTSLVERRPENYEVEILSSILYELLKLFSLELLAIQDMISILSTNTLPPPNTNTHKREHMAVIVRPLSAVSALVRFVEEPQIFAFEFNDGCPIHVYASTSRDNLLATVLDVLETQRQCAIPVLPRLTMSGHRIDPPCGVAHLEMPYHGSVDMESASMHTKHLAAIAKEAVVSSDTVPGAKIRLWRRIREFNACVPYTGVPVNIEVPEVVVLALISLLPTIPHSLPADAPPLLPPSPKAAATIMGFVACLRRLLTSRSVASHVMSFPVAVGRIMGLLRNGSEGVAAEAAGLVAMLIGGGPGDSSILMDARGESHATYMHAKSVLFSQPMYVPILVNRLRPISVSPLLSLSVVEVLEAMLCEPHGETTQHATFVELLRQVAGLRRRLFALFAHPAESVRETISVIMRTIAEEDAIAAEFMRDAALKDGALLRHLLNAFFLPAGEQRDVSRQLVALWADSYQPALDLLSRILPPGLVAYLHTRSDEESQSQYDEAPLSRRQRRILQQRRVRGSKSMSVQEQGVPPNGVEDGEPFRHTSAGTYGVADVHQRHVGPYSSTHSPLPGISIDPSCAVTVPHGFVPEALSENNHQIGEPQLDSHVYSVDSNANGDLVSSSHSDFSVPAQVVVENTPVGSGRLLCNWYGFWRAFSLDHNRADLIWNERTRQELREALQAEVHNLDVEKARTNDIVPGSSVTEDAGGSDNLPRMSWNYAEFLVSYPSLSKEVCVGQYYLRLLLEIGSNYRAHNFPLRDPVAFFRALYHQFLCDADIGLTVDGAVPDELGSSDDWCDIGRLDGFGGGGGSSVRELCSRAMTIVYEQHYKVIGAFDGTPHITVLLDRTDDRVLRHRLLLLLKVLMNDLSNVEACVLVGGCVLAVDLLTVAHETSERTAIPLQSNLIAATAFMEPSKEWMYIDKDGTQVGPLEKDAIRRLWSKKSIDWTTKCWASGMSDWKGLRDIRELRWALSVRVPVLTPTQIGDAALSILHSMTSARSDLDDAGEIVTPTPRVKRILSSPRCLPHVAQVMLTGEPSIVEAAASLLMAIVTRNPKAMIRLYITGAFYFALAYPGSNLLSIAHLFSATHTHQAFHGGEEAALSSSLPLAKRSVLGGLLPESLLYVLERSGPSAFAGAMVSDSDTPEIIWTHKMRAENLICQVLQHLGEFPQKLAQHCHSLYDYAPMPPVTYPNLKDEMWCHRYYLRNLCDEIRFPNWPIVEHVEFLQSLLVMWREELTRRPMDLSEEEVCKILEISLDDLVLGENGSIKQSSDLSLANSGNKIENIDEEKLKRQYRKLAIKYHPDKNPEGREKFVAVQKAYERLQASMQGLQGPQVWRLLLLLKAQRILYKRYGDVLGPFKYAGYPMLLNAVTVDKDDSNFLSFDRTPLLIAASELIWLTCASSSLNGEELIRDGGIPLLATLLSRCMCVVQPTTPANEPAARIVTNIMHTFSVLSQFESGRVEILKFGGLADGIVHCTELEFVPSAVDAALLTAANVLVSSELQNALLRAGFLWYVLPLLLQYDSTAEENETCEAHGVGARVQIAKNLHAVHATQALSKLCGLSGDDILYPDNKPAYNALKALLTPKLADMLRNHPPKELLSNLNSNLESPEIIWNSSTRGELLKFVDQQRASQGPDGSYDLTESHSFTYEALSKELNVGNVYLRVYNNQPDFEISDQEEFCIALLKFIVELVLQWNSINLETIHQHGSVTEASMSGNDEVSDSTIEGKMDNSSGKQSTDGDSEVIINLQSGLTSLQNLLTSNPGLAAVFASKERLIPLFECLALHVPSESTSPQICLSVLSLLTKHASCLEAMVAERMSLILLFQILHCNPPCRDGALAVLYSLASTPELAWAAAKHGGVVYILELMLPLQEEIPVQQRAVAASLLGKLVGQPMHGPRVAITLARFLPDGLVSAIKDGPGEAVVSSLELTTETPELVWTPAMAASLSAQLATMASDLYQEQMKGRVVDWDVPEQASGQHVMKDEPQVGGIYVRLFLKDPKFPLRNPKRFLEGLLDQYVSSVAATHHEAIATDPELPLLLSAALVSLLRVHPVLADHVGYLGYVPKLVAAMAYEGQRETMASGQASSGSQAEPGEHDNSSHSEATVQTPQERVRLSCLRVLHQLASSTTCAEAMASTSAGTPQVIPLLMKAIGWQGGSILALETLKRVVGAGNRARDALVAQGLKVGLVEVLLGILDWRAGGRQGLRNKMKWNESEASIGRVLAVEPSSAFRLALER

SEQ ID NO: 65736 - protein, 355 aa, Zea Mays
MSEVPYTQCIQVAAAHSCYLVVELNIDSYSESARLCLIGVDHLKCPRIFASPEAIQPYKLIYAYMLVEVGKVSDSLRYCQPSIKVLKAYGRAPELEVWKQLFSSLKERIRTHQQICAKSIAMVTWVYEAADNAQVTAGNNSTPHAPMAMLLIITFFQGFGRLSLVAASAVQSAASVVQVGTKEIQSKMRDGSYDQKVNETVNVVANKTAEIGSKTWGIMRGVMAMASQKVEEYTERLGRGLATQRAECSWDDWDDQGKKGEPAKPHQISYSWAGWDDGKDDGFDSPGYNNHNNSNKGSNHNGTSGGSFWRRGPFDAGSPPRSPENRSSATRQTRQQICCIGLLPPRRGSCRPARP

SEQ ID NO: 65737 - protein, 353 aa, Zea Mays
MSLLAVASSTRAAAVRPLCASAASDEAVPAPAVADTAGRRPVKVILPKKKPQKWSTGMAPGEYGGGPATIKPRKYWWGKEDRDPVGNTDDFIWNKDFLPHMERVIANGGADAEPTITRLAPVDEEGESGFLSINRAMSLDSVEVDLSQELQAPTRPILQTQVEAAWRGRAIGAEAVNGASAPRWRLVPTRREQAKWDRAAKAATGGSDVILRESKSRVQQGDPKLKQRLQWFTLGIGGVGVISAYISYTPEIAVSFGAGLIGSLVYLRMLGTSIDSLAGGTGETVKSAAAQPRLLIPVVLVMMYNRWNQILVPDYGFMQLELIPMLVGFFTYKIATFAQAIQDSIPPVGNREG

SEQ ID NO: 65738 - protein, 659 aa, Zea Mays
MLCHVCTTKRKTPIHASGSSTPQTPPPHRFAVSRSPRLSPPPPRPNPMGLCFSKKQQAKRRDEQPSSDAKKSSRRKSGSDTVLVADAKKAPQAKAPAPPKKAVARPEELAADKRTVFVVKAAAAAAAAEVAAAAKGGSEEAEAKREAPEEEPMPVAVAVARAPVRTSSCTKEEVDAILIQCGRLSRTSSASGNPPSGEHGGGRRRYAGSKRSYDFDHGTRGGGGDVDECDWGREGAAVTRPSPRRRTPERKRSSSHDGRTGGGSGSGSRSRRISRSPGRRADVVPAAGSSETGERGARQHPGKMVSVPAREKGRAQSPVKAASSGKRYPSPRSNSPARAAASGNENAGVQSTHGPSLSRNSSKKAEQSPFRRNPMAELDENALGNNHHHSNGKPVKTAERAKDQIPSCRTTAKEKEIVEEAVASDTRAAPARMKATHSVSIVAENVTNPRPGSRSSRRSSRDFEHNDNTYASLLLEDIQNYHQQSASAATATATPAPTLALPACVSNAFSILEAVANLNSSSPDNKSFELERSVNDKESFVNGRYGGNGASTTLVVESEVGVKDDLMEPSMHKYVSVRDIRGERRETEPQESAGSNSFASDAWTCSWEPKSVDSTDRTRSRTASKSYNGDKVEQSWQSKQKLSSSQEPSHRGSTSNVYA

SEQ ID NO: 65739 - protein, 397 aa, Zea Mays
MKLLQGTTERLLDPNENTRFRESAPNAVAARDSGQVSHAQPEAAPPKRNVMSSSLNSASPPFYPSSASTQDFPVAAQTRDIQAGGSNKIPPSSMKMDDNSKLQSGSMVRGRIAMDYGGRDKLLADGPIRSSQGRAPTASLNSGFTSSSVNPGQSPIARASGGNSNIGISSNNQPQSHGSVMHQKLGQVQNQSATRIPTQQLSHRTSNLSPVAQHLPGKSGESGENGSYPTLNDSKTASAVVKVNSQETGMSSFMYGGTQVIGAAGLSQGDQNFPGTPALLPVMQFGSQHPGGLGVPTVGMALPGYVAQQQMGMGNNEMTWLPLLAGAAGAFGGSYPPYIALDPSFYSRSSGQTSSSVPSREPSTNRGSKYPQNDIGNEELDERQNKPRRYSEMNFSQ

SEQ ID NO: 65740 - protein, 134 aa, Zea Mays
MVIFPSSCFFWHRTLANQHMRNCTITLLDQPTIDYLQWNQFILAEPIKVDPNDKQQVFQHFVWAKKFERELGTGSVHHRMLSIWLQLEQNQIPHLELPLRPQSIRFEFHPVLSNSQLVFQHLSKVSTLNQHLGH

SEQ ID NO: 65741 - protein, 145 aa, Zea Mays
MSKEGARASWNSTYEKGLVDVLHDNKDNPKLKGQNGWNSEGWKCITAKFNERFSLAHFTKQQLQEKDKELKSSYKAVRDSRKESWTGWNDSLCMILAEPEVWARLISAHPKVARFRKKPFPLFYSLEALYEGECQQRTTMFEECG

SEQ ID NO: 65742 - protein, 54 aa, Zea Mays
MVIDKREHIWCTWKFSAHIKSSAFILYLTYVVVWYILLITPSNVVECSGGMCYL

SEQ ID NO: 65743 - protein, 237 aa, Zea Mays
MGNCCCGSADAGTKPPGRRPTPTKGTPPKGTTAWAPAPKPKPSDDGSSGAKQREMGGDDDDGAPGPGPVVGRVLQAPRLREFTLAELRAATRGFKPEMVLGEGGFGRVYKGWVDERTLNPAKSNAGVIVAVKKLNPESVQGLQEWQSEVNFLGRLWHPNLVRLLGYCGEDRELLLVYEFMSKGSLENHLFRSKLSMQFVRLYSYFSCIRLTNCNNVMVLLFGDCVPVPGHRPITCLT

SEQ ID NO: 65744 - protein, 239 aa, Zea Mays
MATTAAASTSLRPLSPSPPRIASLPRRWCWGIPVQSSGRSAFHAERRRRSTLLCAADKAPEESLKKTIEVDRLIDMLRDANPRELDQIVVENVLAFDAGFWVRLAARIDLCKSDDDKKDYEELAENVMNIVDRLVHKTNQKIEQSTDVLKAIISPAMHEGDVKWPPRDPDTLKLMEKEITRREQEGQLDEGFLSEVSAQLRLNKTEISQGFRLCCKRCCSYMLLNLSKNVVMHTKGGKL

SEQ ID NO: 65745 - protein, 250 aa, Zea Mays
MSMGAVSREVSSACERLCFICPSLRTRSRHPVKRYKKLLAEIFPRTQDEGPNDRKIGKLCEYISRNPMRVPKITVYLEQKCYKEFRAERYGSVKVVMAIYRKVICSCQEQLPLFANSLLTIVETLLEQNRQDDLRKLACQTLFDFINSQVDSTYMFNLENQIPKLCHLAQEMGEKEKICILHAAGLQALSSMIWFMGEHSHMSAELDNFWKIMRAHMQMLIMMLLLRIFELSGWMKCSKPKVMNLLLLPF

SEQ ID NO: 65746 - protein, 1857 aa, Zea Mays
MGDGGVACAVRSVESFRAGALVRRGGAGEAMPDKGERAHGHRHQHQHWKNQQSATAADLEEGELLNGEAGTNGLPERSMPPKKWRKVLAASAAAVEVEPGEIVSTKQAVPLKKERRNGDVEKVELLPERQRKEKSSGKSTRKSIKDDVEPGEIALPGKRRDAKSQLAHDNSRRPSSSAQKGSLRDSDEEPGEIKPESGISGSVRKNRPTEPHSSNHKHHTDTSDQSGSKHRRKGEGKSSSAARHLSGRIREVSPPTRDRRDKHERSPGILGRFPHDRFRHDRYDRSPSRLERSPHRTRHYDSRDRSPYISPRHRARPPQFRDNTPSRVDNSPRGRVQHEDIRDRSPFRHDRSPSERCRPTDTHEASKKSRSSNNSEKSHHKSKSAKQSSKIKSGSNGKNEEKISKEKHTESSQYTELPPPPPLPLPPPPPPPPPPPPLPPAVPPPLPPSPEPEPPGVLAEDMIEDMDICDTPPHTSAVPEPTEPICDIGRWFYLDHFGIEQGPSKLAELKKLVQDGYLLSDHLIKHADSNRWVTVENAASPLVPSDFPSLYSDTSTQLVNPPEAPGNLLDEALEEASNLASGAEDKQMEETSAEDSEEFCIDDRVEALMDGSILVHGQELEIIGELLGADFQPADWQRWSRREDFTRLNVHTEVNNEINGGTENRATDAYGLVSVEKNFHHNAESSEWFSGRWSCKGGDWRRNDELSQDTPFRKKLVLNEGYPLCQMPKGSCEDPRRPCKDELYYPVRAKKYELPLWAFSLTEEDIDSVNDTTKSGVVPGRPGQTRQPSRGVKGMMLSVVRINSRVVKDQSSVEPHTKPRGTDRPLSRSSRSHSIGAERSSVHEGSSHFRKHHDHDSQSSHKSKPVPNIPKDRVCTVDELSVYRGDWYYLDGTGHEHGPFSYSELQELVKNGTIIEQSSVFRKIDNTWFPVLKDLKPGSSVPSAARSSSFTAALMLPDQYNFGVNQGSGSFNQLHPQFVGYTRGKLHELVMKYFKSRELTLAINEVLDPWISAKQPKKEFEAYFSHNSASRNLLPEDGGSAKKAKLLPDQSDEDIHLSQDILASRKEDICFDELCDAEPSVDNDSLNPGAGNETWGLLNGHVLARIFHFMRADVKALISSAATCRSWNAAVKYYRNMCRFIDLSSVGPLCTDSVFCDIMAGYEKQNIRTLILAGCSNLSSHALGRVLEQLPQISYVDIHGCGHLGDLKNKFQHVKWIRSSLNPEESYRKIKTLKQIGDGNNYASKVARNFTNHLDGSDELDGYFADISNRENANLSFGQGFYKRSKLLDARKSSAVLSRDAEMRRLMQRQAETSYRKMEEFIINRLREIMRSNRFDFFIPKVSKIEGRLKNGYYARHGFRTIKHDIRTMCQDALRYKDGNDSGDIKQIVVSFIQLAKRLGNPRYISDRYGAGAQDSLDINQYSFDTKLKKKQNKIRGANSLAAGADNSSRAFDLEIKRSLSKLKKKDVYSGSETSDDDDGYSEVDETESETTVSDTESDLDVNSGAWDLKGNSLKLIEPGESVTDDRILGARMTKASLVPPVTRKYEVIEEYLIVADLEEVQRKMRVALPDDYSEKLLSQKNGTENLELPEVKDYQPRKVAGDEILEQEVYGIDPYTHNLLSDIMPADLELSPTDKHIFIEELLLNTLNKQVRHFTGSGNTPMTYNLRPVIEEIQRSAEDNGDRRTSKMCLGMLKTMRNRSEQNFVAYRKGLGVVCNKKGGFGVDDFVVEFFGEVYPSWRWYEKQDGIKHIQNNSEDQAPEFYNIMLERPKGDGDGYDLVFVDAMHKANYASRICHSCNPNCEAKVTAVNGKYQIGVYTLRPIAEGEEITFDYNSVTEKSMKHQSASVEVKYAVAAI

SEQ ID NO: 65747 - protein, 358 aa, Zea Mays
MNGEVECSVCHAKVPVPPPVSKAYDSHRSTVSSRQRALNVLLVSGDCVLAGLQPILVYISKVDGKFKFSPISVNFLTEITKIMFTIVMLFIQARRLKVGDKPLFTVSIFMQAARNNVLLSVPAFLYAINNYLKFIMQLYFNPASVKMLSNLKVLVIAVLLKMIMRRRFSVIQVTVPALASVYNEKALKSQFDTSIYLQNLFLYGYGAIFNFIGLVVTAIIQGPSSFNILEGHSKATMFLICNNAAQGILSSFFFKYADTILKKYSSTIATIFTGVASAVLFGHTLTINFVLGISIVIISMHQYLSNQIKDEVPSSKVEMAEAHDHSRKEPSYVNVPDSGASESKHRHGSDERQPLLPV

SEQ ID NO: 65748 - protein, 984 aa, Zea Mays
MTTDGQLREWVSDKLMSLLGYSKSVVVQYVIRLAKECSSPGDLVGKLVEFGFSSSAETRTFASDVYAKVPRRASGISEVVATDSGRNVRRRTEEEDEEGGIGSSDEEKEMIRDQQEKAQLERNMRERDAANTRKLMERQLSKEEQEELTRKSQAMDNNDTSDLRKFSRQAYLQKRRDKKIEEIRDEILDHQYIFQDLKLTEAEEKELRYKMKIYDLVKEHVETPDDVGAYKMPEAYDMGENVNQEKRFAVAMQRYKDPKANDKMNPFAEQEAWEEHQIGKSKLQFGSKDKKPSSDEYQYVFEDTIDFVKSSVIEGTQPEDDSDKEDVEAKDILKRELQDERKTLPIFKFRDELLKAVEEYQVIVIVGETGSGKTTQIPQFLHESGYTAKGKVACTQPRRVAAMSVAARVSQEMGVKLGHEVGYSIRFEDCTSDKTIIKYMTDGMLLREFLGEPDLASYSVVMVDEAHERTLSTDILFGLVKDISRFRPDLKLLISSATLDAEKFSDYFDSAPIFKIPGRRYPVEIHYTKAPEADYIDAAIVTVLQIHVTQSPGDILVFLTGQEEIETVDEILKHRTRGLGTKISELIICPIYANLPTELQAKIFEPTPEGARKVVLATNIAETSLTIDGIKYVIDPGFCKIKSYNPRTGMESLLINPISKASANQRAGRSGRTGPGKCFRLYTSYNYMHDLEDNTVPEIQRTNLANVVLTLKSLGIHDLVNFDFMDPPPSEALLRALEQLFALSALNSRGELTKTGRRMAEFPLDPMLSKMIVASEKYKCSDEIISIASMLSIGNSIFYRPKDKQVHADNARLNFHTGNVGDHIALLNVYNSWKETDYSTQWCYENYIQVRSMKRARDIRDQLDGLMERVEIEICSNTSDLDAIKKAITSGFFHHSARLQRDGTYKTVKNPQTVHIHPSSGLAEVRPRWVVYHELVLTTKEFMRQVTELKPEWLVEIAPHYYQLKDVEDSGTKKLPKGQGRAAL

SEQ ID NO: 65749 - protein, 61 aa, Zea Mays
MKPNLLSESSSILIFLAESSKLVNKSRFLPRASVSAFVVQSRFCFVLRSKDSLAVACFSSL

SEQ ID NO: 65750 - protein, 312 aa, Zea Mays
MPDPTTKLPSPRPRRRRRLFSLCLGTALLALIVSALVHVVAQPPGPAPASARFSVIIDGGSTGTRAHVFAAGPDGRPDLARSTVMRVSPGLSSFAADPARAGESLKPLLDFARDKIGGAVREAEVRLMATAGLRLLEERAQEAILASCRDVLRASGFRFEDAWAKVIPGSDEGVYAWVAANYALGRLGGDPNKTVGIIELGGASAQLTFVSDEVLPPKLSYNYTFGETTYTLYTNSFLNFGQNAAQDSFHEMLRSRGSFKNGTLADPCAPRGYSRNEGASRSTLENQYVNNGTGNFTECISSSQLLLQKGKD

SEQ ID NO: 65751 - protein, 1336 aa, Zea Mays
MGMVPNGLLPSASARVTRRLDPERWAVAEGRTAELIARIQPNAYSEGRRLAVYHYVQRLIMNCLSCQVFTFGSVPLKTYLPDGDIDVTAFSNSEELKEIWANLVRDALEREEKNENAEFHVKEVQYIQAEVKIIKCLVENIVVDISFNQVGGLCTLCFLEEIDNLISENHLFKRSIILIKAWCFYESRILGAHHGLISTYALETLVLYIFHIFNNSFTGPLEVLYRFLEFFSNFDWEKFCLSLWGPVPISSLPDMTAEPPRIDSGELLLNKSFLDTCSSAYGVVPHTQENHSQPFISKHFNVIDPLRTNNNLGRSVSKGNFFRIRSAFAYGAKRLGKLLECPKEDLIGELNQFFTNTWIRHGSGSRPDVPTPSIVDVRPLKVVPSVVSSSQRSVTSFKKKAENPKLHATQDNLRLNQDNLTEDGHIYTDPSQPIHKSDIHYRNLPRAVNPSVSHVQHQKSYTAQGSAKVSEQLERNNSAGLMQSERDKRVPNGLFVNDRNGQNRSRFARTRSSPELTDSSAEGFRGRRTNAVGMEKSLGVDYSSRRNILVPEMSSNHSTKSSQDESVSSLNCLSHPSAAASDSNSVSSSYRDDNGFVMNEELPSVSESSDMHHDEQVLVNLMESVKLHGFNGQIQLPMQIPSHMSVAHPPLLAPTSFSQKHLTGVPPANLIGTPWLPNMQFLHGFVPPPMAHYIHNPNFAPNIEDGTETEKPNTSDVNHDAGKTWHEYGVGFSGQFDPEARDPHIYDIDGKEHLSLPNGVAGAPLERQMKFTVENNGVDDETYTGMFQNHTSREAAVDYSKRSGYVNVPSSHASSSKGKTLDSSPWDEMTAHTTRPPREKWGKRSAFAAPATTTHVKTGWQMGNTTEHLSTEVNDGPRNGTVVPIITEASEIVTGSDSFSTQSRTSQVPNDFDPSQIGMPNPVFAPFLIGSPQHRQADSSGLTFVPTGPPVPFVVLPFVSGNSDGSGPQFERSEGIDQLPANTVGHFVGSLHDVHQQDSSATSTVSSSTMTEPSGDHKPDILNSDFVSHWHNLQYGRLCQNPRPMGPVLYPVPVPPMYLHGHATWDGPGRPAAPNVNWTQMVGGQRVFPVMPVQPATERTGVLQHYSEDTPRYRGGTGTYLPNPKVHFRDRHSNSRNYRGGYNGDRGDYSDKEGSWVNSKQRNLNRGYGRSQSERSSMRSDRQTTDESQSDRQRRTYRTDSYRHEASSQYLVQGQPFGSTSSMRKQGNTSHGVYTPPSTSSNGPSALSGPPGPPFFMVYSYEQGSNHGATATSSEPIEFGSLGPLPAADGDDIPRSTRQIMANGFYGQRRGPYRGGSSHSSPDQPSSPQPRRLMDC

SEQ ID NO: 65752 - protein, 53 aa, Zea Mays
MARTMLGEYKTPERFWSEAMNTACHAINRLYLHRLLKKTSYELLTGNKPNVSY

SEQ ID NO: 65753 - protein, 526 aa, Zea Mays
MHKLLALNQRQKMVLQRKTEEAAAATKRLKELLEAKKSSRETYGSANGSGMQALIRAIDDELEVTVRAHELRSYYERQMQERAAISKEIAKLKEESKHKISDCPQAMSPSARSSRISALENMLSSSSSAMVSMASQLSEAEERERVFNGKGRWYHVRSLPEAKNIMNYLFQLASSARSQVLDKEVICNEKEHTITELKEKVVVLNGGIRQLETQVRDLRSQNTQLFTALNNAKKSARSNGTGFAGRKSVRSSQHFGYSKDNFNWVDDMDISDSEHSDELENMSDGSDSDWVQSTRKAKKHQRRVSSHSNPNLDCQNTQGSAEPEKPSDEKCILPKYISSDGCSCSKSSSCKTNKCECRGSGAQCGAGCGCKDSKCSNRDSSTIEKANQGAMLLQTAFSEKEAQDAKPRKPLTNIGNNVVNQTAETKKPRKNRRKSAIQLVPGPLLPSEPVATEAAPRDIANIPLKLPRAMSSVTPAESNPPLTDRNAAKPDESVSTGSKNSTGAAATRAPSQLRKNATTEKENQLR

SEQ ID NO: 65754 - protein, 207 aa, Zea Mays
MEIVNSVSFSSIGVGRIVINKTVKVGCQTHRIGWKLTRTCCEYSPGASRKKQEKYEQQPQNVDLPELHPKNKKKPFPVPIKKMLQASRREKRLAQMHIEKPLEPPKNGLLVPELVPVAHEVLDNWKVLIRGLSQLLNVVSVYGCRKCPQVHVGPVGHQIQDCYGSGSQRRNSHHSWARGYQQLLSYAFRLVLTYHNTPRGDGLLLSG

SEQ ID NO: 65755 - protein, 399 aa, Zea Mays
MDGPKRSQLRVRLRVTARRRGADGDGAGGAAGPGGRKRRMEAPVRNSVAKLQRREIGGRQLAARGGGPAAAVPERFRNMQLQEEFDTYDENAHLFVKLQFLKRRSKIIEIVAAKDIIFALANSGLCAAFDRVTNKRIAFLNLSPDEVIRSLFYNKNNDSLITVSVYAADKFSTLKCRTTPIEYIRRNQLDAGFPLFESESLKWPGFVEFDDVNGKVLTYSAQDGIYKVFELKNYSFLYSIPDENVQEIKIRTPSYVPLKILSIEDGKQLKSFKHLLHRNKKIDFIEQFNEKLLVKQENENFQIFDVRSSELIEVSVSKFMTPSAFIFLYENNLFLTFRNRTVAVWDFRGELVTSFEDHLLWHNDCSTNNIYITSDQDLIISYCKSEAVAEDGTGAVLKP

SEQ ID NO: 65756 - protein, 281 aa, Zea Mays
MDSEPDVELRGLDIDVELDPEDLQPSVPLKKVPGGDLFEAARAGDCDRLALLLDAGANVNARDRWDSVALYYACLAGHAEAARMLLEAGAVCAERTFDGDRCHYAALNLRLRWLLKSFEARPPPLAPLPTALRATFLACPANRTAFLEMLQGSAGAESAALAAAAGFGPKDDPSSACLFPPDITFYVDRKPVEAHRVILCARSPFFEKKFKTDWKDRKEFASARSCKKFWIKKLCIRSMRSTSQQENWIWTAHRNDSSYKRNPCLRKIAFHQPCSVFCRLV

SEQ ID NO: 65757 - protein, 396 aa, Zea Mays
MANFSIRLQNCVVLVAAMPMTIERDLHMATGNGETSYTKNSRIQEKVMFQIKPVLEEATRAAYSALLPRTMVVADLGCSSGPNTLRFVSEVIGIIARHCKEHDRRHDYPQLQFFLNDLPGNDFNNLFLLIQQFNKSMARNHKGEAAEALPPCYISGLSGSFYTRIFPSESVHLFHSLFSVHWHSQASEQLKDTKNKCLDIYITKNMPPSMVKLFQQQFEKDFSLFLKLRYEELVSGGQMVLTFIGRKHEDVFTREPNHLHGLLAQSLKSLVDEGLVEKEKLESFYLPFYSPSVGEVEAILKQVGLFNMNHVKVFEINWDPYDDSESDDVHNSIGSGENVAKCLRAVMESLVASQFGEHILDKLFKEFAHCIAEHLENEKTKHVVLVLSIEKAIIHV

SEQ ID NO: 65758 - protein, 623 aa, Zea Mays
MAADALSIIPGAVLRNLSDKLYEKRKNAALEIEGIVKQLATFGEHEKISAVISLLTNDFTYSPQANHRKGGLIGLAAVTVGLTSEAAQHLEQIVPPVLTSFLDQDSRVRYYACEALYNIAKVVRGDFIIYFNKIFDALCKLSADSDANVQSAAHLLDKLVKDIVTESDQFSIEEFIPLLRERMNVLNPYVRQFLVGWITVLDSVPDIDMLGFLPDFLDGLFNMLSDSSHEIRQQADAALSEFLQEIKNSPNVDYGRMAEILVRRAGSTDEFTRLTSITWINEFVKLGGEQLVPYYADILGAVLPCISDEEEKIRVVARETNEELRAIKADPAEGFDIGAILSIAKRELNSEHEATRIEALHWFFTLLDRYCAEFLAYLNDIFDPLLNALSDPSDAVVLLVLEVHARIAEESHHFHHLVSYLIRTFHNNHFVLEKRGALIVRRLCVLLGAEKVYREFSTILESEVDLDFASVMVQVLNLILLTSTELGELRSPLKKSLVDSCGKDLFQSLYASWRHSPMATISLCLLAQAYNHASCVIQSLGEEDINVNFLVQLDKLIRLLETPVFAYLRLQLLEPGKHTWLLKTLYGLLMLLPQVKLLTRLCWERLYIVGFICLHSKVRPSRS

SEQ ID NO: 65759 - protein, 300 aa, Zea Mays
MVAAPSKCRPSAAALVVAPPGAPRRQLRCRCCEDTLGVPRRRLQPQLHLKQQAPAATTAPAAAPPPRPRRIVLVRHGESEGNVDEAAYTRVPDPRIGLTAKGWREADDCGRRLRDLFSSGSRDQDDWKVYFYASPYRRSLETLRGIGHAFEPHRIAGVREEPRLREQDFGNFQDREQMRVEKEIRQRYGRFFYRFPNGESAADVYDRITGFRETLLSDIVLGRFQPPGHRSTSGDMNIVLVSHGLTLRVFLMRWYKWTVRQFEGLENLANGGELVMQTGEGGRTRCGRRRPGPASSTTAS

SEQ ID NO: 65760 - protein, 4211 aa, Zea Mays
MLVLYLLRKYLGEYVEGLSVEALRISVWKGDVVLKDLKLKAEALNSLGFPVTVKAGFVGTITLKVPWKCLGKEPVIVLIDRLFVLAHPAPDGQTLKEEDRQKLFEAKLQQIEAAEAATLEATNRNSRGGPAPGGNSWLYNLISTIIGNLKVTISNVHIRYEDSVSNSGHPFASGFTLSKLAAVTVDEDGNETFDAGVALDKLRKSVELHRLGIYHDSDSNPWKLNKNWEALNRTEWSEIFQDGIEDGSQSSIWAVNRNYLVSPINGTLKYKRLGKNERGDPDTPLEKASLVLSDVSLTVTEAQYYDGIKLLEAFSRFRTRVDVSHLRPVVPVKEDRRAWWRYAVLAGLRQRKLCYWFSWERTRRLCQLRRRYVQLYATLLQQAAKVDISEIREIEKILDMKVIILWRLLGHAKVETVKSKGTLYRKGASKKRWWPFAWNTTGLPSEEATHPESQLDEEEQLTKEEWQAINKLLSYQPDEDMSFPLEKVSPNVIQFMMDVSIGQAGARIINIDGTEVLCGRFHQLQVVTKLYPKSTCCDVTLKYCGLSSPEGSLAQSVVSEGKSHALDVSFVRAPIGMDLDWQLIAKISPCHVTVLKESYERFMEFIKRSNAVSPTVTMETATALQLKLEKVTRRAQEQLQLVLEEQSRFGLDIDLDAPKVRIPLNANQPLLGNEYFVLDFGHFTLHTRDGKHDEERQSLYSGFYITGRDMAAFLICDLAQNIYSIPENLDQDTLLGHTFDDNQFCSLLDRCGMSVIIEQIKVPHPNYPSTRVAFQVPNLDIHFSPKRYCKIVELLGVLLHMKGNNNEYSNNHESGSLAPWYPADLAGDARTLVWRGIGYSQAEWHTCYVVLSGMYLYILESEFSANYQRCCSMASRQVFEVPPTSVGGSPYSIGVCSRGGDTHKALELTSTLVIEFRNEIEKAMWMKALVQATYRASAPPDVNILGDPVSPPPESSTPRLNSLGLVDLVVNGSVIETKLSLYGKLDRKSSDSQELLMLELLGNGGKVNVVQSSRGLSVKTKLHSLKIMDELQGRLSMTSKYLVCSVINESVGATSSDTLDKGGDLSIFPVDEDPFMDALTDFTPDQNSNPDDCQIPNFISDANEYNEIGSKDGSCFDGDEQNAKPTEIFYEAQDSNVADFVVLTFLSRSPDSCLYDGIDSQMSIRMSALEFYCNRPTLVALIEFGFDLSTVNSVPKCSLDVAPAIETVKPTGKEEGAPTIVKGLLGYGKRRTIFNIKMDVDRVSMFLNKEDGSQLAMFVQEKFLFDLKVHPSSFSIDGMLGNMRFCDMSLGPEHRWGWLCDIRKPGVESLIKFTFQSYSIDDEDFEGHNYSLTGQLSAVRIVFLYRFIQEFTSYFMELGTPHTEEAIKFIDKVGGFEWLIQKYEMDGASAIKLDLSLETPIIIVPKNSQSEDYIQFDLGQLKVRNEFSWHGGKETDPSAVRLDVLHAEINGINMAVGVNGTLGKCMIRDGRGINIEVRRSLRDVFKKVPILSMKFQIGLLHGVMSDKEYNVAISCISTNLSDTPNLPPSFRENMNRTKESIRLLADKVNLSNHLLLSRTVVVMTVEIQYALLELRNGPDAESPLAELAVEGLWVSYRTTSMLEMDLYLSILKFSIHDIRPDTKSEMRLMLGSCSETANLCVDDSSTDAGVSNLTMLILDYRSRSSFQSFVIRIQQPRILVVLDFLLPVVEYFVPSLGSITGREESLDPKNDPLMRADDIILTEHVFLQKEDFIQLSPVRQLIVDGCDIDEFIYDGCGGTVSLCEEFDKKGQVYSGIIIIIGCGKRLRFKNVKIENGALLRRCVYLNMGSSYSISSEDDVEVSVLESSFTNDEDCLNLEEHKKRNLQNAIDGPTNQILNFTFEAQVVSPEFTFYDSSKLSMDDSLHIEKLLRAKMDFSFMYASKEKDIWARSVIKDLTIEAGSGLLVLEPVDVSWKYTSVNEKTNIVLVSTDVCIHLSLSVASLMLKLQNQTLAALQFGNISPLISCTNFKRIWSSPKGDLPGYNLTFWRPQAPSNYVILGDCVSSRSVPPSQVVVAISNTYGRVRKPLGFRLIHVLPGSLDLIDSCQSTEENECSIWIPVPPPGYLALGCVVNIGRLPPSNHVVYCLRSDLATSATFSDCIHTLSPAAGIISEFSIWRVDNVIASFCAHNSIEQPTKTEALNLHHVLLRNPNCYIVKDLSADSSIQNDQSSDQLNHRKSLSGWDVLRTLSRPSNYCMSTPHFERIWWDKGNDTKKPFSIWRPLPRFGFASVGDCITEGFEPPTLGILFKCDTVVSEKPVQFTKVTQIDRKGLEEIFFWYPVPPPGYASLGCIVTKTDEMPSKDSICCPKLSLVSQANMSEDPISMSSSSKGPCCWSIWKVENQGCTFLARPDVKKPSAQLAYRIADHAKPKARENITAELKLGCLSVGILDSSCGMVTPLFDTTIANINLATHGRFETLNAVLICSIAASTFNRHLEAWEPFVEPFDGIFKFETYDTSEHPPSKVGKRIRVAATSPLNANLSSANLELLIETLVSWRRQIDLENKSSTKSEGTIENMKKADDSSYSALNEDDFQRVVFENKLGCDVYLKKKMEDSEITIELLQHESKVSLLLPPPRFSDKLNVLSNSTESRYYVVVQIFESKGLPIIDDGNGHSYFCALRLLIGSHASDQHKVFPQSARTRCVKPVETTELLTHCAKWNEHFIFEVPEQASANLEIEVTNLASKAGKGEVIGSLSMPIGRGATMLKRAPSMRMIQHVSDVKRVLTCPLTKKGQIPNFEDRKKGGVLVLSSCYVERSTHSYFQRLKDSINNVESDFCIGLSPDGPWESFTAALPVTVLPKSLNNNRFAFEVTMRNGKKHATLRGLAVIANDADIKLEVSICPVNMLDNSMLNTRLASSTSVIDEVFENQWYRPIAGWGHNPSIGHRKDLKQWSTKDCSYSSKAFFEPGLPSGWRWTSPWKIERLNFVDNDGWAYAADFQNLNWPSSSWRSSKSPHDFVRRRRWVRSRQQSQEQSAEIPRKVLATVSPHSSTALPWTSMIRDMDLCLQVRPYSEKSEESYSWSQICSLGSESIPKQQHSSLSRQSTVKQSVVSSRNSVLKLAELEKKDVLSYCHPPVSTERYFWFSVGIDASVVHTDLNVPVYDWRISFNSILRLENKLPYEAEYAIWEISTKSNMVEKQHGIVPSGGSVFIYSADIRKPIYLTLFLQNGWILEKDAVLIMDLLSLEHVSSFWMVQKQSQRRLRVSVEHDLGASDAAPKTLRLFVPYWIKNHSSIPLCYRIVEGESTESTEADSLSRPDSLSRVSKSSKFSLKYSSKSLVRRGTMSHRNMQVLEDIEDCSTDYVMLSPQDYLNRSAGMRSESRDNNFSPARVAISMAVGGCTQYSVGVSLFELENKEHVDIKTFASDGSYYWFSVQLKMASDRTKVVNLLPRALLINRIGRTIFLSEYHDETEEPLQPYEPPKVFQWRSEFGSELLKLRLEGYQWSTPFSINANGVMCVLMNSTTGNDQAFVRVNVRSGTKSSRHEVVFQLDCWSSPYRVENRSMFLPIRFRQFGGDDHSWRNLLPNSSASFFLEDLSRRHLLEVLVDGTDPMNSMTYDINVVMDHQPLTNSDALKKALRVTVLKEGKLNVIQIIDWLPDNRNRGQITERMLSPIFQPSEVDYGQSSPDLDSEFHVTLELTELGISVIDHMPEEVLYLSVQQLLLAYSSGIGSGVNRLKMRMHWIQVDNQLPFVPMPVLFCPQKIENQSDYIFKFSMTVQTNNSLDFCVYPYVGVQVPENCVFFVNIHEPIIWRLHEMIQHLKFDRIYSNQPSAVSVDPILKIGLLNISEIRFRVSMAMSPSQRPRGVFGFWSSLMTALGNMEHMPVRIAQRYREELCMRQSALMNSAISNIQKDLLSQPLQLLSGVDILGNASSALSNMSKGIAALSMDKKFIQGRMRQDSKGVEDFGDVIRDGGGALAKGIFRGVTGILTKPIEGAKSSGVEGFVQGVGKGIIGAAAQPVSGVLDLLSKTTEGANAVKMKISSAIMAEEQLLRRRLPRAIGGNSLLYPYDGHKATGQAILHLAECATFLGQIDIFKIRGKFASTDAYEDHFLLPKGKIFLITHRRVLLLQLPMMTQRKFNPTKDPCSVIWDVLWDDLVTVEMTHGKKDPPDSWPSKLILYLKAKPSNSKEIVRLVKCNRGSDQASIIYSAIDKAYKAYGPNSLKEFLRWKVPRPYAPRNSSGRSIQDLSFG

SEQ ID NO: 65761 - protein, 271 aa, Zea Mays
MAAEGEAKNPSGGGEGGNPQHQQAVQAAPAEPPTAQGEAVQEAGAQATGQEPEGEKANRDGEGSAGEKDDGACRDLVLVEDPEVLAVEDPEEATAALQEEMKALVASVPDGAGAAFTAMQLQELEQQSRVYQYMAARVPVPTHLVFPVWKSVTGASSEGAQKYPTLLGLATLCLDFGKNPEPEPGRCRRTDGKKWRCWRNTIPNEKYCERHMHRGRKRPVQVVEEAEPDSASGSKSAPSKATEGAKKVDDKSPGSKKLAVAAAAAAAVQST

SEQ ID NO: 65762 - protein, 544 aa, Zea Mays
MAEKEGNLEAVLKEAVDLENIPLEEVFENLRCSREGLSTEQAQQRLEIFGPNKLEEKEESKFLKFLGFMWNPLSWVMEAAAIMAIALANGGGKPPDWQDFVGIITLLVINSTISFIEENNAGNAAAALMARLAPKAKVLRDGRWTEEDAAILVPGDIVSIKLGDIIPADARLLEGDPLKIDQSALTGESLPVTKGPGDGVYSGSTVKQGEIEAVVIATGVHTFFGKAAHLVDSTNQVGHFQKVLTAIGNFCICSIAVGMFVEIIVMYPIQHRAYRPGIDNLLVLLIGGIPIAMPTVLSVTMAIGSHRLSQQGAITKRMTAIEEMAGMDVLCSDKTGTLTLNKLTVDRNLVEVFERGTTQDQVILMAARASRTENQDAIDTAIVGMLADPKEARAGIQEVHFLPFNPTDKRTALTYIDGDGKMYRVSKGAPEQILHLAHNKSDIERRVHAMIDKFAERGLRSLAVAYQEVPEGRKESPGGPWHFVGLMPLFDPPRHDSAETIRRALNLGVNVKMITVGNRKGNRTSSRNGYKYVPLFCFIRTEQG

SEQ ID NO: 65763 - protein, 1899 aa, Zea Mays
MRWRKGATLESLLTANSESQITPKDRTSRKVPPRTTKLKSRQPRSPDHKTTSRILREHLQEVILSQKKIISRYSVRHYYVKFGSPDSSETAPPFGEMDSFGALVQSSGKLDLTKVVPVNESDAVDTKSEPIDGSAYLELGDKRNLGKQHEPFQQNGMVHSSEKLPDCPYLDIGESNNRSHLTCEEKPRLAEVPADQKDVDGRRPDDIVSDQDNFIGASNDTDMENKEGLQMKTECDPSASVELVELNRHNKEGDKVLYAEPPEVGPAIDSSLGLDNASSGEEPTCVDLPLSSDSAPTVSATNGPNSGSQSGRQMNGVDWSTDEESSNDVDLIDVSSSSSVVSENGDVQNNDCLVSCLQHEEAIHSLSDDHAGAIHNSDEQSPNTSSNWDDMAIGCNNYTEKVHHPVEHVQDVVLDDISMILSKPNDVSEDEDKISSGNADDLSLHPTKLNQEEIQELKTESEEGRSLESGSSPSKASLPNKDHVSMNDVEADTVTIPKETVADTAPTGLDPDGIDERQDGVAPKYSSIHNSVLYESYDDKIAEDTHSLLDDGLSTTFDDDKHVAEDHQFVVLEQRTCPTSLNTCKDDSMQGCAVARDFTDAEKLPGVVSGVLASQLETESHVGETLASTSYAFSDDTEALEIGVPLAPGTSFLPNTSSSLVEKHELTETEEIAEVGEFVVAKESTTSVFAVDVVPPKEFIDANIHPEKVEVLATSLTEEATRLDLQLQSPSREVLETTEAIHRNFGAVDESREDISKKSMLQTDNSPLIVETTSEKCSDRDGDTQFLVKSDYQEELLKEGSHNAEDRSLCDLNKDGAVTLKSNAVEKQPVNAGQDLAWGMHAQDSSSTNPFLDPAYLMSHTQIYSSSSMSSQPCFPEEEDFLSELVIQHDNMGVTADALWEPATPPDDAPLPSEIMTEDDFRSFCQEYHEIDFSSVTNCSHSEPASDSNKIPNAFLIRESDFPCYNSALPVKLDQEACIHSKFCSECVEYSCAVERQGTTSMVVSGKEDRVGKDETPGVDFHLNFLEFSNDNRSPELNMLSVPVDLRQELHGLPEVDSRDSSPLLHKEKTSEECCFSLSNNVVEVKQELEIRADLVPHSSINEKVDGLDEAVPVEPEAHACALDEYDNQDVPHISTSEKNETLTLGKPVLVQGPEVCAFGGFECDPPIIPSPSVDETKDNLEVRMNMILQSFHHSLRTSFQAEQKSECYTSGEHDSQTVPFPLHDENINELDDPPLSNADELDRESKACVPHECDAQIAPCSTDEDIHELDHPPLSSPALVDLESEDHVSDDRDSEVTPCLVKDKIDESVDAQPNLLPGELEQETHAPPELDFRVAPQSAKESDCSTEFDSQAAPCSSNIPVLANTTVSTCISAMPSSEETYQLSPVPPPTVQFQNDSYKDPQALLADSYKDPQAPPPLPPLQWRLGKPRLGLLSRKGCMTEPARVIDPVLQISSQEMDIRPGLLDPTDRSIEPVSCQEIKEDRCESSLIDHNDQNVDFDRLSTRVAVTDVARTEHRLSLETSEDIKQQGHISSSATGVGEHLDAGFTSTMADEEHLDDSGMTHGTALYLSDPLFPLPTYELQDPQPDTRENSEHPSQTHGAASGDDKSMDAVGSMESTLTKGHVSGNRCYQQPQHGESSSETSDHKEHITNASEDGVKHQSGTSEAPSDTAKHSAPGTLLKGNVQESQILQEHNVGSSEDDQPGGLLYSLEPVAPQGENKNQVNNPGLLLEWPGDTSELVTGLEKSCYAHAEQPPVMGWTVGPQMLHPKYGILEEESQFEPNIADNHLIRKPISIKNIPRNPLVDAVAAHDRSSMRKVSELAPPTDKPKPNERNMLLEQIRNKTFSLKPVAPAQQTAMRSPARTSTRNLKVAAIIEKANAIRQAVGSDDEDADSWSDT

SEQ ID NO: 65764 - protein, 834 aa, Zea Mays
MANAACVGGSFLGVEKGKPATVSNLGAPAVLLLVLACLPLVLPSSDPKQGMSFGDLDGGGSAAGLQYPYGAFASSPVLSLTVVDARRRRGGGGNAKDASEAENEGQSMMSGHLDVVLSGGGDGEDGEAANQRKPKRKKPYNRHTPRQIEQLEAMFKEFHHPDEKQRAQLSRQLGLDPRQVKFWFQNRRTHLKNQLERQENARLKHENDKLRVENLSIREAIRDLVCSCCGGPAVLGELSPEEHQLRLENARLRDELARVCTVTSKFIGKPMSHMELLLAKEPHPMTGSSLELAVAVGVGSSVPSSKMPVSTISELAGSTSSSTGTVTTPMVTASLPMVSIDKSKFAQLAVSAMNELVKMARMNEPLWIPTIPSPGSPIMETLNFKEYLKAFSPCVGVKPTGFVSEASRESGIVTIDSSAALMEVFMDERRWSDIFYCIVAKASIVEEILPGVAGSRNGALLLMQAELQMLSPLVPIREVTFLRFCKQLAEGAWAVVDVSIDGLQTDQCLATNTKCRRLPSGCVLQDTPNGCKVTWVEHAEYPEASVHQLYQPLMRSGLALGAGRWLATLQRQCECLAILMSSLAAPEHDSAAVSLEGKWSLLKLARRMMENFCAGMGASSSREWSMLDGFTGSTGKDVRVMVQNSVDEPGVPPGVVLSVATAVWLPVTPERLFNFLRDEELRAEWDILSNGGPMQQVLRISKGQLDGNSVALLRADHTDSHLNSILILQETCTDRSGAMVVYTPVDFPAMQLVLGGGDSKNVALLPSGFVILPAGSTASGLGHKARGSLLTVAFQILVNSQPTAKLTVESVDTVYSLISCTIEKIKAALHCDVC

SEQ ID NO: 65765 - protein, 284 aa, Zea Mays
MRRSSLLERMPALDEANYLVKRAASTQAAVSSVNSAPAVTSGGPLKLPNGVAKPPPAPLADLLDLGSDDAPVTTSAPTTSPNDFLQDLLGIGLTDSSPIGGAPSTSTDILMDLLSIGSSPVQNGPPTSNFSLPGIETKPPPVTPQVVDLLDGLSSSTSLPDENAAYPTITAFQSATLRITFSFKKQPGKPQETTINASFTNLATTALTDFVFQAAVPKFIQLRLDPASSSTLPASGNVSVTQSLSVTNNQHGQKPLAMRIRMSYKVNGEDRLEQGQISNFPSGL

SEQ ID NO: 65766 - protein, 140 aa, Zea Mays
MDLTRDANFRIAQGGLQALSVAAVVADDHFKIHLNALVPAAVERLDDGKQPVRDAARQLLITLMEVSSPTIIVERAGSYAWTHKIWRVRDEFVRTVASAVGLFASTEISLQRVLLSPVLQLMNDSNQSVRDAAISCIEVS

SEQ ID NO: 65767 - protein, 475 aa, Zea Mays
MASTSSPHRKLLHSLVYWAVQRCRMSELPCRLTVSLKRPAEPASSPPLRVSVSDTGVGSKLEEFLELDALAREIPVERWDGTLLVTTTGINDEAIYRYQINLQEETSSARFSKLATAYKNHARFSGTEVCLCLSNDADVDDFVLWLVCFFKKIQVLRAANLACELFVEQTGNTGSRNVCLPQDSDDVHHSVTASSIDQLVSGLKDYSLSHVNSCDKCGMCLFDRDLLKIGTGAANHVERRKANRLHVEVVIVIAHIASDSDCCMANCSSTQVLYFEDFVPCQILQSSFDVLMSTDWQSYGFKLKGGLMGDDGNAVLEWDNMAFARIDISIHTYHECAMQERQGSPQDRYLLRKALKSALTHLKADHAGDFLSCHGQRVREYVPDLAESIAGLILSSTDEEFQGECFALLGLGSEQDVSGGAVQSSICEKMIRIIEINDTKDNSEDNVPYLFECEKLDEDSELDEGGGDEDMASDF

SEQ ID NO: 65768 - protein, 208 aa, Zea Mays
MDFHSKATNYLVTASDDESIRLYDTQDAVCLNTINSKKYGVGLVCFTDNPSIVLYSSNNGWDESLRLLSMNDNRFIRYYKGHLDRVVCIALCSGKENFLSCSLDRTILLWDHRAEKPQGLLRAQRRPTVSYDAQGMVFAVAYGGRIKMFDIRKFGMVVVIERWRGLVTWFGLYLTCYVRRGLLRPSLSALMIRKPMSYSSAVMAGGFC

SEQ ID NO: 65769 - protein, 252 aa, Zea Mays
MEGKCSSTTELTSDRHCSSVVIECSSSGYGICSGSCLMSIVTKYSEKIILTESDAKPRTSRRKEKLKIPANAKRKDNVDCSSEWQGPPPWDPSIGGDGYPKFLCDVMIEGLAKHLRCVGIDAAIPSSKKPEPRDLLNQTYKEGRILLTRDAKLLKYQYLAGNQVYRVKSLLKHDQLAEVINIFQLKISEDQLMSRLFPRACSTEIWSSGSAPIATNSTGRGLSTTMQSKGSCQCATLVTKQHVRPWYSFVKL

SEQ ID NO: 65770 - protein, 138 aa, Zea Mays
MHPSFAHPWAGTVRLWPYDQSGRPPPPPAFNALPQYNSFGSTPSAYGGFYGAPPPPYGMPYGGAAPPGFQAPAPAYQATPWNPTHGGAWHQDALAHSFNTMTLNPPNATSEWYADSGAGSHMTSDAGFANQERDRQVQ

SEQ ID NO: 65771 - protein, 98 aa, Zea Mays
MSRPAWSAREALAASAVAAVLLGGLVLMSLVVGRDARTPSPASAAAPAVGGRRMVIGATEELKGGDDPLSSSKRRVPNGPDPIHNRGAGESGSSPGRA

SEQ ID NO: 65772 - protein, 831 aa, Zea Mays
MAEPEPLPQVSSEPTTPPQEGSGRTKTKNKKNRSKKQPKRAGADTDGLSSGASTMVEDPFFVLAGGKEGGFLDLEEIDEADFGIFGGVLDDVGQSVEEAGKDHGKKKKKTKKRKRGGDGEGFSGDAALVVENDQVDVEKVEKKVEDGEKGDKKGKRKMNMKKRKVKDNEMNRESDEDVASDKAEDMQDDTENMEQNEDDELILGEDDVSAWRELRLHPLLLKAMRRLGFKEPTPIQKSCFPAAAHRGKDVIGAAETGSGKTLAFGLPVLQRLLEEREKATRLQQEDEKMEERSCGSPLRALILTPTRELAKQVCDHLKDVAKFLGIHVVPIVGGLSMEKQERLLKKKPEIVVGTPGRLWEHMSMNNQHLVEADRMIERGHFRELQSIIEMLPLTNGSDEQAARTMPNCETVPILQIKKRQTFVFSATLALSSNFRKKLKRGLSTSKASTPDDVSSIEALSKQAGMKSNAEIVDLTKASILPEKLEESFIECSEEDKDAYLYYILSVHGQGRTIIFCTSIAALRHISSILRILGINVLTNHAQMQQRARMKAVDRFRESENSILVATDGFARGMDFDDVRTVIHYQLPHSTDVYIHRSGRTARKSLAGCSIALISPTDKSRFYSLCKSLSKENLQQFPVDHTYMSGVMNRLSLARQIDKIARKTSQENANKSWLQRNAESMGLILDTSDSEEDHVQGHKKRKATSAHLQKLQQELSDLLQCPLQPKTFSRRYLAGAGVSPLLQKQLEELAKRNASNNSSKSKNKGSGFVVIGQDRVEPLQALQNSGQEVCVNIDKEREKRRVAENWRRKKHEEKKRTQEQKRKDKRKAKEMA

SEQ ID NO: 65773 - protein, 196 aa, Zea Mays
MPGGNIYDFLHKQNNFLDLHKILRFAIDISKGMDYLHQNNIIHRDLKSANLLLGHDQVVKIADFGVARHGSQQGQMTAETGTYRWMAPEIINHKPYDHKADVFSFAIVLWELATSMVPYDNMTPLQAALGVRQGLRLDIPGSVHPRLTKLIRQCWNEDPDARLTFAEITKELQDSLHHIEAPKGASRRSRAKMQKK

SEQ ID NO: 65774 - protein, 636 aa, Zea Mays
MTVDRLELVEVEKSKLDEKRKLGEQDMVRLMQEKENAENTIASLQQEIQVLSRMHEQYHERKETEARQMEEHLAMRLKEAEFLLMQSEKKVEEIESVSQLKSQLWTRKANIFQSFMDNQKLSIKDIRISSQSIKQEMFALQMKWIDEISSIGRELKGLVDAADNYHKVLAENQKLFNEVQELKGNIRVYCRVRPFLPGQDGKTTIIDYIGENGEILITNPFKQGKDVCRMFKFNKVFNTHASQAEVFSDIQPLIRSVLDGFNVCIFAYGQTGSGKTYTMSGPGTSKEDWGVNYRALNDLFDISLSRRNAFSYEVGVQMVEIYNEQVRDLLSNDIAQKRLGIWSTSQPNGLVVPDASLHPVKSTLDVLQLMEIGQTNRAVGSTALNERSSRSHSILTVHVRGVDLKNGSTSRGCLHLIDLAGSERKNAHVPYRNSKLTQVLQSSLGGQAKTLMFVQINPDTGSYSETISTLKFAERVSGVELGAARSNKEGKDIKELLEQVSSLKDTISRKDMEIDQLLKNKAKSPGSSIDRNDSRQQIRRLSGTGSSEAECEDNMSDDGCSVAGTEYSVGGASEATAERMQKAPSRIARLFHTKNGQPANSKPKPRESALKPPGRTTSTGGSQATGGSLVKPPKRR

SEQ ID NO: 65775 - protein, 230 aa, Zea Mays
MGARLLRHQHEDINKGPKNKPSILGTVSLNLADYALTAGETIEIILPLSIPGGAPERASSLHLTLSMVELRAFQETSDASQRSAATLPLSPSPSDSLPGGKYEVLVIKAGLRKVKILTDLVSTRRPKKTCQGGGEDKFCVNSDSVEYPCDTESLDDDLDDRVEEDEFGDSTIRKSFSYGYLQSVNYVGGLVYAHAKIDGEHEDWIYYSNRKTDVGFHVEKVLPSTTENGC

SEQ ID NO: 65776 - protein, 1199 aa, Zea Mays
MDNMLGDLYKPDDGDDFYSKKYRDELENVSFQLLEEITDGFSESRELGRGSFGVVYRGLTKNGDYVAVKKLHANVTDLNHKQFQNELYNLAKLKHENIVRIYGYCYEIKKTFMEHDRRKILVEEPRIALCLEYLHNGSLQDHISDEFSGLDWDTRYRIMEGVCRGLYHIHRNLKKPLYHLDLKPANILLSKTMQPKLADFGLSRIFRNEELTRTTKSPLGTLGYQPPEYIERGEVSEKFDIFSLGVVMIHLVSGRGGFERYACMHSEEFINQVKTNWRKRFKQLQRNSLRKVKVYCHEVETCTRIALNCVEKDTQKRPDIDMVINNLKDRKTHRFKYSQAYKKGLTLFTMHDLVHDLARLLTAGEILDASNIGTMDARHVAREPATRSLFHGYMHAKSNFRSFIRTNSNIYTYRRRREPEGSGQQYKYALLTNCHKPLEVLTDSPNMIRALHFRDCHGSKGLKDYAFLPAKLSLKVLDLSGCNIAYLPASIGELAVLRYLNAPEIKNEMLPDSLSKLSKLIYLNLSGSNISALPDSIGDIEGLMHLDISNCVLLCELPESFVDLKNLVYLDLSHCQIKITARVFSGLTNIQHLNLSKSLIHGGDGLEGLQEAVGGLTELRYLNLSGCFENLRPDEVLSFVDRICRLTNLVHLDLSFNLGLVSVPESIGSLRKLHTLDLLCCRNLVTLPKCMFNMDSMKMLNVTCCPHLDQSTLPRYRYFTLPYFEVHADDGESTSNIGLLRYVNPTHELYISGLDNTISAEEVDSINLSQKQGIQSLSLSWTRDAQRSVEDMEVLGKLVPPDTLKCFELRGYDSMSFPTWVMGITLYLPRLTKVVLWELRKCNSLPPLGQLPTLQKLVIGGMDSTLTVDEGFCCAGPGAFPLLQELQLCQMENLEVWNTTYSCGQSNEDVQEFMFPNLRELLIRDCPKLRLKPCPPKTVGWKIENSDNVLSSWDEEGEIDLAALFPSRKEFKKLWEGKTKVPAACSAQFEKCRKPGASYNACPERVEVKSSKLPLGKWRLFRHLLPTYDLRISCCTYATSGSSQEIIQGLAFIESLCLEDDAQSELPNWLGELTSLETLEISKYPGLEAPLDGMKQLAHLRKLSLINCRSMSALPQWLGELISLKELIISEWPNLSDFPESMQLLTSLKMLRLERCPRITALPGWLGDLASLKILVISNCKGIVSLPDSIQKITRLVRV

SEQ ID NO: 65777 - protein, 212 aa, Zea Mays
MAKARKQKGDGSGTGGGATVLHQKLCLSIDMENQLIYGYTEIKALLAENDTFALHADNMTIRSILVDGETVEFDYSPHWKNETDQPNWSSISCLNTVADAACSTYTSSLNREATPNLIVSSERSIKSMIEQQLDENSEKYEENSGRLEKHGGKTIQTSYDQIVNGCNGSAVEEGIENSAVEEGKKKEKEKEKEEKNGNEKSKENGNETENEK

SEQ ID NO: 65778 - protein, 85 aa, Zea Mays
MADNCMVSRLKSIGHIQVLRGRAHQVILIFLLGIFARKSLMLLCLHFSLVTLLAQMLVLCGTRKQDDPEDLVLFLSGTSRMLKVR

SEQ ID NO: 65779 - protein, 381 aa, Zea Mays
MIWRNIYSRPLLTSRSGHSHMPQSPKPYTSLSATVIAIAMAGRRPAPVAILLLLAAAFAPISSAVRPVSDAHRSAAVELFAPSADGSFGDLESTYEAVRTFQILGLENYKSLSGKACKFAAENLASPGSTTKDLFHAVRISGALGCAVDAGVYDGVVARLKAVIQDTNSLLELYYPVGGLLGIKEQGHNVVLSDAEGTFHATKALSQSDGRWRYDTDSAESSTFAAGIALEALAGIVSLADAAVDPSMMGVVKNDVVKLFDTIKSYNDGTFYFDEKHVDATEYKGPIITSASVVRGVTSFAAVVSGKLNIPAEKILGLAKFFLGIGLPGSAKDCFNQIESLSFLENNRVFVPLILSLSSKVFSLTSKDQLKVIITFISCIL

SEQ ID NO: 65780 - protein, 216 aa, Zea Mays
MAPEARGEAALVYRDALAPVEERVRDLLGRMTLREKAAQMAQIERTVATPRALTELGAGSVLNAGGSTPCEQASPADWAAMVDGFQRLAISSRLGVPILYGTDAIHGHNNVYGATVFPHNVGLGACRDGELARRIGEATALEVRATGIHWTFAPCVAVCRDPRWGRCYESYSEDPEIVRSLTTIVSGLQGQPPADHPHGYPFLASPRGWWHGQGGQ

SEQ ID NO: 65781 - protein, 338 aa, Zea Mays
MLHQHDGCRHRAILESCCASRHHHRHRNFYHNRHRQHHARDPTGSTICLLRLSLHGACCCHVTTPTTKSDANFIDQYLDLMDITRGIIWRFLGPWLHRPRNKLKELVKGPLLLENTVVEEEDLKGAHHLTALAEGSVRAQGNAEGSVRVQGIEGSGLAQGIEGSGLAQGNAEGSGLVQGTAGRGLAQGTAGGSAHAQGTAEGSAHAQGTGGAVHPMAEGIEIGPGHPPAMGTIRQTRKRFYGLVVDCVNKGTCNTTYKLVRLRRLAWIFSSVAVFCCFIQVLYSVSFRIEMSDDDGCYCSGNRRHVLQNTYETMAYSCVCLRLLWYVLILRLTRCTVD

SEQ ID NO: 65782 - protein, 80 aa, Zea Mays
MDLLRSLNQKIASQCLHLYSSLPRREGTYLSICRAQVPRSTTSRIILSFIRVKGPFFSLSLLRHNFMLQRSSMDDIDDDI

SEQ ID NO: 65783 - protein, 229 aa, Zea Mays
MTKRGAVYEPLPWSLRLKILIGAARGLAFLHSSERQIIYRDFKASNILLDSHFNAKLSDFGLAKHGPDGGESHVTTRVMGTYGYAAPEYVSTGHLYVKSDVYGFGVVLLEMISGLRALDPSREREKVNLVNWARPLLSDRRKLSQLMDGGLEGQYNPKAALLAAQLTLRCLNGDPKRRPSMKEVVEALEKIESSAKGRMAREPRNSSRRGLVQSPRGDSARNNSSSRGR

SEQ ID NO: 65784 - protein, 340 aa, Zea Mays
MASGTGSGQPQPAAADADPGAGDNKLVFETPLQPQPVREDYVENAVKFLSHPKVRGSPVVYRRSFLEKKGLTTQEIDEALRRVPDPEPITTATASPQQQVGSQNQSAGAQTYAPARSMHPATAGPVVRPRFSWYQAFLAAGLLLGFGASTAVFIKKLFLPRLKSWIRNVVAQGDGAEGNQLKHRIDEETAEAVKASASAVSAIAKTNQQLLASKDEEKKILVTLTQALDSQAKELKSLTESINRTREPINITRDDRFSQHRPLEDHVPPVTRNGAINSSWRSSQQTNMYGVSHGDFGSARSASFVPAPAEPTAGSFSRSCAEVRGLAGLYWHALQITRPS

SEQ ID NO: 65785 - protein, 234 aa, Zea Mays
MGSSAAGSTPTARQQRGAGVDAGAAPSSSSPVFLNVYDVTPANGYARWLGLGVYHSGVQVHGVEYAYGAHDGASSGIFEVVPRRCPGYAFRESVAVGATELSRGEVRALMAELAAEFPGDAYNLVSRNCNHFCDAACRRLVARARIPRWVNRLAKIGVAFTCVIPGNGRAARPPSAASRSRSRSAPPRPRTFFRTFSVGPRRNMTAPSPPAHASASTSSGSTTGHDNGESGEGE

SEQ ID NO: 65786 - protein, 1341 aa, Zea Mays
MATPNMKNYRHSSPFGSKGVERAKSACRSKWNNRILSTPFPMLPIVAVVNFTNLSIWKPRALHPRTTNTLYKSPELTPETTAFKHGAHALGPRPLFAGRSSRQHPDPRPRRHRATGVRRPATAPAHPRASEREPASPWFPARARPEIQAADEPCPSPAISDQLVPVIPAATSWCREAALQAYRSIVGRVCCPYPYNHAAAWCCCLEPTMQHNRAGAGAAAGDMVKTPRSPVTTGTRRCRAKPQKKEEESTENNKLENGPLDATEEVHHGVEKGDGHVTRKRPRRAAACSDFKEKSIRLSEKKSVVMVKKNRMEEEEVDAVNLTKLGPEDPPPCRKLIDFILHDAEGNPQPFEMSEIDDFFITALIMPMDDDLEKEREKGVRCEGFGRIEDWNISGYDEGTPVIWVSTDVADYECVKPSTNYKSYFDHFYEKAQVCVEVFKKLAKSVGGNPNQGLDELLASVVRSTNAMKGYSGTMSKDLVISIGEFVYNQLVGLDETSNNDDEKFATLPVLLSLRDQCRSRVELTKLPSNFSNTSLKIKDSECDETAEDDDDAKLARLLQQEEEWKMMKKQRGRRGTPSQKNVYIKISEAEIANDYPLPAYYKPFSQEMDEYIFDSDDSIFSDDVPVRILNNWTLYNADSRLISLELIPMKSGAENDVVVFGSGFMRDDDGSCCSTAESVKSSSSSSKADQLDAGIPIYLSPIKEWIIEFGGSMICITIRTDVAWYKLRQPTKQYAPWCEPVLKTARLAVSIITLLKEQSRASKLSFADVIRKVAEFDKGNPAFISSNITLVERYIVVHGQIILQQFADFPDETIRRSAFVSGLLLKMEQRRHTKLVMKKKTQVMRGENLNPSAAMGPASRKKAMRATTTRLINRIWSDYYAHHFPEDSKEGDGNEIKEIDDEQEENEDEDAEDEGQIEENISKTPPSTRSRKLLSQTCKEIRWEGETSGKTLSGETLYKCAYVRELRIPVGGTVALEDDSGDTVMCFVEYMFQKVDGSKMVHGRILQKGSQTILDNAANEREVFLTNDCLEFKLDDIKELVMVDIQSRPWGHKYRKENSEADKVEQVKAEERKKKGQPMVYFCKSLYWPEKGAFFALSRDKMGLGSGLCSSCDNIEPDSDELKIFSKTSFVYRKVTYNVNEFLYISPDFFAEDEDRATFKAGRNVGLKPYAVCQILSIPEGAGSKKLNPASANISARRFYRPDDISSAKAYASDIREVYYSEDVIDVPVDMIEGKCEVRKKNDLASSDLPVMFEHVFFCELIYDRASGALKQLPPNVRFMSMVQRTSALKKNKGKQICEPDQIDSGKWLDVPKENRLATLDIFAGCGGLSEGLQQAGMYC

SEQ ID NO: 65787 - protein, 90 aa, Zea Mays
MKLIFVWKPSVKWCTHEGEARKLQPCGLSAQQQGNEGEVMEGLISTSAKAKTTVSLQDHVIYVYRIWGHVCNFTRCGTVAHHYWDGDKET

SEQ ID NO: 65788 - protein, 513 aa, Zea Mays
MDAPAMFTRKHVPEDIGLRNIGVGEAEDDGAGGQAQLHRDEKQHKPVLKKVKEKVKKIKSTLAGHGHGHDGEHGGDERMGEEDAYAGSDSSEEGEEDAVEREAALEKDGYMEDIEDKPVVMESDPDPDPDVHGAPMYESARAPAVQDLVAEYDQPAWTPAVREVEGDGVSPRVRLGDVGGPVVEDPAAPRSKTPAAREGEDIGTTPVVQQFETMSLSDGPAHVGAAKEGAKAEEWEGNAADMVGGVAGGASYTDRLKNAAAGTTEYGRKLASTVYEKVAGAGTGTGTAVGVGKRDDERTEAVPASNTRTDAARGAGYTDNIKSADAPATVEEANTESRPGYTDKIRSAAAGTTEYGKQLASTVYEKVASVGTAVAGKVQQATQSAGTATPGVGAQRDTGAAATATPGAGEQDKGVTVTGYIAEKLRPGDEDRALSEAISGAVQRRKDDAGDTVVQRVPAPGQAVASLTGGNRVSETVQPTTATGEDVKEGYAAEAPVIRGEEIGGAKLNTNAI

SEQ ID NO: 65789 - protein, 819 aa, Zea Mays
MVKEREEQVAIVRMVLGEGTPEMDIIRALHMAGDDPTKAINILLDLNKAAPPLPPSPSPFPCPSPSPSPGKPAKALVDSTPPCKAPTRPMPTAEKPKSTTSNGGSEEHWWLVGSAEMVGLSTCKGRRITSGDVVTFSFPNATTAVGKSRPSRPALASCSSEIMRFSTPSHGEVGRIPNEWARCLLPLLKENKLKVKGSCKSAPEVLTIMDTVLLSVSIYINSSMFHDQKQSSPKAARFAPYDSTFHPLPALFKLIGLAPFIKAAFTPEDLYSRKRPTETKSSIGSPAAKLTSGRLRLSSDGNEDDHGEETVSDSDLDDIIGISDSCALEERAPPDSLMCDLRSYQKQALHWMLQLEKGSSSQDAATTLHPCWEAYKLEDKRELVLYLNVFSGDATTEFPSTLQLSRGGILADAMGLGKTIMTIALLLSDSSKGCITTQNAAQTPREASGLGESHDAVKKLANPFSFSKHKKPKAPLIGGSNLIICPMTLISQWKAEIEAHTKPGTANIYVHYGQNRPKDASIIGQSDIVLTTYGVVSSEFSIDGSTENGALYSVHWFRVVLDEAHMIKSSKSLISLAAAALTADRRWCLTGTPIQNNLEDLYSLFRFLKVEPWRNWALWNKLVQKPYEEGDERGLKLLQSILKPIMLRRTKNCTDKEGRPILNLPPANIEVKYCVLSEAEKDFYEALFRRSKVKFDQFVEQGRVLHNYASILELLLRLRQCCDHPFLIMSRGDTKEYADLNKLAKRFLRGGNGAVNGDSCIPSRAYIKQVVQELQKDEGECPICLEAFEDAVLTPCAHRLCRECLLSSWRSATAGLCPV

SEQ ID NO: 65790 - protein, 277 aa, Zea Mays
MTLDEALEAIDSMLVEGSFGSAGSRVIIEEFLEGEEASFFALVDGENALPLESAQDHKRVGDGDVGPNTGGMGAYSPAPIVTDELKRIVMESIIIPTVKGMAAEGCKFVGVLYAGLMIEKKSGLPKLIEYNVRFGDPECQVLMMRLESDLAQVLLSACKGELSNVSLTWSPEMAMVVVMASQGYPGSYKKGTVIKNVDKAERVSPAVKIFHAGTAVDGDGNLVAVGGRVLGFTAKGKDIEEARARAYGAVDAIEWVEGFCRRDIGWRALRQKQVANQ

SEQ ID NO: 65791 - protein, 525 aa, Zea Mays
MSGPLNSNISGGPSNLRDSTGRPFTSSFSGQSGSLPGFHHSGSHNIHGNLNLANISGSLAPRNNSMAGIPSAGVQQPSGGISSGRFPPNNLQASLSQIPHGHSGISNRGGMNVGGNPGFGSSMNAIGGSIQGLSSNLANVGNRNSAPGLAASPVLGNLGPRIASSGNILGGSNIGRSISSGGLSMPGIASRMNLSGNSGSGAINIQGSNRIGMLQQASPQFMNLLGSSYPTPGGSLSQNQVQSGSGSLGSSGMLYEGSSGDNAPFDINDFPQLTGRPNSAGGGQGQYGSLRKHGVSVNAIVQQNQEFSIQNEDFPALPGNKGSSSDYPMDIHHKDHLQENINIMQAQHYPMARPSGFSLGSSYPPRQHQQSANSVQNAGLETIGLRPANSPSLSTNSGVYEQFMQKYHQPQTQNSLRLQAASGPQQYKDQSQKSVQGTQAVPDPYSLLGLLSLIRMKEPGPTTLALGIDLTSLGLNLNSQDNLYKTFGSPWSSEPAVGEPDYQIPACFSAEPPPALQLAFFLALH

SEQ ID NO: 65792 - protein, 157 aa, Zea Mays
MLVHQQNLEEQEPLSSIFDGSSPASAIVAVDTNLDTSTPDTYRAPPAPLPYDVILAVPNNPGLEKPDTKSKTDDQQESINDQESLKVDESCKKSVTEDKADEEDVCPICLEEYDEENPRSITKCEHHFHLCCILEWMERKDTCPVCDQITLVDEMFE

SEQ ID NO: 65793 - protein, 108 aa, Zea Mays
MGISPFPEITSVKNGALPCLQFGLSMYRASASGQTTNLSRRPCREKIVGMMKSENLFASQGGPIILSQASIIFFLRFGTKEIAPSSMSVLLEKINNSLRVISITALSV

SEQ ID NO: 65794 - protein, 202 aa, Zea Mays
MSKGGAAEEEAGVFPQAWSDGGSKRCPAGTVPIRRTAARDVLRASSARRFGMKARGGGSSSSNARRDSTSSGHEVSESLCLISHRLRLRLAATCPPAISVATRETHTHHALKRHARPVIKSWWCCNIKAGLVGGENTGVSGSNCRDSLRNQMAQPCMPACLRFCRPRSCSAPAATPHPQATVQLGWRTVHYWRMQCAVRPWP

SEQ ID NO: 65795 - protein, 75 aa, Zea Mays
MQSLVPFSTASSARPMASGPARRCARGSRARRAPSTSLRSSLAPPAAVDWSTPSVILTVSRSLRRLAPPTTGGRG

SEQ ID NO: 65796 - protein, 242 aa, Zea Mays
MALTWRAKTIGPTLPSFYLDDDRFPLNKTYGFNLFNSSEPCLAWLDKQLPRSVILVSYGTVSNYDEAQLEELGNGLYNSGKPFIWVVRSNEEHKLSDELRDKCKERGLIVSWCPQLEVLAHKATGCFFTHCGWNSTLEAIVNGVPMVAIPHWADQPTISKYMESMWGLGVRVRKDEKGLVTRDEVERCIKDVMDGDSKDKYRKSATMWMQKAKAAMQNGGSSDKNITEFAAKYSSGQKNIVA

SEQ ID NO: 65797 - protein, 735 aa, Zea Mays
MNKLIRNSKRCQYRKLFLKHCPVNSKCAADVAKNHNNKAHFLIGGKSAYYDQSYVQLEAYSTHQQVVSFIWAVLTRIIPEPLLGNSSSKRSLRINIWKFIKLRRFESFCLSDCIGELKVSHYSWLSNIGFSDCFCSALMEKEIWSSNGSEEEKLQNLLRCWISWMFSDIVIPLVQSYFYVTERESRRYDVLYYPKTVWRNLTSTAIASLNRQNFRILRGTSRKEAIQSCYFSTVRFIPKAKDMRPLVNLRAQSKNALLNNCHLIINKVKDENPDKFGSSVFDYNNVHQNIWHFISSVRSHLKEKIKIYIVVADVSKAFDCITHDMLLKVVDDALKCDDYVLRKCKKVVCNWSKNAIYRFDSNVSISNGDNVCDFLIQLSSRGGILVDQGKSCKIRKKEIQCFLSKQVKCNILKIGQNFYSQRVGIIQGNKLSPNLCSLYFGHLENSELLKSLHDNKIDSEKDVLTPRSLLMRFIDDFIFISFSKEQALNFFNRMRRGFVNYNCYMNDSKYGFNFEVANSEHCSNRIYKGDDGFSFIPWSGLLINCETLEIQADYTRYLDIHISSTITAKMHSSAKYLESKLCHYMRPKCHPIFFDSVINSPGTVRLNIYQNFLLCAMKFHCYFRSMPDPGIMKPELLHIIKRTFRYMHSLVAKRMHEAELQYDVRPVLKLRRKETMWLGLSAYLRVLQKKQSRYSELLASLREEIGRCGHLDRHNDALRYAVDDSHSSVFWKFKF

SEQ ID NO: 65798 - protein, 83 aa, Zea Mays
MRCGGAEAERRSAREPRGGNAMLAWRAARENNAAGQPGADSRAGRAGGSAGRSAGACVPAHAAQMPAHTRKRELFFNAILLYV

SEQ ID NO: 65799 - protein, 1138 aa, Zea Mays
MGAQAKDSEDETEYAGTCSLSSRRIDRRTPIREISTKSHVDSALHAPSGGPTVSASNVVGATGKHLSTPEQFMKAHDASTKSSDIRTDSGTAPDTKCAAMSVDNDTLKPTRSHIYHNENDEVPADKASRDEAKDDHRRELDTRDSTLRTPSVHKSIAPTIPGDNIENTNRNCFHGFSQINVNSDLQLNSSEENFSKKILHSTNLSRKVDQKDDGHVPDPKPNISQSSVEENLNMCEFNPRSEGNSASRNDQPLGYSRRRSSKSGSLNVHRKKSILSSVSSKAPNEAPDSGSGISSATASDVGRSPTEPTKVDGHVNSGPTMNSTENQMSGCKSNLLSYRRTSLKLVSSAEVEKLPENSVNDKNMVEPDVVKTPALHEATTEEPSPSVCSEVRKESLGVHQNRDAEMTDAQLLSKTEDAAPCSKPDKVVSCQNSGLEGCKDVPVNKITDEHGIFPSKISTSRVKKVGAKRSRNAGSKAASEFTNSRSEVAALKPKHDKVASHENVEAQQGEGCCSPNAAECTPPSPAEALNNKSTNEVLTSSQGPNHKTNESLVASKAESVNMTLQRNKKGNRRKLPNTSNADENQRSSSRTVPNSKSGNLVAKGSRTADFNISDSPTVDETETVPSNSSFNEAVPPGNGEEKHKRLSSSANADDPEACTANKVPNNRVRKVVAKRKLSDVQSHKSGSEPCKTAKVLVSEVKVVSPARVAQSSRNANKVTVVQDLQNTNTGRTNDTVGSFCKDVTEDCSKDMQSSKTRSSRRQKIADLVDGSTDHDKENILVDSNFTSNTKRGNNSMSSKSNTKTLQSSKAVLDESSVIKRNGYGTLDVPEPTWFILSGHRLLRKEYRAILRRLRGRVCRDSHHWSFQATHLVTTEMRRTEKFFAAAAAGRWILKPDYLTASNEAGKFLEEEPFEWHGEGLNIGDTISLDAPRKWRQLRQRTGYGAFYGMQVIIYGECIAPTLDTLKRAIRCGDGTILATSPPYTRFFKSSVDFAVVSAGMPSADAWVQEFMRHSIPCISADYLVEYVCKPGHPLGKHVLFNMHDLAERSLQKLMKNQEDAPGSCSACGSDNREVPMLVCGGDGRSQSSGCGVRTHADCCNPPVEGCDGGEWLCGRCDQQKSAKKAKKTAAKPRVLKQR

SEQ ID NO: 65800 - protein, 73 aa, Zea Mays
MSRRQPVPAAAAKLEEGEHELSIVDALLEVLSGRCELRRTSFGSRRLYRRFSFTSMGAPPQGRRVVNMVEFLD

SEQ ID NO: 65801 - protein, 94 aa, Zea Mays
MVWHCASYNMPTMRAEVPAPTMGRICHELMAHGFVMRRARGTAAAPAPTHYSQARGEKRVYLSFSILFILFEIGFPQRLMFYATKHQQLSFRTS

SEQ ID NO: 65802 - protein, 173 aa, Zea Mays
MVYVGICSLVGSLSVMSVKALGIALKLTFSGMNQLVYPQTWVFSSVVTLCIVTQMNYLNKALDTFNTAVVSPIYYTMFTSLTILASVIMFKDWDRQNPTQIVTEMCGFVTILSGTFLLHKTKDMVDGLPPNLPIRLPKHADEDGYAAEGIPLRSAADGIPLRSPRATDSFRSS

SEQ ID NO: 65803 - protein, 222 aa, Zea Mays
MPFTAISSQIQCQGLLPLYPVTSSATLSSSCSPTSISFYKDEDSSHEESSYSLTDYVCLKIPDGSLNKVNCIGVIKGSGNCCTTLSMMSLSGFLLHIPDGYECVDLSLYKDNQVVLLLSETSCSDSPGKSWMVMLQIENFSFMPLSGTFPANIYSLQKLVALDLQLDTDYGKVRSIPHTVSTPFAVSASRGVACVFSSRRHALVYILDEDEEAEGDETSDME

SEQ ID NO: 65804 - protein, 579 aa, Zea Mays
MYSESDRPSSTSSSAKRTHAIDPEVSDHEKCHKTESSHPSRFSKRRKEQLQNSSSVYPRKVQDVVLLDDEDMQPEEEVNCDMSDGQNGPKIYYPSRDNRESVELSRSDIKCLDPGVYLSSPVINFYIQYIKRNRLSSEDFRDKFYIFNTYFYGKLEEALCRQDEFSKLRRWWKGVNILNKAYIILPIHGMAHWSLVIICIPAKESISGPIILHLDSLAMHPSTKILNTVERYLEKEWCQLSSWEDFKNNIHKQSVEVPRQNNEYDCGIFMLYYIERFIKEAPERFTIDKLDMFNRSWFKPEEASGLRRRIRELLLEEFESAKLDDALPGADASERDDSINDGELKPDASSDSSEMVVEVVGGLGGTDKSNEGIKVVASEEASGESGDAGKSTEGTVAASEEKSIEGINVAEPEDACESIGGIYVAESDEASGEFGEIGKTNKGTKVAVSEGASVSGYTDKNMEDISDSEVAVLDKAPTSSYRRGEKTTACVLSEAASLSDSVKDEQGMVKPDSGSSKAEREGDLIVIASPERSEGNDEIIGSMPITDVVCDSCDSDTETKVRIVKIHRRKFVPSCGCSN

SEQ ID NO: 65805 - protein, 447 aa, Zea Mays
MTSGFESGSPNIAEVFCGSHSQAESQDDLEHERRDWQRFSHAVIGEESERTWRENADNMSSHEGTAVEDDNNDHLPEANEESTSVDHLPEGLEGSITDGSLPEAQEDQHDSDHLPAVLEELHGNNHFQESHGEWRRDDRPVEVYDEWQSDDHLPEVNEEWHNDDESNDTADNWHDNNSDQPIDHDAALIRRANTFIPGDDDNVYSTELRELLSRRSVSNLLHSAFRENLDRLIRSYVERQGRGPLPWDLEGTTPAPPSPVQIQEEQRDDEDQELQRTVNRPPLVIPPPPMPPRQPLWHSELHRTNWIRQNIHRSSSDIEWEAINDLRADMARLQQGMSHMQRMLEACMDMQLELQRSVRQEVSAALNRFIGEQGGESKEIIDDGSKWINVRKGTCCICCETPIDSLLYRCGHMCTCSKCANELVRGGGKCPLCRAPIIEVIRAYFIM

SEQ ID NO: 65806 - protein, 352 aa, Zea Mays
MKLGLRLLQERAKSDSFWWPYIANLPETFTVPIFFPGEDIKNLQYAPILHQVNKRCRFLLEFEKEVQQKLHTVPLVDHPFYGQDVNSSSLGWAMSAASSRAFRLHGEVPMLLPLIDMCNHSFNPNARIVQERSVNSLDMSVKVLAEKKIKQNEAITLNYGCYPNDFFLLDYGFVITQNPYDQVELSYDGALLDAASMAAGVSSPNFSAPAKWQQDILSQLNLHGEGAVLKVSLGGPDVVDGRLLAALRVLLADDPEAVHKHDLNTLMSLDVQVPLGPTVEASALRTVLALCAIALQHFHTKIMDDQAILGGGPPLITQLAVQFRLQKKFTIVDVMQNISRRIKMLSPQKSTG

SEQ ID NO: 65807 - protein, 262 aa, Zea Mays
MELTRGYIVTFPEFIWCCILRKQLQKAFAVILGCMSAAILLAEATLLPSGVDLSLFSILIKAVGKQEVLVQRMGNIDDAVPFFGRGFNKIYPLIMVVYTLLVASNFFVRVIDFLGRWKRFKFQREEENIDGLDPSGMIILQKERSWIEQGCKVGEQVIPLARNFNGVNADIESQNVPLVRRMVPSFTWEIKLRLFSFSLFETLSSPSFCEFKNCYRINFNPLVMEISPNDNPCSQNQLGDVTFNEVTLHPVQTDLTFGDKGG

SEQ ID NO: 65808 - protein, 59 aa, Zea Mays
MVRVIDHTDSVLKAMHACHTRGVFRTRRCICDSVTPIIKAWAAGLVSSCTCRDPRSLKP

SEQ ID NO: 65809 - protein, 183 aa, Zea Mays
MFSGYCLASMSQSKGKNQHRKGSLSRLQLSVILLVITNVPMALYMSLFHQRGTEDVMYYLSKEAYDGRVRSVLFLMPCHSTPYYSTLHYNLPMRFLDCTPSDSKGTLDESDRFLTSPSEFVGDVFGNLSAFSHIVLFESEERHVLQLLLHNSFLEMRRFFHSHFKIDRDLQSAVVVYSWRDVL

SEQ ID NO: 65810 - protein, 109 aa, Zea Mays
MDTQAEDHACCGAFDTIRGTKDWRAHFGYTEWKMCIYGADCSEISLVQVRGSGMLKDSACHELDKIRSLKRPYIKRVQDRHKEVQVFEESDLMRSLRKINLKVTFMMIQ

SEQ ID NO: 65811 - protein, 1156 aa, Zea Mays
MAKPMKYDDEEEISSSAEEEDQSDAAGSVSGEEGDDDDEDAAAPPAEEAEGEGQQEEEVDEEEIEAVTTGAGAEDEEDAGAVTAAEGDDESQSTEDDEPVARDKDDDDETDAVVGKREKARLKELQKMKKHKIQEILDTQNAAIDADMNNKGKGRLKYLLQQTEIFAHFAKGSQSNEKKPRGRGRHASKMTEEEEDEEYLKEEEDALAGAGGTRLVSQPSCIKGKMRDYQLAGLNWLIRLYENGINGILADEMGLGKTLQTISLLGYLHEFRGITGPHMVVAPKSTLGNWMKEIQRFCPILRAVKFLGNPEERNHIRDDLLQPGKFDVCVTSFEMAIKEKSALRRFSWRYIIIDEAHRIKNENSLLSKTMRIYNTNYRLLITGTPLQNNLHELWALLNFLLPEIFSSAETFDEWFQISGENDQQEVVQQLHKVLRPFLLRRLKSDVEKGLPPKKETILKVGMSQMQKQYYRALLQKDLEVINAGGERKRLLNIAMQLRKCCNHPYLFQGAEPGPPYTTGEHLVENAGKMVLLDKLLPKLKERDSRVLIFSQMTRLLDILEDYLMYRGYQYCRIDGNTGGEDRDASIEAFNKPGSEKNPQADLQAQDRAHRIGQKKEVQVFRFCTEIMQTKLQYTIEEKVIERAYKKLALDALVIQQGRLAEQKTVNKDDLLQMVRFGAEMVFSSKDSTITDEDIDRIIAKGEETTAELDAKMKKFTEDAIKFKMDDNAELYDFDDEKDENKVDFKKLVSDNWIEPPRRERKRNYSESDYFKQALRQGAPAKPREPRIPRMPHLHDFQFFNNQRLNELYEKEVRYLMQANQKKDTIDGEDEDQLEPLTAEEQEEKEQLLEEGFASWTRRDFNTFIRACEKYGRNDIKSISSEMEGKTEEEVQRYAKVFKERYKELTDYDRIIKNIERGEARISRKDEIMKAIGKKLDRYKNPWLELKIQYGQNKGKFYNEECDRFMLCMVHKLGYGNWDELKAAFRMSPLFRFDWFVKSRTTQELARRCDTLIRLVEKENQEYDEQERQARKEKRLAKNTTPTKRAALRNSEGESAPLSSFKRRRQSLMDDYVGSLSARCSLCNALSPYVLCLVSCARELNASRAGDFVVAVDSDFAIATVATLLIHFFIVALTLIPNYKIRDFNLTLEFDQIYAIK

SEQ ID NO: 65812 - protein, 792 aa, Zea Mays
MPQGKSKKNVVKEKAKKIKKNAESRAKVHENTDQIEINIREGVSIWITKAAVQKCFEFPPGTDKKLPIDPTTKTFDSLYRVLSVSEKKINVKKKKMKENMKEKQVEEEKIEMNMEEKKQNLVEDEGSQQEESEEEDGEDGEIGEEEGEDGAIGDAKVGGDGDKESAKRGGIKVAVRRNVLTPLNINLMLQNINNDEILKLLVKRNEDTDGTEPNLDIDLIVRCFFAVSSVAEFGKDKKKLISGCTTVLMVVFLDHLVENPLDPLTIPRINLYTSDFIADLIMVPKDSPGPEKKRRKFKNSEDTCYHEDSEMVPSPGRASPVVASVQSHKNFVDHADLEIVPSHENSVDLHSVYMAHVLERSRQSIVVDILDYNIPESTFADCLLPTGHMHTDVFYLQCQLLSKDWKDKVILSWKATQELIHQDIGVKELDKELTAEVMNKVDLIFIPIIHAGHWSLVILSTAKQETYILDSYPRHSGVAKDVLTQLQKYLDNKHNFDMSNYTDHVPPVQHQKNNYDCGFHVLLYIEEFMKEKMYKINKKMVLKFRKQLCMNLLYHPLNRINLVEFRKKLGITLKRKLPGILDLTIEGERSESEAAVIIEIENRDDKTLEDEHISVEKEKLRKHKFTSDKINDEICKHILNYNERELLSVGQTTMTGGQLEKYVNEGDNGDKILRAFITCFTCDEKFNQGNITTVIPPHEVSEEGELSKVDAAQLVEEIKAVLKGTNVARVRKDTESTKDPKVKVFRNMRRTFIFFPFYKNEELFVFHVDTKRLPIIDALFCKMSSLSFEDRS

SEQ ID NO: 65813 - protein, 195 aa, Zea Mays
MAEPGLEGSQPVDLSKHPSGIVPTLQNIVSTVNLDCKLDLKAIALQARNAEYNPKRFAAVIMRIREPKTTALIFASGKMVCTGAKSEQQSKLAARKYARIIQKLGFPAKFKNIVGSCDVKFPIRLEGLAYSHGAFSSYEPELFPGLIYRMKQPKIVLLIFVSGKIVLTGAKVREETYTAFENIYPVLSEFRKIQQ

SEQ ID NO: 65814 - protein, 72 aa, Zea Mays
MIKDYLNWPHALDMGQDKLEPGYSIHEKTIAHWEWRDGESGTYPPGKGPPKKGGVLSGGADLFMQWRIRGNG

SEQ ID NO: 65815 - protein, 467 aa, Zea Mays
MPVSSPPVLAAEQLENISSDSIQSNHERESFSMRKKAIQAEHRKECLSFVEEVFGNDPSISGDFIVINFFALEGWHLAELFQVKCVIAAPYFVPYSAPTSFKRQFKQTFPLLYKYFQEAPANTVCWTDIIHWMWALFMESWGSWRNDCLNLSPIPFTDPVTNLPLWHVREESPLLLYGFSKEIVECPGYWPFNAHACGFWFLPMDWQFSCDKCMELSGNINSSFGGMLCANHSSLEHFLTRNAYSSRPIFVGLSSIGRMGFLRNPKAFLMVLKAAIESTDYMFILFSSGYKPLDSAIQSIASSVNESRGVDSPSLGGDSALLFNGRLFCFLGSIPYSWLFPRCAAAIHHAGSGSTAAALLAGIPQVTCPFMMDQFYWSERLQWLGVAPEPLQRQNLVPDNDDALSIHNAADVLVGAIRSALSPETKAQAARIADRLSSEDGIGEALRILKARVLTQNKIISSFIASK

SEQ ID NO: 65816 - protein, 220 aa, Zea Mays
MAKQQNPIPIPMPLSLSLPLVLVALLLPAARGAAETPQYTTVHAESDFEVRLYGDTVWMSAPTPDIPSFHVATKLGFHRLFQYLMGANLNSSRIRMTTPVLTSVVPGAGPLRSSAYSVRLYLPAKFQASPPVPLPELNLHPDRWPGHCVAARSFSGRARDKNVVEEAEKLAMSLSRSPWANSTDYSSKSAYSVAQYSSPFRIIGRVNEVVWHSQRLQAVF

SEQ ID NO: 65817 - protein, 202 aa, Zea Mays
MALLQHQPATHTPARRFCRAPTNRAGRKPPQHMQRLASSRRLLQAALAPARANSSLSAAAVAAPAPANGAFPKMPAFDYTPPPYDGPRAEEIFRKRAQFLSPSLFHFYDRPLNIVEGKMQYLFDEDGRRYLDAFGGIATVCCGHCHPDVVEAIVNQAKRIQHSTVLYLNHAIADFAEALASKMPGDLKVVFFTNSDGSTPCA

SEQ ID NO: 65818 - protein, 598 aa, Zea Mays
MGRPKGGAASSSKKPKAKQKQRGGVDFKKYKHKVGRKLPPPKNATNTEIKSKAIVLPEQSMASERTGMAVNKRGLTLRELLQQTGHYNANVRRAALNGIKDIVVKHPTELKLHKVAIIEKLQERICDTDKVVRESLYNILQSLIFPSLKEDNTISVRSTLFLLMANILNGTTHLSVEIQLMAFRFLELVVLNFPSSFSSYAEQTFNNFVAVLSNDRINLHDRNKLNSVLSGLGHCLSLVAKTIENDDTSNRQAHNLSARENWKFTTDEDSTGGAFSMSNLLTKLQNLVQILTNSVEVSASELCAKSALDVQSSEALLSALQCLDLICRIFVHEVKKPQLKFSIPKNQHGPDWLRSSLLVHLNNLWGVKRLFHGKGDDKFFIFNLRIAEIFLRLNVWIDNTVFSAEEFCLFVSSLFAKAKTLRNKDLIEIYLSPLITCIPGLISNAPDDSKGYLLEVFTDSFKDCKVDCKLMLPYLDAVGGMLFPEKTSIWLAENDSGVLGYHDIWIHELPGILLQSIDKAPLVTKVALELLLRIGQYFPAVDCGRLRPFMKLFGHYQELWILVLLLNFLVIAKNLPFHAFIIFPVCSLTSLSHWPHVA

SEQ ID NO: 65819 - protein, 80 aa, Zea Mays
MYALSATNSQAGNGFMLIQLLVMIFTPFTQMVLLLHPTLSQCNKCAWGFGLSFCSNSFSCHFTVSCVNFSRLERSWIFSL

SEQ ID NO: 65820 - protein, 794 aa, Zea Mays
MFELVLAIQVSSQPHCLFFLMKSDDASAKMKVLADDPDEKDYKFDFDLRQIDDLLPDEDEFFAGITDETEPIGQTNTTEELEEFDVFGNGGGMELDIDPVETITVSFANSSIVDGARGNGINPFGVPNTVGTVAGEHPFGEHPSRTLFVRNINSNVEDSELRSLFEQYGDIRTLYTATKHRGFVMISYFDIRAARNAMRALQNKPLRRRKLDIHFSIPKENPSDKDLNQGTLVIFNLDPSVSNEEVRQIFGAYGEVKEIRETPNKKHHKFIEFYDVRAAEAALRSLNKSEIAGKRIKLEPSRPGGTRRNLMQQLGHDLDQEEPRSYRHPHVGSPIANSPPGAWAHYSSPTDNNMLQAFTRSPTGNGMSPIGMPSLISNAPKIAPIGKDSNRSKYDQVFSNGNQSLGAAFQHSHSYQDHNSEQMSSSPGTLSGPQFLWGSPKPYSEHSKSPIWRPPANGPALSSSSRTQGQGFLYSSRQASLFGSLDQHHHHVGSAPSGAPFENHFGFLSESPETSYMKQLKFGNMGNVGIGRNGGGLMLGMASHASVNPGSSLIGSLTDNVSSSFRPILSPRLGQAFYTNPPYHGPGTFGLDSSIDHARNRRVDSSVLQADSKRQYLLDLEKIRRGDDTRTTLMIKNIPNKYTSKMLLAAIDELHKGIYDFFYLPIDFKNKCNVGYAFINMVSPVHIISFYQAFNGKKWEKFNSEKVASLAYARIQGRSALISHFQNSSLMNEDKRCRPILFNPNGQDSVNQEAFPINGICIHMPLEDDCLDNEENKSLNEKTGENSTDIAGSL

SEQ ID NO: 65821 - protein, 89 aa, Zea Mays
MLQSAGVLTIVVCQGLFPFGSFKTRPSYKCVERSKVSAWGEQNQFSPSLPVLFLSLALYLVFCAQPHGNWVSLLALLMLQHLSSSRFFL

SEQ ID NO: 65822 - protein, 632 aa, Zea Mays
MAKTRKPPAPPSPPPPPAETPSPQRRRKKKGRPSLLDLQRRSLRLQAQNPSPAASPTRRDPNPSDDDEDGTGSGRRRQKRLKSVLSGVVKEEQGEGKKDAAKATGKEDAASDGGPTGTPLPDKKLLLFILDRLQKKDTYGVFSEPVDAEELPDYFDIIDHPMDFSTIREKLLNDSYSKLEQFEDDVFLLTSNAMSYNSADTIYFRQARSIEALAKKDFENLRQPSDEEEPKPPARRGRPPKNPKTEGDVSPDLSNVKANKPEDNVDTFRKRSTGDRTRNTNTPMKDLSSFHDTFGSFSAKRTDKIGDYSGSSKWGKKPVSLDDDRRSTYDQHYSRNSSLFAALDDERKLLVPVGVQQPHAYARSLARFASKLGPVGWDVAANRIRRALPPGTSFGPGWVVDGEPPQNSQWAPAASTNPSSEPTAPPNMPSKNDVLDHKSGPSSNGDVTGEEHLTRTQTVASTSTSFDKSSDISSKVTKLENGVTESCGGTDNTGSAAPPMQQHSHSREIHSNINGFTAMSNAMSQYAGQGLFGSGIHMTHAQVLGMFSGMNGKVNGYIHRHPVTADSLKTAGQNGDVGKATVNPVQSAGQDPKTATENSSAHPGLNSRAQSSGSSPRGKLTNPKHPDLALQL

SEQ ID NO: 65823 - protein, 149 aa, Zea Mays
MALIVAAAGGNLLVRKLVNLTPSQGSVKAPNPHGDSIRDSANMYAILLANELLSIELQWQDQRDTLELILGVWVEMSLYAADHCSQESHARQLSNGCEFITIVSLLAHHFKYYSGAFRGADNLGEDKPASENKPVTVNNPMSENCGNLV

SEQ ID NO: 65824 - protein, 431 aa, Zea Mays
MMMNTNAMSPTASTDADFSFGPLQPYVGFDVAGMGMPSVVVERSSSLLQHNTSSSSHNNNLGLYDSFDFAAAAGLPFQESGLLPPASLPLAPSPQSMAAMAMPPSSLLLTLPGVPAAADVVYNPFGGGGAGGFLKREDGGPLVDAAGGGGRIGLNLGRRTYFSPADVLAVDRLLTRSRLAGGGVGVGLGMGLGMGVLGLGAAHHQQPPPRCQAEGCKADLSAAKHYHRRHKVCEYHAKASAVAAAGKQQRFCQQCSRFHVLAEFDEAKRSCRKRLTEHNRRRRKPSSAQDEDSSPPPPKKLDTCITNTASYNDDLKSKKLYTIRQKDAIATTCTTSSHLTLTTYIHMHSCMHARRQSFDVVRVLVWDQYILMHASDPTLHIYTDRCKLTPCYVHDQIDICCINVLRSLYILSLTVYSCTCTCRAWLLVATS

SEQ ID NO: 65825 - protein, 215 aa, Zea Mays
MTVMMPQRHRATAKKPMWIIVLLSMVCIMLIGAYVFPPRRFSKCYLSASSVCTSFKDWLPSMGHRERADEEIISSVVIRDILSMPMPMSKNPKIALMFLTPGSLPFEKLWETFLQGHEGRYSIYVHASREKPVHTSSLFAGRDIHSDAIVWGLISMVDAEKRLLANALEDVDNQVFVLLSDSCVPLHSFDYVYNYLMGTNVSFIDWSTWQWKVPY

SEQ ID NO: 65826 - protein, 149 aa, Zea Mays
MPPLTAGQERCRLSRPGERLGPWGKKREFGNYVSLRGIKGLAFTCLGSMSKWEPVTFQESLSFVKKVKARDYMLYISLLDVLNRNDQIPLQAYSELSLLFQHHEDLLAELSKFRPLPCPNNVYTHGSIWMIIFLMPFLLLSLVLALRSH

SEQ ID NO: 65827 - protein, 206 aa, Zea Mays
MPPRSPTPSTRFARPASLRCVYSLLHSCATCSFSNVFQNTTACLCPHTSLVLHLIGIQTRISVNMSVNFCFAFFCIVQHTLFLAFGSCWSHVGHSGAKVPDCGGTGLCSRCKGECFVFKQLSKETATRSHKAAKNMATGYTSGLSTNGPTATSTPPPACLHKMAGVLPTINTHVKRSWDVHVCGSTTRASVGTLILVWFLHSNSSV

SEQ ID NO: 65828 - protein, 276 aa, Zea Mays
MAGAKADVDAETGDGSGVGSGGGGLFSEQMLIDKLNRLNNSATSIETLSQWCIFHRKRAKRVVDTWEKQFTSSREEKKIPFLYLSNDILQNSKRKGADYVDEFWRVLPRSLKHVYENGGEEGRKQVARLILIWDQRKVFGTRIGSMKNSILGDNPPILDNNVNSLNPSSNPTSNSKAARKDSGTVVKKLTVGGMPEKIVSAYQSVFDQHFDEDTALNKCKSTVGLLERINKDINDASINGNQPASSLISDLQEQEMTLKQCIEQLESAGVEVNNSP

SEQ ID NO: 65829 - protein, 98 aa, Zea Mays
MELASAMTALCPLPCCSYCSPSPCQARPPSVPSPSSPQPLSLAALALFSPSPSRARPCPKFSRQPLCFSMVGTLPIFCRLEERILVSVRRSKSQHNAC

SEQ ID NO: 65830 - protein, 182 aa, Zea Mays
MATVETSGTAIGSSGRWALHGKTALVTGGTRGIGRAVVEELAALGAAVHTCSRKAEELGERIKEWEARGFSVTGSVCDLSERDQRERLLREVADRFGGKLNILVNNVGTNIRKPTTEFTAEEYSFLMATNLESAYHLCQIAHPLLKLSGSGSIIFISSVAGAIGIFSGTIYAMTKANQEFSL

SEQ ID NO: 65831 - protein, 252 aa, Zea Mays
MESLFGQSQRRRRAGGSGFESLKRLGHISPAVQSHLKHVYLTLCSALAFSALGAYLHILLNVGGALTTVGCVASIAFLISLPASRDQERNRLALLMSAALLQGASVGPLVDLVIDLDSRILVTAFVGTAVAFACFSGAAIIAKRREYLYLGGLLSSGLSILLWLQFATSIFGHTSATFMFELQLYFGLLVFLGYMVFDTQEIIERAHRGDMDYIKHALTLFTDFVAVLVRILVIMMKNAQEKSQDEKKRKKR

SEQ ID NO: 65832 - protein, 1183 aa, Zea Mays
MLRSRFESLPEAFNERLIPSDANKSKGLRAAFSSRPKASGDESEREKRAARFAQMWNAIITSFREEDLIDNREKDLLLVPDCKDRELDIFQWPPFLLASKIPIALDMAADSGGKDRDLTKRIKSDPYFSFAIRECYASFKNIINTLVFGQREKDVLVQIFTVVDKHIEEETLITGLNMKNLPALSKKFVELLELLQKNKEEDLGQVVILFQDMLEVVTRDIMEEQDLLETLDSLHGANSRKHEGITPLDQQDQLFAKAIKFPVVESNAWTEKIKRLHLLLTVKESAMDVPINLDARRRISFFANSLFMDMPNAPKVRNMLPFSILTPYYKEDVLFSLQNLEERNEDGVSILFYLQKIYPDEWKNFLERVGCKNEEVLREDEQLEEKLCLWVSYRGQTLTRTVRGMMYYRKALELQAFLDMANNDDLMKGYRAMEVMSEDSPLKTQCKAIADMKFTYVVSCQLYGIQKRSNEPCAHDILRLMTEYPSLRVAYIDEVEAPSKDRIKKIEKVYYSVLVKASVTKPNEPGQSLDQVIYKIKLPGNAILGEGKPENQNHAIIFTRGECLQTIDMNQEHYMEEALKMRNLLQEFEKKHGVRHPSILGVREHIFTGSVSSLAWFMSNQETSFVTIGQRVLANPLRVRFHYGHPDVFDRLFHVTRGGVSKASKIINLSEDIFAGFNSTLREGNVTHHEYMQVGKGRDVGLNQISLFEAKIANGNGEQTLSRDIYRLGHRFDFFRMLSCYYTTIGFYFSTMITVWTVYVFLYGRLYLVLSGLDEALATGKRFVHNTPLQVALASESFVQLGFLMALPMMMEIGLERGFRTALSDFILMQLQLASVFFTFSLGTKTHYYGRTLLHGGAEYRATGRGFVVFHAKFAENYRLYSRSHFVKGLELMILLVVYEIFGQSYRGAITYIFITVSMWFMVGTWLFAPFLFNPSGFEWQKIVDDWTDWHKWISNRGGIGVAPEKSWESWWEKEQEPLRYSGKRGTIVEILLALRFFIYQYGLVYHLNITKKITKDNQSVLVYCFSWVVIFVVLLVMKTVSVGRRRFSAEFQLVFRLIKGLIFITFTAIVVILIAIPGMTVLDIFVCILAFMPTGWGLLLIAQAIRPVIQKIGLWGSIKALARGYEILMGLLLFTPIAFLAWFPFVSEFQTRMLFNQAFSRGLQISRILGGHKKDRGTRSKE

SEQ ID NO: 65833 - protein, 443 aa, Zea Mays
MKQCPGGSRRCRGQMPGLRRGQVVWGVDKTDGFEARCGGGWQPGKGQFAMTHQAALASVTAQAQMHLQSPTPSACSEVPSSPFYMTPRSLVPLQHSPSVTEGNICTPIADKSFSSDSKSHHVVNMVADGFNWRKYGQKQVKSSDNSRSYYRCTNSGCLAKKKVEHFPDGRVVEIIYRGAHNHEPPQKTRFAKERVTPISVPSGGETLRLVNTEIVESSTPTCELERSAISETSEQHLFCSSDCEGDAGNKSEDEHPSAEALPKRRTLEATAPNLTPVRRTVREQKIIVQAGKMSDGYRWRKYGQKIVKGNPNPRSYYRCTHGGCPVRKHVEKAPDDVNNIVVTYEGKHNHDEPFRSSSIPVSVISPSATATEQPNTSSTSDERPPTITQKDANSESDKETTLKFGGEKALESAQTLLSIKTNSDDMKNSVLKETSAAVPVQNN

SEQ ID NO: 65834 - protein, 496 aa, Zea Mays
MVRGSRPLGQTISKKFSDMRYSNISWPFLLLLCFVSMADAEYMKYKDPKQPINSRIRDLIGRMTLAEKIGQMTQIERQVASANVMKQYFIGSILSGGGSVPSPQASPAIWVNMVNEFQKGALSTRLGIPLIYGIDAVHGNNNVYNATLFPHNIGLGATRDPGLIKRIGEATALEVRATGIQYTFAPCIAVCRDPRWGRCYESYSEDHKVVQQMTDIILGLQGEIPVNHTKGVPYVAGKDKVAACAKHYVGDGGTHNGINENNTIIDEHGLLSIHMPPYYDSIIKGVATVMVSYSSLNGVKMHANHDLVTGYLKSKLHFRGFVISDWLGVDRITSPPGANYTYSVQAGINAGIDMVMVPYNYTDYINDLTSLVHKGVINISRIDDAVKRILRVKFTMGLFENPLADLSFAEQLGKKEHRELAREAVRKSLVLLKNGNSPDQQFLPLPKRARSILVAGSHASNLGYQCGGWSIQWMGDSGNITTVIQYPVQGQQFLMR

SEQ ID NO: 65835 - protein, 551 aa, Zea Mays
MNSTRRASKAAKSTINYHRFSLDEHHLFEPDALITKERDANHQSRQSSQSCRTYAYRRLTTPQFVSALSGIWNLVGQPESSGTAQRSSIHGISSREDPVCFSRDQQGNILTPCCVENSSGLRSQYCFSTPKEIYEDLIYVKKKMLTLTPFNNIVGASSTWMHMHSTNKVEGAHYLQFGTIYSVQAEKMEKIETSQNSKRSMCEETCASSNNMDIRDNSYSNQTRHMPNELFTISNEEASSTHDCESSRHNTECNLEKNQEDSNFLACPVHEMEIAKEVRIMPGSQVFSKACTDAQLDKSKHMSCLVGDAVVLNSANADESACREDVCLQLSLDKCSQELQPTFQHRFDGAVTINRHAVAGALAGTAVSVSLHPIDTVKTIIQANSYGQSSVYHTLRRTLIERGVLGLYGGLASKLACSAPISAIYTLTYETVKGALLPVFPKEYHSIAHCAAGGCSSIATSFVFTPSECIKQQMQVGSHYQNCWNALVGCLKKGGIASLYTGWGAVLCRNIPHSIVKFYAYESLKQSLLKSAPDRAKLNSGQTVSFLDLPY

SEQ ID NO: 65836 - protein, 74 aa, Zea Mays
MVQVSLFGFNHACDRSIRELTTFFACRLEPSQSSFQSLQLLGNRIRSPEKRQGGNLLIDLFRHCDNHLGEKQVN

SEQ ID NO: 65837 - protein, 262 aa, Zea Mays
MGAGIRVLAALLAALAAATAGVTAQLRQDYYAAVCPDLESIVRAAVSKKVQAQPVAVGATIRLFFHDCFVEGCDASVILVSTGNNTAEKDHPSNLSLAGDGFDTVIQAKAAVDAVPACANQVSCADILALATRDVIELAGGPSYAVELGRLDGLVSMSTNVDGKLPPPSFNLDQLTSIFALNNLSQADMIALSGEQITTAPVRSSFFPLQQLLYQRQRSTQARFRSMSFKSSKGPAQRTKANAPSAAINCKRFIISGLSKHP

SEQ ID NO: 65838 - protein, 505 aa, Zea Mays
MLPAVAAASPGLSHLPRYHHLGRRFHLRRHRLLPAIPARLSCGATHARRLLLAGAFAKGEGSSGQDVDHSAGATNSGSAYLGLFVRLLGLDNDTRDREHAVCTLYQYSLGGRKSIDEIMQFPGCIVLIISLLKSESILACEAATGLLRNITSVHIYRKMAGESGAMEEIINLLCKSTITPKILEQCLCTIWNFSIDEKWRYKVLKSDVLMKIVGYLDEEDIQVKEAAGGIISNLALSSSSHGALVEVGVIPKLVHLLQTKEDDYKIIRKEAKSSLIQLATDDCYYSLIIEEGLVRVPLVGSAAYKAFKPLPHSWPSFPDGSKIQRSSHPSKYGATELLLGLSVNENDTKPDEAKINAMIGRSNQQFLARVGAIELDDQGQEESGSEKNDMYTILPWVDGVARLVLILGLEDVSAIKKAARAMGDASINEHMRTSFKEAGAVKPLLQLLKHKDVHVREAGAYALEKLCVSATVCHNIKTEGGLELLVNIVKDRHTPVELLEKFLCR

SEQ ID NO: 65839 - protein, 593 aa, Zea Mays
MATTTPPTAILGTLVDFTSRENWDKFFALRGTGDSFEWYAEWPNLRAPLLDLLGDRGAAAGAAQEILVPACGSSVLSEKLYDAGFCRVTNVDFSRVVVADMLRRHARARPEMRWRVMDMTDMQFADGSFDVILDKGGLDALMEPEAGTKLGIKYLNEVKRVMKSGGKFVCLTLAESHVLALLLSEFRFGWDMSIQAIASESSEKSAFQTFMVVMVKGKMGVAQTIKSSLDQSAEYCNMRQANAVIRALGNENIIRESYSSSVDVLLSLRDLQLGAIGDLKVIVPGRRRQFILGEQETSLYCYKAILLDAKKQTETFVYHCGVFIVPKARALEWLFCSSEGQWHVVESARAARLIMVFLDSRHANIDMDIIKKDLSPLVKDLEPGNPEEEAPIPFMMAGDGVKQRHTLQEVTSEITGPMVVEDVVYENADGDQGSMSEKMFRRLIFGRSSGLVQSEALLIRDPPSDEVDKKNKSAAATSKKRRNHKRGSKNSLRIDHKFLGSSYHSSIISGLSLVASSLSAAASSGEKVSITVVGLGAGCFPMFLRGCLPFVDIEVVELDPLVAELAKKYFGFSMDEQLKAKHRISVYADDVVL

SEQ ID NO: 65840 - protein, 292 aa, Zea Mays
MQVEFAGLAELLARVATEDRTVIMTSVNEIWTRPNSLLDIFLGGLRGGEDTAHLVDHVLIVTVDAGSFSGCKAVHPHCYLLEVKSMDMNRAKTFGTPEYVEMIWLKLSIQQRVLELGYNFLFTDADILWLRNPFQRISVYADMSCSVDNSKMAPALLDCENNVGFYYMKSTNRSVEMVRYWRAARARFDGNLIEQVVFNKIKYELISRLGARIQPLETEYISGFCDFQDHFDKVCTVHANCCMGLENKVHDLKSVAADWRNYTSLTPEQRKLQEGSFKVTPPRMCQKSMGWV

SEQ ID NO: 65841 - protein, 334 aa, Zea Mays
MGCRIGVVFSGRQSPGGHNVIWGLYDVVKAHNSNSKIIGFLGGTDGLFAQKTIEITDEALPSYKNQGGYDMLGRTRDQIRTTEQVKATIGTCQALKLDALVIIGGVTSNTDAAQLAETFAQLKCPTKVVGVPVTLNGDLKNQFVETTVGFDTICKVNSQLISNACIDALSAEKYYYFIRMMGRKASHVALECALQSHPNMVILGEEVSVSKLTIFDITKQICDAVQARAEKDKYHGVVLIPEGLVESIPELYALLQEIHGLHNKGVSVENISSHLSPWASALFEFLPPFIRKQLLLHPGSDDSAQLSQIEIEKLLAQLVETEMDKRLVVETKFF

SEQ ID NO: 65842 - protein, 66 aa, Zea Mays
MYDASGIRLHAGKQAAVLNQIVCELPSEHPLSETRPLRELLGHTPTQVVAGALLGCTIATAGQLFV

SEQ ID NO: 65843 - protein, 457 aa, Zea Mays
MEAAASSLSTLLSTLRVDGPWTPPGTWESAIPESGAARVTDLGGRLQPIYELASVTDDALIHLALHALYGVKSSLDEIEELSVLFSSNPADRTSNRVTNVWLRSSSTISVGSILKSLRSTGLVVFFLCKFVHFYLVQSREMNCASREVHEHEHPGDKDTEQHRPYSLVNQAFAAAVSKVLEGYFCSLNTLPASIRLRRSVGQSGIPSKTSDGMSCNSTAEVTLLEVYLHTEELRRHVKSLGNICFPKFAGATLCHDGLDTEASVEFENFPRGTDLLSYLYVYIRDADPVHYGLLKYLFIRSCEPYFNFIKSWIYRASVDDPYEEFLITQTENKGVQGVSSDITDEFTLFPLKGRNHVSAPCFLKEICHPVLRTGQQLRVLMNLLKSCKLSATGGDGYPSCNIINMEGVLPWFNTPIESSMNSFTFSKSSVEAVTCKRDAMYKLMMEKLQRFFSNVEV

SEQ ID NO: 65844 - protein, 348 aa, Zea Mays
MQNTCFQRQWPQDLTGGRLRPRHDHQGSRVLPPHQEDRLRCRLHTSYPRRAAASYRPRQGPKACHRPVMLSTLGDGRVVRGLAGLPREGPAVLVGYHMLLGLELGPMVTGILSGTGVHVRGLAHPFMFDGGTERLMPDSAHFDLHRVMGAVPVTGANFYRLLADKEFVLLYPGGAREALHRKGEEYKLFWPEQPEFVRMASRFGATIVPFGVVGEDDICHLLLDYNDLQKVPFYGMLDEALNRDGLRLRTDSMGEVKDQRMHPLLLAPKVPGRFYFVFGKPIETRGREKELRDKEAAQRLYLQVKSEVEGCINYLKEKREEDPYRSILPRLLYQALHGPNAEIPTFEP

SEQ ID NO: 65845 - protein, 344 aa, Zea Mays
MWRATRRSPPFLRWLSSDAASSKAPRQRVAALWGNGDYGRLGLGSLESRWSPTVCPFFLARAADPPASLACGGAHTLFLTQNGRVFATGLNDFGQLGIGTSVTHMLEPVEISGFHERVVEVSAGNHHSCAVTADGKLFVWGRNSGGQLGLGKGKVVSTPTKVDCLTDLRVKTVALGSEHSIAVTEEGEVLSWGAAGSGRLGHGRQSSILGFSLTSTEYTPRLIKNFDGIKIKKIAAGMLHSACIDEKGTLFIFGQKTEKGFGRPNEEFRPNIVEEIPFSEEVACGGYHTCVVTDSGDLYSWGSNENGCLGLGYFICDFFNNFPTSSCILLISVCNCASNVEVVF

SEQ ID NO: 65846 - protein, 712 aa, Zea Mays
MEAQATATATVKEALAALYHHPDDAIRTAADRWLQEFQHTLDAWQVADSLLHDESSNLETLIFCSQTLRSKVQRDFEELPSEAFRSLQDSLYVLLKKFNKGPQKVRTQICIAIAALAVHVPVEDWGAGGIVNWLSDEMKAHPEFIPGFLELLIVLPQETSSYKIAARPERRRQFEIDLCSSANVAIDLLTACMAIDQLKEQVLEGFSSWLRFCHGISASELASHPLVHLALSSLNSDQFLEPAVNVTSELIHATVSHGSGAIAERMPLIQILVPHIMGLKEQLKDPSKDEEDVKAIARLYADMGESYVDLIATGSDDSIQIVNALLEVTSLLEFDISSMTFNFWHRLKRNLIKRDSYVSYGSEVAIEAEKNRRLQVFRPKFETLVSLVSFRVEYPEDYHTFSEEDRRDFRHVRYAVSDVLLDATEVLGGDSTLKLLSTKLAQAYGSCNNEQNPKWQPVEAALFCIQAIARSVSIEEREILPQVMSLLPCLPHHEQLLQTVCSTIGAFSKWIDAAPAELSILPPLVDILNKGMSTSEDTAAAASMAFKYICEDCRRKFSGSLDGLFQIYHIAISGVGGYKVSSEDSLHLVEALSAVITTLPPESASRALELICQPVINPLQELIQQGDQVLQQVPARHLTVHIDRLSSIFSNVKQPEVVAEAVYRYWPTLKSIFDQRAWDTRTMESICRSCKFADLATRTPFACCDSSGPLYM

SEQ ID NO: 65847 - protein, 891 aa, Zea Mays
MRLRRAMQTSPPTVSASSLECVSSCRAASWKGGGRPYECSVLLCAWNAPRALTGALASTAQCSSCGHAEAGGGWRRRGRSRRSNNSLPRITLDEDINRGKFGYDPSRAYSTSFVRSWSTIVDRTWRSYCYSSSDSFISPETLWEDLKPAVSYLQPEELKFVHDALKLAYEAHSGQKRRSGEPFIIHPVEVARILGEHELDWESIAAGLLHDTVEDTNVVTFERIENEFGPTVRRIVEGETKVSKLGKLQCKSEGSTKQDIKAEDLRQMFLAMTEEVRVIIVKLADRLHNMRTLTHMPQHKQYAIAVETLQVFAPLAKLLGMYRIKSELEYLSFMYVNPTGFAELRKRVEDLYKSHEQELEEANRILRQKIAEDEFLDLVSVETEVRSVYKELYSIYKTTLKSKSSINEVNQVAQLRIIIKPKSCNGVGPLCTAQQICYHVLGLVHGIWTPIPQAVEDYIATPKPNGYQSLHTTVIPFLNESMFHLEVQIRTEDMDLIAERGIAAHYSGRRVASGPVGLGISSGRNAKGKVICLNNTDFALRIGWLNAIREWQEEFVGNMSSREFVDTITRDLLGSRVFVFTPKGEIKNLPKGATVVDYAYLIHTEIGNKMIAAKVNGNLVSPIHVLANAEVVEIITYDKLSSKYAFQRHQQWLQHAKTRSARHKIMRFLREQAALSAAEITADAVNSFVADLEDESDSELSLPSTKKEDSKFNWEKILSSDKLFFVNKSSDGFLPVNNVYPKVNGKQNKTVKDLGIKINGHSTIRGDSFSELMHPSNSTCKEVFPGLDDWKSGKISGWHNTEGNSVQWLCIACVDRKGMMAEVTSALTACGITVCSCVAEVSKRRGMGAMLFHFEGSYENVVSACLSVDMIFGVLGWSVGCSWCPLGALEC

SEQ ID NO: 65848 - protein, 77 aa, Zea Mays
MVTGRLVHHGPSQSSGTVAVSTCLAPPKSPPRPRHSARPPMAARLVPRRLARPCLLVPRSQLPSQGLNWEVAMKQWW

SEQ ID NO: 65849 - protein, 258 aa, Zea Mays
MDKYEAVRDIGSGNFGVARLMRNRETRELVAVKCIERGHRIDENVYREIINHRSLRHPNIIRFKEVILTPTHLMIVMEFAAGGELFDRICDRGRFSEDEARYFFQQLICGVSYCHYMQICHRDLKLENVLLDGSPAPRLKICDFGYSKSSVLHSRPKSAVGTPAYIAPEVLSRREYDGKLADVWSCGVTLYVMLVGAYPFEDPDDPKNIRNTIQQIMQVQYKIPDHVHISTECQQLIARIFVANPMRYFLRIFSRESQ

SEQ ID NO: 65850 - protein, 158 aa, Zea Mays
MTPQRSPMGTGGGGSSGGGGGGPPALHYLSGPYGDTTFTKVFVGGLAWETRSEGLRAHFEVYGDILEAVVITDRATGRSKGYGFVTFRDPESARMACMDPYPVIDGRRANCNLAILGRPGPAVPFGHQHMDQNTYISRMHTVHMLDNSTCRFTVAQGQ

SEQ ID NO: 65851 - protein, 385 aa, Zea Mays
MKQRCEEYLSFIGTLPQDVEVVNSVDSTVPEKPRLELFKHDCSSSGKCSEYSNTESSDDVGKQEISELSDGDEFHFYDTRQSFSEFASSPADPRKGCLNNGNEDHKSVESLTVDKAEKYMLSHSKRRLQLPEPIEKEKGVSLWSMIKDNVGKDLTRVCLPVYFNEPLSSLQKCFEELEYSYLLDRAYECGLRGNGLMRILYVAAFAVSGYASTDSRPCKPFNPLLGETYEADYPEKGIRFFSEKVSHHPMVMACHCEGKGWKFWGDSNLKSKFWGQSIQLDPNGVLTLEFDDGEIFQWSKVTTTINNLILGRVYCHHHGTMNISGNRRYSCKLTFKEQSFLDRNPRQVKKDKKITHKIYMGCANIWLYGRFKESSRMLVEARLQH

SEQ ID NO: 65852 - protein, 560 aa, Zea Mays
MHNHRKRSREADSATHPVNGAPRRLLQFAVRDAVRTVPPVTSGSESASKRLCSVVSTLASDSTLDITHIRLQKTNSDLRIPVATAALRAAAEAAEDALKDSFCGSVFSRLGRMPTINSSEQSPDRRSQDLEGKEYENIDNIQAENQVEFYGRNQHGGSDVYMRDRRTEEATGSLSNIDEYGHNSSVRYNGLGSLRSALPASGGKESLVLGYVRGASEVRSGRLIAQGPPAGSGPRSSEKILNVSGNTKTQKLRTHVTRDALAFDPQVPMEKVSGARKSIGQGPHAGSGPRPSERILNVSGNTNTQKLPTHVTRDDLAFDPQVPMEKVADARKSHVKIAHANDMSMTTDKSKDLIQSSSMLEAQKATSAAGSNTTGQPEGGSDSRTVFVSNVHFGATKDALSRHFNKFGAILKTHIVTDGVTGQSTGSAYIEFLHKESAEQALTLNGASFMLRILKVVRKNSTEATRSPGLLRVSRGSPFASRLIRTAYPRPTFPGAIRGRLPLRGVAQSLQWKRSATDSSNAVKPSQAAPSAPGNQLVTPTPRSFTYTRTEPKPNDGAMA

SEQ ID NO: 65853 - protein, 876 aa, Zea Mays
MSDLASTSKDKLAYFRIKELKDILNQLGLPKHGKKQDLVDRVLAELSDEQGQRHHGWGRKNALTREAVAKVVDDTYRKMQVCAPDLPSRSHSGSDFNHFRPKEEATDFYYVETKVRCLCNSTMLNDKIIKCEDGKCQLWQHFTCVLIPDTPTEGAGPDIPPHFYCELCRLNRADPFWVTTANPLLPVKFISSGVGNDGASAPQIVEKTFQLSRAERETVQRPEYDLQVWCILVNDKVQFRMQWPQYAELQVNGIPVRVMTRPGSQLLGINGRDDGPLVTTCSREGINKISLSRVDARTFCFGVRIVRRRTVPQVLSLIPKEGEGESFEDALARVRRCLGGGGATDNADSDSDLEVVTESVTVNLRCPNSGSRMRIAGRFKPCVHMGCFDLETFVELNQRSRKWQCPICLNNYSLENLMIDPYFNRITSLLHNCSEDVNELDVKPDGSWRVMGDAATRDLSQWHMPDGTLCDSKEDTNPGVASVNEFKREGASDEHRTLKLGIKKNPIGLWQVSSKADDMKPVVRNHIQNNTGFSTPNIVPMISSPTGSYRDGEDVSVNQEGGGIQFDISLNQEFDSFAHNFGQTYNTEDRPQHPHHNAADVIVLSDSDEENDPTVQPPAVYENTPTNDDSFPFVTDAAGSGYPERYQEDASVGTSGLGLLRQNTGEFEINNWQMLSYPQPEQGFQFFVTDTDVGNPFVAPHNSFTIAPEDYSLGCNVGIEDPSAAHDVSICRNSNDVHGSLVDNPLALTGDDPSLQIFLPSQPSTVPLQQELSERSDTPNGVHPNDWRISLTLAAGGGGNEESTSVGGLKSQPKVSSKEAGVEPLLDAASALGSMNNDRCTGSNLNPKRIENIFSHPRQPRSVRPRLCLSLDTDSE

SEQ ID NO: 65854 - protein, 1103 aa, Zea Mays
MVNDLLEGIHFVASIEAMYLGVRAGIHPTIIYDIISNAAGSSRIFVELVPKLLSEDPLLIDFLKSTRKKASHVMDMSKSVTFPLPLLGVAYQQLVHGSSAVTGDGSASPLKVWEASFGVNIVDAAGEQIYDASKLADQLVAESKAAKRIGFIGLGAMGFGMASHLLKSGFCVVAYDVYKPTMARFADLGGSTKGSPEEIAKDVEILIIMVANESQADSVLFGNAGAVPVLSAGTSVILSSTVSPGFVIHLNRRLEAECRQIKLVDAPVSGGVKRAADGTLTIMTSGTDEALHCTGSVLSALSEKLYVIKGGCGAASSVKMVNQLLAGVHIASAAEAMSFAARLNLRTRRVFEIMQHARGYSWMFGNRVPHMLDNDYTPYSAVDIFVKDLGIVSCESSNSRIPVHVSSIAHQLFISGSASGWGRYDDAAVVKVYETLTGVKVEGKAPMLSKEDVLQSLPSEWPEDPIDNLVPIASHSSKKFLVVLDDDPTGTQTVHDIEVLTEWPVEALVEQFLKLPTCFFILTNSRSMTADKAMLLVQTICKNLKAAAEKVPGVSYTIVLRGDSTLRGHFPEEADAAVSVLGEMDAWIICPFFLQGGRYTINDIHYVADSDRLIPAGETEFAKDAVFGYKSSNLRQWVEEKTKGRVLENQVSTISITLLRKQGPTAVCEHLCSLEKVSVEMVSMKSMEDRDQEIRRIVELGNAYIQSRKDTLILTSRQLITGKTPEESLEINYKVSSALVEIVRRIDSKPHYIIAKGGITSSDIATKALEAKRAKVMGQALAGVPLWQLGPESRFPGVPYIVFPGNVGDNSALAKVVKSWASPSRSSTKEILLNAEKGGYAVGAFNVYNLEGIEAVVAAAEAEKSPAILQIHPSALKQGGVPLVACCIAAAEQSSVPISVHYDHGISKSDLLQALEAGFDSVMVDGSHLTLGDNILYTKSISSLAHAKGLLVEAELGRLSGSEDGMTVEEYEARFTDVAQAEEFIDETSIDALAVCIGNVHGKYPPSGPNLKFDLLKDLRALTLKKGVSLVLHGASGLSHELVKECIDLGVRKFNVNTEVRNSYLASLRKPEKDLIQVMASAKEAMKAVVAEKLRLFGSCGKA

SEQ ID NO: 65855 - protein, 598 aa, Zea Mays
MQGFPGGAPDPQQLQATMLAIEQACSLIQLHMNPSEAEKVITSLHSSLMPYQVCRFILETSQKPNARFQAAGAIGDAAVREWGVLTDDNKRSLIIYCLNYVMEHASSPDGYVQSKVSAVAARLLKRGWVEFSDQEKAAIFFEVEQSIRGIHGPNRQFAAINFLETLVSEFSPSTASAMSLPKEFHEQCEYSLEVQFLKDFYCWAQAAVFNTADKILNSTVTIPDERACSAALRLMFQILSWNFKHTVEHESSDAKINFGLRIDTINLKKFERSLVKPGSMWREILISSGHPTWVLNFYTTLRQKYSYDTLWGDSPIAVSCRQLIVQLCSLAGSVFPNDNGDAQIKHLMLILSAVVLWIEPPDVITASIRNGGSESEFIDGCHALLSIASLTTGSLFDNLLKSIRPYGTVNLLSALTSEAVKSVLNNQSEEETWGIDSLDILLETWNVLLGDVDADKNPISTDGALASSSLFKMIVESHLKAAADSAFEDTDDTEYFHVSVSKRDEQLALYALIARASANTTIPFLAQLFSERFARLNQRNGESDPTQTLEELYWLLLVTSHVLTDSGEGETLLIPEALQAGFPNVIEAAHHPVVTLSW

SEQ ID NO: 65856 - protein, 1136 aa, Zea Mays
MYKLSGRGGGRGGSGAAKRPLPPHGRGRGGASSIGGMAGPPRGRAGAGAATQPAGRDEAFRLESSGPPAFAAIIRLTPDLVDEIRRAEEAGGGARIKFNPNMYNSSENVIDVSGKEFKFTWASERGELCDIYEERQSGEDGNGLLLECGSAWRKVNVQRILDESTKNLVKMRSEEAERLSKSRKSIVLDPANPSVKSQAKSMAAAAVEGNPRRMHWKQKNEFFKKNKAAVITPTKSVSKVKLSNNIPKGNISSSPAPSPEQPGASNPSFPVGSDANNEVTTPFDLNKGENSKHEKSTASKMSNKGINRRASSHAANVDNNTKEVRSYLISVLSKNPKGMGLKALEKVAADAFPNASKKIESIVKNIANYQGPERYVLKPGLEVESSKRHASEGVRSISENIEESAPSLKIDDPDICERIDIVGSPLAVTDGKLSNDSEGKAGTSSDSGSDSDSDSDSSDSGSDSESQSRSAAETGSGSSSDSDSDASSSSKEGSDAIVDITSDDDKANTAHTKVVDDLNLSSSPRDLTRLNVDDEQIDIGTNLDYRSASPHIDLNNFNTGNDDAAAEGFSSGNLNKPSEMPGSKNMTNTRMDSIGVDNKHNEMSFVDNLFDDSMRAASENSPKGEAGQLTVQHGNKRKSTSKDESKLVPVNIAKPKLKRSSGSENSTAKPESAKKAKPDVTSPIGSLSEHKRSLPPEKHTNDRLNKETGNVSRDASRDSSPAMKGRPSAPGNLQRIDQSPNLPIPTMHSEGTKGNAVKSSSKKKSDKMQKPWHGIDGDFGSCYSHGVDHHANFDGSDDSSTRKRSRHENPLIDDKMLKHSKDTNANINSMNLTKSSREIVVPDEVTAFPESNESNGEPSNSQRDNVEKSPYGKKKLQRELSDLELGELRETSLENDDGRIRKQFERNSSSKSLDAKLTGVNNFYPSINDRKTPVTVFHDKRKPSPQEYGNRGHVNQEGFQRKAAVYAFDDNRPQQRENFPESLHLPKIDNSDSENIMYPDRSGEKTSKRETRMAHSGMLEYADMQKKKATSRLPQNGTNNVIVSRMQKSISTSDNEERSRNNSLIETKTGRKRRDSSSDDDNLFFSKYDKDAPELKGPIKDFSQFEDYVQEYNEKYGVYSYLSSQIDKTKFFKGSG

SEQ ID NO: 65857 - protein, 645 aa, Zea Mays
MMQMLGLRGSASKDRGRGGDASPSSAVAGATGTPRSPWTPASASSPRSPFAAEAGGEGGGGRPLRLVYCDERGRFRMDPEAVAALQLVKGPVGVVSVCGRARQGKSFILNQLLGRSSGFQVASTHRPCTKGLWMWSAPIKRTAFDGTEYSLLLLDSEGIDAYDQTGTYSIQIFSLAVLLSSMFIYNQMGGIDEAALDRLSLVTEMTKHIRVRANGGRSTASELAQFSPIFIWLLRDFYLDLVENGRKITPRDYLEIALRPLEGRGKDISSKNEIRESIRALFPDRECFTLVRPLNNENELQRLDQIPLEKLRPEFQAGLDELTRFIFERTRPKQVAGTIMTGPVLAGITQSFLDAINNGAVPTISSSWQDYKKNAFLEADKQCSNAKHNMEKKIRAACTAPGVKVSAVIQVLETALAEYETSCTGPAKWRMLAAFLRQCLEGPILDLCLKLINEVESEKTSFTLRCRSNEDQLELLKKQLEANESHKSEYLKRYKAAINEKQKASVDLSSNLANLRTKCSTLEERCVSISKELDHVRHECTDWRVKYEQSVSQHKAEQDRFVAQLASLESRHSSAEGKLGAAREHAASAQDEAAEWKKKYEMAAVQAKTALERLASVQEQINKIAQERESSIRAEFASHLEGKRK

SEQ ID NO: 65858 - protein, 662 aa, Zea Mays
MLLKETMGFDPLISILKIRRGSAFNFTQQKTVNLLAALNTVELLLMVGPSGEAGKDANKNANQTALAQKNILDHLLLLGVESQWAPVALRCMALRCIGNLVLRNPQNLDSLARKQVGEEPHVQPALNAILSIILRTSIAQEFVAADYVFKCFCERNPNGQALLASTIAPHPNQGDIHEPASDMPFGSVLLQALVSSDVNGDMEACCRASSVLSHIIKDNLQSKDRVLQIQLETSTASLGRTEPVLHRIVTCLSIAASMEGENDQNNQLEEPYIQPFILRLLIIWLVDCSNAVNCLLESAVHLNFIIELASNKRYAACVRGLAAVVLGACILYNASREKGRDAFAVADAISQKIGLTTYFLRFDELRKSLAHPLSEQHHRKELSRSSANSMSDFQEIEEDETNKGDQHPVLSEIFDSQFVNLLTKLEADIRENIMDIFSRTKTATAVLPTELEQKNGEVDEEYIKRLKSFVEKQCNEMQDLLARNAMLAEELLRTGGGTTTDTSQKPSSGRERVQIEALRQELEGAKRQIGALKSEKSQIEAEANNQRNLSVKLESDLKSLSEAYNSIEQANYRLDAEVKALRQGGSVPYPDVEAIKAQAKEEAEKDSEAELNDLLVCLGQEQTKVEKLSTRLAELGEDVDTLLQGIGDDTAIPDDDDEDDEE

SEQ ID NO: 65859 - protein, 214 aa, Zea Mays
MDLYNSIYSKKKCADNKWIDWKNIKRLPKMPYVEKASRDISLHELMAIKQNWYEEPIKQFYSTLSINQSRTSLTWMTGINKKITVTKRFCQKVLHVPSEHNIKIKRQLTDAQEKELMSADGNQVYSLNRIITKTINPLIGDKSKVHESSRVLLYHILFGKPFDIVDMLEEMENNHMHTSKRMSYAPYIMLLINSATKEKFVPGSGENKCVEHEK

SEQ ID NO: 65860 - protein, 177 aa, Zea Mays
MAAALWTLLVAVALSAALASNRPVAATATAAAEAANEVLRAHQLPGGLLPAGITAFRHDAATGAFEARLDAPCTARFEVGLRYNATVSGVISPGQIADISGVAAQDLFMWFPVHDIKVDIPSSGVIYFNVGVVKKHLPLAVFDAPPACTPDPLLQVISHPSLTLSMARALIHRSWDQ

SEQ ID NO: 65861 - protein, 1092 aa, Zea Mays
MSMAWRLLRTIHFRHLSPGVRRASKIVDQGFTNNAPELSTNKGSLLRCSSIRFGEKRNSIFACAPDNLEQKSGQTFEADAHSALKLCSGIGSVVIAKCSHIFERNGDTFDGNCSLQDILKPGLWLSPETLRRFWRVSELKPKDFLDILNGFGLSAVKVRNARFLWNLYRWTSRQSKEFQHLPRSNETMVSILADAHMLSQAESLLLSLIDHMTPAVSSELFSQIIQVYSEAGNLGKSVALYDYARGKHLIPSASCYQVLLHFLTRNRKDELILRVYLDMLEVGFGSCTEGNILDSVVMALIRKGYCRYRRFDDIEQVLRHMKTNGVNVLLSGNCVLSKALSFLGLDHLGVKIKRDNVTGFPKAEFFDSVGNGLYLDTDSKMFEVSLSQVLDSALLPDINSELIRASQQGDVASALLVKDKAFQWGYDISPDSCSELFKALCVSPAYVIDVIDLMEEMPDILYKLDAQNLDLVAQTLSRNGMSAHAKLVLEKMLREDLSISHNTYTYLMIGLCEERNIAGFWECWNLATKCRWSPDSKDMMGLISYLCKWGVIEEALKLMNSLFDCYHDLFFSAYCALLKELCRTGHTSIGCAMLEALKEKGVAVDRSLFFYVMEGFLKEQRTAESIGMHDMWLSKSKELDVFTYRSVLPSLPWLDTDRAKNLVESMLTVKLTEFSYRGCIVNELMQTRNIKWAIPVLQESAPGKLSATLLNSLLQAYGWLKNWRKLDAVLCKMLKMHATLSISSYRFLVCRMCEQSRFSSASSLRALFQHTDKSRELIACNILIFYLFQRRNSSQIHDLLKDIEGNGISLDKTTYDFLVYGFHKSGDINDSVNALDACIAQGIKPSNRSLRIVLSHYCRLGNHEKSLALFHLIERNGWKHGLIIKTTLASCLLSFGRQLEAKSCLNNLSKGEFIGCSSNFDDLIKEFCILGDLKMTLYLLNTMLKKGTLPNEASYSSVIYKLCTLKEFDQALDFLAEMQLASLKSSEISCDALVHGLCAMGRPSDARKVLEMLTTLGSAPSYGMFRVVFDNYCRSSNLQKAAALLHDMQQAGQVPNFEMHWSVISNLSSTNEKTEGHGECILPNLFLSANSP

SEQ ID NO: 65862 - protein, 678 aa, Zea Mays
MVRAGENRHFFPLTSLQIGDLQSYLAELTIFLCPHTKKFLILLDNRPWLLDQDTKPAHLWQLMVTKSRFSPFANSRARRRRDETDEKLVYSTSSVSAPHLQNKSSRWYSLIDDAMREKKLQVNKLKDARILNRELHQTLYGFIIFEVDWADVRGINYLNELQTDTSMVVESKIMKRWEFDSVKQASTLIASWFSGNPFECQLLQDYLTNISSNGDIFYDAQNDFLTPEWDSENLPSDSDDSSHVQIIRESSGFTDSSYTTPPCSGPYKRRKITKSDDGSSSTEESYTEIVASPKHSSSSCSSCDSDNENAKPLLEPSTYKDVLICFRFDDHDLPFGLKEVILSDVRLLTLLEYGLPSWVIFLQSYPVFCKIYRPWMCPLARALYVLMSLITVLIGFYDLYKNVPMLKATASRLFGPLFDWIETWEMISRLKYLGTMLFLHNFQQAFTWSLKIVGAAKSALSVLTKPIAGPILEVFELTMPIWNLCAETVGYLSSVVMLSVEVSWSVVIDTVEMIVWPFWFVFSTMVSIVNSILYPIIWLLGEILAAPFRLVIGLSSFVVDLFVDIINFLRGSWSTLSALYQVGSVPRSPVLTSDNNIWASLWKDLLYQIFRALRSILYGFVAFFSTCNRHRLSIYNHIQVFLRRISHVPAGARFTAYLDGTRKYSSQNHHKRRKAKTR

SEQ ID NO: 65863 - protein, 1040 aa, Zea Mays
MEEMAKELDDLRAEVEALTAQLRAKSDLADGLKRASADHAARLRDARAEAERNAAEAAARGEEAAAAGERCEVLESRLAEKEQALRHLCAAHEALKATLREKIEGLEGDKRGLLAALEDAEARRGEHEAALRARDVEVARLRGLLSEKDRRCGEAEKRASAPRDVVMRDDMLGKLEEEKAAVQCKLKWKDEQFRHLEEALKKVQDDFRAAKKEWGSDRSTLVDRIDTLEADLDSKIRVAEDFRSRLDMCSQALAHEEGRRKRVETEMSELRHMYGNVISEYQGAKSMVESLSSKTDGDIAYLRSSLAEKATMLKEIEYSKARIEQENEDLRSKLKEYQEAQIGGADAVVSLKSLREKFRALEQTHRSCTEKLRGKEEEWRLQMTKLVNDLDGCLSQLESKDILIVQLQNELLGSHRSLELQTVDNWEALIILTVVQTKFYESCSFVDTAKLNMQHHCEEIEKEISSAKKQLEEQSCIIAQSQAEQKQQSGVITKLHARIEELEHMEQEHKKMQRQLDAYKEMRDNMLRDAHCLKDETSKKESTLQVKLREALSALDEANCALADRKRELSQLEISLHHQKEAIEHLEKLKVDMEAEAKSYMCDNRILKRDLDTALTAKVEAEELLRQEKMQLTCALDEAKYTLSERNSELTQFEINFHQQKQALANLEKVKVDMGTELKTCMDENCVLKRDLGVALIAKMEAEECHTKEKEEFCGIIKEKGMMIDKLQQYVAVLEEENMVKKLDLGSLIKMECDKSIREVKNWYSEIVEISDKKLLELEERLRFAEQKFSCREQEIMNMFDQEESDWYTLIAEKEIAISDIQQTVESVQLDIKHLLEAAAAKVAEVQLEVNQLYGFAETLNSLNIIQEHDTVFKDMLIAECERELDSLQVNLVQEKHQSRNLKNLIEQLEAQTASEMSEKAEEHLEVTNKLKSLEGRNETLDEHLRELKSRTTDMSKAVLQERNQLVNELTGLTNTIGEVIYGGESMMSNLRRIMQKVNEEPCNDRLTSEKTNGRSSSPLIRHKSGHVLDRRSPLKENNY

SEQ ID NO: 65864 - protein, 738 aa, Zea Mays
MEPRVPCVDGGGDGLELRAARRHRREGGRIHVLDAQILEPQRQRSNPFRNIFHLLTQREVLPRTKHHAKRIWNNSPKYDPHLIELRFSDADAKLGILSWAESLSLHRWSAKYCPLLPPPRSTIAAAFSPDGKSLASTHGDHTVKIMDCHTGKCVKVLSGHRRTPWVVRYHPLHSDILASGSLDHEVRLWDANTSDCIGSQDFHRPIASIAFHGRGEILAVASGHKLYIWNYNKRDDASVPTIILRTRRSLRAVHFHPHGAPYLLTAEVNNIESADSPLTLARSSGYSNYPSALLVSNTNSRFCPLPESNVTSPCLLWPAYLRDDGILHVLGNASSSTIVQQRSSLVQPSTSDTANLQLEQFATPMDVCPGEPTSFNNISDAVTVPTSNAIEMHGAGGQSNPRLQGSSSISNLERFSARDALQVSSLSSIEPIPSTAGSSGSNSRRAMPLNMLLTGGLDVQMFQRNVGSGQQDHFLFGDSSNWEVPFVQGFLMTQNHTGASSSIPLTSGSSRRPNRHYASRSVPGVGSLLLVGPQIDEAEAHAASLGAGSEITASMLAPGTELPCTVKLRIWRHDINEPCVPLAPEACRLTISHAVLCSEMGAHFSPCGRFLVACVACLLPQTEGGRGSQLPVPYEEAGSSPTRHPLPSHRVIYELRVYSLEEETFGDILASRAIRAAHCLTSIQFSPTSEHILLAYGRRHSSLLRSIVVEGENGIPVYTILECWFCSCMILFDTWDSK

SEQ ID NO: 65865 - protein, 224 aa, Zea Mays
MRDGCNANAIPCPATSNHTTEPSSVASQEASPASTKDTAIPEQVERPSSEELLADVSLPQGKVEPKKTEPAPAASSSIQQHGCKQAGNGNTEPKSKENAAADDDPITRLQRAAGTAISAAAVKAKFLVEQEEGYIRQLAALVIEKQFQKMETKMSFLTEVGNLVLRSRDLTERMRKKLLLERSMIIASRMGAAAASRTIQHGAPVTTRLPVGHVHALNPQLRRP

SEQ ID NO: 65866 - protein, 337 aa, Zea Mays
MGPWAVDLALSVGIFPYVLKLLPTNTIELRQILVFIWTKILSLDKSCQVDLVKDGGHTYFIRFLDSLDAFPEQRAMAAFVIAVIVDGHRMGQEACMNAGLIDVCLRHLQPENLHAQTEPLLLQWLCLCLGKLWEDFPEAQLLGLQTNAPETVICLLSEPRPEVRAAAVFALGNLTTLSNCPDDDSDDDEKVKAEINVVRSLLQISSDGSPLVRSEVAIALTHFALGHNKNLKSVAAEYWKPQSKSLLKSLPSLANINNPSNVYSPNNILQGSIGPVLRVGSDSGAAGRDGHISTSSPIAASSIMHGSPQSDDSSQHSDSGILLRENASNGGLSYTRC

SEQ ID NO: 65867 - protein, 175 aa, Zea Mays
MSGQNLRSIQFFFFFLSFFFFFFWRSSAYLKPTAFQLPSVGYSTHSPAKGYCTDALASFFFPPCPPCPLKTKVPPLLRYGKYCGILYSGCPGEKPCDALDACCMVHDHCVDTHNNDYLNTRCNENLLSCLDGVSPAGPTFPGNECDVGQTASVIRGVIESAVLAGKILHKRDDGQ

SEQ ID NO: 65868 - protein, 589 aa, Zea Mays
MADKEKLESEEEYESDLDDAPLSALRRRDAASDDEDEDEDGGMPLRRRKAGSDADSDGQGAAEVYDEDGAYEESEEYEEYEYGGFKAGGGGVRGVAVEAVAGAGHEEGEAGDGEAEKAGEAAPGGEEEDKKGNEPYSVPTTGAFYMHDDRFQEGRGRGRGRQRRMVNSRRLWSPKDEQAWVHDRFDEMDLHDFHGDNPKRKQGGVFRGRGGGQGGRTRGISRGNFRGSRTRTYYHDGSKNYSYVPKESHAYRDNTKNAHHSSHINGKNRVPKPSRDHYDGAKSYDIVPNESHIYHGDAKSQKNAPRVVRGRGSKRYQPRLKSTSDVSSVQNTKSQSLEGTSSNANLVKDEAQGPNSRLEQVLPIKQTVASNLNSASPPFYPARSSSQEFAVGQGENTQELSTNLVRGKAFVPSGHVEAAINGMNRPALLPPASSSNGPFPVATNQVNRDYGHPAHPIVQQNPVQPPTRSAPRMPAQMFGATFSNGSKISPAQPTSTILDDDAEISSPSGSNKYDSRLTVKGQPDDQGEERASFLYGGARVLGATSAMGITLGDQNFHGTPALLPGLYHGSVKHEFNNMLCEAYQRNKLL

SEQ ID NO: 65869 - protein, 299 aa, Zea Mays
MKAAVSSAGESAGELLLRAAALVPWTRYFLAALALAAVLLYRYLTTPWLASPHLQTLFLSISGRPPSFTYRRQLYTVRDGGTIALDWLLASDLEDGDIGTSDGTISKDDSTPLLVVIPGLTSDSSAAYVKHLVFSMAIKGWNVVVSNHRGLGGISITSDCFYNAGWTADMREVVSFLHQEYPKAPLFTVGTSIGANIVVKYLGEEGENTPVAGAASICSPWDLLVTSKFISRKLVQRCYDRALAIGLKGYAKLHQSVLARLANWEAITSSHSIREFDRHATCVVAKYEGKQKHCIGNYT

SEQ ID NO: 65870 - protein, 709 aa, Zea Mays
MDTAFLSPPLARNLVYDEFAVLHPTSYPFHTLRYLRCNPMYSRPLLTIAPASPSRGLIQRVAALPDVDDFFWEKDPTPILDTIDAPIHLKNLSSKELKQLADEVRSEIAFIMSRKCQPCGADRSVVELTIAIHYVFNAPMDKILWDAGQHAYAHKILTGRRSLFHTITQKNGLSGFTSRFESEYDPFGAGHGCNSLSAGLGMAVARDINGRKNRIVTVISNWTTMAGQVYEAMGHAGFLDSNMVVILNDSCHTLLPKADGGAKMSVNAFSSALSKIQSSKGFRRFREAAKGLAKWFGKGMHEFAAKVDEYARGMIGPHGATLFEELGLYYIGPIDGRNIDDLICVLKEVASLDSTGPVLVHVITGTENDTGGIIGSEINAVEEGTGLSRTYNDCFVEALTAEAENDKRIVVVHGGMGIDRSLRLFQSRFPDRFFDLGIAEQHAVTFSAGLACGGLKPFCIIPSTFLQRAYDQIIEDVDMQKIPVRFAITNAGLVGSEGPTNSGPFDITFMSCLPNMIVMSPSNEDELIDMVATAAMIEDRPICFRYPRGAIVGTSGSVTYGNPFEIGKGEILVEGKEIAFLGYGEVVQRCLIARSLLSNFGIQATVANARFCKPLDIDLIRTLCQQHSFLITVEEGTVGGFGSHVSQFISLDGLLDGRTKWRPIVLPDRYIEHASLAEQLDLAGLTAHHIAATALTLLGRHRDALLLMK

SEQ ID NO: 65871 - protein, 258 aa, Zea Mays
MQPESVQSVDASLTKRGRGRPRKEKALESGRMKASQMTEGQREALTADQAGAVQNEVEDRDLQSLGTPLTEKRGRGRPRKRPLEIETAKAGAAKRGRPRKEKTSETGDLKVAQMTEGRHEALPAQAVDQTGPVQNEVEAMILQSLATTPLMEKRSRGRPRKRPLETETAETQVAASVEKRGRGRPRKKNPSAGWSAGTRDTALKGIKRGPGRPRKARPFETESVKTALEVSRDLTEDGPQKDGDLVSGKKADTHGVVW

SEQ ID NO: 65872 - protein, 244 aa, Zea Mays
MTKIMMQYKQNMLPERQSNHKVEADKMVEQTNQSEVSFVKAEHLNGSKIRQTGIEDYSYDKDVVEIKLPDTDLSSDYGVHFVKDVCIDEGVLPDQKISSEKQVDQKVSISFDSREEISADSTKTAHELKSKIVVLPVKCDTHDNIVEQNSSCKKRDLEDNNTTDVSTESNDEGLNPKQLPFHEVAQDYQEVDSVISESNENQDRLFTGDATHQGLEKYVMTKLFNRVFASVPEDVKSDEELFEN

SEQ ID NO: 65873 - protein, 805 aa, Zea Mays
MLDLVKKDVGNNEQNKGSKRKKSENDIDSYKSARLDESTSEGTVRNKGQLVDPRGSNTSSADIQLKLKEQSDTLWKLKDGLKTHVSAAELRDMLEANGQDTSGPERHLLDRCADGMLFGALGPCPVCANGMYYYNGQYQCSGNVSEWSKCTYSATEPVRVKKKWQIPHGTKNDYLMKWFKSQKVKKPERVLPPMSPEKSGSKATQRTSLLSSKGLDKLRFSVVGQSKEAANEWIEKLKLAGANFYARVVKDIDCLIACGELDNENAEVRKARRLKIPIVREGYIGECVKKNKMLPFDLYKLENALESSKGSTVTVKVKGRSAVHESSGLQDTAHILEDGKSIYNATLNMSDLALGVNSYYVLQIIEQDDGSECYVFRKWGRVGSEKIGGQKLEEMSKTEAIKEFKRLFLEKTGNSWEAWECKTNFRKQPGRFYPLDVDYGVKKAPKRKDISEMKSSLAPQLLELMKMLFNVETYRAAMMEFEINMSEMPLGKLSKENIEKGFEALTEIQNLLKDTADQALAVRESLIVAASNRFFTLIPSIHPHIIRDEDDLMIKAKMLEALQDIEIASKIVGFDSDSDESLDDKYMKLHCDITPLAHDSEDYKLIEQYLLNTHAPTHKDWSLELEEVFSLDRDGELNKYSRYKNNLHNKMLLWHGSRLTNFVGILSQGLRIAPPEAPVTGYMFGKGLYFADLVSKSAQYCYVDRNNPVGLMLLSEVALGDMYELKKATSMDKPPRGKHSTKGLGKTVPLESEFVKWRDDVVVPCGKPVPSSIRSSELMYNEYIVYNTSQVKMQFLLKVRFHHKR

SEQ ID NO: 65874 - protein, 496 aa, Zea Mays
MAAAAPPVAKKVPRQLVEHGDVRVDNYYWLRDDSRSDPDVLAHLRAENDYTAAVMSDVKQLEDEIYAEIRGRIKEDDIDAPLRKGRYYYYERTLTGKEYVQHCRRPVSTDAPITVHDVMPTGPDAPDEHIILDENVKAEGHDYYSIGAFKVSPNNKLVAYAEDTKGDEIYTVYVIDTESGEYVGQPLKGITSDIEWAGDDHLVYITMDSILRPDKVWLHKLGSDQSSDACLYHEKDDTFSLGLQASESKRYLFVESGSKNTSFIFYLDIPKQNKELAVLTPRVYGIDTTASHRGNHFFIKRRSDEFYNSELVACPLDNVAETTILLPHRESVKIQDFQLFDNHIAVYERENGLPKVIVYRLPAIGESIGQLQGGRAIDFIDPTYAVDPEESQFHSSVLRFHYSSMRTPPSVYDYDMDSGVSVLKKIHTILGGFNASNYVTERKWAAAADGTQVPMSILYRNDLVKLDGSDPMLLYGYGSYEVRSVCLFSFLLFGKL

SEQ ID NO: 65875 - protein, 1089 aa, Zea Mays
MVTPPTVEQEDEEMLVPRQEAVDTDAAQPMEVVAQTEVVSTAESQPVEDPQTSRFTWTIENFTRFSEKKHYLEVFVVGGFKWSVLIFPKGNNVDHFSMYLDVADSTSLPYGWSRYAQFSLAVVNQIQPEFTIRKETQHQFNARESDWGFTSFMPLSELYDASRGYLVNDTVVVEAEVAVRRIVDYWTYDSKKETGYVGLKNQGATCYMNSLLQTLYHIPYFRKAVYHMPTTENDIPSGSIPLALQSLFYKLQYSDSSVATKELTKSFGWDTYDSFMQHDVQELNRVLSEKLEDKMKGTVVEGTIEQLFEGHHINYIECINVEHKSNRKESFYDLQLDVKGCRDIYSSFDKYVEVERLEGDNKYHAENHGLQDAKKGVLFLDFPPVLQLQLKRFEYDYMRDSMVKINDRYEFPLQLDLDRDGGKYIAPNADRSTRNLYTLHSVLVHSGGVHGGHYYAFIRPTLSEQWYKFDDERVTKEDAKKALEEQYGGDEELPQINPGFNNAPFKFTKYSNAYMLVYIRESAKEKIMCTVDEKDIAEHLRVRLKKEQEEKEHKKKEKAEAHLYTIIKVARDEDLKEQIGKGIYFDLVDHEKVHNFRIQKQMPFSCFKEEVAKEYGIPVQFQRFWLWAKRQNHTYRPNRPLTVHEETQSDLRPLPPPEKGKEDILLFFKFYNPEKEELCFMGRLFVKALGKPSEILAKLNEMAGFPPDQEIELFEEIKFEPNVMCETIDKKLTFHYSQLEDGDIICFQKSPGAEYDAPVRYPDVPSFLEYVHNRQVVHFRSLEKPKDDDFSLELSKLHTYDDVVERVARQLELDDPAKIRLTPHNCYSQQPKPQPVKYRGVVHLSDMLIHYNQTSDILYYEVLDIPLPELQFLKTLKVAFHHPTKDEVVIHSIRLPKNSTIADVIYDLKTKVELSSPNAELRVLEVFYHKIYKIFPLHEKIENINDQYWTLRAEEIPEEEKNIGPNDRLIHVYHFKKDINQTQQIQNFGDPFVLVVHEGETLAEVKKRIQSKLQVSADEFSKWKFAFISMNRPDYLQDSDVVPTGFQRREVYGAWEQYLGIEHADTAPKRVYTVNQNRHAYEKPVKIYN

SEQ ID NO: 65876 - protein, 217 aa, Zea Mays
MLMRAAAALPRRSSRPSEPGSSSSRAPAPGASSSRAPAPGASFDPFDVDTDPPSRPELTPEQIGLCVDALAHFEYKGKRRDDLSDEFRSLSVSDIRHMKTISVAHYPVNREKNRYIDVLPFDDTRVQLKSSARPPNNDYINASFIKATENNRVATFISTQGPLVKTFGDFWEMVFEYQCPAIVMLTHFDSIKMVLLSATRRGGYAKVSFSVRAWTMM

SEQ ID NO: 65877 - protein, 1118 aa, Zea Mays
MFFDGCPRRLGCTVLLRGKSYEELKKVKLAVQYALFAAYHLSLETSYLADEGATLPKVPSDLQLEKPNSSSRYYQQNLIEFQTIEGETYGAGCITPCLNGSANQSHSRDDIIHEEHAHCHSRSDLSWEEYTGGTIDVYPYSTEASMYSSCMPPVCMTVQTPKSSLASARKSTPGNLFFSNNVHIDEAGGGMSKVDNDVLDLDNGWNHISDEDSVAIHDHNGNHNEYFPTSDSPQSILVSLSIACPLRGIVCKQSQLFRIKFYGTFDKPLGTYFREDLFVQTSCCESCKEPAESHVRCYTHQQGSLTISVKTLPSVKLPGELDGKVWMWHRCLRCKPKDGIPPATQRIVMSDAARGLSFGKFLELSFSNHTTANRIACCGHSLQRDCLRFYGLGSMVAVFRYSPVDILSVNLPSSVLDFACPKAQDWIIKEAVDVCARKEHLYREIVAKLDCIEKIVKDQNIGMKSGLHKHVADLKELVKVEWKKYDVVSAFSIVDNLQTFEPYIDVLELNLLRRELVHDIHVWDRRLYMMHSLTKENCRTMPNDAQFSEKFTESSLEQSKDVTSGKHLNAESSLEQNQPSTLEVAAVSVKSSPMTEQTNTSISHLALETTIMGDASMHSVSTVISFAPGSYEMQSEGVLAELEAGKTLQKSQSSASNLSDRIDLAWTGSGQLVNDSSSSMEAVSFIPASLKDNPAYQKVIAPIRIKSFDSAISSRNVDDSNASIRRSYSQRPPKAIERTGKGLSPTFLNKLSLPGMIHGESRLLLSQNDSGVIVPIYDDEPSSMIAHAMTVPEYHSFLLPLLYQNNESNLLNYGSDQPQPITRNDSKYNHFTISFEDEDSNSVDKAKFSVTCYFAKQFDAIRRKCCPDELDYIRSLSRCKRWSAQGGKSNVYFAKTLDDRFVIKQVTRTELDSFEDYAADYFKYLIDSVSSGSPTCLTKVLGLYQIIAKNLRDGKELKMDVMVMENLFFKRKVSRIYDLKGSLRSRYNPDTSGNNKVLLDLNLLETLHTKPIFLGSKAKRRLERAVWNDTSFLASVDVMDYSLLVGIDEERKELVMGIIDYLRQYTWDKQLETWVKATGFLGGSKDVLPTIISPDQYKKRFRKAMSKYFLALPDQWSP

SEQ ID NO: 65878 - protein, 146 aa, Zea Mays
MVCSQCNLRGSCDRAYVKARKEDVGRTVDVMRILLTYGLDVITGNVDNRACLNKSVKESIKILLSEVVEVDSRGPGSSTVKAAQRKGQSAVPMKQGDWNCPKCDFLNFAKNIKCLRCDGEFQERYQLLHEDREHLPLKKGDWICKR

SEQ ID NO: 65879 - protein, 563 aa, Zea Mays
MASRRVVSSLLRSASRLRAASPAAPRPRAPPHRPSPAGYLFNRAAAYASSAAAQAAPATPPPATGKTGGGKITDEFTGAGAIGQVCQVIGAVVDVRFDEGLPPILTALEVLDNNIRLVLEVAQHLGENMVRTIAMDGTEGLVRGQRVLNTGSPITVPVGRATLGRIINVIGEPIDEKGDIKTNHFLPIHREAPAFVEQATEQQILVTGIKVVDLLAPYQRGGKIGLFGGAGVGKTVLIMELINNVAKAHGGFSVFAGVGERTREGNDLYREMIESGVIKLDDKQSESKCALVYGQMNEPPGARARVGLTGLTVAEHFRDAEGQDVLLFIDNIFRFTQANSEVSALLGRIPSAVGYQPTLATDLGGLQERITTTKKGSITSVQAIYVPADDLTDPAPATTFAHLDATTVLSRQISELGIYPAVDPLDSTSRMLSPHVLGEDHYNTARGVQKVLQNYKNLQDIIAILGMDELSEDDKLTVARARKIQRFLSQPFHVAEVFTGAPGKYVELKESVKSFQVQFELFFFLLRNCCLEILYSLLCFLIMFRYASVDITGSLLCFTIFVV

SEQ ID NO: 65880 - protein, 311 aa, Zea Mays
MLSTPAAGWRFRRGGLPWRLHTCSCLASPLSSSGGEPEKARPLLAERYRDGVVKRYISDGSSKLQLRLEKHESPVNGVEDENADSLIPQAILDFVLPAGFPGSVSADYLDYMLLQFPTNVTGWICHVLVTSSLLKAVGVGSFTGTSAAASAAAIRWVSKDGIGAFGRLLIGGRFGALFDDDPKKWRMYADFIGSAGSIFELSTTLYPGYFLPLASLGNLAKAIARGFKDPSFRVIQNHFAESGNLGEVAAKEEVWEVGAQLLGLSIGVLIMDKTGVKSSYLTLVLTWLSVRLLHLWLRYQSISVLKFRTVR

SEQ ID NO: 65881 - protein, 725 aa, Zea Mays
MPPLAFLRRYLPARLLARACDGGVRGSPGVARDEEAGGSGGLSGRSAGAPSGECYACTQPGVPAFHSTACDQVHSPDWDADAGSSLVPVQAQQQAQPAAAAAQHAARWLFGPVLDPRSKRVQRWNRWILLGRAAALALDPLFFYALSIGRAGRPCLYLDAGLAAAVTALRTCADVAHLAHVLLQFRLAYVSRESLVVGCGKLVWDARAIAAHYARSVKGLCFDLFVILPIPQVIFWLVIPKLIREERVRLIMTILLLMFIFQFLPKVYHSIHIMRKMQKVTGYIFGSIWWGFGLNLFAYFIASHIAGGCWYVLAIQRIASCLQEECKKNNSCDLISLACSKEICFHPPWSSNVNGFACDTNMTSFSQRNVSTCLSGKGSFAYGIYLGALPVISSNSLAVKILYPIFWGLMTLSTFGNDLAPTSNGIEVIFSIINVLSGLMLFTLLIGNIQVFLHAVLARKRKMQLRFRDMEWWMRRRQLPSRLRQRVRKYERERWAAVTGDEEMEMIKDLPEGLRRDIKRYLCLELVKQVPLFHGMDDLILDNICDRLRPLVFSSGEKVIREGDPVQRMVFILQGKLRSTQPLTKGVVATCMLGAGNFLGDELLSWCLRRPFVDRLPASSATFECVEAAQAFCLDAPDLRFITEHFRYKFANEKLRRTARYYSSNWRTWAAVNIQLAWRRYRARASTDLAAMAAPPLAGGPDDGDRRLRHYAAMFMSLRPHDHLE

SEQ ID NO: 65882 - protein, 1116 aa, Zea Mays
MGSVGVEADDDGSIVKEFLQRCEPSGDAAYGELRALLARLHDPATRRDARLFLAALHRHQQRSSSAAGGLTHEQFFRRFGFRMQELLLQDTATDITASSFIATKPAAAAGFQQMKKLTMMEIPSIFIPEDWSFTFYEGLNRHPDSIFRDKTVAELGCGNGWISIALAEKWCPSKVYGLDINPRAVKIAWINLYLNALDDDGLPIYDGEGKTLLDRVEFYESDLLSYCRDNKIELDRIVGCIPQILNPNPEAMSKIVTENSSEEFLYALSNYCALQGFVEDQFGLGLIARAVEEGISVIKPSGIMVFNMGGRPGQGVCERLFRRRGFRITKLWQTKIMQAADTDISALVEIEKNSRHRFEFFMDLVGDQPICARTAWAYMKSGGHISHALSVYSCQLRQPNQVKKIFEFLKDGFHEVSSSLDLSFDDDSVAEEKIPFLAYLASFLKENKSNPCEPPAGCLNFRKLVAGFMKSYHHIPLTPDNVVVFPSRSVAIENALQLFSPALAIVDEHLTRHLPKQWLTSLAIEGRADCNHADGTVTVIEAPRQSDLLIELIRKLQPQVVVTGMAQFEAITSAAFENLLNVTKDVGSRLFLDISEHLELSSLPSSNGVLKYLAGKTLPSHAAILCGLVKNQVYSDLEVAFAISEDAAVYKALSQTIELLEGHTSLISQHYYGCLFHELLAFQIADRHPQQERQPAEVIPQQMIGFSDPAVSTLKATEFFVPGSAESSIIHMDLDRSFLPVPSAVNASVFESFVRQNITDSETDVRSSIQQLVKDSYGLSAAGCAEIIYGNTSVALFNKLVLCCMQEQGTLLFPLGTNGHYVSAAKFVNASTVTIPTNPSSGFRIEPKVLADTLKNVSRPWVYVCGPTINPTGFLYSDSDIRELLSVCAEYGARVVIDTSFSGLEYETDGWRQWNLAGCLSSLKRSEPSFSVVLLGELSFALTAGGHDFGFVILGDSSLAETFHSFSSLSRPHTTLKYTFKKLLGLKNQKDQHFSDLIVEQKEELKNRANQLIQTLESCGWEAAIGCGGISMLAKPTAYMGKAFKAAGFDGELDASNIREAILRATGLCINSSSWTGIPGYCRFSFALERGEFERAMGCIARFKELVLGGAQMNGA

SEQ ID NO: 65883 - protein, 66 aa, Zea Mays
MAGEHCTEPQFHQIFRQRTLLPGPAFSSDAFQILKYHFFINMHEHMTHVFNPINHESFFLRKYISE

SEQ ID NO: 65884 - protein, 256 aa, Zea Mays
MVFCSAVPGTIDERAINKKRVLNPWERNENHTLCLNSAKAIGCTVVNIGTQDLVEGRPHLVLGLISQIIKIQLLADLNLKKTPQLVELFDDSKDIDEVLSLSPEKMLLRWMNHHLKKAGYKKTVNNFSSDVKDGEAYAYLLKALAPEHSPETTLDTKDPNERAKLVLEQAAKLDCKRYLTPKDITEGSANLNLAFVAQIFQHRNGLTSDTKQVTLTQTATPDDVLVSREERAFRMWINSLGVESYVNNVFEDVRNG

SEQ ID NO: 65885 - protein, 113 aa, Zea Mays
MYLLENTGEFVRSNELQEGDFIVIYSDVKSGKYLIRGVKVRPPPAQEQGSGSSGGGKHRPLCPAGPGRAAAAGAPEDAVVDGVSGACKGRSPEGVRRVRQQGAGAMSQMAVSI

SEQ ID NO: 65886 - protein, 195 aa, Zea Mays
MHTSSGQFSSRSCYRALFMGAIMFEPWKRLWKSWAPPKCKFFLWLAIRNKCWTSDRLEKRGLDHPVSCLLCDQEQETIQHILCTCVFARQFWHSILFGLNVGNLSPFGDESSFADWWRKTSKKIHKSKRKGMNNIIILGAWCLWIHRNKVVFDGETPSLSSIRCVFLDEIGCWITAGAKHLQSFGLELARNLYRV

SEQ ID NO: 65887 - protein, 409 aa, Zea Mays
MLYELLSGEVDIWEIAPSFTELLKNTSVQFVRDSVKLLRPSDHLRRKPGEPCTGGVVHLESGTVIEYDWLVLALGAEAKIDVVPGSAEYALPFTTLEDALRVESKLKMLERKRFGKSSPTIEVAIVGLGYSGVELAATISERLKNTGTVKAINVQTTVCPTAPQGNRDAALKVLESRNIQLFLGYFVSCIKEAPTSDESSSTVTYSEVDGDHRKLILDLQPAERGLKGQTLDADLVLWTVGSTSQIPRLQPPDAPYVIPLNGRGQVETEETLQVKGHPRTFAIGDSAALRDPSGKLLPATAQVAFQQADFAGWNLWAAINDRPLLPFRFQNLGEMMTLGRNDAAVTASFIEGLTLEGPLGHAARKLVYCLRMPTDEHRVKVGISWFTKAAIDSLASVQNAVSNTLTGSS

SEQ ID NO: 65888 - protein, 1126 aa, Zea Mays
MACIKSAHRAALTALAPDAPYLAAGTMTGAVDLSFSASANIEIFRLDFQSDSTDLPILASAPSPDRFNRLSWSRPGAVEGDSFALGLLAGGLSDGSVAVWNPLSMISSEGKAEDAMVARLEKHTGPVCGLEFSELTPNRLASGAEQGELCIWDLKNPVEPIVYPPLKSVGSHAQAEISCLSWNPKFQHIVASTSSNGMTVVWDLRNQKPLTSFSDSNRRKCSVLQWNPDMSTQLIVASDDDNSPSLRVWDVRKTISPVREFVGHSKGVIAMSWCPYDSSFLLTCSKDNRTICWDTVSGEIISELPASANWNFDLHWYRKIPGVIAASSFDGKIGIYNLEFSGLYATGDAVGAPVRPRAPAPKWLKCPTGASFGFGGKLVSFHPVAPTQGAQTSTSEVHVHNLVIEQSLVSRSTEFEAAIQNGDKSSLRALCEKKSQESLSDEERETWGFLRVMFEDGDFARTKLLAHLGFEPPQAPPASSTDELSQTLADTLNIDHAAVTDNADAQFLIDNGDDFFNNPRPSEASLAEESVSTNGQQIEQEVSGDSVPSDPSIDKSIQHALVVGDYKGAVNQCLASNRMADALVIAHAGGSALWESTRNHYLKNSISPYLKVVSAMVGNDLMSFVSTWPLSSWKETLALLCTFAQKEEWHILCDTLASRLLNVGDTLAATLCYICAGNIDKAVEIWSRTLKSEDGGKTYVDLLQDLMEKTITLALATGQKRFSASLSKLIENYAELLASQGLLKTAMEYLKLLGSDEHSHELAILRDRIACSTEENDNVSSVSESTGTPSPYVTNQPYTTPDHSQNVYQVPQPYNVPSNTYSEAYPQQGTGAYGYNNAYQPQQPANMFVPPSTPPNTQPGPSHVPVPQQTVKTFTPANPAGLKNPGQYQQPNTLGSQLYTGATNQPYSSGPSAPYPSGPPTTFHQPVAPVQYQSAAPPVSSFGPTTPVPGTVPNQMFPHSAATNSTSRFMPSNNQSFAPRPGLSPVQPSSPTQVQAQPAPPAPPATVQTADTTKVSAELRPVIGTLTRLFDETTKALGGSQATQAKKREIEDNSRKIGALFSKLNSGDISPNVSSKLIQLCSAIDASDFVTAMHLQVLLTTSDWDECNFWLAALKRMIKTRQNFRM

SEQ ID NO: 65889 - protein, 211 aa, Zea Mays
MICLRVQPDDTLHTVKKKILEKYHLVFEGVQMEDNLTLADYNIQHQSTLDLQEKMQIYVKETLKGLTITLDVDSLDTIDIIKDKIEYNEGFPKGRQCLIFGDEQLEGKYTLADYNICNESTLLLVIHPCTSTSDAMQIFVKMQNGKTTTVRVDSSDTVNSITVKIYEMEGIPPLEQRIIFRGRRLEGRRTLADYGIQKEETLHLMLCLCGW

SEQ ID NO: 65890 - protein, 1288 aa, Zea Mays
MGNLCWSTNRERWRRTAPSPSVPACSDLPAAVSSFADAFVDFAVSDIFFPTFPSSSSLPPRPKTPTTFLPSPSRLVAIGDLHGDLPKSLSVLRLAGLVPPSCTPTPPPPPASSWPAGPTLAVQLGDILNRSDDELRLLYLLHRLSLSAETRGGAFLPILGNHEVMNVSGDFRFATPQGFHDRAVCGGVLACAGFAAWAAEAGVAGAAGCWRTGVAGAGAVYTASLIVSRDCLKLNSTLGLWTCFCPIRSKPNPLPSYIDIGSWAGLVNPRRRKKYMLPSANWQEMKKLSSGKKSGKGDGLGRPGESLDSQARQIAVRSPLPWREAYQSSPQIPRYSPLRLRSRLRRRAPPSPPAPHRATPMYSQLVDGDSDSEGSLISDISASPPRGRSPSPPPPPPPPPEHRPNPKHTATVKPKPPKSKAKPKLAASACTAAVSPPPLPSAALSDPHGLVSRIAAAPALVTATSTVSSSSFRRLVQSRNPSFDPAAAFSAPTPAPTLAPTEIATAATAQCPAPDAPPQTRPKRVHPNSVSEVVPPAAEAEQPKRPRGGAEGNFVRLNINGYGRRRTFRNAQARRPTKYRSWRRQRHGGAKPQGRGDEEGDFVAEAMIEREKKRAGGDGGVLEAVEAAREDPSEQNLENLLRIIYGYNSFREGQLEAIQKVVAGESTMLVLPTGAGKSLCYQVPAMILPGLTLVVSPLLSLMVDQLMKLPAFLPGGFLASNQTSDEFHETLQRLRGGEIKVLFVSPERFLNEEFLLIFRDGLQISLVAIDEAHCISEWSHNFRPSYLRLRASLLRRKLNVQSILAMTATATTQTLEEIVTVLEIPSDNLIKTSQIRDNLQLFISMSNNRLKDLLLLLKASPFVDMKSIIVYCKFQGETDYVSKYLCDNNITAKSYHSGLLMKNRNRVQELFCSNKIRVVVATVAFGMGLDKSDVEGVIHYSLPESLEEYIQETGRAGRDGRLSYCHLFLDSTTFYKSRSLLHSDGVDEYAMSKFLFQVFSCENSVGCICSLVKESTSRKFDIKEEVLFTVLTQLEIGGQQYLRLLPQFSVTCTLYFHKTSPQLLADKDVLVRSVLDKSETKGGHFVFDMTKVANDLSITVNEVFDHLQQLKFSGEISFELKDPACIYVILKKPDDLNALSADITRWLSEVENSKISKLDAMFDLANFAVKGCQRTDGCSGSQHTPCIQKKIIQYFSKNYSTSDSGQCTQPQRGSPFLQADIKVFLKSNSFAKFTPRAVARIMHGISSPAFPSATWSKNHFWGRYLEVDFPVVMEAAKAELVKLVGKGE

SEQ ID NO: 65891 - protein, 582 aa, Zea Mays
MLVAEVLRAGAYISRFSRRACKVAIFSSIACSPTSQFRRLQFLDLSIKSRPYHFSQSCLMALAAAPASGDSQSGPQRNYQVVVAATRDMGIGKGGVMPWKLLGDLKFFKELTLTTTDPAKKNAVIMGRKTWESIPVKSRPLPGRLNVILTRSGSFDFATVENVVICGSMKSALELLASTPYCLSIEKVFVIGGGQVLREYLNGPACEAIHLTDIQSSIECDTFIPPVDFSVFQPWYSSFPVVESNIRHSFVTFVRVRKSVAETHESNGKESTEIDTKNDKFEIENFSFLPKIVYDRHEEYQYLNLVEDIIRFGAQKNDRTGTGTLSKFGCQMRFNLRKNFPLLTTKRVFWRGVVEELLWFISGSTNAKVLQEKGIHIWDGNASREYLDRIGLAHREEGDLGPVYGFQWRHFGAEYTDMHADYTGKGFDQLMDVIDKIKNNPDDRRIILSAWNPSDLKKMALPPCHMFAQFYVENGELSCQMYQRSADMGLGVPFNIASYSLLTYMIAQVCDLSPGDFVHVIGDAHVYRNHVRALEEQIQKMPKPFPILKINPSKKDIDSFMASDFKLVGYDPHQKLEMKMAV

SEQ ID NO: 65892 - protein, 311 aa, Zea Mays
MVYHFHGMIDMLINCGYEKGTTLFGYGYDFRQSNRIDKAMAGLRAKLETAYKTSGGKKVNLISHSMGGLLVRCFMSMNHDVFTKYVNKWICIACPFQGAPGCINDSLLTGLQFVYGFESFFFVSRWAMHQLLVECPSIYEMLPNPEFKWKEKPIIQVWRKNPEKDGTVELVQYEATDCVSLFEEALRNNELTYNGKKVALPFNMSVFKWATKTRQILDNAELPDTVSFYNIYGTSYETPYDVWLIGCQCIKFKADGFSAKERVGVKADHRGLLSDENVFKLLKKWLGVSEKKSEWRCVSKSYSKVGNWVAL

SEQ ID NO: 65893 - protein, 659 aa, Zea Mays
MGKPKQQVLSRFFSPKPAPVLSSAAPDPPPPLPPNPKPSAAHPPVSTVASFSPAKRARALSLSPKSPAAKRPNPTPPPSRDAVRRRLLEPLHQEPPRLLDPTGGGKGYTPLEQQVVDLKARHPDVLLMVEVGYRFRFFGEDAAVAAAVLGIVAHPDRSFLTASVPNFRLGFHVRRLVAAGHKVGVVRQTETAAIKAAARGVGGAPFSRGLSAVYTRATIEAAAGELEGGGAAAPEEGSSYLVCIVDKEVEAAGREGLQVKVGLVAIEVSTGEVVHGEFLDSDSRSGLEALLLGLAPVEVILGTPLSFATEKIMMAYVGPTSNVRVERVSCEWFGKDAALAELITLFEKSVNNASRAEDDRKLIETNDDNNNFHGIEGIMAMPELVVQALALSVRYLKEFSLSANALQQLEVFRNNSDGTTEGSLFQIMNNTCTSFGSRLLRNWLTRPLCNRHLICARHDAVSEIFESMGPQHSVNNLQDGGDRSCTASVLSDLCIVLSSVLALLGRSPDIQRGISRIFHCKATAKEFVGVIQSILTSGKQLQKLVLEDIGIVSSPHKSVHSPLLRRLINTASSSTILNSAVKLLSCLNKDAADQGDMLNLFIASVDQFPEVAEGHVNVKMAEHKLDLLIVEYRKQFAMHNLEFKTVAGTTHLIELPVDR

SEQ ID NO: 65894 - protein, 51 aa, Zea Mays
MPLMGRRGERGEVHANASWLIPAMAVACFALSLSTYTWARPVPGWGVGGET

SEQ ID NO: 65895 - protein, 155 aa, Zea Mays
MSESTWSRDFDEAIRFEPFIEHQVCVILPKINIRQEHRCRSSQHATSTGPLILLNGELQGRIASGHEETTIAGSELAARHDVTVVFRELGNHDVRSRRTAGASPTENSRASDARELGTVEHATKEWWGIDYEIKNHGIHISQHGEGYRALIPELL

SEQ ID NO: 65896 - protein, 435 aa, Zea Mays
MASPASASLKEAVGSLDRDGFVGLLSNLIGETAHLQNDPPTYRPQEERVAQHVVDVLRPVSADTGGGPLLVRKISYAEGRSNVIVEYPGTVPGRVVSFVGMHMDVVPANGSDEDKDKLRGRGTTDCLGHVALVAQLMRRLGEVKPPLKHSVIAVFIANEENSSVTGIGVDGLVKDGLLDKLKTGPLFWIDTADKQPCIGTGGMIPWHLKATGKLFHSGLAHKAINAMEMNMEALKVIQKRFYTDFPPHEKEKVYKFATPSTMKPTKWSYPGGGLNQIPGECTISGDVRLTPFYSTSHVMEKLKEYVEDINERFETVLDTRGPVSKYILPDENLQGRLEITFDGDVMNGVACNLESRGYHALCKATKEIVGHVEPYSITGSLPLIRELQDEGFDVQTAGYGLLKTYHAKNEYCLFSDMAQGFQVFLSIISQLEEEV

SEQ ID NO: 65897 - protein, 847 aa, Zea Mays
MTSSAAAAAAAAQVAGGGGGGEGDAAAAARGGTEDGMYTELWNLCAGPLVTVPRVGDKVYYFPQGHIEQVEASTNQVAEQHMQFYDLPWKILCEVMNVELKAEPDNDEVYAQLTLLPESKPEENGSSEEMPASPPAALARPRVHSFCKTLTASDTSTHGGFSVLRRHADECLPPLDMTRQPPTQELVAKDLHGVEWRFRHIFRGQPRRHLLQSGWSVFVSAKRLVAGDAFIFLRGDSGELRVGVRRAMRQQANVPSSVISSHSMHLGVLATAWHAVNTGTMFTVYYKPRTSPAEFVVPCDRYMESLKRNYPIGMRFKMRFEGEEAPEQRFTGTIVGNVDPDQAGWAESKWRYLKVRWDEASSIPRPERVSPWQIEPAVSPPPINPLPVHRPKRPRSNAVASLPESSAPTKEAAPKVTLETQQHALQRPLQTQDNVAPKSVFGDNSELDSAHKSSLRPSGFDLDKSTIGMQRKLGSDIWMRMNRPDGYSEMLSGYQPPNEGARNSQGFCSLPDQIAAGRPNFWHTVNAHYQDQQGNHNLFPGSWSMMPSSTGFGMNRQSYPMIQEVGGMSQSCTNTKFGNGVYAALPGRGIDRYPSGWFGHTTPGGRVDDAQPRVIKPQPLVLAHGEALKMKGNSCKLFGIHLDSPAKSEPLKSPPSVATPAAEKWMADGIDADKSPEPHKTPKQLGATQVDPVPERCPQASRGTQCKSQGGSTRSCKKVHKQGMALGRSVDLTKFNGYTELVAELDEMFDFNGELKGCSKEWMVVYTDYEGDMMLVGDDPWNEFCSMVHKIFVYTREEVQRMNPGALNSRPEDSGLANSTERGSASTAAAREAPGYQSASSLNSDNC

SEQ ID NO: 65898 - protein, 876 aa, Zea Mays
MDHGRYAPQHGWENNSAPNGYGVINEPDFRSGGSYNARRSVDEGFPRDSYGRGAFYHDTHDRNMYASPPSAGGMWSQPRRNHDEDYATARDHRSHRDFGADRSKRIGSRERAEFHGEFEDRYRSSHQSREDSYERDHEYGRYGYDSDYERGKRDSSWRRRDSCDSERERSGLSREREESPYTRHSRSRSHGRDDRSRSRSRSRSPRPRSHGRNQRDGLYYDNRFDRRREYDWDDRGHGDSVAPSATVVVKGLSLKTNDDDLYKILAQWGPLRSVRVIRERNSGMSRGFAFIDFPTVEAARRMMEATGENGLEIDGRNVFFQYSSKPTGGMGGPSLGQENFTRPTYGHRTAAAPCDWICTICGCMNFARRTSCFQCNEPRTEDALPADATGSASHFGRRGSELGPTHVLVVRGLDENADEEMLRYEFAKHAPIKDIRLVRDKFTHVSRGFAFVHFHSVEDATKALEATNGITLEKNGQVLRVAYAKSTHGPASGGSQSNSLAAAAIEAASFAQQYDAIGWAPKEYNPDDKQNNNSESQKDGSTAQSGFVWDEKSGYYYDSASGFYYDGTTGLYYDSNSGVWYSYDQQTQQYVPCNDQSNTKAAGEAASENTKTSDSNSGKKVVISAPAATIKQSEKTSLPDAVQAAANAALAAEKREKEKAKEIKLASKNSLIANKKMSNVLAMWKQRNQEGQAARIVLDDKEPANSDDKFSHSRSGTGFSLKSKPNSDLENAMGNSLGQGMTSTQTLDSVVKPRPVSNSLGTTVMGVIRGSARGVIKSDTTFHALSDAGSTDSRTTITTRASGLMTSSEALITPAPFKTDVSALVSNTPSGVSGSGKRRFSEAPGQSQYRDRAAERRNLYGSSHGTDTVGLDSRFK

SEQ ID NO: 65899 - protein, 83 aa, Zea Mays
MGRETGTLQLLVPLLLTGGKGADLVIRGNVVLNTLSARSTSMLLRRDQICINSPSSRQVPGLAELSYATDFDSPSAQSSGMFS

SEQ ID NO: 65900 - protein, 265 aa, Zea Mays
MVVVLANPPVVDQIPLLRSPGPRDSFSCVPVVDLSGPGAARAIVDACERFGFFKVVNHGVPAATMDVAESEAVGFFAQAQADKDRAGPRASYPFGYGSKRIGLNGDMGWLEYLLLAVDSASLSDACPVPSGAAFRSALNEYVAAVRDVAARVLEAMAEGLGIADAAALSSMVTGAGSDQVFRVNHYPPCPALQGLGCTATATGFGEHTDPQIISVLRSNGTSGLQVALRDAAQAQQWVSVPSDRDAFFVNVGDSLQVGVRFSFDT

SEQ ID NO: 65901 - protein, 209 aa, Zea Mays
MCLGVTAGAYILTLFATKYRERVLGLILVSPLCKAPSWSEWFYNKVMSNLLYYYGMCNVVKDILLQRYFGKGVRGGSAEPESDIVQACRSFLDQRQCVNVWRFIQTINERKDLTENLKQLQCRTLIFVGENSQFHAEAVHMTAKLDRRYSALVEYKACGSVVTEEQPHAMLIPMEYFLMGYGLYRPSQINCSPRSPLNPFCISPELPLS

SEQ ID NO: 65902 - protein, 526 aa, Zea Mays
MAGVDAARYAHSPAHHAVAARDHAALRRVLDALPRARRPEEIRTEADSVAEEARAEAVSAVIDRRDVPGRETPLHLAVRLCDPTAAEMLMAAGADWSLQNEQGWSALQEAICTREEALARVIVRHYQPLAWAKWCRRLPRVVAAMRRMRDFYMEITFHFESSVIPFISRIAPSDTYRVWKRGSNLRADMTLAGFDGFKIQRSDQTILFLGEGSEDGKVPPGSLCMINHKDKEIMNALEGAGTPASDAEVQQEVAAMSQTNIFRPGIDVTQALLLPQLTWRRQERTEAVGPWKAKVYEMNHVVVSVKSRRVPGAMTDEEFFSSCNDNDIESEGFDDVLTEEEKKQLEAALKMDSPDAGGEDQSDSFAGPRHSCFEPREREVPIEDMSVSGNGEGKHDKKGWFSNWGKRSQVSKSEGVKKMASPRNSLCVDDKVSDLVIESPSNVQTRPGRHSVDVVRPDDNRRIRERDSRRHVASAENGHRRKEGSKESNSSFEGSTYNKTPSRHISCQGRYSSRAYNQSACDIHKI

SEQ ID NO: 65903 - protein, 344 aa, Zea Mays
MERVNGVNIVPHFCRIEDKEIEFYSQFHIIVLGLDSIEARSYINSVACGFLDYDSSDNPLQETVKPMVDGGTEGFKGHARVIIPGTTPCFECNIWLFPPQVKFPLCTLAETPRTAAHCIEYAHLIKWDEVHPGKPFDGDDAEHMQWIYSEALKRAELFGISGVTYSLTQGVVKNIIPAIASTNAIISAACALEALKLISGCSKSVSNYLTYNGLEGTHIKVTEFVRDKDCLVCGPGTLVELDTSSTLSDFIKMLEEHPKLRMSKASVTHEGNNLYMQSPEVLEQMTRPNLSIPMFELLKEVPYTTVHATGMAENNGKKVSSLRKLRVAFKGIEDASKMDTTVSS

SEQ ID NO: 65904 - protein, 251 aa, Zea Mays
MARCRRRRQGEMYCPPLIKQLNVPIKIKIYEWNASGLLSRIEGLRAFLPKPEMMTRPRNFTDLKNKVDQEMHVCITRIDEETNELIISEKEAWAVTCLREGTLLQGTVRKLFPYGAQIRIGETNRGGLLHISNMTHGKLRSVADVLKVGETVKALVIKSTPDRIALSTKDLESEPGLLITNKEKVFSEAEEMARRYREQIAEPQPPGSIAAEDSCDDAVPFNDESRSYANWKWLKFSKSDDVANPKSGVES

SEQ ID NO: 65905 - protein, 218 aa, Zea Mays
MRHDKVWPTSAARQEQSTWSLDLDAAVRGGLEPEPVRADSAAVAGAGAGADEVSRAGDEHVVVARHPAADLPADPPVDPELQDEVPRGEVLGERVGEEGREGDGGAGQHGRPDVDVAVALVHRGQPGRQRHLLVLVRGVDVEAVVVDADAAVGVAGRHGDLRRRGQQRGRAVAQVQLPQRRVLQVEARVRGAEHQVHDQRHDAHQQRHGQQDGQQAPA

SEQ ID NO: 65906 - protein, 495 aa, Zea Mays
MATADQSRIFMKDVKRVIIKVGTAVVTRHDGRVSTGNFGVLCEQVKEINALGYEVIIVSSGAVGVGKQRLNYRKLVNSSFADMQKPQTELDGKACAAVGQSGLMALYDMLFTQLDVSSSQLLVTDSDFENPNFRERLRETVESLLDLKVVPIFNENDAISTRKAPYEDSSGIFWDNDSLAGLLAIELKADLLVLLSDVDGLYSGPPSEPQSKMIHTYIKDKYHNEITFGDKSRVGRGGMTAKVKAALVASNSGTPVVITSGSASGSIIRVLQGEKIGTLFHKDASLWEPSSDVSACEMAVTARECSRRLQNLSSDERNKILLDVADALEKNENLIRTENEADVAAAQDAGYEKFLVDRLTLKPGKISALAKSIRTLARMEDPINQILKRTEIASLAIRSGNGLLLKGGKEAMRSNKVLHKLHDVIDLVIPRGSNKLVSQIKTSTKIPVLGHADGICHVYIDKSANMNMAKQIVMDAKIDYPAACNAMVCLICYNL

SEQ ID NO: 65907 - protein, 292 aa, Zea Mays
MTHIVVRSRSLAPTPRGLRTLNSVWAQHLSEEVRRRFYKNWCKSKKKAFSKYALKYDSDAGKKEIQLQLEKIRKMKGLKQKKAHLMEIQVNGGTIADKVDYGYKFFEEVPVDAVFQKDEMIDIIGVTKGKGYEGVVTRWGVTRLPRKTHRGLRKVACIGAWHPARVSYTVARAGQNGYHHRTEMNKKVYKIGKAGQESHDASTEFDRTEKDITPMGGFPHYGIIKGDYLMIKGCCVGPKKRVVTLRQSLLKQTSRLALEEIKLKFIDTSSKFGHGRFQTTDEKQRFFGKLKA

SEQ ID NO: 65908 - protein, 57 aa, Zea Mays
MEDSHPHDGHQAGRLHHGEEEVGGRLGLRDGAGITWGRRRGIGVAARVEERGGGAAK

SEQ ID NO: 65909 - protein, 467 aa, Zea Mays
MAELQIFKNNKEEADEKMRYWQLPWVPPPKEEPPSEEELARKAALKEKAGQRLRDMAAAKRSQKIVELEKQLSYLEELMEQLDEAEEEEATAILGSSGYLSQQEIRSAILKASQSLRKAKGESNGNDEKTDASAVDKYPLVSVPDETLTPEQLKEKKKQILLKTTTEGKLRAKQKRAEEEALREKQEEKRENPELYLEELRARYSELSDKFEQRKRQKVNGSQTNGNHSSSAGVGRGERLNAAQKERMRLLASAAFDRGKGEDTFGMRDEDWLVYNKMSKDNDDDSNDDDESELVRISSKLQEIDPTFVSKSEAVQLTPEPPKVRPLTAEDYRIAIGIERFRCPEVLFQPGMIGIDQAGIDEMVSISLRRLMEDESVKERLCQSILVTGGSSLFPGMIPRLESGIRQYRPYLAPLKLVGAADPILDAWRGAAAFAASSKFGKQTFSLADYGEHGENLFHRYNIVYSL

SEQ ID NO: 65910 - protein, 341 aa, Zea Mays
MCSTCKSHESFPSNKIIFCKGPCKRACHEKCLEPPLNKSVLPTSSHGWLCKFCLCKVRILETINAHLGTSFTVKCHFEDIFKETTELIDSEDALDEDWLSEYSGDEDYDPDENEASGDCMDSGEKIMSDDSNGSGSPLYSPNDDIPDFISADLNVVEGFCHTNLDLGIDAVEDDFAQILTYQRPRRDVDYRRLNEEMFGKITGNEEQSEDEDWGHERRKKRTHSGVAGDNSVGFLNVISDEKSQKKGRKLFRIPPAAVEVLRRAFAENELPPRDVKENLSRELGISFEKIDKWFKNTRCAALRDRKAEGNSHNTAPSKSSKNKGKAGISDWKEWSCYWSLQ

SEQ ID NO: 65911 - protein, 242 aa, Zea Mays
MTFRHMLYPAYKSNRTPTPDTVVQGMQYLKASIKAMSIKVPGVEADDVIGTLAINSVSAGYKVRIVSPDKDFFQILSPSLRLLRIAPRGSGMVSFGVEDFVKRYGPLKPSQFVDVVALSGDKADNIPGVEGIGDINAVKLISKFGSLDNLLKSVDEVEDERIKQALISHSEQAILCKNLATLRSDLPHYMVPFKTADLVFKKPQDDGEKFIKLLRALEAYAEGSSVNPIIRRAAYLWNKLKS

SEQ ID NO: 65912 - protein, 324 aa, Zea Mays
MAAPPEGNVRLGEGWDEDDVLEPQPLEVIAPDVKSKKRNPAPGVRVVGRRIYDPENGKTCHQCRQKTTDFAAACKQVKKKGPCPVKYCLKCLLNRYGESAEEAAGKEDWICPKCRGICNCSFCRKKKGEMPTGIMAHIAKASGCTSVHDLLKKGSDVVSAAQAILKVNGSDKGTKRSRGTDAAAEVATEKDVNIGIDINTVIADEGDENIGVDLNSLPSVDTKKRQKRQKLKHRTKKDPADATSHGVNTEPLQMDGNLDFLNSKTVRPRGTPVTKIAGAELDDEDTGAAIQFIEFCRAFTEVVKDFSNKERATRKNSSRFSWRP

SEQ ID NO: 65913 - protein, 100 aa, Zea Mays
MAAFPGARLDSATTAIKARPYPRYPPVASTPCDAPTKTPRTRRAEEEHEREKERCRGSRGRANHRKSSGLRHQDATPHAVDKSWCHGSLVENLTDVRWAE

SEQ ID NO: 65914 - protein, 72 aa, Zea Mays
MARPRLPILPTPGMPHGFPQAPGAPLMPGIRPPAIYQANPQASAGPTSGAPPAPPTAPQPAFSYAPPSEGNH

SEQ ID NO: 65915 - protein, 134 aa, Zea Mays
MQHVRARISKCVARTRWCVRCGVPGIRQQQADDATAGNNKHGHACMLTMNASSKHAGRSGPVARRPDATAVPVVGPTYVRAGGNMCPRARLFYSFRSDVSRKKGKFTGVRVQCMQGRMHVNIKMPACVREPAGG

SEQ ID NO: 65916 - protein, 623 aa, Zea Mays
MRLGQTLALEVLNLLKIAFGKKKYITSDSHDKVKIYPMGSMLISALRLVDVFSDDSNFRSSFLTNTVPFLTQILATPHGEFVSSWCSVNLPAIEEDASLDYDPFVASEVALLASNNVLTEAKADYSCPFRPSLPSVAYAQTRTSCVVKIIANLHVFIPNICEEQERDLFLQNFQKYLVSGSSKLSADQPASSDFDATKVCRNLGSLSDYAKTLVPNLLNGEDLLLLSDFSDKLQSWCKSQVAVKVVQNDIPPESMEDMHPMQQPLPTRASTPDSKMNNFPKDVQNMEVSAPIPPINREGNDKDETPKNTVSRNGGFLQNAVGQDLVHLGVARTASGGSSAVTSVVSTGHQRSKMDLDPASGSVDNFKTPELTKENGLQGDDKGESSVYDERQPKRRKRNIMNSEQIDELEKALVDEPEMHRNPVLLQGWSEKLSLQGPEITSSQLKNWLNNRKAKLARIAKERGTFEGDNADKPSTPHPGESSESAGEDNYIPPARVMTAPSKGRLVSPDGNEKTSQAELSPNTMLIRPFTRSFSLEPGRLVSLVDSDGKEVGRGKIFQAPGKSPAPVESRICTVDVTELRTEKWRELPHPSEASGRTFQEAEARNGGIMRVSWDSGRLLPVV

SEQ ID NO: 65917 - protein, 189 aa, Zea Mays
MDSLRGVKLPGVPKGGSALVKVALLGGAGLYAVLNSFYNVEGGHRAIVFNRLEGIKDKVYPEGTHLMIPWIERPIIYDVRARPNLVESTSGSRDLQMVAAQEAERAKFIVEKAEQDKRSAVIRAQGEAKSAELIGQAIANNPAFLALRQIEAAREISHTMAASSNKVFLDSRDLLLGLQQLNVGGKQKK

SEQ ID NO: 65918 - protein, 430 aa, Zea Mays
MGCFQSKVAGPLPPNDAAALPADKPADPEAANGAADGGGDGDDKEAVKRAVPVFREFALAELRAATKGFSADLIVSESGEKAPNAVYRGRLDGGRLIAVKRFSRLSWPDPQQFLADAVGVGKVRHKRLVNLIGCCAEGDERLLVAEYMPNDTLSKHLFHWDKQPLPWEMRLRVAYFIAQALDHCNLENRKIYHDLNAYRVLFDEEGDPRLSSFGLMKNSRDGKSYSTNLAYTPPEFLRTGRVIPESVIYSYGTVLLDLLSGKHIPPSHALDLIRGKNILLLMDSSLEGQYANEDASKLVDLASKCLQFESRDRPNIKYLLSSVGPLQNQKEVASHVFMGITKATSVLPAIYSPLGKACAGMDLSAVHDILLKTGYKDDEGAENELSFQEWTQQVQEMLNTKKFGDIAFRDKDFKTAIDYYSKAQFFLLDE

SEQ ID NO: 65919 - protein, 4509 aa, Zea Mays
MGSPFVLTATLRKSYEVALMAVGQKWPVLLYGPVGAGKSALINKLAHIVGNRVLFIHMDEQMDGRTLLGSYVCTEKPGEFKWAPGSLTQAIVKGFWIVFEDIDKAPSDVRSILVPLLEGSNTFSVGHAEAVEVAESFRFFATVTTSKNDVSHDLPGRLTFSALWRKVMVGEPNQSDMVNIIKGCYPSLEPISSKLIDTFEKVNSLGSYQFGSLNLAGGLSDGVLHRFSLRDLLKWCKRILGTDLNFEDLRFASSGCKLIYHEAVDIFTASLSSPEKRLYVAGEIARILCVPYRGETVQPTEKPVIQARHMELQVGRVTLPCCDKPTLIQKGPFADIRRALEILERVACSIKFNEPILLVGETGTGKTTTVQNLAAWLKQPLTVVNLSQQSDISDLLGGFKPTDARSICFPLYMEFKDLFSRSFSAKEVTREDNLFIDVIKLRVQDCVGNITWTKSMWRLYFLIERCYRSREPVLLVGETGGGKTTVCQILSAVLGLKLHILNCHQYTETSDFIGGFCPIRDRSRIAIEFKDLVAKIKQMKMFFYVAGNVPLETDVSGADSVISHLDEILDRYRKKKYLFPEVSAQDLGAMEQIKLDLMHLHKRWQAIFLWQDGPLVQAMKNGDLFLIDEISLADDSVLERLNSVLEPERKLSLAEKGGSVLEKIVAHPNFFILATMNPGGDYGKKELSPALRNRFTEIWVPAVIDVDELRSITFGRFTKTDFSCLGDCIVNFWKWFNQLHIGRTLTIRDLLSWISFINVTEQNLGPEQALIHGLFLILLDGLSLGLNVSKTEATEMRNTCLSFLLEELQKVGGTAVDSYLNDLNNYGWGDNMKKKDIDHGCLEDHFGIAPFYIPKGHFPCKQQDFEIMAPTTSKNVLRVLRGMQLPKPLLLEGSPGVGKTSLIVALAGFSGHDVVRINLSEQTDMMDLLGSDLPAQGGNGMEFSWSDGILLQALKNGSWVLLDELNLAPQSVLEGLNAILDHRAEVFIPELGQTYKCSSSFRVFACQNPSSQGGGRKGLPKSFLNRFTKVYVDELSEEDYLFICKSRYGSLISESFIRNLIHFNSRLYMDTMVYRKYGQQGSPWEFNLRDIIRSCEMIAGSPNPMMDDSFLNTVYLQRMRTLVDRHEVVKLYEDVFKKKISIHQPKMLHVNPHCLVVGSASIRRNNIQSYKVQNNQLNIFPGVLNSLEAAMHCIQQGWLCILIGQNSAGKTSLIRLLAQLSGNTLNELNLSSATDVSELLGCFEQYNFFRHYKTVLSEVEHYVDVYFSLSIDTNQKNFVAERRGLFTKWFEFVAAKGHSSIKTSKLMSGNASLPSLSLLAEIVEQMKCDLEMFDFSIPLTKDDLSETLKSINNLQQNGAAHQPVRFKWVAGDLIRAIERGEWIVLDNANFCNPTVLDRINSLVEQERSIMVNECGLVDGNPVVIKAHPKFRMFLTVNSNYGEVSRAMRNRGVEIFLMDQSWNLKGFSNVPGDSERKDVIRFLISCGIPRMELVSSMCEAHMYAKGEGSRVGVNITLLEITRWVQLFQQLIVKGNQFLWSLHLSWEHTYLPCLGEINGSGIVEEGKNKFLTNFDRSEILARNFSFLTVFDGCSTSLHSGLSLSLPGGWPIEQKLRDLIWYSKETCVMRNCMFLQSLGAQYAAYQISSLNDNSLLLGQISLIHPSILPAASLRELQFPTVNGQPVKICVTGAFNSYLADQMLFFAANWVMEQCTKNDLELYGKWFNWYNSLVQPYCNFFESYWYILEQESEHPIWHNILEYYREIVAYHNIDIVTQHIPLLSKKLLDMAGCDSLKACQNRLHRSFKALGLLRLTLQQWQIETKCPDLSVLECTLLPALKSLRCLEGEVLKTIAKSWKRLKIYSLLLDYHRSIWKMMIASQLEGLPIVWNLLRKEILKLQQKFPVEVDVFLMECVNLNNINDTNFQYGKPTLWDYGGHPHLPSSSEIFDKMQELLSFTTDVWPRKNLLNIELDDRKQLTDAMLSANKDLRHLAMEGVSMACIATMKTEEDVLAVVPQLDEVHKRLVGKVNSVRDNLGLLSKTSVPEFKFCCSVSSEILCNIYGFNGWLASLPLLNLKSLNLDTLLLQQLCKCTQKDSSETHEILVNSEYLLKYAMDYSLGSSSRSPLDYIQHQIIWWICHDWAKVDNAHLKVASCILEMWYNYHSSLWTYCSGSPKCLFSVTHDDSCDLAHLTKMDAINTIIQQDLHVVDYLKSGVMLKVASRNLWEGVSCLGNFVSSLHSAADSLFKQIIFVHKKHFEEENYNQLESLLFQQSRRLIEKEDLDTVCALLSSSSCRVLASLSESDKLVESLLMDLYSSYSRDSLLHTGAAWVRIGELRFRLLLSSYSPDPTFKSRYKHSHILEKITLVKLEEKVRHDCEELAGSNSPEDSHDNELLQLLEIKEKDTRAKVVFRPRQSKHKSLIAACLEFEDRLSECKDLLASLTCEGLGQLEVDRVCNWQIISMNFIKRLTEDYREYVDLIQPIQVAVYEMKLGLAIALSGSLQREYLKKIKEDDINRVLGAIYAFMQFPSGSFTERVVTDVTDDLTNYTITGQLGTLNSCSGDVDMLKKLAAMSSQLNVCKVAGKVKSLSEMLASVHHIFLVRTADCVSCSLVMDKSSYASLKDTFDHFTSMWINMKYRLKAKESDDSQYFKFKSRMISIDDIFKDVPLLSDMESEDSILDNEEKLEHEFFKITESIDDDNGVVEDNWDLIPESALKCIVTIHDQLFGSPDLFEKRRKCQVSDAQKVQSFIESYELGTRILKDLPELTCSMFDEKLMPEHLFRVCLEYQRSCAKTHQDCSGYNAYKDPNPPVLFKMVESLTTLQERVNSYLDEWPDHPGLLKILDLIASLLAMPLSTPISKVLLGLQLLAGKAQTLQENDSKFFVKDHLASIFLLVYSWQRLELDCWPILLEEVQTKYELNAAKLWFPLRALLTQTSGIPVDDDLSIIRSVEEFVQTSSLGEYKRRLHILFAFHGEISAGASLGSYSSNAVKKIQNILYSVFGYYMQFLSLVHGKIEEGKKNIEKELKDHVKLYSWEQAPYSSASIENFKRTRQKIFKLLQRFNDILKSPVIFLLNEEATSRKIPCWLDPQRPESHLPVDSEKFNKRFLWYHKWASETSLSLQTLQQSNGSTVGVPTAKDMVYDVKHWQNEIELNDRLQFFWISLERICGAANFGSTVKHGKKNQKKTALSNLFKTLEECGLSKHRPMSHEWGDELAAPSPLFLEQSYDSAHLLQQINSQKMLEDVSINHSTLLNTDNWKHANQQYFKCLAMMQQLRQVSLKFNKDLGLEEVNKAMSFMSHLLTVLSEQRHLAYNLFDQRNQFKHAIFLLGSGGKSKSLSSSQNVLLSSMWQQKKLFDAVITLITDSNLLLRSFKDCHYNSCNNFIEVEGISSLLGKFILNFSESKELLDECLLGSTNIFAGAYKSMPHSATEMEQLFTDNCQHIDSLLDGYLPGSNNIFPDAYKSIPLATTEMEQLFADNCQLIDSLREDMKVLCHRDLSVGSVKKVLISRLEELLEKGKMAMENRRHVEENHKLCLKLEASYIEILKETFMLVVGAVRKLTDHEVCSNGTEKSPVGNVASWKDTLQTCIMNLKLDDICVAGEKIRILVRLLVDYKPDIRTSIELHLMHLHAWLSVILSSAEGILSELLEAHITTSEMTLALGDLFIHLFTDGFGSTEDTAEDADELQQDAVGSGTGMGEGDGQKSVSSDIDDESQLGDSKDLTCKADPAPKNDDKAVEMQDGFNAQLSDVSEDLEGKDSGGEDEDTLDNQMGDTGDASEVVGKKSWDKDEDDDPKTSIEKYESGSSAKGTQQDDREMRAKDDGSIEEEDPMEMDSEEGKNNNLEHDPSTHDETELNTDEVMDKADAYDDRTGPELPEPENDSIDVDMVEQEQTDEINADNEDIGTEEAEQADQRLDASDDMEEGDMAQHSDGVVDNEGEHVEDANTDAGEMDSHQLDKADSLMPLSQGLQPDNMQINSNGESEANLANSSDMHGAVAPSVNFSGNEVPNMEISMPNTGNDSILSSNSKPDMQNDAQQHIKQTNPFRSIGDALEDWKERARVSADTQDHQPETGKDSSENTTEFRYVPEGEESTSQALGAATADQINYDNQINQSFLEDESCIRNLEHSDERTPDNPEVPYLQTSQALPNKSENANELDGREIQTDASVQNLVERTDHTFQDLVSFKQPPADDKIALIDLTTDRELPSQMDLDITDAETKRSNAVWKNLELATMKLSQELAEQLRLVMEPTLASKLQGDYRTGKRINMKKVIPYIASHFRRDKIWLRRTKPNKRNYQVVIAVDDSRSMSEGKCGKFAIEALVTVCRAMSQLEVGQFAVASFGKKGNVSVLHDFDQIFNSEAGVNVISSLSFEQDNKIEDEPVSDLLTHLNVMLDTAVARARTPSGQNPLQQLILIISDGKFHEKENLRRHVRDVLNRKRMVAYVLLDSPEDSIINLKEACFRVGEKVELKKYMDSFPFPYYVMLQNIEALPRTLADLLRQWFELMQSANE

SEQ ID NO: 65920 - protein, 434 aa, Zea Mays
MRRPTLSLALGLGLGLSLVALFAARGAHASIHEYGGGDFAPRANSFFFHGGSEGLYASDHSSNSSASFIRFDTVVFRRTLESASRHEEMQQKTGLVEAIIVEIQDRGKIGGSYLHSDAICCTPELDKEKSCRVGEVIIRPNPENPDWPKRIQTFFDGKNEETTMVTQIVSINKTGMYYLYFMFCDPQLKGLKITGRTVWRNPQGYLPGKMAPMMTFYGFMSLAYLVLGLLWFIQFVRCWKDILQLHYHITAVIALGMCEMAFWYFEYANFNSTGTRPMGITLWAVTFTAVKKTVSRLLLLVVSMGYGVVLPTLGGITSRVAALGFIYFVASEALELVENLGNINDFSGKTRLFLVLPVAVLDATFIIWIFSSLSRTLEKLQLRRSMAKLELYRKFTNSLAVYDKTVKGNGKQLHHGNERRSKSQVLCRFPSSMW

SEQ ID NO: 65921 - protein, 387 aa, Zea Mays
MAPSPPRRAALLLATVLLLAAAGSTPGATAAGIFQVRRKFTAGVGGGAGANISALRAHDGTRHGRLLAAADLPLGGLGLPTDTGLYYTEIKLGTPPKHYYVQVDTGSDILWVNCITCEQCPHKSGLGLDLTLYDPKASSTGSMVMCDQAFCAATFGGKLPKCGANVPCEYSVTYGDGSSTIGSFVTDALQFDQVTRDGQTQPANASVIFGCGAQQGGDLGSSNQALDGILGFGEANTSMLSQLTTAGKVKKIFAHCLDTIKGGGIFSIGDVVQPKVKTTPLVADKPHYNVNLKTIDVGGTTLQLPAHIFEPGEKKGTIIDSGTTLTYLPELVFKEVMLAVFNKHQDITFHDVQGFLCFQYPGRYGLVVYTVVKVLIITCNSFHAVFH

SEQ ID NO: 65922 - protein, 1261 aa, Zea Mays
MARRPPPSPPPPAQGNGSGSGSLTTRDALAYLKAVKDKFQEKRHTYEQFIQVMRDFKSDRLDSTGVIARVKTIFHGYPDLILGFNAFLPKEHAIRPLDLREDKKPVDYPRAISLVNRIKSRFQQEEHVYKSFLGILNKYRMHNKPIQDVYNEVTALLHGHPDLLEEFSHFLPDTPMPPPQAGTTTKVRHDDNNAIMHSVTRAQTVQVNQQIIESPVFNSKSQTVQRGRDFPSTADWDTSADRLDLEHDIQKSCIEKEKIRDACPRQHRRGYKRNEKNDEYENEDLDVEQCGHKSQRKMEGTGDDTPGDATLSSFNCSHAQEFQFCEKLKAHLEPEAYQEFLKCLHIYNQDIITRNELKRLVKDILQHYPDLVNGFNDFLGHCENIDGFLEGTFNKRQTSRMVRPVEKERYKENEGDSDPEKERYKESKNSERVLTFNSKEGAAHEASTFPSKEKYNLCKPISELDLSNCQRCTPSYRLLPKNYPVPSASNRTDTEASVLNDRWVSVTSGSEDYSFKHMRKNQYEESLFRCEDDMFELDMLLESVTVAIERVEKLVERMEGNSLKPDSSISLDEHLTSLNMRCIERLYGDHGLDVIDVLRKNVGVTLPVILTRLKQKQEEWSRCQSDFNKVWAEVYSKNYHKSLDHRSFYFKQQDTKNLNTKALLSQIKEISEKNRKGDDVLLAIAAGNRWPLVANMSFVYLDMDIHEDLYQIIKYSCGELCNSSDQVNKVMRIWTTFLEPLLGIHHRAHGAEDADMVKSKRRTREVGLACGGKTNNAAAKGGNGSKSAGAESVAEFMGRNETIPSMKSIKHDRITSLYGVGVHPFSAYSVSHNNLRPETEEGELSPNGDFKEEHFCVFEDEAVDGTSKQNEGSTSRSPQGRPKNYLKFSGKDHSGAENEGNKRAQRSAEDSENASEADEDISGSESAGDEESSHEDQEEEEDDMDLDTKAKNDCRAEVNREAQGLDGGTSLSFSECLQSTVKPISKYVSTALPNHEKKLSHIFYGNDSFYVLFRLHQIFYERILSAKTNCSTSDNNWKASRHINSPDQYSRFISALYNLLDGSSDHTKFEDDCRSIIGTQSYVLFTIDKLIYKIVKQLQALASDEMDNQLLQLYLYEKSRSPGSFFDLVYHENARALLHDDNIYRFECHSDPTELTIQLMEYGNEKPELTAVSFDPTFSPYLYNGYLSSIDDTKLVDDVFLRRNKRKQGRNDDSPTSLKIMDNVMFANGLECKISCESSKVSYVLDTEDVLFRTRKRRSSI

SEQ ID NO: 65923 - protein, 106 aa, Zea Mays
MIGAFCFLPHCNISQICAHQARGVFNRPQTMEVLLHLEQHLAVMPHLCTGESTPSLSQQLQLRWISSVSQCCLREDHLGLGRSEVPECSVELYVSEELDSICPCQY

SEQ ID NO: 65924 - protein, 379 aa, Zea Mays
MLMDPPVMQMDCKLKNDVDKTSSIDYDRKVTISHDDYGWAGSDVKPKDDIVCNPVEVSNACQTGINEVLDSASKNSPLNLGDLPQGAELRNKNGDSSYSNVKLQLNSSAGNNNGLQTDDDNFTKQYFGKKDMHHRQEEMHPSSNTVSLPTSCRLNGDATPSEEEKIAEDRVKVDGNVDAVIKEVETDLVGCHAHQKEFQCTLQDLSEIACSIDLVHNTSSPQGENKKPVSPLNGMGHYVDNNSCNGDTNYKGEELNMGDAGDEDHAIALWVKWRGKWQTGIRCCRVDCPLPTLRAKPTHDRKSYVVVFFPRTKTYSWVDMLLVLPIEECPLPLVNGTHRKWRKLVKDLNIPRRFNMQNLAVFMINLIDELHIEAVVDDA

SEQ ID NO: 65925 - protein, 72 aa, Zea Mays
MCWQGARRSRAASWWGPRRGRQGARWSRAVPWCGPRRGRQNHGGSRAAPCWGPRRGRQNRAPPRVWMPTLWS

SEQ ID NO: 65926 - protein, 96 aa, Zea Mays
MAWRGAASRSIIAAVRARAASPSSTAASRLRSTAPLPAPSRRSVPAFAFATARPLAAMSGSPAAAVVKLTGHSATSVRACCELSQGTLFCRTCQDR

SEQ ID NO: 65927 - protein, 312 aa, Zea Mays
MILLLLLARKKHDPFFYSCSFLPFFPRCGVCSRGVKSGGSSAVFTAECSHAFHFPCIAAHARSSSANGVLSCPVCASPWRQAPFLASLRLHCSFHDDKHRGGGDGRKTSPLAKLYDDDEPLLAPKATANGGGFNPIPEADEDDEEQGAASEFRGFFPCPRSRTTSGLAVTVAPEVALVSSGRRHGKYVVAVKVKAPGLRSSSTAPRRASIDLVTVLDVSQGMMGEKLQMLKRGMRLVVASLGPTDRLSIVAFSGAAKRLLPLRRMTRTGQRSARQIVDRLVVCAAAATTATATQGQQSACVGDALRKAHQGA

SEQ ID NO: 65928 - protein, 89 aa, Zea Mays
MGTRLARTTRIGPMVMEGTQLSNPCRPSRSPSQWLCAEVLRAIANSPGSPMVPERRRRQAVGVSSLPRRNRLARLAFLSQRWWLGLVVA

SEQ ID NO: 65929 - protein, 294 aa, Zea Mays
MDGGNSPRPRTSHASGWAGRSRRRKRRAQPRCQRGPPANALSASPRPSLRPPTRNLRAIRNLRPLLTPPTRPPRHPQPSCVLSLLYRALRVEQPPRRKPPPFPIPIPHHALRGRRAPGGSDRRALLLLVRRRRSGEGGSAQAPRRRCPSRVRLAGALLQPHTRRWAGRRGAFAVLTMRGIGLALVHSTGTSTSVENVVSLSKLCSTLQLKTVQSSGTQQITTCLAFCIAHMEEDLRPGTEQYRFIEQCHIGLMKFHNHSGFYKDFSSWVGQRLYLLRQTVLSYAQNYQKQAKML

SEQ ID NO: 65930 - protein, 66 aa, Zea Mays
MVQNWIYNFASSPPPPPKKIKQIPTDVGHCKRIVKSKYPYVENNVVVIAYLTLFVLQLIILMPLKK

SEQ ID NO: 65931 - protein, 103 aa, Zea Mays
MEQTLVAPAPPEQSRPEHHLGGCPSRRPTAGRERTNRGAGGRPCSLIDSVARGSRSILAIMEDGAEARERERTARCQFEDSSSSRLLWLWLTRINRNRNQSTG

SEQ ID NO: 65932 - protein, 278 aa, Zea Mays
MNPEDEAEEDGANIDLDSQRKGKCVVLKTSTRQIQELVEAIVLPMTHKDRFQKLGIRPPKGVLLYGPPGTGKTLMARACAAQTNATFLKLAGPQLVQMFIGDGAKLVRDAFQLAKEKAPCIIFIDEIDAIGTKRFDSEVSGDREVQRTMLELLNQLDGFSSDERIKVIAATNRADILDPALMRSGRLDRKIEFPHPSEEARARILQIHSRKMNVNPDVNFEELARSTDDFNGAQLKAVCVEAGMLALRRDATEVTHEDFNEGIVQVQAKKKSSLNYYA

SEQ ID NO: 65933 - protein, 53 aa, Zea Mays
MVGQPPGPPRPAVVRPTVGHRRAAAARPCGLGARPQPVRAVRQCPLGPRPAAS

SEQ ID NO: 65934 - protein, 211 aa, Zea Mays
MRPMASNGMASAPSPFFPPNFLLQMQQTPSDHEHQEQHHHHHHHKHHLAAPPLHPHHNPFLPSSQCPSLQDFRGMAPIMLGKRPMYGADVQVVGGEEVNGCGGVNEDELSDDGSQAGGEKKRRLNVEQVRTLEKNFELGNKLEPERKLQLARALGLQPRQVAIWFQNRRARWKTKQLEKDYDALKRQLDAVKADNDALLSHNKKLQAEVCV

SEQ ID NO: 65935 - protein, 422 aa, Zea Mays
MASWPAASRRRSSGGMKSAELSGSGASYGYGRTSSSPDACGYGRQFSAYSARSSQVSRSGSFSAAAQRVAGAFTGCFVPRRQVKAGEEEEEEEKKSKRSMDSGSYHGWNEANLSAAAGSWQEGRALTIADVSKATSNFSEKNVIRQGRSSTMYRGKLRDGSQIAVKCVTKLNDQSPTAELWRELEKIQHRNLARLFGFFERAADSLVVVEYVGNGSLREHLDESCGNGLELAQRLNIAIDVAQAITYLHEYKERPIIHGGIRSSGVLLTDALAAKVAGFGLAGTAASGSGSGSDATPARSAAGYVDPEYLITYQLTDKSDVYAFGVLLVESKSCAVQALQKCRAGEAVVAMDPRMRRSPASVAAVERTLALAAQSVAAARDERPSMRRCSELLWTIRRDYHRQEEPRCGAVAAERSDEWVIR

SEQ ID NO: 65936 - protein, 686 aa, Zea Mays
MGIDLNMVDGEGHERRPPPVTCRELWHACAGPVVALPRRGSLVVYLPQGHLAAAGGGDVAADLPPHVVCRVADVELCADAATDEVCARLALVAEGEAFGRNLGGGGVEGDDGMEDFDAERKSGMLHMFCKTLTASDTSTHGGFSVPRRAAEDCFPPLDYNQLRPSQELVAKDLHGAKWKFRHIYRGQPRRHLLTTGWSSFVNKKKLVSGDAVLFLRGDDGELRLGVRRAIQLKNEALFEDFNSDSTKRHSLTAVADSLKNRSVFHISYNPRATASEYIIPYAKFLKSLNHPVCIGARINFQCHNEDVSERRSGVVVRISEIDPMKWPGSKWRSLLVRWEDGAECNGQDRVSPWEIEIAGGSVSVSHSLSASSSKRTKLCPQGNLDVPAMYVTGNGCTDSMETGKLPRVLQGQELMSFRTCHVPCAPQTAEAAKLQSSDASRFLSNAHGCALGGPTSRLAVHSSGFTYQCVGFNESIGFSEVLQGQEISRAVPKFQGMMSEACSLKDRYGLHSYMRAPVAVNGLSATTQECSLALSTPPGAQVPSLYPGNVVNRTVVPQLGLARKFGGGGTNGQQSGPFDRPRELWTRPQHETPDQMNLDQFETRRPSVPVDAAKLGSGGGEVRKTSCRLFGFSLTEKILPADDDDVKEVSYETECQNPRMLDLFGYNCSTPSAALPALCAAAPFGM

SEQ ID NO: 65937 - protein, 195 aa, Zea Mays
MVAEILEKRIAHPQLTYFTYVEKFLPEDDPEDVIALEYNLIGSKQIYEACADGEMRSNDQVYYYTICIANEDKLFRTEAADYRIFLPTNLSFAWVITQAVVGASRRSNAVRLEHERGVTDKLGEVEHDERDGTSTPPVGRSAAPMGMPPGSASPSIMGPIMYLNPISSVTSAAMTTTKEPSDNSDPVGGRLYAMY

SEQ ID NO: 65938 - protein, 308 aa, Zea Mays
MHDVFRGIGHQEPSYPRQIADRWSAAPEKASSGAKAKQPTTIRGTNREQRSSRIESARKKKKKKMKMKMIMIMEQEEEACSSYCSSPLRQCRICYDEEDERRSAMESPCACSGSLKYAHRGCVQRWCDEKGSTVCEICLQNFETGYTVPPKKTQPADVAVTIRDSVAVPRQQNEPEDEEEQVAAALIGASDPEYAECARAAGRSASCCRSVAVTFTIVLLLRHLVTVVTLGAANQQQFAFSLLTVYMLRASGILLPFYVAMRLICVIQQGQRQYRLHLLQEQRRHALRRLVWLQGQGQHQQPHVILVR

SEQ ID NO: 65939 - protein, 750 aa, Zea Mays
MAAAKEKASVCCRDAPARVAGAPVVPMRAIAASPVGKVVALAAGGGERVSASAAGSSGAVIEEIAAVQPTTAKASSKGIPIMTRAQRCHPLDPLSAAEIAVAVATVRVAGRSPEERDSMRFVEAVLLEPEKNVVALADAYFFPPFQPSLLPRSKVELSEVHAATRGGHHRGKVISSEVIPDVQPAMDAMEYAECEATVKSYPPFIEAMKRRGVDDMDLVMVDAWCAGYYSEADAPSRRLGKPLIFCRTESDSPMENGYARPVEGIHVVVDMQNNAVIEFEDRKLVPLPPPDHLRNYTPGETRGGVDRSDVKPLIINQPEGPSFRINGYFVEWQKWNFRIGFTPKEGLVIYSVAYVDGSRGRRPIAHRLSFVEMVVPYGDPSEPHYRKNAFDAGEDGLGKNAHSLKKGCDCLGYIKYFDAHFTNFTGGVETIENCVCLHEEDHGILWKHQDWRTGLAEVRRSRRLTVSFICTVANYEYGFYWHFYQDGKIEAEVKLTGILSLGALMPGESRKYGTTIAPGLYAPVHQHFFVARMDMAVDCKPNEAHNQVVEVNVKVESAGTHNVHNNAFYAEEKLLKSELQAMRDCDPSSARHWIVRNTRTVNRTGQPTGYRLVPGSNCLPLALPEAKFLRRAGFLKHNLWVTQYKRGEMFPGGEFPNQNPRIHEGLPTWVKNDRPLEETDIVLWYVFGLTHIPRLEDWPVMPVEHIGFMLMPHGFFNCSPAVDVPPSSSDADVKEAESPKAIQNSLISKL

SEQ ID NO: 65940 - protein, 347 aa, Zea Mays
MDQLRPEPAAGAHEIEKTAAPDVESEPAAAVPEPERVPPWREQVTARGMVAALLIGFVYTVIVMKLSLTTGLTPTMNVSAALLAFLALRGWTRALGRLGIACRPFTRQENTVVQTCVVACYTIGFGGGFGSFLLGLDKKTYELSGVSTPGNVPGSYREPAIGWMTGFLLAVSFVGLLTLLPLRKVLVIDYKLTYPSGTATAVLINGFHTPQGDKNAKIQVRGFLKYFGISFLWSFFQWFYTAGDHCGFAQFPTFGLQAFNQTFSFDFSLTYVGAGMICSHLVNLSLLFGAVVSWGVMWPLIGKQKGNWYPADASQNSMTGIYGYKVNWPSFALPFSWETVSTTSSKS

SEQ ID NO: 65941 - protein, 400 aa, Zea Mays
MDIERCRIWWPRQELQFKQKPFSPRLILFGWFFSSAGSIDIVISAAVPQVHILHSFATLDTLQTIILSSNKRMPVSLQESAAFTILGDCVRHPPKELEGYCFNKLEQLPLDANFVQKEHFGTRRNNVMIGSVGNGDQGPSYDHRRWGCDCCVLDGFLEVCRKSAVKEGSWVHLYWKFGENFKSNLNQVPVLHHLYLDGQQIENNRCHVILYEVPTIGRNHFSLGLDAPRTLNVSFKKPNWINDLQKQPSFLDLDSIVLALNCSNAARLPDTQECSTTCSGAYFIFASVYDVLVQVTWHCVGIFLASSSTILYIMILMSRKCLSHMPQYLMLNKVFRHSWNNIHLRSCQILYWPIVFQDASLSILIKYRDYLYLDYCSRPPHDRSNLEIRLCVADGCSSWI

SEQ ID NO: 65942 - protein, 266 aa, Zea Mays
MAASLSLVATTCSAAATSSRAWTQLAVAFFDVTVTISKQTVNNNPHRTRSILSSKAPAGQLSARHADIRHRRHSPAALRPVREECVSHVQFLAGLPLLEARSARRYLVLCCGTASCMGTKVLSTLDGIQRHKQDPCLRTLREKLEIALLLINLDGISTNRIYVTSQGAHARSGRKKESRTSDVHIIPAGLGEAAAALTRQEYHLTPKDGNLQSQQLLLNGNVLATDADGEIPELEPVQVEGTQPITVGPYSIVFAHVPSFYAPACL

SEQ ID NO: 65943 - protein, 85 aa, Zea Mays
MTRWSSSVSPISRRLATRPLIRNAKSPTLSPSRKPTFSYSFHKRCTLAAFTRSSPILIDLTASHASFAVFFTASPAFISGGTARR

SEQ ID NO: 65944 - protein, 195 aa, Zea Mays
MEGRRLSRRQLRSLPDAASFSPEVAASPGLVGSGQLGLGLSAAFETLPPGKGRAFCAGGDVAAVVRSIHKDSWKYGADFFRNEFLLNYIIATYTKPQVSLLSGIVMGGGAGVSLHGRFRVATDNTVFAMPETALGLFPDIGASYFLSRLPGFYGEYVGLAGARLDGGEMLACGLATHFVQSNCVVSSINLLNNHH

SEQ ID NO: 65945 - protein, 723 aa, Zea Mays
MTTMSDDGDRTCPLCAEEMDITDQQLKPCKCGYDICVWCWHHIIDMAEKEETVGRCPACRTCYDKDRIVKMAATCDRTVAEKNAEKKHRTQKVKPKAAPSAAATSTVESKKHLASVRVIQRNLVYIIGLPAHLCNESVLECREYFGQYGKILKVSVSRPTGPPSQQASANSNISVYITYAKEEEAIRCIQAVHNFVLEGKVLRACFGTTKYCHAWLRNMTCGNPDCLYLHDVGSQEDSFTKDEIISAYTRTRVPQMASGVSQRRTGTVLPPPGDDFSYSAVVSAKHTFKNGTLNTTSQPRLSPPNSSSGRSTLPSAASWGQRDLNARTTATGATSSQSHTKPKSESQSNPFSSSSVFSCTKTPSSWNDDTSTAAKISEGQQLSEKESRTLQPYKPGISKETQALSSLESSLDIDFSTIPSAWNDDDIVVPDVMPKGSDENQVANKNGELTHPASKSLVLSKKDIKMNITSKTPSDFVSSPAISKSDVSTSDGDHSLTNITPKCLASNAVECQSSHTAVEKMLEDIGSKDTDMEKLSAQISSVTLGGNDEIQSMAGNQQPDVMPCTSVDVLMDQNFGRDLAHPNPDELLLPSENKDSIVSCQYSSDKRLDWSLEMQNCSVTPLNDRMDSALLTDKIHSRQLDGSEQSSYSSFVEFPSTVDTSLWNDTENNAALTIDNITSSQMQPGFSSTDNTYALLNGGQDGLVCYPRILEEIFTRMALHSNL

SEQ ID NO: 65946 - protein, 163 aa, Zea Mays
MGTHWNSKVCGGDILILVRVHLYFVLCMVTLRGDFAWYKALNTKTGMKLRFQGPSSLVCSMAITNEMLFAGTGDGRIMAWRFPAKDSNTEPVLILSGHQRPVISLSILARRLYSGSLDKSIKAWDLTTRQCVQTLSEHKASVTSVLCWDEKLLSCSLDKTVKL

SEQ ID NO: 65947 - protein, 917 aa, Zea Mays
MIAEKPNWIRHEGLQIFSIDIQPGGLRFATGGGDQKVRIWSMKSVDKNNNHNDSSQGLLATMRDHFGSVNCVRWARHGRYLASGSDDQVILIHERKAGSGTSEFGSGEPPDVENWKVIMTLRGHTADVVDLNWSPDDSTLASGSLDNTVHIWNITNGMCTAVLRGHSSLVKGVTWDPIGSFIASQSDDKTVIIWRTSDWSLAHKTEGHWEKSLGSTFFRRLAWSPCGHFITTTHGFQKPRHSAPVLERGEWSATFDFLGHNAPIVVVKFNNSMFRKSFSNGQDTKAAPAGWANGTSKISSKEQQPYNVIAIGSQDRTITVWTTASARPLFVAKHFFSQSVVDLSWSPDGYSLFACSLDGSVANFHFEAKELGYKLSDSDLDELKRSRYGDVRGRQSNLAESPAQLLLEEASAKQSASKKGTPIVQQFQAPQKLSADVLNPAPVVQNQKAPEALPEDEKKSSDPAADGMNKVTRLSSPVKQREYRRPDGRKRIIPEAVGFPSNQDNIPSRSQNHVIDFSSLDQRMNGIRPSYCSSSNCNNSGVKDCSGVTARANITESLVIQKASTNASSDGRLTVERTGSVVPGSLNCPALSIHVLDKKDNEDSLPVCLEANPVEHAAGDMNGVGGAFSTKGTEIRCTRGTETLWLDRISAKVTALAGNTNFWAVGCEDGYLQDSLAALVASPDESSANHAGAVKVISAKFSRCGFPLVVLASRHAFLFDMSMKCWLRIADDCFPASNFASSFIFPQAGELGKLQIDVGKFMARKPIWSRVTDDGLQTRAHLETQLAASLALKSPQEYRQCLLSYIRFLAREADESRLREVCESFLGPPMGMLGSESSTDPKSPAWDSDVLGMKKHQLLREDILPSMASNRKVQRLLNEFMDLLSEYEAAKSKVDPMDITPALPQQAPEANANVVTS

SEQ ID NO: 65948 - protein, 232 aa, Zea Mays
MCTRGHWRPSEDEKLKELVALYGPHNWNAIAEKLQGRSGKSCRLRWFNQLDPRINRSPFSEEEEELLLASHRVHGNRWAVIARLFPGRTDNAVKNHWHVIMARRCRERMRLSNRRAGGAAAAGAGAVVVATGAAAEDGSNPRSANKKPRPDASGMASLLDKYRREFSAVPFAINHDSNQQQGYCSNTNEDANKSVEFYDFLQVNANSSDTKCGSSIEEQEAESRDDDQAEGL

SEQ ID NO: 65949 - protein, 314 aa, Zea Mays
MPDPTTKPPSPRPRRRRRLCGLCLGTALLALLVAALVHVVAPLPRAASASARFSVIIDGGSTGTRAHVFVTGHDGSPDLALSTVMRVSPGLSSFAADPARAGESLKPLIDFARDKIDGAGSAAGEAEVRLMATAGLRLLEERTQEAILASCRDVLRASGFRFEDAWAKVIPGSDEGIYAWVAANYALGRLGGDPNRTVGIIELGGASAQLAFVSDEVLPPKLSYNYTFIETTYTLYTNSFLNFGQNAAQDSFHEMLRSRGIYLDLNVPSSINIATPYFSTLVSFVFETLWCPVPVSLGRIQYLMYKGTKGVFDF

SEQ ID NO: 65950 - protein, 590 aa, Zea Mays
MARRHGWQLPAHTLQVVAITVYSVLCIAFYAFFSPFLGKDLYQYIAVGIYSFLALSVLILYVRCTAIDPADSGILISMDDILIYKSEAHVDTQDEAGKPGLRNDEDIRKHKSCFGRVCFCCAIFTTGDCRGGDEANHQEDYGEEALFCTLCNAEVRKHSKHCRSCDKCVDGFDHHCRLAAECGVGIAVFVRCFTDKTVIEDQIGEKLGYGLSRAPFATIVALATALSMLASVPLGELFFFHMILIRKGITTYEYVVAMRAQSEPPGPSVNDDQQSLASSPMSSAPTAFSGSSFARHYKGAWCTPPRIFIDQDEIIPHLEPGRVPSTVDPDTTDPMERTKTHPKRPVRISAWKLAKLDSNEAMKAAAKARASSSVLKPINTRNQYEADSDSLSSRNSVISADTGHHRYPRSCGNSQYKPSYPPSRASADDIELYPQTPSSFQSNSRTSTPIAEHHPSKHFNPIYQTSANRSPFSAKASVSEAPVSEITNAGRSYPPPQADRSSRSSVYWDQEAGRFVSAQANQGSSSRPAYPDLLYTGQNIFFGGPLIADPAARSFRDPGGSSQRSAGPRSHQLPVFVPSDPQKDQLSRLP

SEQ ID NO: 65951 - protein, 568 aa, Zea Mays
MMFYHLVAELVLIRMQFLFSFDAAEELKDSIANKNHELVLVQGMNLVDEIWGDARPNPPKEPTRVHDIKYAGIDVPSKLSFIRSQLAENGCDAVVISMLDEVAWLLNMRGSDVPHSPVFYSYLIVEVSTATLFVDNSKVSKDVLEHLEQAGVKLKPYEAIISEVERKKILRQFNRENIIFAMLLLIKTLIALSRLAEKGAKLWLDSSSVNAAIITAFKSSCDMKKKGKAGEEVGEKEASSNDRITGDPSVHNGVISAVYNVSPVALAKSVKNDAEIEGMKNSHLRDAAALAEFWCWLEEEICKSVPLTEVQIAEKLLEFRQKQDGFIETSFDTISGYGANGAIIHYRPTPESCSSVGSDNLFLLDSGAQYIDGTTDITRTVHFGEASPRQKECFTRVLQGHIALDQAVFPERTPGFVLDVLARSSLWKIGLDYRHGTGHGVGAALNVHEGPQSISYRYGNLTALQKGMIVSNEPGYYEDNSFGIRIENLLLVKELNLANSFGGISYLGFEKLTFVPIQSKLIESSLMSPSEINWVNDYHEEVWEKVSPLLSGHSRDWLWKNTRPLLDV

SEQ ID NO: 65952 - protein, 182 aa, Zea Mays
MRKILNETKELQQITNDKQKNQVVRIQHFTFIFAEDVNKQNRQAAQTMEMMYTIIADEFKSMDNKDMRPEDYLNFFCLGNREEPPSNGSPESEKSTYKSAEIDIEFMKKKLEDLDKPMKRRNDKLLKIEHELCERITELEMQIDPAQCRGDWRLNLEVLLKDVTLSQRTIGSQMKIVKNKHA

SEQ ID NO: 65953 - protein, 202 aa, Zea Mays
MKFGKSLSGQIVETLPEWRDKFLSYKDLKKRLKLIGAGNGAERQPKRARRDDSGEADAAAAAAAMTPEEAEFMQLLEAELDKFNSFFVEKEEEYIIRQKELQDRVARAAGRESKEELMRVRKEIVDFHGEMVLLENYSALNYTAAGGSFLPQQPPAASNLYSRRPGRLIPHPSLPGRLPSQPPAIPPAAPPHLSAAAGAQIR

SEQ ID NO: 65954 - protein, 610 aa, Zea Mays
MSDRAFQNLKTLLDQAVKPNPRSPVSRPPRQSPPCSCCRQWRWCRLSSVLTPPHPSGSAGPTPSDLAVSAPRAGRSRQGEPDATPRRATMPLPLAKARRGSSPQPSPQPARSSCRSQLEQDVKRLRKALQDETALHAVLEGALGRAAVTLADMAYLPTNAQELLSTICILETAVTKLEEEMVSLHFQLTQERNERRLVEYRLKHLPPPPSACSCHSGKLGPDDPTGEKCSSQTEEVYPRAVLHEQAVKLQRQISVKSFVDPNQLSEDIVRCMRNIFISLSDSCRDSSRNSNMENQQSIPSPTGNYSISAFWTLSEPSSISSWVQSPQVDLNYNNNVLASETVFDPYKAREKLSWADIGSYGAAAEVSWMSVGKKQLEYAAESLRKFRLFIEQLAEINPIHLSDDARLAFWINLYNALMMHAYLAYGVPRSDMKLFSLMQKAAYTIGGHSFSAAFIEYVILKMKPPSHRPQMKIKVPEEQKKFCIAAPEPLLTFALSCGMYSSPGVKIYTANNVREELQDAQRDFIRASVGVSRKGKLLAPKILHCFARGFVDDNSFPIWISHFLPQQQATFVDHCVSQRRQSLLGTRTFGVVPFDSRFRYLFLPDAGSLN

SEQ ID NO: 65955 - protein, 645 aa, Zea Mays
MSPIMALQASSSSPSAFRAVPATANASCRRQFQVRAQVAGGSSSSSIGADGGKMMVSKEPAAAATSSGPWKIDFSGEKPPTPLLDTVNYPLHMKNLSILELEQLAAELRAEVVHTVSKTGGHLSSSLGVVELSVALHHVFDTPEDKIIWDVGHQAYPHKILTGRRSRMHTIRQTSGLAGFPKRDESAHDAFGVGHSSTSISAALGMAVARDLLGRKNHVISVIGDGAMTAGQAYEAMNNSGYLDANMIVVLNDNKQVSLPTATLDGPSKPVGALSRALTKLQSSTKFRRLREAAKSVTKQIGGPTHEVAAKVDEYARGMISASGSSLFEELGLYYIGPVDGHCVVAIHAAMGGGTGLNYFQKRFPERCFDVGIAEQHAVTFAAGLAAEGLKPFCAIYSSFLQRGYDQVVHDVDLQRLPVRFALDRAGLVGADGPTHCGAFDVAYMACLPNMVVMAPADEAELMHMVATAAAIDDRPSCFRFPRGNGVGAALPPGNKGVALEVGRGRVLVGGGTRVALLGYGAMVQACLKAAEALKEHDVYVTVADARFCKPLDTALIRELAAEHEVLITAEEGSIGGFGSHVAHYLSLTGLLDGPLKLRSMFLPDRYIDHGAPQDQIEEAGLTPRHIAATVLSLLGRPLEAMQLK

SEQ ID NO: 65956 - protein, 711 aa, Zea Mays
MASKVRFTVGSQVWVEDAEVAWIDGLVEEVQGDELIINCTSGKKVTANVSSVYPKDAEAKRCGVEDMTRLAYLNEPGVLQNLKSRYGMNEIYTYTGNILIAVNPFQRLPHLYNNHMMGIYKGAEFGELSPHPFAIADHAYRLMMNCGKSQAILVSGESGAGKTESTKSLMQYLAFMGGKAQSGGRSVQQQVLESNPVLEAFGNAKTVRNNNSSRFGKFVEIQFDKNGKISGAAIRTYLLERSRVCQISDPERNYHCFYMLCNAPAEDRERYKLGDAASFHYLNQSSCIKLDAMDDASEYIITRRAMDIVGISSDEQDAIFRVVAAILHLGNVEFSEGSEADSSVPKDDKSQFHLRTAAELFMCDEKALEESLCKRVMVTRGESIVKNLDARAAALSRDALARIVYSRLFDWLVTKINTSIGQDLSSKLLIGVLDIYGFESFKTNSFEQFCINLTNEKLQQHFNQHVFKMEQEEYTKEEIDWSYIQFVDNQEILDLIEKKPGGIIALLDETCMLRNSTHEIFAEKLYQKFKGNLHFSRPKFSRSDFTIHHYAGNVTYQTDLFLDKNIDYAVNEHQVLLHASRCSFVSSLFPHEVSAKSTKFTSIGSSFKQQLQALLETLSATEPHYIRCIKPNNVLKPAIFENSNVLQQLRCGGVLEAIRISCLGYPTRRRFDEFVDRFGVLLPEVLGESYDEVTATNMLLDKVNLTGYQGK

SEQ ID NO: 65957 - protein, 790 aa, Zea Mays
MHCVRCQFFQDICSQLENDFRKSLETEVTDDHEEDAIRPLPWYPGNLAWHLNFSRMQLRRNQALESFHEFLKRENEVGNITRQEAVSMVPPLFLNVQPDHHILDMCAAPGSKTFQLLEMIHQSTKPGLLPNALVVANDVDVQRCNLLIHQTKRMCTANLIVTNHEAQNFPGCNLAKFCSKMCMDEAKVQRLEFDRVLCDVPCSGDGTVRKAPDMWRKWNAGMGNGLHHLQVEIAMRGMSLLKVGGRMVYSTCSMNPVENEGVVAEILRRCGDSVELLDVSNELPELARRPGLSTWKVRDRGSWFGVHEDVPRYRKHVISASMFPSGKGSKDSGTGSSSVEVNTDVADADMKDSTDMGEGEQETTVTIDDSNNGDNLKTEEGTKVDCESGEVTTSSSYKKLNSTSIRTEHSDYPLHRCMRIVPHDQNSGAFFIAVLHKLSPLNENQVVDGVRIDQNISKDKTEKLEKDLVSHKASSEENTVHQQVIDNANVLDGEQNRDRDNKSSEDKSSEDSKVNVNEAAKGQAGTRDRRRQQNQGRWRGVDPVIFFKDEVTVKSIVSFYGITDSFPLEGHLVTRNPDTSHVKRIYYVSKSVQDVLELNIKIGERLKITSLGLKIFERQSSKEGSPCTFRLSSEGLPLLLPYITKQILYASAIDFQHLLQYRTIKFPDFVDAKFGEEASALLPGCCVVVLREGHQDIGSIATDPSAIAIVCWKGKTNLCVMVSPLDGKELLERISLRHGLKIPKGDKEKPSQEIAGSDELLDCATEVDDQESLPESKASDIEISDAKEAE

SEQ ID NO: 65958 - protein, 60 aa, Zea Mays
MTDRAVNCVQVNSSVYLILATATGRQYYYHIIQDYMYSQARGVWFTAVGVGMGIGPAVIG

SEQ ID NO: 65959 - protein, 645 aa, Zea Mays
MDPEKQNEMSLIDKRELVYEVARWPQGAMEILRCWTRRELLELICVELGKERKYTNVPKAKMIAYLLKLVSRNSGKNGQLKNDNPNVMLLGQDNKDEIQMKESDEQSRPLKTANSDSSISREACAGSSVVCSNVACQATPNAGDKYCKRCSCCICNKYDDNKDPSLWLVCSSDNPYSGCSCGVSCHLNCALKNKRAGIVKNGCNKLDCSFYCVSCGKINWLMRCLQKQLAIAREARRVDVLCERLSLSHKIIQGSERYKEIASIISSAVKTLEIEVGSALDQVSVITGRGIVNRLTCGAEVQKLCSSTLEIVDSKVDNILEFESNNSPKLLGPQPQILFHEITPFSVVIVLNYQHDIGKEQIDGSKIWHRSARVCNYSSEPTCHILRPNTRSLVSGLSPSTEYFFKVLPFSSTHGFTEWETKCSTRSLDHGSSQCSTQNSESMCLKDDSMQHHKKDLNVQNHQRTIQYDSPKGSTNSSENNLSCDRYSKRAKVARLDGASDNDESQLPPTSEVLPFASSNSSPSEAPSKPDLLIGTPDSASKNYVEQQYEYCVRVVRWLEHEGHMDNDFRVKFLTWFSLKATTQDRRIVGAFVDVLIGDPASLVGQLVDAFKDAICIKEKPSQAQQKDACCKTDWEGGYFPVTLH

SEQ ID NO: 65960 - protein, 108 aa, Zea Mays
MAAMANTSRLPTPCSLPTISIGAKSRRLAVAAVRCGPGGSRSHRRSLGVLLCRSSSTAGAQGSTRMEDYNTAMKRMMRNPYEYHHDLGAKNLAFSTSGDRPWILIQTH

SEQ ID NO: 65961 - protein, 53 aa, Zea Mays
MVGAGGVGLRAAIGLAKSGGERPRQAGHRAAIAEPGGLAEPGDLAEPGGLAEL

SEQ ID NO: 65962 - protein, 259 aa, Zea Mays
MVASVSCLPMTECFRLKQYHNSRETAVQQPQVMWGVVGKTTLVWHWLRQKLVSGCHWLWEEQRKTNCWLHSVLLRHDIVGFRFVAFGGKLEMWQLWLYASWRNRRYKHTHFVFFFVELLCSVFAAESRSNVVVVVLLLLATRMWIAAFVVLECLPRKVGGGRERERGVLLSSRLVYLCVLFSLASSDGMALHVSFLEKRLPRPFLGDVDAPPAPVTATAHWDQPRGRRTTCTPGRSRPYRGLACRSSSIRASLYLGINR

SEQ ID NO: 65963 - protein, 619 aa, Zea Mays
MDYDFGGTSPDPYGGGSIHLVCDHCGTSDNYTTDDADDGQFTCRTCSAVHTTQATAADPHDFPATGNISVRRVATQPTPKLGARTPAPYLRTPQAAPVPATAAFDDFTELSEPRDFVSGSGTCGEPEDLAVQVRWRYVRGLQVILQRQLEVLVERHQVLEDHKAVGRQKCYDDKKPDEMKYEWDDDMSLQRKDRHKLEFAFLRSLRMMLPVYSTLAVCFLACHIAREAILPSDIYRWAMEGNIPYVAAFTEVDRFLGSSFQDCPLDARQLFRPVRVIGAWQLEAAAGSIAQRVALRLPSVNFYAIAQRCLKDLLLPIDRILPHACQIYEWAMPAELWLSSNPARVPTRVCVMAILIVALRLLYNINGQGIWEKICEEGRNPSESHYDANSSTSRKLEASNSEEFGTRELLCAISVAYDKINTSHDYSSDLRSYLKYCKEVVFAGITSSDEQTHLIEIFWDMYKAREDDNIEDHVKSQSHSMADIPITNGVRKHYRDGAFVKASSFSASSGHDAMQMLKSEMQDHGFHYMPPRKPRKSDGYLRYRRRRLSGGFIFVAHADYYLLLRAFAKLAEIDIRIMHISVLKLEKRLACIEERIERSLNTLHNFSTGTVDELRSVSD

SEQ ID NO: 65964 - protein, 241 aa, Zea Mays
MVSNNLNLRTMGNAMMEKFNKYWEEKNNVMVIATILDPRYKMRFIEWCFNKIFDEHQVLFELEDVRSELEKLYGDFEVQHRERKESQSKSNASSSLSIERSCSLPSASCQFQSFLSSTQSNPSKSELLIYLEETNVCLSDKEFDLLNWWKVNSHRFPVVSRMAKKFLTIPATSVSSESTFSTGGRTLDDYRSSLRPSMVEALVCSSSWIRGTHDGSMIYVEEDDEDNVENILFPKSLVESN

SEQ ID NO: 65965 - protein, 117 aa, Zea Mays
MRQRILENIVKYGLFLVNLVQNFHELSISLCCKNKKIWCYWCMQCAVAKERKLCSVNVIEREFAILLSVKPENHNITIGFVCFLCTQKRLVRAVERVLHYVYSDLLGVLCSLPWLKK

SEQ ID NO: 65966 - protein, 599 aa, Zea Mays
MDAGRDGDGAGKAPPKGPADATTVPPAPVAASAPGSSAGTSGSGEKPVKRVMKTPYQLEVLEYTYAVEHYPSEAKRLELSAKIGLSDRQLQMWFCHRRLKDRKPPSKRQRRDEESALAPVMPPPPVLPAPVMPVASSDLMVGAPGPYDKLLQPVHLRRGAGRSSAVPRISMPDLGRRYYEPPPVMITPLMQLTQYELRVINSVESQLGEPLREDGPALGINFDPLPPGAFGAPIVPEQQKQPVQSYDTDIFSRHDQKLLKASAFLPTIESPFVPNSFTGKRKSTVGNSPVVQPHVGSRAVHEYQFLPEQPSDTYERASPHYYDTPVEASNSRIPSLTSGSQLLHGSEEAAPSYAFQGHTSGSSLLPPSSRPQVFPVAPTDYEMTQFNSNLSSVPVEGQFDTSQVAAFEDPPVSSERRAYHDEDTSRVERKRKHNEEAKIAKEVEAHERRIRKELEKQDFLNRKREEQRHKEMERLERERRKEEERLLRERQREEERFQREQRRENERMEKFLQKQSRREEKQRQKEQLRKEKEAARQKAANERAAARRIARDYMELVEDERLELMELAAQNKGLPSMLYLDSDTLQQLDSFREVIFHFK

SEQ ID NO: 65967 - protein, 170 aa, Zea Mays
MVLPLVKLGSLAFRTLSKPIAARLKYNAGIHPKFRGLIIGIAQANHRFTTNMQRRLYGRATDIHIRPLNEEKAIQAAADLLGELFVFSVAGAAIIYEVQRSARSEARKEEARRLEIEKREEQLALEVQIMKHKISEMERQYSKWTLPGLRGFGTAQAAAQPAGTQHPTAA

SEQ ID NO: 65968 - protein, 64 aa, Zea Mays
MSFSFQTVNAALDLIKCGTAKEADLDLVLVEVNLNNMALDTSANSDLFHHILNELQAPLIAMCS

SEQ ID NO: 65969 - protein, 1149 aa, Zea Mays
MLRARFKSIPEAFSQCNAIKQREQAFEHRSFFRVWNSFINSLREEDFISDREKDMLMAPSYSSNLSIIQWPPFLLASKVPAAVHMAMNSKEGDEHELIEKIKLDGDRYDAVIECYKSLMIILNSLLLDTNDQNIVNDIDKKVTYSMIKKTFLEDFEMAEIGKKSEPINDVGERKIVNALQDFMEITTRDFMKDGQSFKDEDERNQRFMNLNMNMIKEDYWREKFVRLHLLLTMKDSAMDVPINLDARRRITFFANSLFMKMPRAPRVHDMISFSVLTPYYNEEVLYSSHDLNRKNEDGISILFYLQKIYPDEWNNFLERIGVESNNEVSIKGRMDDIRLWASYRGQTLARTVRGMMYYRRALELQCYEDMINDQGYGLADLDTAKAARSKAIADIKFTYVVSCQLYGVHKTSKDSRERGLYENILNLMLTYPALRIAYIDEKEVQLRNGKIEKQYYSVLVKGDDEEIYRIRLPGKPTEVGEGKPNNQNHAIIFTRGEALQAIDMNQDNYLEEAFKMRNLLEEFLLTHGKSEPTILGVREHIFTGSVSSLAWFMSSQETSFVTIGQRVLANPLKVRFHYGHPDVFDRLFHLTRGGISKASKIINLSEDIFAGFNSTLRRGNVTHHEYIQLGKGRDVGMNQISNFEAKVANGNGEQTLCRDIYRLGHRFDFYRMLSLYFTTVGFYFNSMVAVLTVYVFLYGRLYLVLSGLEKSILQDPNIQNIKPFENALATQSVFQLGMLLVLPMMMEIGLEKGFGRALAEFVIMQLQLASVFFTFHLGTKTHYYGRTILHGGAKYRATGRGFVVRHAKFAENYRMYSRSHFVKALELLILLVVYLAYGSSYRSSSLYLYVTVSIWFLVFCWLFAPFVFNPSCFEWHKTVDDWNDWWKWMGNRGGIGLAPEQSWEAWWVSEHDHLRNATIRSLLLEFILSLRFLIYQYGIVYHLHIVHGNKSFLVYALSWLVIAVALVSLKVVSMGREKFVTRIQLVFRILKGIVFLVLIGLLVLLFVGFDLAVSDVGASILAFIPTGWFILLVAQLCGPLFRRLIIEPLHLLCCPYGTGGACRGPCCARFRQRTGAALRKMGPWDSIQEMARMYEYTMGLLIFLPIAVLSWFPFVSEFQTRLLFNQAFSRGLQISRILAGQNGSGTKSD

SEQ ID NO: 65970 - protein, 954 aa, Zea Mays
MALALQWPLQFPLQLQARPPAVTAGHHRRRHRVLAVCRSPPLPARCCASAAAAADTGKAQTAARRAYPFDEIEPRWQRHWEEHRTFRTLDIGEGLDTSKPKCYILDMFPYPSGAGLHVGHPLGYTATDILSRFKRMKGFNVLHPMGWDAFGLPAEQYAIQTGTHPKITTERNIERFRTQLKSLGFSYDWDREISTTEPGYYKWTQWIFLQLLKRGLAYQAEVPVNWCPALGTVLANEEVVDGVSERGGYPVIRKPMRQWMLRITSYADRLLEDLNDLDWPESIKEMQRNWIGRSKGAELIFSAVDQEGHDLGATLLVYTTRPDTIFGATYLVVAPEHVLLSSLTSEEQRAHVEEYRELSARKSELERTELQKEKTGVFSGSYAKNPATGEIIPIWVADYVLGSYGTGAIMAVPAHDSRDHEFAVKYELPIIKVVSPPNGNCDPVEAYEDDGIMINSSSSSSGLNINGMLSQDAAKKVTEWIENNGFGKKKVNYKLRDWLFARQRYWGEPFPVSYLDDTNEMVPLTEDDLPLTLPELDDFTPTGTGEPPLTKATNWVRTIDPSSGKPARRETSTMPQWAGSCWYYLRFMDPKNCSILVDKAKERYWGPVDIYVGGAEHSVLHLLYARFWHKVLYDMGVVSTKEPFKCLINQGLILGEIEYTAYRDNEGRWVSADSDSSLIDCYQEKVAPDKVTKVGDHYVLKDNPNIRLNARAYKMSKSRGNVINPDDVVSEYGADSLRLYEMFMGPLRDSKTWSTGGIEGVHRFLGRTWRLIVGPQLSDGSYNDGTMTTEDEPTLDQLRVLHRCIARVTEEIQETRFNTAISAMMEFVNAAYKWETQPKSVIESFVLLLSPFAPHLAEELWFRLGHPQSLAYEQFPEAKSEYLEESKLVLPVQINGKTRGTILVDKACSEDDVFQIAASDEKLSKYLDGKGIRKKIYVPGRILNVILDQQKSRT

SEQ ID NO: 65971 - protein, 236 aa, Zea Mays
MRSRPASMAAGPTPSAAAASLRPPPPCFDYRAAVLADTRAAAAGNPALAGLIESGALVRVPRRRFGPVPAWRPPDFVEPEDVWILGTSHLSRDSVADVERVLRAVQPDNVVVELCRSRAGIMYASSDSSDEPLLKSNMFSLGGSKFFGAVSRSINLGGQSALALRLLLAVFSSKIASSANRPFGEEFRAARRVSEDIGAQLVLGDRPIEITVCGLLSTQWFSSIADLCTELALLTL

SEQ ID NO: 65972 - protein, 747 aa, Zea Mays
MFEVRILLYDYMRSSICRVITILGNKVSSLTIKDVTRNCSLPSTHVYSGRLTDKIPLGKIERSVQAVEAALKKLENGGSVNDAKAVCEPEVLRQLARWHSKLRVYISPFIHGTRYSSFGRHFTKVEKLVEIVDRLHWYVETGDMIVDFCCGANDFSRLMKEKLDKVQKKCHFKNYDLIQPQNRFCFEKRDWMTVQPNELPHGSQLIMGLNPPFGVKASLANKFIDKALTFKPKLIVLIVPKETKRLDQRRTPYDLIWEDSECLSGKSFYLPGSVDLNDKIVEGWNASAPPLYLWSHPGWTKKHMQVAEEHGHTCMGKIACHVEESNLSDDLSVRKQSDATNKLNSRSGKETPFNDRMSNLLDDGSARKQARSEEEKRTLGKIEHHVKKANIPDNLPVKKEPEASSKVMSHSGKDRKIGRYNRRRHDNRSSKGTPDHTESLPPEKQVEVAYEETRVIPSKKIAHNEKKSAQYNYEQTAAGMPNMRSRGGDSDMSISPPVSCNARSKPMSYSLTRPIEHLDTNAHLLAEEPSDSVLNRVPNHDSYLAIKEEYCDGFKRKNDPIFSHIDDSSRMRGSSIEEVTKPYITAPNSDPWSKGDGSFYRHPSSEDLNANADVLMPGYSARYGQIGGDSNPQASMVPLATDSRLHGGTVADNYLSARYSLGSSGARVSQPAPTVPPFGLSGASSQRGSVMDRYSYGLSGPTGTQRSVIDRYAPSLDGTNTTRSRSSLPEQYPFGQPGSSGGGWPHH

SEQ ID NO: 65973 - protein, 722 aa, Zea Mays
MNDFRKLFSFNSTRLQMPRTTTPQGLLIYNGLVESEALIDSSSCSSRTAMEINPADEIDKCEAGGGAEPQPADPEPDAAAAVEQQQPWREQLTARGLVAAALIGSMYTVVVMKLNLTTGFVPTMNVSAALLAFLALRGWTGALSRLGVAGARPFTRQENTVVQTCAVACYSLALCGFGSFMLGLNRRTYEAAGVNTPGNVPGSVKEPGFGWIAGFLVASSFGGLLTLIPLRKALVIDYKLTYPSGTATAVLINGFHTPQGDKNAEKQVRAFLKYFGISFLWSFFQWFYTGGNACGFAQFPTFGLKAWKHSFFFDFSMTYVGAGMICPHLVNLSALLGAVLSWGILWPLISRRKGYWYPADVPESSMTSLYGYKSFVCIALIMGDGIYHLVKVLGVTAKSLHERSKLRRSNNRVADEDNAAAIDSLRRDEVFNRDSIPAWLAYAGYAVTSAVAAVAIPAMFRQVRWYYVVAAYALAPVLGFSNSYGAGLTDINMGYSYGQLALFVLAAWAGRDDGVVAGLVGCGLVKQLVLISADLMHDFKTAHLTLTSPRSMLAAQAVGAAMGCVVTPLTFLLFYRAFDVGNPDGYWKAPFALIYRNMALLGAQGFSALPTHCLPLSAGFFALAVLANVMKDVLPPRYARYVPLPTAMAVPFLVGASFAIDMVVGTVVVFAWHWIDGNETTLLVPAVASGLICGDGVWTFPSSLLSLAKIKPPICLKFTPGS

SEQ ID NO: 65974 - protein, 392 aa, Zea Mays
MEHLLVGCVFTRLCKGGELLDRILARGGKYSEEDAKVVIHQILSVASFCHLQGVVHRDLKPENFLFMSKDENSALKVIDFGLSDFVKPDGRLNDIVGSAYYVAPEVLHRSYGTEADMWSIGVIAYILLCGSRPFWARTESGIFRAVLKADPSFDEIPWPTLSAEAKDFVRRLLNKDYRKRMTAAQALCHPWIRGTQEVKIYLDMIIYRLMRAYISSSSLRKSALRVTFALAKALTTDQLFYLREQFTLLDPNKSGHISLQNMKAALMKNSSGAMNDSRVLDFVNSICNIQYGNIDFEEFSAAAISVYQMEGLETWQQHAQQAYELFDREGNRPIVIEELASELGLGPSVPLHVVLQDWIRHSDGNLSFLGFIKLLHGVSSRTIPKVQDNRLH

SEQ ID NO: 65975 - protein, 217 aa, Zea Mays
MRASLHRGHARGRGRQRRRRGVQRLELREEAVALAVLAPGAGVLGAPVVLVHVLELLLALLGAPVVTQPCKLPCDVLPERRFERGAPEVGVHLRPDPDERQRLLARPPVAGRSRAAGAQVGLHVFVLESDRHTGAGAARCQFLEISARPRRLQLHRRQGWDGGGDRHGEPRRRRRERGRARARASRLRGHVRGPGATVVVQHGRRHLWFPAQNKKFR

SEQ ID NO: 65976 - protein, 74 aa, Zea Mays
MCSSRSSNHGVGAALSHLLISPGHMLLGHLCAIPLETIVVTGIRHDPGQYLDKEPCTIVVRCPPFATTSSSWFV

SEQ ID NO: 65977 - protein, 624 aa, Zea Mays
MFLAMTEEVRVIIVKLADRLHNMRTLTHMPQHKQYAIAMETLQVFAPLAKLLGMYRIKSELEYLSFMYVNPTGFAELRKRVEDLYKAHEQELEEANRILRQKIADDQFLDLVSVETKVRSVYKELYSIYKTTLKSKSSINEVNQVAQLRIIIKPKSCNGVGPLCTAQQICYHVLGLVHGIWTPVPQAVEDYIATPKPNGYQSLHTTVIPFLNESMFHLEVQIRTEDMDLIAERGIAAHYSGRGVVSGPVRPGISSGRNAKGKVICLNNTGFALRIGWLNAIREWQEEFVGNMSSREFVDTITRDLLGSRVFVFTPKGEIKNLPKGATVVDYAYLIHTEIGNKMIAAKVNGNLVSPIHVLANAEVVEIITYDKLSSKYAFQRHQQWLQHAKTRSARHKIMKFLREQAALSAAEITADAVNNFVADLEDESDSELSLPSTKNEDSKFNWEKILSSDKLFFVNKSSDGFLPVNNVHTKVNGKQNKTVKDLGIKINGHSTIRGDSFSELMHPGNSTCKEVFPGLDHWKSGKISGWHNTEGNSVQWLCIACVDRKGMMAEVTSALTACGITIWSCVAEVNKRRGMGVMLFHFEGSYENVVSACSSVDMILGVLGWSVGCSWCPLGVLEC

SEQ ID NO: 65978 - protein, 584 aa, Zea Mays
MAPPLPLPLLRWLLLAAAVAATVAQPQPQPLASRTDLAALYSLRASLGLRARDWPLRADPCARWAGVDCAAGRVVGVTVAGLRRTRLGAARPPLLALDGLRRLTALARFNASGFPLPGEIPPWLAAGLPPPLAVLDLTSAAVNGTLPPDLGASGNLTALLLSGNTLTGPVPPALLSAAGLRVLDLSRNNLSGPLPNVSVSLGAAGASVFNVSGNSLYGVAADAIGALRRRFQVVDVSSNYLDGAWNGSDTTVLATTNCFYGVPAQRSRADCEEFYRKQGVKLVDPPAPSPVPSSEPPPSPSPEKKKKKKHGISKKLLIGVLVAAGTLVAVFFIALLFCLVKRRSRGRRGGRGRGVAPNEEGTRSVSVRRRDSSVNPVVLSPSAVSPSANDGPKDASAVIGEITYEQLVLATGGFGDDQLIKHGHSGDMYHGVLENGSHVIVKKVGAKGANRHASELDFYVRYSHERIVPLLAHLSNDDDEFMAYKYMPKGDLTHALHKKPVDTADGLPSLDWITRLKIATGVAEAMCFLHEECSPPLVHRDIQSSSVLLDDKYEVRLGSMSDICIQQSGGSQNVFTRILRSSNW

SEQ ID NO: 65979 - protein, 892 aa, Zea Mays
MEAEAAAAVVASSASASASAGRSRPSSSAAQNRIGENKTNISSYTQRTYNLSKNRQISTSKGTDSASNLLTKRQDDALCTLHSLDIIPVDKDGGTFQDESPFSSSNVMFGGNLGPKNAIIRPIKLPEVPKLPPYTTWIFLDRNQRMTEDQSVLGRRRIYYDTSCGEALICSDSEDEAIEDEEEKKEFKHSEDHIIRMTVQECGMSDAVLQTLARHMERAADDIKARYEILHGEKTKDSCKKGTEHNVKVEDLYCDKDLDAALDSFDNLFCRRCLVFDCKLHGCSQDLVFPTEKQPAWSGVDDSVPCGIHCHKLASEPDAAAGADHMLFDVEEPTHSSDNVMNQPGSNRKKNGSSGRKTKSQQSESSSTARVISESSDSEVHPISNKSPQHSPSPSKVKIGPKGGIRKITNRRIAERILMSVKKGQREMASSDSNFVSGYLLARDMKLRSDTRNGNKELIVSSQQSSPSTRSSKKKSTPQIGNSSAFAEAHNDSTEEANNRHSATDGYDSSRKEEFVNENLCKQEVYLRSWKAIEQGLLVKGLEIFGRNSCLIARNLLGGMKTCKDVFQYMNYIENNSASGALSGVDSLVKGYIKGTELRTRSRYFRRRGKVRRLKYTWKSAGYNFKRITERKDQPCRQYNPCGCQSTCGKQCPCLSNGTCCEKYCGCPKICKNRFRGCHCAKSQCRSRQCPCFAADRECDPDVCRNCWVGCGDGTLGVPNQRGDNYECRNMKLLLKQQQRVLLGRSDVSGWGAFLKNSVSKHEYLGEYTGELISHKEADKRGKIYDRENSSFLFNLNNEYVLDAYRMGDKLKFANHAPDPNCYAKVIMVTGDHRVGIFAKERILAGEELFYDYRYEPDRAPAWARKPEASGAKDDGQPFNGRAKKLAQNNRG

SEQ ID NO: 65980 - protein, 363 aa, Zea Mays
MNRIDRKRRSPFPAPACLGYLLPLPPSSHHTDSRHHWPAGLFVHSLSLARSPARPPASLSFHLLNAYKYSTGSHVHGRNVHLPSLPPHGCWLLLGRPSHTPAVALSLVWSSPASPSLILSSAAPACQCHHPPAVRIIFGPNPSKWRRRGGAACRRSESGTTTTTAAARSSPRPRHRRSWRPAATSGSSTRRPRGSHRRRRRPAGKFGGRRPTGPHAAAAASGPVPRRLRGRPTPWSHRRRPCHARRRRARPALPGRAWCAASTRTCTRCPRRTCSTTRICHRGGRRRPAGACGWVASASVAFRLINYFLYFFIHVSTPSLTVLLFRLCNVLVFLFVSRLDFRLCNVLVFFSFWTRASIVQCGQ

SEQ ID NO: 65981 - protein, 406 aa, Zea Mays
MTHHYPPTRITRGERHYCCRRQWLSALTEPMDDLTVGGLALFAAVADFIDDSAPAMPQPAAASTAHEPEPEPGSPCSVASDCSSVATADFEGFADLGSALVLDDLVSSASTSASSASGPRAAAAAPARSVFALDCVPRWGLQSVCGRRPEMEDAARVLPTFFHVPLWMLAGDAPVDGLDRASFRLPAHFFGVYDGHGGLQVANYCRERIHEVLAEELTKAEEAASDADLGGLDPNTQKHWEKAFVGCFSRVDAEVGGDAATEAKPVAPDTVGSTAVVALVCSSHVIVANCGDSRAVLCRGKQPVALSVDHKPNREDEYARIEAQGGKVINWNGYRVLGVLAMSRSIGTCPYPLHVMRATLVYDAIYIHTVFQFLKNYRLVNQTTYSNGTICSYHHLECCWLVHSVR

SEQ ID NO: 65982 - protein, 292 aa, Zea Mays
MMSDKHPVKAMCDIRDLGLFYVVFSFPEKSNPPVFDKCDWQCVSHIEAAWDLAYSIGSCVFSSGSDSKSQDERRRLYLYSALFNPLRSMFYLDKRSKKAPVSSFIIKDSLKLKTSDAETVVNIHAASEKFAELIPLLESNADVYALKEKLEDEYLEIPGDSVKRVFAGLILREIKEFWRVALLLSILFYRETGTPAGTLDEQDELRRRKEKYIRAERSITDLDLDGVWKLKPILDGKSIMGVMQVKSGGPLIGKWQQRVLKWQLAHPDGTVDECVEWMKQSQSKRQKVESST

SEQ ID NO: 65983 - protein, 64 aa, Zea Mays
MAPDSTHGADGGSVKSSSAAAPHFLSLSGLRRGQGFQGSGWCGRVPGALNMDMSGGRGVRKVDG

SEQ ID NO: 65984 - protein, 377 aa, Zea Mays
MIHTHIFIFELICCHKARFWMQSEQPQATAVLFSYDGSGPGSSRRTRRSGVAQATQRVFLYPQAPKVSSIVSSKYRTAYHFQPPKNWINGDAFVPDTVIEDRRLWSRIDYGNYYASKSFFDSKKGRRVIWGWTNETDSSSDDVAKGWAGIHAIPRTIWLDKDSKQLLQWPVEEIESLRGKQVRHQGLELRKGDLFEIKEIDTLQADVEIDFELTSIGSADPFDPSWLLDIEKQCREAGASAHGPFGLVVLASESMEEHTSVHFRVYYRSQEKHMVLMCADLRKSSLRPELYTPAYGGFFELDLEKEKTVVSLRTLIDRSAVESFGGGGRVCIMARVYPAALVDDGGTRMYAFNNGTSTVRVPRLEAWSMRRAQVNKG

SEQ ID NO: 65985 - protein, 124 aa, Zea Mays
MAVGPPRHGRRSSFLHRHGSASLQQSGDRALPFPRHAGAMSSPSPANLASHQEGVSLSAAPMATISPSCACPGSSSSTPAPLNLPSLPLSLSQIYCMFLYFIVVIVLTLGGVEAMQMVVSVLRN

SEQ ID NO: 65986 - protein, 315 aa, Zea Mays
MALATLLAHLTAGRFGRVLALTSGGAPTASAAHRVLHLLLRTSPPPPLPRLVAIARWSRAHFRAPLPLRLHALLLARLASDGSLHSLLRSELHVLAAGRLHSPASILRALPASSGPLVADMLVLALARASQPLAAYEAFLLAGADCPRYRPSAFSVNALLAALVRADRVDLADRAFRAALRRRVSPDLFTFNIVISGFCKTGQLRKAGDVAKNISAWGVAPSVATYNTLIDGYCKRGQVGKMYHVDALLKEMIQAGISPDVVTFNVLINGALQRGEGGGQHQAGGRDGGAGVGMHIVYHEQCAERVLQERHDGGS

SEQ ID NO: 65987 - protein, 148 aa, Zea Mays
MSRTPPCREAPCACLCSWPWWCCGVATSCASRQPSWPWNSPCHKARPAAATLSCSSRHYSSSSPNTCIILATVRASSNSLPGQLSRALALAILCSTSLNPESQMLAKCKRGPCASLIKCSVKDFNQRSSSFRASSRNPKSWAKTEPAA

SEQ ID NO: 65988 - protein, 71 aa, Zea Mays
MSAVKLPSICRTLRMIVTEDRRKGGSRTHPQPESGTRSATWPSYPGGGGFAQQRQGKAPPSHARLWCHLPC

SEQ ID NO: 65989 - protein, 74 aa, Zea Mays
MEPEACRPPRRWSSSLDRVRVRVRLRCACLLAPPPPPGDHAGGRTTRKGRDRDSRNDARAETGVVRSRCGFGRR

SEQ ID NO: 65990 - protein, 57 aa, Zea Mays
MASAMVELGWARCSAAPVTSRRRHSGGRWWAVDGGRGLGTCGDGTRHLAKTWHRRWH

SEQ ID NO: 65991 - protein, 662 aa, Zea Mays
MLRAAVAAAEELRSPLLRVIGTLRDGRGSVLLGRRVRFCSNSSASDTEAAVAEAEAKAEDASAAEGEADSKASSAIVPTSTNIDDCLSVIALPLPHRPLFPGFYMPINVKDQKLLQALIENRKRSAPYAGAFLVKDEEGTDPNIVTGSDSAKSIDDLKGKDLLKRLHEVGTLAQITSIQGDHVVLLGHRRLRITEMVEEDPLTVKVDHLKEKPYNKDDDVMKATSFEVISTLREVLRTSSLWKDHVQTYTQHIGDFNYQRLADFGAAISGANKLLCQEVLEELDVYKRLKLTLELVKKEMEISKLQQSIAKAIEEKISGDQRRYLLNEQLKAIKKELGLETDDKTALSAKFRERIESKKDKCPPHVLQVIEEELTKLQLLEASSSEFSVTRNYLDWLTVLPWGNYSDENFDVHHAQKILDEDHYGLSDVKERILEFIAVGKLRGTSQGKIICLSGPPGVGKTSIGRSIARALNRQFYRFSVGGLADVAEIKGHRRTYVGAMPGKMVQCLKSVGTANPLVLIDEIDKLGKGHSGDPASALLELLDPEQNVNFLDHYLDVPIDLSKVLFVCTANVIEMIPNPLLDRMEIIAIAGYITDEKMHIARDYLEKNTRQACGIKPEQVEVTDTALLALIENYCREAGVRNLQKQIEKIYRKVCKITSAY

SEQ ID NO: 65992 - protein, 787 aa, Zea Mays
MTRRVRRRTCREREGKVVRGASRVVSAGPEGEEDAAAVEVDWRALPDDTVLQLFARLNYRDRASMASACRAWRALGSSPCLWRTLDLRAHRYDREVASSLASRCGSLRRIRLRGHEAAEAVLGLRARGLREVVADGCRGLTDATLAVLAARHEDLQSLQIGPDPLERISSDALRHVALCCSQLCRLRLSGLREVDAEAVGALARCCPLLEDVAFLDCGTVDEAALAGIHSVRFLSVAGCRNLKWATASTCWTQLPSLIALDVSRTDVPPSAVSRLISHAKTLKLICTLNCISVEEEQLHNPAVFSNSKGKVVLTINSDIFKSFETMFPVVDVKEHEFFNQCNWSHKDKIPGDTMTWLEWILSQSLLRIAESNPQGMDGFWLQKGTTLLLRLLKSLQEDVQERAATSLATFVVMDDESANVDPARSEAVMQNGGIRMLLDLARCSRESAQSEAAKAIANLSVNTKVAKAVADEGGITILINLAKSMNRLVAEEAAGGLWNLSVGEDHKAAIAVSGGIKALVDLIFRWPAGTDGVLERAAGALANLAADDKCSLEVAKAGGVHALVTLARSCKLDGVLEQAARGLANLAAHGDNNDNNAAVGQEAGALEALVQLTSSQNEGVRQEAAGALWNLSFDDRNREAIAAVGGVEALVALVQQCLNASEGLQERAAGALWGLSVSEANSIAIGQGGGVAPLLTLARSEVEDVHETAAGALWNLAFYSGNALRIVEEGGVPVLVKICSSSRSKMARFMSALALAYMFDGRWMKLLWLEHPQIAVPRVLMLRELEE

SEQ ID NO: 65993 - protein, 93 aa, Zea Mays
MNWSALPGSTLPYHSASCQEGNYYSHHLPRPVRDCLFTYGIVGFRLTHDEVCGQLKGPRSLGQQSVWSLIDTDGRPFLLNLWSHFKLFQNFGA

SEQ ID NO: 65994 - protein, 895 aa, Zea Mays
MKEMQHKAPSERSQPLRMVDERDNNEWSKATGNQGTNRYADDRRRGDGWGTAPSRDYSSARAPSDPDAWRQRSRSPSPRGVWNKSRRNRSRSRSRSRSRSRNRSRSRSRSIGRGRGRSRSPYIADRGSEWRVERGRTSGGPVRPCRDFVAGRCRRGSNCRFLHEDGGHRPFDDHYPADPRERYGYQSKEFMDTRGPNDYLRSRQSRDRYDDRPWERSEPRRDYRYPEQCFNFAKGKCMRGASCIFAHSNSASHGRWRDETRESAHDRFGPDSSYGNRTEHRRVNKNPCKFFAEGCCRRGENCSYLHEEAPHSQIGVSAPDEALNYSDGHAARGNYSNWGEQNNAVHATSQILSRDDRESPISQSIGRNDSRNDYENQHSKDAGKSQYQIIHQEDFGSPGQKKHEDAISQQPQLLTPVQTTALSMHNEKVSEMDSQNAPSSIGGLSMQSGVRSANIIAEQSLGQILQRHDPIPHIPGPQTLPITTQPQNVTSSFPSNSHVQQNNFPIHQNRQEQFVVPHAAANISTPSMQSQPIASHMGHIQRGGYGIEPQALPNISTHNGHNFNVASQVPPNIPTAVHAGQTQVTIDMPRLGQDSGPQSIHNMEMQPMSPNVQSQSLQGLPLVPASSSADMAGVPVPHNAVKSEEVSRVTASLAQYFGNTAFGAGTVGLQPSQPNMNASLMATPPVVPPPVQPNPWPWAQQQTGIVQPGLPVPPQQQQQQQQAPQRQQQQQAPQSFQTLIAVGGSNGNSMLIPNAGASVGPATVAAKETAPPESKKGEKKNADAEKKNGDAERRNAEAEAQEDGDKGKKGKDSKQLKMFKVALADFVKEALKPTWKDGQMSREVHKTIVKKVVDKVTSTVENTPPTKEKIDVYMTYSKEKLNKLVQAYVGKYAKA

SEQ ID NO: 65995 - protein, 488 aa, Zea Mays
MANPLAGLQDHLKLARDYALEGLYDTSIIFFDGAIAQINKHLTTLDDALIRTKWMNCKKAISEEVEIVKQLDAQLKSLKEAPGTRRSSSPPIRSNKSFVFQPLDEYPTSSPAPFDDPDVWAPPRDTPTRRPTRGQSSARKSSQDGAWARGSSRTGTPSRSAKPNGIKGGAVKSTASNSSVRKGKQSSNKADSTSSDAEEGVRWDDVAGLSEAKRLLEEAVVLPLWMPEYFQGIRRPWKGVLMFGPPGTGKTLLAKAVATECGTTFFNVSSATLASKWRGESERMVRCLFDLARAYAPSTIFIDEIDSLCTSRGASGEHESSRRVKSELLVQIDGVNNSSTTDDGQPKIVMVLAATNFPWDIDEALRRRLEKRIYIPLPDFESRKALININLRTVQIAADVNIDEVARRTEGYSGDDLTNVCRDASMNGMRRKIAGKTRDEIKNMSKDEIAKDPVAMCDFVEALVKVQKSVSPSDIEKHEKWMAEFGSA

SEQ ID NO: 65996 - protein, 208 aa, Zea Mays
MTGTYEASDRPPPPNSAGYRTDKVRRKRLTAQKRKEIKEAFDLFDIDGSGTIDARELNVAMRALGFEMTPEVRTRDVCQWRRQPNRADDRGGGQGRQRHHRLRRVRAHDDGQDGRAGRPGRAPQGVPHHRPGRQRKDLGHGHPAAGHRDRRALHAGRGPGDDRGRRRGRRRRDRPGGVHEDDEADRLWLWVLVVTDKPIPTYIDTYHR

SEQ ID NO: 65997 - protein, 274 aa, Zea Mays
MLMLFFAACHMEIIKSLPRHLKIVDLSADFRLRDINEYAEWYGHSHRAPELQGEAVYGLTELKRDDIRNARLVANPGCYPTSIQLPLVPLVKAKLIKLTNIIIDAKSGVSGAGRGAKEANLYTEIAEGIHAYGITSHRHVPEIEQGLTDAAESKVTISFTPHLMCMKRGMQSTVYVELASGVTPRDLYEHLKSTYENEEFVKLLHGSNVPCTSHVVGSNYCFMNVYEDRIPGRAIIISVIDNLVKGASGQALQNLNLMMGLPENMGLQYQPLFP

SEQ ID NO: 65998 - protein, 465 aa, Zea Mays
MRPLPKKPNAALPVPKQLKVHHPENESLSRFFLEKWRAMMQEPDGLSQNNYLAFANANRSLCSSKEPIRTLKDFSNVKGVGTWLINHMKSFFEKSSQDLSPAKGKKAKGTKSYLPRKNTAAYAILITLHRAKTSGKDFMMKQELIDAAEASGLSRDAIGPNKSKAKQSYGKDWYTGWSCMKTLLSNRLVTKWSNPAKYMLTQEGEGTARDCLSRSGLDDSARPLTIIGAHNTSAMDPSVARHSPELVSDSSLTKKKSNCYRQVQATNYEGIICCDSDSEEPCGKDIPLKGMEPITSCGPPDISRPFQGTPKLQSSTMGSAKLAMPPRRANENFLEAYEVILILDDREKFGSRSRKVADNICSLSHFAVDVRQLPVGDGIWIARHKEDHTEYVLDFIVERKEVMDLDGSIEDNRYRDQKLRMKKCGLRKLIYLVEGDLNRAPKRVKTAELLGLPIPRRDMLILHVR

SEQ ID NO: 65999 - protein, 416 aa, Zea Mays
MGRTIKKARKAKPKKSKKKTEASSSSNHAVASGPAKAEKASLNYIGVFKLSNINGKKREPIPASAVDGDTDVDSDSSSDEEDEEINEDTKPILHLKKVAHAGCVNRIRSMTQKPHICATWGDTGHVQVWDLSSFLNSLAESGASAPKEDDIIHKHLPMKVFSGHKDEGYAIDWSPLVTGRLVSGDCNKCIHLWEPTSNNWNVDANPFVGHTASVEDLQWSPTEADIFASCSVDGTISIWDVRTGKKPSISVKAHKADVNVISWNRLASCMIASGCDDGSFSVHDLRSIQDSLVAHFEYHKKAITSIEWSPHEASSLAVTSEDHQLTIWDLSLERDTEEEAEFRAKMKEQANAPDDLPPQLLFAHQGQRDLKEVHWHPQIPSMIISTAIDGFNVLMPSNIDTTIPGSTDTAMPPAEP

SEQ ID NO: 66000 - protein, 94 aa, Zea Mays
MANSVHKNHAFLYNDRKYSRNVHCNNVVSYAMAASSSHVVHDRNLARRNVINHMPRRNVVHVSRKTSSEPSTIYHALNASFAICRKDRKIVARK

SEQ ID NO: 66001 - protein, 236 aa, Zea Mays
MQVLPICNKLLSQEIMRVSSIVHNHGFGDHDRHRFRSPSPMSSPNPRANLPGNGFSPWSGLQERLGFPQRTSMDWQGAPPSPSTQVVKKILRLEVPVDSYPNFNFVGRILGPRGNSLKRVEASTGCRVFIRGNGSIKDPGKEDKLRGKPGYEHLSDPLHILIEAEFPASIIDARLRHAQEIIEELLKPVDESHDFYKRQQLRELALLNSTLREDSPHPGSVSPFSNGGMKRAKTGQ

SEQ ID NO: 66002 - protein, 115 aa, Zea Mays
MSSLAQTKFSLQRMQRDSISWRGKMCASSPTATNGEGTRDRKNKRRTTPMFTLDCSRLGVGPHHRGLNTSVDGVEASASDSPSHLALLSCSINGTGAHPMTVLFGALCAAALASD

SEQ ID NO: 66003 - protein, 419 aa, Zea Mays
MTRFPPVYFMILYWDSGNVGCRTAGRIKCLGWPCSGVFLLKGRFIFGPDARSLFVTMFLIVAPVSIFCPLVAKELMDKFSYGLGLPVMIAAVLFTAYDLSLLLLTSGRDPGIIPRNAHPPEPEGFDDNAEVGANQTPPVRLPRVKDVVVNGITVKIKYCDTCMLYRPPRCSHCSICNNCVERFDHHCPWVGQCIGLRNYRFFYMFVFSTTLLCLYVFGFCWVFVVKIRNAEQITIWKAMTKTPASVALIIYTFIAVWFVGGLSVFHLYLMSTNQTTYENFRYRYDQRANPYNRGIMVNIKQILFTTIPPSKNNFCGRVQQEHGLRPRPTNGFMSPNMGRAVGDIEMGRKPVAWDEPRMAAEIGDLGAGLSNLLEDKDGRFRSASPDLSRDALAVGGGLEEEGSSAMNAGRSSWGVEAGR

SEQ ID NO: 66004 - protein, 548 aa, Zea Mays
MRGGAMKALRRSSTSSPPSSPHFHSWIHRRYLLVTSSATSSLSASANSAAEGSDSASVVAASSSPSLDPSSPNMDRGVIKSPWSRRKRKRALTCQHWICLFSANGKFRDGGRKFLKKVRSGGIEPGIRAEVWPFLLGVKEYEKLRRQCHHVLHCNRGNGLNVINEFLNEDFSDGAEGSESPYSNGASKRACVMPRELKSLGSKAEESESSNWDVVESIDEDTSELTSVDPCMIESESSESESSYEEDPDRTPVSTNMEESCDPKPRFVRTASAKSDIFLSDRTPEDFTTWQRIIRVDAIRANTEWVLFARNQAEVSKEKALQSAISVGLKDFDHLEPYMIYHAARLVALLEAYAVYDPEIGYCQGMSDLLSPIVAVMEEDHEAFWCFVGFMRKARHNFRLDEVGIRRQLKTVSQIIKLKDSQLYRHLQQLQAEDCFFLYRMVVVLFRRELTFEQTMCLWEVMWADQAAIRAGIGRSTWARIRLHAPPTDDLLLYAIAACVLQRRKLIIEKYSSMDEILRECNSMAGQLDVWKLLDDAHHLVVDLHHRI

SEQ ID NO: 66005 - protein, 965 aa, Zea Mays
MEAQATATVKEALAALYHHPDDAIRTAADRWLQEFQHTLDAWQVADSLLHDESSNLETLIFCSQTLRSKVQRDFEELPSEAFRSLQDSLYVLLKKFNKGPQKVRTQICIAIAALAVHVPVEDWGAGGIVNWLSDEMKTHPEFIPGFLELLIVLPQETSSYKIAARPERRRQFEIDLCSSANVAIDLLTACMAIDQLKEQVLEGFSSWLRFCHGISASELASHPLVHLALSSLNSGQFLEAAVNVTSELIHATVSHGAGTMAEQVPLIQILVPHIMGLKEQLKDPSKDEEDVKAIARLYADMGESYVDLIATGSDDSIQIVNALLEVTSLLEFAISSMTFNFWHCLKRNLIRRDSDVSYGLDVTVEIEKNRRLQIFRPKFETLVSLVSFRVEYPEDYHTFSEEDRKDFRHVRYAVSDVLLDATEVLGGDSTLKLLSTKLAQAYGSCNNEQNSKWQPVEATLFCIQAIARSVSIEEREILPQIMSLLPCLPQHEQLLQTVCLTIGAFSKWIDAAPAELSILPPLVDILNKGMSTSEDTAAAASMAFKYICEDCRTKFSGSLDGLFQIYHIAISGVGGYKVSSEDSLHLVEALSVIITTLPPESASRALELICQPVINPLQEFIQQGDQVLQRVPARHLTVHIDRLSSIFSNVKQPEVVAEAVYRYWPTLKSIFDQRAWDTRTMESICRSCKFAVRTCGRFMGMTIGAMLEEIQTLYQQHKQSCFLYLSSEVIKIFGSDPSCAGYLTSLIQILFSHTVQLLRTIQDFTARPDIADDCYLLASRCIRYCPDLFIPTETFQRLVDCAMAGITIHHREACKSILSFLSDVIDLPNSSGGGQYREVINTIILQRGTTLTRIMIAALTGALPSGRLEEVSYVLLSLSRAFGEDMLNWARESINLIPPQALTDAERLRFFNIISDATSGSSLHNITDRFGEISDICRRNKTVQDLVQSALRPQDLTVTVVRQQM

SEQ ID NO: 66006 - protein, 87 aa, Zea Mays
MENEVQILKDGSRKMNSDISSVAKDTAEKVEVLHSAIEKVQVIADEWVKMNYTINRIWSFTKETEKRVEGLYSDLMKTKRKVPFWRD

SEQ ID NO: 66007 - protein, 67 aa, Zea Mays
MTTVSRRTVATHLAGVSSSSSVSNATFALLLQSLLTRMISTDFHKECRHLRSHPLLRYIDYFFVFYT

SEQ ID NO: 66008 - protein, 797 aa, Zea Mays
MSQSYAAAASKRPFSSPTTSPSPTSSPATPLMKKAKHPAAASSSSVGTVEKNGIQLDTVAAAMGGGRTNGEEDADMVLVNQDKLPAPSVPASAGVAANLFRKKATLPQPSTSARKPLRIKIGQPKLPKNFEEDTWSILKDAITAIFLKQKLSCDVEKLYQAAGDLCLHKLGANLYDRIKKECGIHIAEKISALVGQSPDLVVFLSLVQRTWQDFCDQMLIIRGIALLLDVKYVKNVANICSVWDMGLQLFRKHLSLSTEIEHKTVTGLLRLIESERLGEAIDRTLLSHLLKMLTALGMYSESFEKPFLECTSEFYATEGVRYMQQSDIPDYLKHVESRLQEEHERCILYLEANTRKPLIATTEKQLLERHTSAIIEKGFTMLMDANRINDLSRMYNLFQRVNAVELLKLALSSYIRATGQGIIMDEEKDRELVPFLLDFKASLDKILEESFAKNEAFSNTIKDSFEHLINLRQNRPAELIAKFLDEKLRAGNKGTSEEELEGILDKVLVLFRFIQLKTECGSQFTNKLEGMFKDIELSKEINDSFRQSSQARTKLPSGIEMSVHVLTTGYWPTYPPMDVKLPHELNVYQDIFKEFYLSKYSGRRLMWQNSLGHCVLKADFPKGKKELAVSLFQSVVLMLFNDAQKLSFIDIKDSTGIEDKELRRTLQSLACGKVRVLQKIPKGRDVEDKDEFVFNEDFSAPLYRIKVNAIQMKETVEENTSTTERVFQDRQYQVDAAIVRIMKTRKVLSHTLLITELYQQLKFPVKPADIKKRIESLIDREYLERDRSNPQIYNYLA

SEQ ID NO: 66009 - protein, 1211 aa, Zea Mays
MSANRKKLIWDLRIYHFVIRIPSQNCERKELAMVIDAGDVFIQSKDTIDDISRTQESNSFLDHISKSLPSYFSDDLLLGIQLDELYNQFELGLTGFQVKVLLPDRHNVSSTLIKLDASIALRLCVFLDEPVLKQLEVGFIVSSIDAYLSQTMYSTIVNLPRMKETNLFKNSVFDNTKTHVPKKLALNVSVSLKLAKLGLHVDLDGNFEESSGLIVGIEDIDIRYAICELSDLSLAMKTVNVTFRYWKDKSDSHVLCLSGNLTRCPENSVETCLDLHYRTHKHDDQIHHVYRLILCDVDLHVNPSVIGQIRMFLRKLDSGPSIGSDVESTMIGQSSMKSGAANGILPMFFLSNLCGADGTVFAGVSVDHFPFLVADHSCGYNFGCLGTQNVEAQESLYSKNEHCHDTSGLNGYHASDLTSNTYGKTQRSDCSSGSSNDPKNASRTVLDLSLISVRIHFPESCGTLVTITIPESISTLTYFDASSWDLLLSANNLTLASPWTPPNVNELVWGTASHRNASVLNVRVKKDLPALSTEVCVGIQNVCCVLPSKLLAMFVGFFLLDDWNRIAEQEFLVADNNLEGLRESHDCVTYKFDISDCVVFFPVEEQGLSCLKLEVPHFFCEFIANGSSVEFAKRIPKEFFSSECIVSRRVDVICIYARNASISLLIVSDQTDFMLKLDENVPKRIHSLIEKLDADVWIQVPCKDIPYSQQPTSPTSVMSKISRCNLIAEDLYFINGMETVIGVVDQLISIGNESKMYKGNASQFLDHRSFCEGNPDPNECTNLTISIKDLMILLGQSKAKGLALERIATANMEFDVSAVLVGEKPERIDFDVVSLTLQSPGGYTLISIVSDGPLSPVFFKFTKHHTGQDEILLSVPLFEIWLYLQDWNTIINHSHSYIKTEVNSMPVEHAAALSQFPEMVSSPLIASEFGSPDDFNLVVTCETISGVLHIPIWGKEENHTSNHMGVTPASFPMEVGTHETDDIQYCEPKGCKFVTLTFDTKHFVVMSGDSCINFRCDLERLKVLLEMIQENKGTSVPFVHISKVKSSGYVRQSERNLEHLSVDLQAEYMDVSFSHQIFNFWHNMELKFPAASSASSFYSVAFKAGLRKGSLLLSDGRWSSHGPVIETLLKNLTVQFSQMKDRTEVSAFVDLLVNYNNIDKVMWEPFVEPSRFQLNMLRKCGDCGLDISPSTDVCLSSSKQLNLNISEPLIE

SEQ ID NO: 66010 - protein, 528 aa, Zea Mays
MFHFDTNIYYRFLTGSSGKWHSSKLLGEHVGGSAVRATCFIPETYTVTYNSCNYSSNGISDGIAVEKDETFLLISVGSKQVLTTWILQPRNAENRQVYSSGLDIDSKQNSRNLENVDSAMSFQWLTTHMPPKLPRNRLKSGHIKQRVEEGNFSVVQPNMDVMDHMENDWRYLSVTAFHLKHPVLRLTVCFVAVACSDATVVLRALLLPSRLWFDVAFLVPHASPVLVLRHIIINASHYKDDAGDRYLIASGSTDGSITFWNLTETIHGFMQLISETQPHMSIDYQKRPRTGRGSQGGRLRWRSLSYASKKRDGDMSSSDGSNPGSLNTAENSSEASGVENTQIVVHEASDSSKTEMPSSTQSCDIPELRPMHSLSGVHQSGVNCLHISFSTPDKSYCIISGGDDQSVQRFNFRVISSEDCLTTPARLNSHDNDTLKILYQHKVASAHSAAVKGIWTDGTWSFSTGLDQRVRCWKMGLAGQFTEYSHAIISVPEPETLDVFHDRAKRKYHIAVAGRGMQMVEFSPPEDD

SEQ ID NO: 66011 - protein, 260 aa, Zea Mays
MELDIQNFMQNPQLQEFEFQNFPTSYLRCAAHRVAQHYGLETIVADSLVEGSVSRIVARKTAESRPKAFQNGSADSRNKSGVPKTVDERIEEYNKARARIFNGSISADSDAASIMGTLSTGKDEPVNVDPSVDETKVSTMNSRSRVAVFKDTEKDRSDPDYDRNYKRYVRSSVPGFNLSPGVFNFVVPQFMQYDIGYVQSPGMSTNQHTMYFGQPDLTIGSSGAAVYRHWPTPTMMYPHCYDNVSPMMSQVPLYQSFNHD

SEQ ID NO: 66012 - protein, 53 aa, Zea Mays
MGSSAAGPHDVDAAPGHLQAQVWYRPSRRTRCSGFLIFVFVFLFLVGQLPCIV

SEQ ID NO: 66013 - protein, 89 aa, Zea Mays
MLSQCAVTPLRKAHLGAHWRVRDGSGPDVLHTSSLRPVCQPRAPPRVSTMTENWRVVMAAPKISVCPRRRSKRCATLYLVAANPKALEQ

SEQ ID NO: 66014 - protein, 311 aa, Zea Mays
MERSRPGAAPTPSPEEEVAAEGHAHGDDVTGQEEEATPVVLKKGPWTASEDAMLMDHVRHHGEGNWNAVQRMTGLLRCGKSCRLRWTNHLRPNLKKGSFSPDEELLIAQLHAQLGNKWARMAAHFQSQRAESAACSVGVTTWTRCSAWCTQRSARRRRRRRPPPPTTPARPRGTAPPTRTRPPSATARRTRTGASTASASGATCPGSADRVQELQGGGGGGGGRRSHAESSIRTPIRPDDSEKGRRRNADLFFFLLLNISACQMPSITDKSVCVLFSVPDRLVAGSISNSAAIESASASLASMLFSSFPFN

SEQ ID NO: 66015 - protein, 114 aa, Zea Mays
MARVRSTARVTREGEETEATKTAPISEVMRQSGLVVTEKATDEGAPATEAEHTVAEEEEDIDEEEDYIILIPSKLSHLDFKKSTVSKADVPMMTKLGYFGEVERKLEQDKKELK

SEQ ID NO: 66016 - protein, 243 aa, Zea Mays
MDYSRPHSIEVPESDIGFHFGTLLDTQEGVDVIFSVAGEKFHAHKLVLAARSPFFRSEFFDHELGEEKNGTDTGDEIKEIVIDDMDPVVFKAVLHFIYRDNLVNDDELSASSSDCSIFDRLSGKLMAAADKYELPRLRLLCESYLCKHISVNSVATTLALADRHHAMELKSVCLKFAAENLSAVIRTEGFDYLKDNCPSLQSEILRTVAGCEEPCSSGLKSQSVWAQLSDGGDTSGRRVRPRV

SEQ ID NO: 66017 - protein, 153 aa, Zea Mays
MPPPSASASRLATHWIADALADDESLDFSVLKALLGDSSKSLAGAPEATRERVALRCIQEVSSVIASGGDAAAPAGVPRVDGAWSCEDVLFRLIRDVGSSGELEKDLLPPLSQDIQEYICTKKFTLPETSFQLGLSVSGLHEIQCSRVAGDSV

SEQ ID NO: 66018 - protein, 418 aa, Zea Mays
MTKPTNLSTLKVNINKQKKEAFQIIKPDLDSLAKSSVHFDERMGINQKKLLRPKRPGFQFVEEGKLSRQAELQKIKSQFGEAQAKELKVKQAQLAKAKAEVDINPNFIEVAPGVRAPKQKQNEDIPEIEPWDAKILLSATYEDISVEEINMDKITIYVEHPEPYDPPAEPAPPPPQPLKLTKKEQKKLRTQRRLAKEKDRQEMIRQGLLEPPKPKVKMSNLMKVLGSEAVQDPTRLEMEIRTAAAEREQAHVDRNIARKLTPSERREKKERKLFDDPTNTIETIVCVYKIRDLSHPQTRFKVDVNAQENKLTGAVVITDSISVVVVEGGKKSIKRYNKLMLNRIDWPAAVGGDEDTEMEADKPVNSCVLVWQGSVAKPTFHRFTVHNCRSEAAAKKVFVDVSVPHYWDLAVNFSEDSS

SEQ ID NO: 66019 - protein, 183 aa, Zea Mays
MVLRSCSPSSWSAAGAAVATRASANPPPPRPSSPPSRPSRRAMDSAAGAGRHRVRIAVVGDVHNDWALEEDSKALRFLQPDLVLFTGDYGNENVELVRSISDLQLPKAAILGNHDCWHTHQFSEKKVDRVRLQLASLGEQHVGYKCLDFPSIKLSVVGGRPFSCGGDRLLRPRLLSKWLLWCQ

SEQ ID NO: 66020 - protein, 3481 aa, Zea Mays
MIIDSFPQFQWHWLGNLQFSLGLLPKFLADMEGLVHDLNLGGSHNPGRLRSLFACFSTVLQIMSSGVAERNNLRELVAGPLEGLAPQLLRCASVIASNLGWSERMEDASKCLVLLAEILQERFADFYVHFVDVLVQSLEVASSAQLAAALKTNLQVLSLQNLGLHAASVGALLDFSSILSKSRLHPNHSVVANSAATYIFCLQHGLEDVVDQAIASVMNELELIKSLLAEGQASCPDIHSPPLELNSERKNESNSGVHCWPQYSEDQLLCLMKFDLKILLATIALDTKKRNERTTNLIQFILKKLDPFGAPFHNFLEMQFQIFSTLHKLSNMELSSNMPASEPFERDSGGYKTQPVVLEKKISCECKKKFVHKYGKYIVQGLNASSSLTLKLEALDWIGSFEKLIHGLERGVDNFSFSYEVIWDATLSSDILFAVLDCAYDRESKVRYHVAITLELLFLGRLINPMNFYVVAQVLLDKLSDPDSNVKDAFLRLFSITLPITTYAFGLFADEHNYRNSSDIVNMSNHCMNWRHVLAVKQQPRKLHWQQLVSVLSYLSLRLKLPLSSWVQRLVFSYRGKKDTRYGQIDMFGDADGNELPKGPGVDRNTIDIIYSVNNHAAVWWGIHEAARHCINLRLRTHLGGPTQTFAALERMLLDVTNVLMVEAKEAEGRYIGPADICLLPMRLLLDFVEALKKYAYNAYEGSFVLSPPPKASSVFFHANKRVCEEWFSRICDPMLNAGLAMHCSDAVIHYCSLRLVDLRNLAASSLRGNSHMGGATESHAFRERLEADVMKVLRHASLALCRCHETDALVGLQKWAASTFYSYFEQDNQLVRGVSDRDNRFSWISGLIYQSQGQYEKAAAHYSHLLQSEEALISMKSDGIQYIIERVIECYTSLSDWKCLESWLAELQVLRAVHAGKPFSGALTSAGNELNAIHAMACFDEGDFHSAWGYLDLTPKSSNELTLDPKVALERSELMLLRGMLRCNSKLEGITEELHKAKLMLDEALTVVPLNGLPQAAACAGQLHCIFALEEALGLTSQNGLNQSQSIMDSLLKALHDPVDKMHQDCNMWLKVFKVYRNTRPSSLSTLLLCQKLASLSRKQSNFMLATRLNQYLIDHPLKSSDEMDKEILELNIKYEGALLKHANGNNEEALSDLWSLVRASVLSRVSCSSGIGTSHSLVARACLKLSTWMEQANSSPLNSIIPMVVKDFSDSDGFQDGAEKLLSGDSVSVSTLDYHALAQEIIGTARKISWQLCPTMGKAWLAYASWCFAHGSYSLSGTDSNLQNSLSPVLQSELSPSRCHLTDDEKSEVGEIIRSICADEHANHVGCEYPMTPGCYNSAPEHPISLLVEQAISLIETAAGAPGFESREGDDPSAVLASELVVLCKCDSGKDTAPLIGKLTEIWWSLRKRRVSLFGHAAHAYFQYLSHSSTELQSSYHHDALKGKTRSYTMRAMLYLLHIMLNYGVELKETLESGLSTVPLLPWQEIIPQLFARLSSHPEKIVRELLESILLKLGKLSPCSIVYPTLVDISACEGEPSEELQRISDFMVKLYPNLIKDVKLAIEELGMITVLWEEQWLSTLQDLHSDVLRRINILKDEAVRVAANSTLSSAEKNKINAAKYSAVMTPIVVALERRLVSTSREPKTPHEMWFHKEYNAKLKSAVTTLKMPPGSPAALGEIWQPFDSIAASLATHQRRSHIMLSEIAPQLAVLSTSDIPMPGFEKILGSSESFSGNHGIVTISSFCKEVTILSTKTRPKKLILQGSDGQRYTYLLKGREDLRLDSRIMQLLEAINSLLYSSSDTRSRNITLRFYSVTPVSGRAGLIQWVENVSSIYNVYKSWQKRSQLAHAHAEAQVSSVSTGNIHNPVAPVPRPSDMFYGKIIPALKEKGIKRVVSRRDWPLDVKRKVLLELMNETPKQILWQEMWCASEGFRNFNSKVNRFSRSVAAMSIVGHILGLGDRHLDNILMDFSNGDVVHIDYNICFDKGKRLKIPEIVPFRLTQTIESALGLTGVEGVFRVTCEEVMGVLLKNKDIILMLLEVFIWDPLIEWTRGNIQDEAGIAGEEKKGMELAVSLSLFSSRIQEIRVPLQEHKDLFLTNLPATVSSLKKFLDILDQYEVASAIFYHAEKERSSVLQHEMSAKLVLADATSGAEKSRTSFEIHAHELAEAKAAAVDEANKLAIWVEKHALVLEAIRENSVACIESCMQLNCKDKTLSLISAVLESGVPLTVVPEPTRAQCSELDREISQLLSELQGGLSSALDSLGEYSLVLKQVLPVNYITTSPVTSWAQVLQRSVRSTSQDMLSLAKIQAAEVIAKVQGEGINLVQQRYQDLVNQMESYVSCVEKLARECSELMNSIGLNNEVQSKERILSVFMNSVQLPSQKKDGDSTHLSHSGSPQQGEIKTPAKGDVQETTGKVLSILGIAVSQLYGDIRAKVSELSIKAIGKAKFRTDDSGLQADAGMSLQVFEQHIEKCALISGVVDEVHEVIGRTLAETSAAYAKPSPRHWASTFQAALHSSINLIEQMTEAFLPEFIRSVVPHNSEVKETVRSISEVRGSVDNALEKLIEVELERTSLAELEQNYSVKVGRITEQQIALEEAAARGREHLSWEEAEELASQEEICRAQLEQLHETWRQKDMRILSLMKVEDNIMNSLLSSKQYVSSLVDHDQESEFHYGQIKALLSIFAKPFADLESLDHMLSSSGMFPHIDNPISNIKDALSLGSSLSDVVWPLAGILKDHAFFVWELNLLDSVLVLCMREISSSLEHGINANQLYMTLKKKLAIYVEKQVFRYVTERIAPALTLKLDEEISALLQLSQGIRASDQPKRDSAAVGRVALMLEEYCNAYETARAAGTAVSLMKRQLNELTEALRKIILEIVQVEWLHDISSSHAQKVKVLSQNILSDDKFISLMLNLSRSNLLDKIQSSVSLITRSIEVLQACESISVSAEGQLERAMGWACAGPNTSSAGGSTAKGSGIPPEFHGHLLKRRKLLRVVQKEASDLVKVCTSVLEFEASRDGLYFVPEDKASEQSSDKGRAWHQTFLNLLARLDAAFHSFTCAEQEWKLGQLSLEAAGKGLFSANNQVSVVSVKANSALVNLQDVLGAMYGHACEASALLSGFKHVSQDCTALTSECGSLLEEVLAIADGLHDVYTLGKEAAAAHSSLMTNLSKANTILFPLEVCLCADVTVMSEAISNEREKNNASMPLIHGKALYQSYNIKVREACKTLEPLVGPLSDNAKELHSMVMKLGHLSSLHAGNLHKALEVPGERESMRSQDLLSTHPDLLQSDSSTEKDRASLGMDSGSPDLELNTDICLQDRCWISPPEHSYTSSSGCTTGLTQINPYDNLEKIDALMDDGAEIDGSGSTDLETKDSNQEVETDLVVGRIESVDNNSAAAFRQVRGQECDNSDPKSYGDSTTRVTRGKNPFALSILKQVEHKLHGQNIDGTRSLNISEQVDYLLKQATSIDNLCNMYEGWTPWI

SEQ ID NO: 66021 - protein, 452 aa, Zea Mays
MRRGPDGPRTLCNACGIAYRKGKMRRMIEAEPPIDEAALAKLVPEIDEDDKLTNFFWADQKSRDDFNYFGDVLCLDTTYKINGYGRPLALFLGVNHHKQTIIFGAAMLYDESFDSYKWLFDSFKIAMHGKQPAVALIDQSIPLSSAMAAAWPSTTQRICAWHVYQNSLKHLNHVFQGSKTFAKDFGKCVFGYEDEDEFVFSWRSMLEKYDLRHNEWLSKVFAEKEQWALAYDRHIFCADIISALQAESFSSILKKFLSPQLELLSFFKHYERAVDEHRYAELQADFQASQSYPRIPPAKMLKQTAHTYTPVVFEIFRKEFELFMDSVLFSCGEAGTTSEYKVASSEKPKEHFVRFDSSDCSCLCTCRKFEFMGIPCCHMLKVLDYRNIKELPQKYLLKRWRRTAKSANEDNEGNATNANNGSLLIVPAPPTNHHGLQSFSAMIQDASVSSMH

SEQ ID NO: 66022 - protein, 774 aa, Zea Mays
MEPSRGGVGGGGRRWGEAEGDAAEEGRRGEDGGEVSLREWLDRPGRAVEAAECVHVFRQVAEAVAVAHAQGVAVGSARPSCFVVSPPFARVAFIESASGSDASGSCSGSDASEDADGDPDPDPDPDASPPLRRRDSAVPGEERAGRSFPLKSVLAMELSWYTSPEDADDSAATFASDVYRLGVLLFELFYTFETMEDKMRAMANLRHRVLPPQLLFKWPKEASFCQLLMHPVPETRPKMSEVLQSEFLNQSRNSLEEHEAALRLREEIEEQELLLDFLQQLQKRKQDIADSLQGTIAFLSSDINEVPHQQSTIGHCENFLSDGDKEVCSGTVEEQSDCGSRKRFRPELQGVDMEENNRSVEECSRTVPSSELIQESVLSKSSRLMKNFKKLETAYFLTRSKLMKQVGSQISSCDRVVKNTTGSAVGTEGSSLDDFSLERQYGTRQRGWVNSFLEGLCKYLSFSKLKVRAELKHCDLLNSSNLVCSVGFDRDREFFATAGVNKKIKVFEYNMIVNEHRDIHYPVVEMSNRSKLSCICWNSYMKSHIASSDFEGIVQVWDVTRSQVFVGMREHERRVWSVDFSIVDPTKLAGSIGTIRTRANVCSVQFQPDTARSIAIGSADHKIYCYDLRNIRAPYCTLVGHTKTVSYVKYLDASTILSASTDNSLKLWDLSMNPGRIIDSPVQTFTGHTNTKNFVGLSISDGYIATGSETNEVFVYHKEFPMPVLAYKFSVTDPISGQEIDDQSQFISCVCWRGQSSTLLSANSSGNIKILEMD

SEQ ID NO: 66023 - protein, 585 aa, Zea Mays
MTVYPVASEPDAAAGADHMLFDVEEPTHSSDNVMNQPGSNRKKNGSSGRKTKSQQSESSSTARVISESSDSEVHPISNKSPQHSPSPSKVKIGPKGGIRKITNRRIAERILMSVKKGQREMASSDSNFVSGYLLARDMKLRSDTRNGNKELIVSSQQSSPSTRSSKKKSTPQIGNSSAFAEAHNDSTEEANNRHSATDGYDSSRKEEFVNENLCKQEVYLRSWKAIEQGLLVKGLEIFGRNSCLIARNLLGGMKTCKDVFQYMNYIENNSASGALSGVDSLVKGYIKGTELRTRSRYFRRRGKVRRLKYTWKSAGYNFKRITERKDQPCRQYNPCGCQSTCGKQCPCLSNGTCCEKYCGCPKICKNRFRGCHCAKSQCRSRQCPCFAADRECDPDVCRNCWVGCGDGTLGVPNQRGDNYECRNMKLLLKQQQRVLLGRSDVSGWGAFLKNSVSKHEYLGEYTGELISHKEADKRGKIYDRENSSFLFNLNNEYVLDAYRMGDKLKFANHAPDPNCYAKVIMVTGDHRVGIFAKERILAGEELFYDYRYEPDRAPAWARKPEASGAKDDGQPFNGRAKKLAQNNRG

SEQ ID NO: 66024 - protein, 652 aa, Zea Mays
MASSPPRAPQLFPFDLNVAQEEVDEEPIEVLEEDVDEEGAPLAQPQEVVVEEVVEKLVEHAVPITEDEPAEDVIMEEPSEEVIMEDEEPTPSPAEEVVGEGKRRKKRVDYEVFVSGLPQDAAEEDVAQALADAGDIEEVRLVRDPADQRLNKGFAFVRFAAAWQARWAANDLREATIKGKACGICKNSETETLHLRNICFDWSKDDLAEKLKPFKLENLDRINLIEHPDRKGKNRGYAFLDFRTHVDAVEAFVKLQKIDLYLGTDSRANISFSNTLSQDDEIMEKVKSVFLDGVPPHWDEDKVREIFGKFGEIDSIQLARNMFTAARKDFGFIGFTARQSALDCIKMVNKDGVGEGSGKVPIKASLQRPRHAFKKYSRQGSSSLLGVRRGFVDKSSSGRGHHSDRYRHFSPVRRSYSDNHSRRHSIDVEERHTSVRGYRAYYRRDSPVHAPSYKYGRTHLETRISEEYTEGRYTSKYPKHRHTMHGTMERDANRRIKYGHSYQERAHRTCPGCKLCGQNYNYPNGEEFSAISGCQEAYYQTDHDLIPSTSQVASHCEGSCCKGQQLKPKSYSVMRDYDYINQESTPSSSDHARTRSNLPAPPHHWHVKHSNEHRRHVTDAHSAFEVRESRSWYLSSKDAPSTHSRKHHRPAR

SEQ ID NO: 66025 - protein, 260 aa, Zea Mays
MDSDVEMNAASDEETFVVLNEEVISERQEEDVSKVSAVLLITREEACALLHHYKWNISKLSDEWFADEEKVRHTVGLLLNGNHEPGSRKLTCGICFEGYSSDTMSSAGCAHFYCHECWEGYISAAIGGGPGCLSLRCPDPSCSAMVLQGMVNELAKDEDKAKYARFLLRAYVEGSKKTKWCPAPDCTCAVEFLGDENYDVSCNCKFSFCWNCTEEAHRPVNCETVSKWILKNSAESENMNWFVAGSGLAFDMWSSSFCFC

SEQ ID NO: 66026 - protein, 374 aa, Zea Mays
MSMAEEGSEAEEGSEAEALEKDGSKASSPSGPASRLVSSNAAGVGSLEVGAATDTSNASRQGLDLGKKGPGAMSMAEEGSEAEEGSEAEALEKDGSKASSPSGPASRLVSSNAAGVGSLEVGAAADTSNASRQGLDLGKKGPGAMSMAEEGSEAEEGSEAEALEKDGSKASSPSGPSGLEDEELQVQDAVASGSKRSKDSAAAATRSANVSSPSVVHSHPAILPAPAQQIPEVKQAVCIPYGFHRLKSLEYSKLVSQCLNTEWTATIGQSEETEELSKITLENKDIQLDINIREESRSSSQQGNFDTEGTSSSEAFLLGTVASEKMLEKLKHKSGRCEPALEKAIVELEHGINGLKYFVCLDPRLQVCSATDTR

SEQ ID NO: 66027 - protein, 598 aa, Zea Mays
MQHLGAMFFELGRTMMMLRTGQSPSEAFVNSGPAVYINSTGPNPIMVQPSFQNTPPFGVSNIPVLGGISGAFGIVDPSRHMNIPSNGASATSGSAAGTTTGSEGAIHGNRQDAARTQGGNPPGFLAATRGLPTRTVVAAVPARSSVGNGAQGNSTSAIPQASVGGVSGVPLIAAQVANALANAPSQVSLSTQSAADQGFHLTTDNRADVLSSSTPATTPQNGPSGTSGSSLPSQDRNTLNVPSLDSIQQHPQLGDTCADTADLSGDATAISTHDAPSNPSVDSSVLKNKSSDEVGSQTTEPSASGSAEPLGLGGGLIPIPKRRSKAVKPSGSTTDPSRDLSSVSQNQDPISVAQQFLEGFASRNTNGSRSNTLSSGPPSSVPQATEVPPRRQGGGQPDIGSMISGMLNNPVFSNMLSNVATQAGGSSADLKSVMEGLQSPAIVDTISNIVQNVDEQDLGAMFGSGRGQGGMDLSRMLQQMMPVVSQALGGAGGRSAGANGGQHRSRPQRIDGEGNAPASSSQIDLHEARQSIEQHESPENIFRAVLETAAQAHGEDNSIQGMVEELATDQELADDYMKLLMEQVRQRIQSESQSGSQP

SEQ ID NO: 66028 - protein, 523 aa, Zea Mays
MAVGGTQPVLRKYLGALKDTTTVSLAKVNSDYKELDIAIVKATNHVERPSKEKYIREIFHSISAARPRADVAYCIHALARRLSKTRNWAVALKTLIVIHRALREVDPTFREELISYGRSRSHMLNMAYFKDDSSAEAWDYSAWVRIYALYLEERLECFRVLKYDVETDPPPQGASSYNVIIQHALSMVALESIKIYTAISDGTINLVDKFFEMQRNDAVRALDVYKRATNQAERLSEFYEVCKTIHIGRGEKFLKIEQPPASFLNTMEEYVRDAPTGQKEKAILAIEYKKEPEEEEKPSSPPAAPEPEPEQVPEPEPEPVKEEAPEAEPDLLGLNEPNPAATAIEEQNALALAIVPIDDAPKAAPTFGNGVTGWELALVTAPSSNETAVAPSKKLAGGLDLLTLDSLYDEANRRASQPASYNPWEATPAAPAPMMTMAPVMHDPFYASNGYAAPHGVQMAAMAQQQQAFMLQQQQMMTMAPAQPVVHHPMQMQQNPANPFGNPFAAAGMPLHAGPGNVYTGLI

SEQ ID NO: 66029 - protein, 1054 aa, Zea Mays
MMGSSTIEQIERSTSCEHSEPSGRKGMEGEILNSPGNYRNSTSVFKKNTPVDHQHIIGDINFLLKEVEGRSNNTSTKVTKDTYHFVAPSITCANGVQSSHLVNPAGRQIGTGLMGHKHVVSHVKISKSNIRSLVATYDDQSDTYSFDIFQQTDSKVSCEGMVLLASLLCSCIRSVKKPELRRASLILLKFSSTYIDDDSRLQLVVPYVIAMLSDPSAIVRCAALETLCDVLCLVQDFPISDAVIFPEYILPMLSLLPDDTEESVRVCYASNIHKLALTAYRFLLRSRSIADIRPLDESVVAHRSQSADSPAKRQDNFFRQLAELRKSIYEIVQDLVMGQKQTPNTRRALLQDIGYLCYFFGHKQSNDFLLPILPAFLNDHDEQLRAVFFGQIVYVCYFIGARSVEEYLLPYLEQALSDDMEAVLVNALDCLTMMCRSGYLRKRVIVGLLVKILPLLRYPINWVKQSAVRFVAACSESLGSVDTYVYLSPHLRQFLHMEPPSLASETALLSCLKPPLPKSIFYEGLEHAQDIGDILLKSSGKKEQIVHGGRYPGTAQSGSLANLEDILRPKGPNISSSMSLYVKNSVSFEKSLYSGFALHASAANSSFYDGLSKGIPSYSFCTDNKRGLGETHMVPDSSVYKASIRLPWLEPNRPAMQTRDDHFSSTRQDFSINDSMKSNSSLQGDIIPNSDTGGLPFSRSAVNLETGWKPRGILVAHLQEHRSSVNDIAVSNDNTFFVTASDDSSIKIWDTRKLEKDIAFRSRLTYSMGNSRALCTTMVHGTSQVIVGASDGTLHLFSVDCARSVGTVVERYAGIVDVKRNEIKEDAILSVVNCSTDSFSPTVLFSTEHCGIHKWDTRTNSESWSFKSSPEEGYISALVVGPCGNWFISGSSRGVLTLWDNRFLVPVKSWNYSTLSPIEKLCLLIPPPSSISSAGRPLVFVAAGCNEVSLWNAENGNCHQMFRTASTDNEAVMSKAPSRPVNKPVIKDIRRAGNYKYRIDELNDPPVRHPGIRSLLPLPGGDLLTGGTDLKIRYWDQASPFGKRRYLGESSWKR

SEQ ID NO: 66030 - protein, 126 aa, Zea Mays
MADAAHVFLLVAVAAALAGRSDGAWCVCRPELADSALQKALDYACGAGADCKPILQSGACFAPDTVKAHCSYAVNSFYQRNSQNPQACVFSGTATLSNSDPSGNGCTYPATPRITVQPPTEGIFIS

SEQ ID NO: 66031 - protein, 555 aa, Zea Mays
MVGVMLENLSHTATIARTTISSVYRTSQIAASVYKSSYHQKAFPEALFHQLLLAMLHSDNKTRIGSHRVLSTIVAPSMACPWSDISFPIPMKGDDSHNLHLLVLSAFSSEAIINETRTKNKIQESLQENNKSEAIVDPENGYTQTEPDKRKYSGGPCLNEHYRTAFNDENLKFMKLNDHQIVLLLSSIWSQASLDDNLPANFEAMGLVYSIALLCSKPKSSSHVTRIRCFQLAFSLRRNSLSPESDLKPSRRRCLYTMASAMLIFSAKIADLHQIIPLVKAAAPEKMVDPHLRLMDDCQLVNTSAESSNSEMVYGSEEDESDALAFLSAINKPDTELIETVMCHFREKFENLPEKVNGIEEQLLQEFSLDDSFPLGAPLFMEMPHSCSMYAEKDEECFDEDTVPSELDDDDIIFEHSGSQSDRKTSGSMASSDVLTVNQLIESVHETARQVANVPVPANPVPYDQMKSQCEALVMEKQQKMSVLLSLKHSRTDSHGSAGVDGLETNESSLLSEPELQSTRKGRMRRCDSASSESDCSFRLPPASPYDKFLKAAGR

SEQ ID NO: 66032 - protein, 356 aa, Zea Mays
MVHSNALLWKKGPVHTVWKASFCKESELSRDKVAGTDIVASVGEIMLDVRSPHGLHLAVLAKLLFGIVRIFSKKMEFLLHDFNELSRSFRLSQLAEPTLPSGRLTLGVLKQANKDVRVGRLVVGQQNTCKVQKTVHAVRTTEVSSAISSEGHSVRVETEVTLGISVVIKETRLPDGLPTFTIPRSFELDSFNLGIAEDIDDEGDDHHQLAHQDILLRDERHHAPYFYEPYQRVSCSYAVDSAGFLPEYIALPNNILDFTEGGKSEIENKNADSAWFTPLKDVLPPEMMGMVAEAKDLAKESKTGDNSVRQVNMNENNRGSDCTMISIPLQESQELQCSDNALENMACGSRSANYTT

SEQ ID NO: 66033 - protein, 458 aa, Zea Mays
MILSRLHVRVTRRSPASAALRDAATRALASAGLFRGLHGGASSEHGREPAGPLTLYRKLVSQGKLTHDSYQENVASELDNLLSRLQRYEMEMEDYHDKLYFWENSREKERRRLLVEEAEDKQRGGVWIDERRGFLDKLVARRRRGSIEPGVGKWVSYLNREKKLDTLVGHRPVAPVAPKGLYLYGNVGSGKTMLMDMFYGATEGVIKHRRRFHFHEAMLEIHDHMHDVWKRRDDDKSIHSSAFSWISSLPFDTKIKEWLIGEEKYKQQTQEKHILLAVADKFLVDRQANKTGASILCFDEIQTIDVFAVVALSGILSRLLSTGTVLVATSNKAPEDLNQDGMQRDIFLELLSKLDESCNEILVGTEKDYRRLIPTEGSTEVHYFWPATSDARSMYEAMWHDITDQSGENIVSVTIPVMFGRSIEIPQSCNGVARFDFEYLCGRPVISQPHFVSVCSSS

SEQ ID NO: 66034 - protein, 267 aa, Zea Mays
MPQGKSKKNVVKEKAKKIKKNAESRAKVHENTDQIEINIREGVSIWITKAAVQKCFEFPPGTDKKLPIDPTTKTFDSLYRVLSVSEKKINVKKKKMKENMKEKQVEEEKIEMNMEEKKQNLVEDEGSQQEESEEEDGEDGEIGEEEGEDGAIGDAKVGGDGDKESAKRGGIKVAVRRNVLTPLNINLMLQNINNDEILKLLVKRNEDTDGTEPNLDIDLIVRCFFAVVLDRLLLPQATFYLSSATLKAVTDLDRLKTVDWSILFSKI

SEQ ID NO: 66035 - protein, 120 aa, Zea Mays
MASKIYLIFCVVFLDMCGFSQFIWLHFYLPLNLIPDAGRQILSLLAAICVYLGISLKVDSTEPKHIKAYCYYLSFMFQTHLILHISTVCLHAQMLNSIYSLPYLFMIDKPIFIDHDINVP

SEQ ID NO: 66036 - protein, 108 aa, Zea Mays
MFLSGMNSSSTSGLAGAPCRLPIWYASSCCRYDSMAWLRSCMQRGSSRLKASILSRSSSRRARNSRSFCVVCSAAVRWWWWWCPSTTSVSCGGFGVVTAYAAPLPLGL

SEQ ID NO: 66037 - protein, 261 aa, Zea Mays
MLTCIACSKQQFAGGGPPLHEPPEDDDVVDGGGGGTATPRTRHAIKALTAQIKDMALKASGAYRHCKPCAGSSAAASRRHHPYHHRGGSAFGGSDAGSASDRFHYAYRRAGSSADATTSMSVRTDFPAGDGEDDEVASEAAGGCGGKDDDAKEWVAQVEPGVLITFVSLAQGGNDLKRIRFSREIFNKWQAQRWWAENYDRIMELYNVQRFNQTVPLVPTTPKSEDESSKDDSPVTPPLDKERLPRTFHRQGGAATNFFAF

SEQ ID NO: 66038 - protein, 92 aa, Zea Mays
MTTTAAGYGCCWAGIPPFALLPRILSTRRETPPPPPPRASLVASSSKLRALAPRLRVSNRPRRLIVSASSSGEANSDAAPSPTVSALYLSSL

SEQ ID NO: 66039 - protein, 165 aa, Zea Mays
MKQVIDRYDSHSKTLQRSEPQSSQLQSHMDDGTCARLKEELAETSLKLRQMRGEELQRLSVEQLQELEKTLESGLGSVLKTKSQKILDEISGLERKRTQLIEENSRLKEQLQVTRMSRMETQLGADPEFVYEEGQSSESVTNTSYPRPSTDTDDCSDTSLRLGSK

SEQ ID NO: 66040 - protein, 720 aa, Zea Mays
MVVIQGGIGPAGLSAEDLHVLDLKQQRPRWHRVVVQGPGPWKTTPGRCMALDTTAKPYEWRKLEPEGEGPPPCMEMETEVSARDVMAMKDHIDLEASQSQQPRKLPPKDLKEIAGSFWLVASMFSKKWQNWRGKQYNFGECKLCFCLSASVAISDLNHTLLQGSTNVGKSAFISAMLRTMAYKDPVAATAQKYKPIQSVVPGTTLGPIQIESFLGGGWHLACEPVEPVRRGSAAAVPDQRMLAAVASRTRNKSATTVLSLAMPFLLSAASASTTTNPHPLSPFPRSQNNSRVHRLQLPARRLPSFPAVAPGASFAPLPQRLGMASLAASAAAAAEVTHLTQRDAAEIDEQLMGPLGFSVDQLMELAGLSVAAALAEVYKLNEHARVLVICGPGNNGGDGLVAARHLYHFGYRPSICYPKRTPKPLYSGLVTQLESLSIPFIPVEDLPNELPREFDVIVDAMFGFSFHGTPRPPFDHLIQMLVSLSDIQNPDKRPAIVSIDIPSGWHVEEGDVDGGIKPDMLVSLTAPKLCAKKFTGPHHFLGGRFVPPPILNKYGLQLPPYPGTSMCVRIGKAPSVEISSLRENYISPELLESQVMSDPFDQFLKWFDEAVTAGLREPNAMALTTANKEGKPSSRMVLLKGVDKQGFVWYTNYGSRKAHDLCENPNAALLFYWNEMNRQVRVEGSVEKVPEAESDKYFHSRPRGSQLGAIVSKQELDSKT

SEQ ID NO: 66041 - protein, 97 aa, Zea Mays
MVPLRAAPPPAPPVGGSPTPPGALLRPTTVPATPPPPSSAVGGSPTPLGAPPRRTASPSKPMPRSQRRDHPHLHPSPEDRPLDARQPTDSPPRPPRA

SEQ ID NO: 66042 - protein, 85 aa, Zea Mays
MAPEVLRDEPSNEKSDVYSFGVILWELMTLQQPWCNLNPAQVVAAVGFKGRRLEIPKDLNPLVAVLIESCWAKSAWTSPGNVYGF

SEQ ID NO: 66043 - protein, 110 aa, Zea Mays
MYLTVVSFPQQPPSRLHPRSCCPGRPGSAGAWWCWQTSRSYRRARPAAAGSPPASIYLEGGSVGYPPTSEPSFHEETRPISRRLAAIPTCLLLLVWSAMLVYPSCPFLHS

SEQ ID NO: 66044 - protein, 119 aa, Zea Mays
MVMVSGGGGNAWAKEMTLRRRIASIFNKTQEHFPTLKDYNDYLEEVEDMTFNLIEGIDVEEIEAKIARYQQENAEQIYLSRAKRAEDLAAALKASRMNPVKAEANDTRSDNLIAGCVST

SEQ ID NO: 66045 - protein, 251 aa, Zea Mays
MVVVFEDFPTEKAAEVMRLATGDDLPIARKASLQRFLAKRKDRLVQRAPYARPSYPTEEPEKKTVKPASALASWLGLGSTEADRLTIALFCGSAHPRQIEDAVLEACPERIQPLPSNVAEPVDVKVHLKVVLSLAMQTWQIRRVFSWIFNHLKKRCFKQFVNPKYIMLYSGATTTVLKEKLLALGSSRILAEHQLQAQLQEQHLKGIWFSFSLCFLNEKKQTTNYSEGSSHPLSHGGSPPWNQPSQRQVCA

SEQ ID NO: 66046 - protein, 439 aa, Zea Mays
MDPAAAALGAVPAAGAPPPGAAAGDQQAAPRVERLSAGVQQQLNLEGMRARAVGLYKAISRILEDFDVIIRTNPSASPKWQDVLGQFSMVSMELFNIVEDIKNVSKVFVVYPRNVNAENATRLRVPGDQRHPQSLPIHLIEVLPLGDGAQNFGDSSGSYPKNMSTFAPNSVNSQGNQIQASGGQLLGRPAPSPGTTGTPNFENVSTPPMPYANSPRSGTNMMNTPSPQQHLTPQQQRQKLMQHSQPLHQPVRPSAAGMLAQSALPQLQDLQGQAQQKLQVPGQQQMQYNQALSQQFHNRQMQPGRMQPGMAQSQLNQGTQLRSHLGQFTGAANNAMFNAAQASSNSQMMANMHGSQSLMPQMQYGMAGGHPHRSHPQMLTDQMFGMGATNSSMMGMQQQQQGLYGNMQAGAQNVPQGMAGLQNQTQNPNFTQQRQQNQQ

SEQ ID NO: 66047 - protein, 336 aa, Zea Mays
MRGVVSIALAYNKAFDLMFPRFCGSARHFGRCARHFGRDIIMPNLKSSVTTIASAVEYMDEVLKALPPGEARNEDSRTLQFNYGSFKHKALDKSLTKKGKTLAILHEFQVLQVVAVGECGLDYDRLQFCPTDMQKKFPGGVTYSFTDLAEDQDRLLSFEKMFIGVNGSSLKTNGNLEVLRGIPVERLMMETDSPYCDIINTHAGSQYVKSVWPSKKKEKYEPDSTVKGRNEPCLVRFKRDSGETPFSVGQAINSPKLVYFEKQFELAKAVKLPMFLHMRAVGEDLCEIMTRNLHRQVLEVVAGSKEISDIEGLSRTLYHNTCRLFFPQDLDASANA

SEQ ID NO: 66048 - protein, 151 aa, Zea Mays
MEQGQGWRRRQIPAFGRWNQHTDEAGYLESAVQAGLVRPGHCYHDDGGNEVVLFRSSASPPPHKPAKKVRSTMEGHGHHHQVQVEAGSRKQRPFVAGDGSRSRAAKPRPRVVRAAVDEDLYIVPSDMSRKKKGRKHVRSMWMGCVGLNCVA

SEQ ID NO: 66049 - protein, 398 aa, Zea Mays
MLTRFLTWKSSTVKVKKEMDSLKRALQDASRERDKAVQDLARLKQHLLDKDLEDQEKMDEDSKLIEELRVVCEQQRAHIMQLERALKVEMAKQEENKKVISEEHQRSNEQIENLNYKLASCMSALESKNVELLNLQTALGQYYAESEAKDRLGGDLAVAREELSKLSESLKVANQTIEISRREKEDMATKLSQAERMLADGKRSMQKLEDDNSRLRRALEQSMTTVNRMSLDSDNSVDRRIVIKLLVTYFQRNHSKEVLDLMVRMLGFSEEDKQRIGFAQSNAGRGVVRGVLGLPGRLVGGIVGGGPSGKSTQSSQDSQSFADLWVDFLLKETEEREKREASEAARQSQQESHTTTGPSTSSSIQQPSQHNPSNVAPGPSTMPHTAWVSQNRNPQQFR

SEQ ID NO: 66050 - protein, 770 aa, Zea Mays
MKRDESSGGEPSFIEPTSGMDDPTLMGSLGGIDGPSLMEPFGRVGGGTSSQTSDIPENGSSNQSVEAHANNGKRESPGDGAARINEVNSSTAVKKKKKRSDRQQQDGPQPKKLLHRVTSQQLEILEGFFSICAHPDDSQRKQLSESTGLSVHQVKFWFQNKRTHVKHLSGREENYRLKVENEMLKEENNRLIRQAQSNAPAPAPAPCPRCINDAGHLLLEKEVERLKALNQMLQQELQLQGTEGETPVAVDPASGAFHPDPEPSLENVFAAQHDGQMLAKLAENAAQELLVLADPESPLWLPVPGGSFETLNMIAYAQTFPGQMSVDAIALKTEATRASGVVMLDPKSLVEFLMDAESYGTMFPGLVSGAATDKVYNWPTSREESYDGAVQMMTVELAFPSPLVAARKCTFVRCCKKLEQGAFAVVDVSLDDGARCRKMPSGMLIQPIRYNSCKVSAIDHVRVDDTSIHDIFHPCLSGVLFGARRWVTSMARQCARIRDVFHVTNCTLNVTSRGRKTIMKLADNLLADYTSSVAAFPDDAWTVQCGVGTEQDIKIMYKRQSEGSSSSSNTAVVCACASFLLPLRMRKAFDLLKNNLLRAKWDVLVNGGSVKEEVRVANGVGSDDAVSILHVKHGHGANRDTMMILQNSSYDASGSFMVYSSLDKQLVETITNPGDSQAMSSINLFPAGFSLVPLTNPDPAPQEGSGSIAQPGATVMTAGFQILMKMARGTGLCPRSVSSAVKIMSDNITNIKDALLKSHPVFYKSIQSVD

SEQ ID NO: 66051 - protein, 431 aa, Zea Mays
MAHARGGGGHGHGHEEEAEAAVCLDGDSEAGEARSAGRAPPWRDQLTARGMVASLAVGAMYSVIVMKLGLTTGLVPTLNVSAALIAFVILRGWTQALARFGVATRPFTRQENTVVQTCAVACYSIAVGGGFGSFLLALNKRTYEMAGEDTEGNLPGSYKEPGIGWMTGFLFAVSFVGIVALIPLRKIMIIDYKLTYPSGTATAVLINGFHTTHGDATAKQQVNGFTKYFAISFFWSFFQWFYSGGDNCGFSQFPTFGLRAWKQTFFFDFSLTYVGAGMICSHLVNLSLLLGALLSWGIMWPLVSDLKGDWYPADMPESSMRSLQGYKAFICIALLLGDGLYNFVKVVAFTVKSLLGRSRLKNAKKEEDIPVLDEIQRNEIFTRDSIPTWLAYSGYLALSAVAVFAIPLMFHEMKWSRSLFLRPGLGRTLVL

SEQ ID NO: 66052 - protein, 683 aa, Zea Mays
MGFDNECILNIQSLPGEYFCPVCRTLVYPNEALQTQCTHLYCKSCLAYVVATTQACPYDGYLVTEADSKPLMESNKTLAETIGKVAVYCLYNKSGCQWHGELSACTTHGTTCAYGNSPVVCNRCGTQIVHRQVQEHAQLCHGLQSQTQQADGSQVQLAAATTQPVTQDPSLASAGSAAPAVTTLPKPSLTTATAVTSSATATGGAAGATTAAVPSSAASISASQTPTAEQWYQQQQQLQYSQYYQQQHPGSNPYMQQYQQYNQYQQAYQHYMQPSMQVPSQNVVQGSAQPASYVQPQVQSSQLMMQAQSQPQVHPLTSQPQLQQHPVQPHPQSHPHLSHVQLPADQSQLHQSIQSAQVPQFQPSHVPLQPSGLQVQPAAHPSALTQVGNQQVATQATAHQVQPHVRVQPPQQQHIVAQQQHPHLQALPPHQNIQPQMQLNSQVQLQPPHAQQQAYPQPQAYPQQTHHMHPQNASYTQQQTQGALLQPVPVSHQQAHVSHHPAPMRPPLPSQQPALQPFQGIQRTTQHGKHIGFHAQWPPMGSNISSQAPPQGFPANSSVSSQSVQPYQQGMSSSQQVHSQPGQPYTQHHVTGNTGHVQTSAGRSMTHLAPTQQFQHQQSAVLRTESPAAAHPIGQGSLDLEKHTSKSGKSENAINAAVSENKISGADSAAMRPTKPQSGRQRP

SEQ ID NO: 66053 - protein, 348 aa, Zea Mays
MCGGWTLCFWVVAAVPFYLATWEHFFTNTLILPTINGPTEGLMLIYVSHLFTFFTGAEWWAQDFRKSLPFFGWIPLPFLSEIEIPLYVLVLILMIVCAVIPTVRSNVSNVQEVVEARKGSMALALAMILPFIVLLAGVAIWCYLSPSSIMRNQPHLLVIGTGFNFGYLVGRMILAHLCDEPKGLKSGMFMSLVFLCFPIANALIAKINDGSPLVDELVLLLLYCAYTVGLYLHLAVSVVHEIKDALGIYCFRDFWPSLSLTAERVGRPLPSDSSIAVDGLFSVSWGVCVEEETTMQPLSLQFSGPVCCFACLFVSQALHGHGAATWHVKKNGPIYISCAGFLYHKTFA

SEQ ID NO: 66054 - protein, 131 aa, Zea Mays
MFNSTLTEDESSHLPVVGVIMMTYYSVKGRFQEWWIEEKVKLSSKFVRCSIEGFNQRLSSFLQILSQVDYAAPYSSSSIHAASTTCPSIPTIYLPMRATCVEIRSSPVMLDPGGLQLVDIPYVVLKSQEFG

SEQ ID NO: 66055 - protein, 552 aa, Zea Mays
MELVYMERRNGSYDDGAVPEFSGRGAGGDQDQDPPAAASEVQSDSRQTPDEKKSKGCQSCRDPFCSCSGGTPHSELFPPHPAKMMILEFLIASLRHPTRTHNVSDLDDLIADGVSQGSVVNLGPSEKKVLESLHAMVNAKTRPKSPSPFMAGSKLRKIRSKSHVITQSEILKLISPETWEASSFPGASPMIGGGTAEDGVHGNKPPPPCCSSVSSNQHVLSRCPSSLSACLLQCIWKDGLPHFELSLDDHPIAVYAASPVRVLEKDRAFDYVYMIHSGEQGRKDWMGHSSNVSRLVGKVKVSSSLVLNPDKSGLLETEFVLYGSPDDYLRQMRSPYSVPKGKGLVRRVTEIMRAGNVSASPRHPWKLGKSSSHQFDDLAGVLEGEMISAGGSDLVSLKADDLPSNQELAAIVVREQRRRRRKEPVSGGWGLKFLEKAGLNRPQGTEETDVQNSDGATHCVTVVVPRGYHGGVVSKSSRPSGLVERWRSGGRCDCGGWDLGCPIRVLNGDGCGSLPEGESRDRRSVEISIKVTNIELVCSKLLWFSFIHRNCC

SEQ ID NO: 66056 - protein, 389 aa, Zea Mays
MNSLLRPPLPGPTPRLSARRRVSSPAPVRVGSAVLAGGERRCQRGLAVATSVAPSWMEEAGVAVLEEGGRRNPSVSDSYRAAGLPQPNATVLDAQARVCTGPAQTRPLGEEQAMRVLDTILRSAIGELKEEPVSSAQLGAFFAGMTIRANSFPEATQWSEGERRAMSIFWPRLVQVLPPEVKFIADPEGTILGANGLAEPRYVGQGTGEMRLVGALREVLAGGHLGYEEVQCVLKDILPIGSSSDSTVVSQALLAAFLIGQRMNRETDRELKAYCLAFDDELGPPPVADVKSLTHYGEPYDGNTRFFKSTLFVAAVRACYGESCLLHGVEWMPPKGGITEGQMLKFMGANIHLSPTQAKILLEDETAGFAYLNLQEACPPLDGVMNFSY

SEQ ID NO: 66057 - protein, 407 aa, Zea Mays
MTVAPGNSGCLYIVFPRKSIVVGINASTGNISWTQNTGPISNEKNLPTVDSNGWMSIGSLDGALYSISPDGEMRKFLGETANGSVIHVGPVLDCSGLSMYVAKTIAEGKSIQTTGDYTYVSVKKPSFILFTLLAPATGTIYWTGEYPGELSNLLSSSDLDDFTVDETVVLTLLSASKTGISNTTQCCTRRQKIASTCRQAKAKFVQADSGEPSYVLLLIFLLVVIVIEAVAISLCCIFWAKKRLQGNGLQKFLEKRHSLHSKRRILGKKISELEQKAAEDVSSNEALGKLGEMVKAKESVERKLSGSYSLGRDEPSLQQQGSLPLYHGKYSSHSFHSSQKESITVFNVLSDTSTSGDGTSSCSSDDSDYESCSGTSSGEMELDVWPSRSAEEAGHSNTANVEEESPT

SEQ ID NO: 66058 - protein, 197 aa, Zea Mays
MFILKDFLVWIKENLGPWGPLVLALAYIPLTVLAVPASILTLGGGYLFGLPVGFVADSIGAAIGATAAFLLGRTIGRSYVLSKCKDYPKFQAVAIAIQRSGFKIVLLLRLVPLLPFNMLNYLLSVTPVGVGEYMLASWLGMMPITLALVYVGTTLKDLSDVTHGWSEISTTRRILIISGFVLSALGLEEQIKLIFNL

SEQ ID NO: 66059 - protein, 84 aa, Zea Mays
MTVEPGFGGQKFMPEMMDKVRTLRKKYPSLDIEVDGGLGPSTIDVAASAGANCIVAGSSIFGAADPGAIISVLRKSVEGSQNKN

SEQ ID NO: 66060 - protein, 538 aa, Zea Mays
MGKVKQKVATAAEDIVLEDEDDAERSSENSVPPVILDLNQSFGEGSEEGEAGEDGSYDEEDGDCDGGSMSRVAGGSSSSNSSSTNHHTSMSNKNYDTNNSSSCKGEGSGETAQTVRQYNRSKLPRLRWTPDLHMAFVHAVERLGGQERATPKLVLQTMNVRGLSIAHVKSHLQMYRSKKLDHESAGAGHDRAAIYSVFKPMDLHMMMRRGDHRFHDMFLHRAAAAGSVISSPLLHNGDLFGSRDAVSPEASRLYALLQRRQQPSSTQTDQVWTFSRHAAAAAAAARAGAIDDDHGPTKGLIHDMILRKDGRLTSHLFGLWDAIACNRTSSNAAGAASHGARVVTSTDWNGTCSSSRPLSVTMSAAASTGLAMGSHHLMSRGRGGSANDVTSLDHAVVTNEALGSRLQTLLERNNAAKLTGEEMCGGTRTKMLKTAMEGKNGGMQEPDLQLSFSPNDDMEGDANKQIKKRKIIDGIGFSQQEVDSDKSMLPLSLSLSLRGGDIGGEDAGRFEAAAGSGGKKAALGRSTLDLTMSIKALE

SEQ ID NO: 66061 - protein, 245 aa, Zea Mays
MWRSKQQLQDDKVSQIEEPTSFLATVWGFLSNFISRNGILFGLLSGSMFFAWTGVFFYLYGWDFLNEALLYHLTRTDPRHNFSIYFYHIYLHHQQGFSSIQRLASFLPQLIVQLALILRFSRDLPFCMFLQTVAFVAFNKVMTAQYFVWFFCLLPLILPWSSMKLKWKGLACAVVWMGSQLHWLMWAYLLEFEGRNVFVQLWVAGLMFLAANTFVMLMVMKHHKYTLLFSTPLKSGNKVATKKEE

SEQ ID NO: 66062 - protein, 155 aa, Zea Mays
MVPSSVALAPCREQFPLADAPAMAPFFPAQRLGSPSPKLERSWNSWSLAPLFFPATSMVASFPWSPSLHASLFIFLPADFPPLLLLAPSSFSLVRQQGAPARTAAVASKSLRSGADPKQQPRWLRALPACCFVLRGEQHAIDARQVFAVFAQPHP

SEQ ID NO: 66063 - protein, 1002 aa, Zea Mays
MGRTRSSSSASRSSPPLAETQTPSRRLSTPPIAKTLTPPRRSPSPVSRRMSTGSSGPTLNGTRGASPVKSNHRSSSPKLHGWQSNVPGFSFDAPLNLRTSLTDRPVCRSRGGSPSSFSGLEKGSRGRRLSMSPTPPRRASSSHSIERDRMSSYSKASATSSGEDDLESMQSVPISYSSSPVVKKSLVVMKTRTIASSKNLSKKLTPSSVPKRSFDSALWLMDHRKAPQDRFRPLLSGAPANTFGAGNGNDVHKPMFSHNSSLTTSSTASSYHGATFGSYMHGSQEQHDFAGEWEADDISQGHEDIFMFDKLDELNEDIHYKSMESTDNSLVIVKHLVSGRQDLEGSRRPNQSLCHSTDISHVSFKATCSRCGKFFDAMDVDEEGVYCDACATKDGNILTSPIVQTIGEENQQYGKTANLKPCIASDSPVPTDCEIYSKEVSLDHQLVNNESYADCLDQAPPIHSMGHTPQEMLLGQEENIDAEHRNKHVGDSLGNTNDNSFHRSSVDECEQTEPTSVGQDLFIIDQMNNHNRGLSQCNENVSESVTCDNSHQLGSTTYQNPKLETTEDTGISVLLVPKPNSNKWPNMLCSEPYYARDGVSMMKRSFGLGSSSAASSSDLGSSRQSIICFERLRSGKKGDFEKSQISSTISCQSIASVSDMSICSSSASLCPQSDAVGDSCFPIDTLESGTSGTLISSQENDDAFCKDTLPSAMECPSSSQFIADDDSPGDMKIQSYLSEVGYTTVENHSACRMTDMDCTSTNMYSLDTEMPSDTLESSGPVESSMPETEEDAYTISQCNKGSAPEHSSDENNFDNIQMQSEIVQGSAEENRLDDCCMSAISEEDVLISGQEDDIRNLPNDEELCAEVEGPRKQIQRCFTLEEAADTILFCSSIVHDLAYKAATIALENKKEPKFVDSIRPTVAIVRGSFAKEESLPKLPHRRTPNRKVKRKRLEGETTTTETTEKDVVANDSPPVCSASGITRNSDNMKPPKLESKCNCIIM

SEQ ID NO: 66064 - protein, 123 aa, Zea Mays
MQIIGFSVRFLSSFLWIQMYRLGASSSTPTYFETNHEARISFLSPRSDSVRRSPTADDILGGSIYDPSYYSSLFEDVRNNACNHQGDKQSGSNDSGSTSAGQTPRLKSFANDVEGGLKRPLNS

SEQ ID NO: 66065 - protein, 975 aa, Zea Mays
MFDDDDDGVDPQIEDVNRYYFEDGEEKPVCFSILPFQFAWKIRLDSEHPNIYVLSIEHKWIKLLKPRKCYGDIVRSTLITVQMLHFFGRGEQRSSNHLWDHLDEVFGKYNPKPVEDDLMKHHTLIKLFVEKDQTLMKSKILQRLIENGFKRTKKALGMEAQSIVSDGWRARKNDDNNYGNKDDSGDDCDGDGSSDDGDGSSDDDVTDQICALCDDGGHLLSCDGPCKRSFHPTKKDGRESKCESLHYTSAEVKRIGTYLCANCKNKQHQCFRCGELEPSHGPNAKVFQCNQASCGYFYHPKCIAQLLDPNATDGELERRIMSGMSFPCPIHWCFKCGHMENKAQRALQLAVCRRCPRAYHRECLPRDLSFGTKDKDGNQRAWKLSDTIFIYCLDHEIDKDTGTTSRNHIKFPATPEYTKTKGLGNSKGRMTGKRRKNKRRKNTDQSTKPTDLPNRLCGAESEQADNVGAKSTLPQIVVEPHCAAKHLKGDPQIAKQGVAARQNGAETMKGHENQFGISFCVASTETEKRVTCLAQRGTCLGTQYDGPSTKGMYDCSVQDTPMDDDVELDNVACIIAVDKYVNGRGKTQEDYTRKEAAQRKDSSENQGQNDALELDNLRMEMQADERPLEPGNKRDRKWQKNVYGLGSASGQKETLSRRENPRSDRGMVHSNDSKTIYYRKGGTEVDNVDDHPLEKQDHQDTSSDGSKKRSRPVDNASGGNRPYLDENKKRNLREDGRYAHYEDWRSERNTAADTSGYKAQSEEKPVWTNTRTGSREHSLDRQRIECGDSYRGTYNNRQRHEWLHPHASGNSSRIGWDDRRQWSSSRSPFPSAEFGGDRSCSRAHPRGSKYRTGGRHDHPQYLGLGTPQHGTSRPHHTMGWDRDTFHDHQHGRRPPHHTMGWDRAPFRDHQHGEYDDSRYGEYDATDNGPDSAHRPYTAAGVAGRSAPSYQLAGGYGEGSRAWRPVTDKYAPWPLP

SEQ ID NO: 66066 - protein, 626 aa, Zea Mays
MDSVRAFSTSPCVRKSTHCGNILFIQRAGFASPTPIQAQSWPIAMQNQDVVAIAKTGSGKTLGYLLPGFMHIKRLQNSTRNGPTVLVLAPTRELATQILDEAMKFGRSSRISCTCLYGGAPKGPQLRDLDRGVDVVVATPGRLNDILEMRRVSLKQVSYLVLDEADRMLDMGFEPQIRKIVKEIPHRRQTLMYTATWPKEVRRIADDLLVHPLQHIEVITPSEKQRRLEQILRSQVSGSKILIFCTTKRMCDQLARTLTRQFGASAIHGDKSQSEREKVLNHFRSGRSPILVATDVAARGLDIKDIRVVINYDFPTGVEDYVHRIGRTGRAGATGVAYTFFCDQDSKYAADLIKILEGANQQVPRDLEDMASRGGGRGKKRNRWASRSERGGPRSELDSRYSGRDGLASSGRSESGRGSHGRDDYGSRGRYDSGETDGRSRRSARGRSRSRSPSPKRSHHHEARRSRSRSRSRSCRNFRASRSKSHSPVASSRHEKAAVISGSTQPNLGYAEHKSPPRSHSGDDHVNHPDQKDDHMGDGKMERVDLDRSPSPQYDKSAPYSPAYNGKASDSMSPNVQPKADAKYVKPSGKPEPASPLRHSKGRDDDEGIIDDDGEIAEGEMMMKVS

SEQ ID NO: 66067 - protein, 1142 aa, Zea Mays
MVVQKQRRVPAEVFWPKVVLKKWLNLKSKDLDLGASLAADYDDDDDGSDVDGQENCGCDDGGGGGGARRPDDDGDGAQITDDSLESAPYKLRRRNSETLRAQYINTKELRVCVGTWNAGGKAPPNDLDIAEWLGTGGDAEPADIYVLGFQEVVPLNASNVFGAEDGRPARAWESVIRGALRQAQPPAPRYRCYSHPPSPSRFEPPIGAAEELLPGGTDTETDTDEDVPLGDPVAAATPTPRKLSRLNHFSVVVGENENGSSELNGDELDDGPDQPPQQLSLQQRALLRSLSRADRVGVLWPEQPLDLLPASSASASASASFRASKSFSRAAYRSSFRGSSRVAADVVDDLPMIPDLDLDGALRKKGRSPFVRIVSKQMVGIFLTVWVRRGLRKCVQSLKVSTVGVGAMGYIGNKGAVSVSMSVYQTMFCFVCSHLAAGEKPGDVHKRNADVHEIHRRTRFAAPGDLQLPRNIHDHDRIFWLGDLNYRLDASYERAHELISAGSWRELAETDQLKRELRKGRAFDGWTEGVLEFAPTYKYELGSRRYVGVGDHQGQSQSQRGGGRRTPAWCDRVLSYGKGLRLLGYRRSELALSDHRPVTATYAAEVEVFSSRKLQRALTLTDAEVEGGQASRMPHQALGDTAIYPSPTYLPTSSIDIHATIAKAAELHAVLLQGGSAAASIVGAYASARQSLALICLQPAASRVLTITRSGLLAMAIEDYPVFALLLSDLKCTRRNKHQATTVSTAGEGSAPRVSAGIQHLDTDIRITRNIDRGEKSHRPSGEMRRFGTAMAAAAADFRSRRSRGRHVHLYPLHLCPLVRSWLRISFPSISLALPGPLLYMGRRVCDALELLVNDSLLAWVCHNSTLQLEMAEECLLQAKDLSGLLLLYSSLGDAEGIEKLASLAKEHEKNNVAFLCLFMLGKVEDCIQLLVDSNCIPEAALLARSYLPSKVPEIVAIWRDDLSKINPKAAESLADPSEYPNLFEDWQVALTVEKSVASQRGNYLPADQYDARVPLDTVFTASVMKMYLKYESPEVLANECRRPLCPAPLFDGLHAQFLLLLPFYLSRHHLQDEAATVPCRGAHLEYQEHHVHPVGQEYRDRQGHCCHCEQRLEQYVHDLPVPVTQQSAQPPPDVVCFLCFL

SEQ ID NO: 66068 - protein, 480 aa, Zea Mays
MAIEKKVDGLVAMGDTAFKPSLEHAVKLLDDRADKKRAGFIVLISDGLDGQSKWGDESITPTDPIRGLLRKYPVHTFGLGKAHDPKALHYIADISYGIYSSIVTDNLDKIIEAFAVCLAGFKTVVAVDACVDIWSNSLLITRIDPGGYILRGSSGGILVGTLYAGEVKDFIVYFSYRTGSWSGGYYTILNGINARVTYREAPGRQSTTTDTCSVSLPIHVANSSSPPANPCPPYPMVLQQMVRLKVLDLLISVLKEFLVLKGEAASAVHGKEGGDDPVLQAIAASLLQRKWKEFKQSDESWKEAPRNFVNLGGIDEDISAMVGILKRGLGVGCIHSWLSSNQMQRATATGGLPGAHMVATGQFRTPAMNAMVQEAHRHLAREASAHDAGTSIVCKRAVELLDGINKRFDLWCKLDQELPRTNQPSPHQEEGHESRDLTAVLRGDINRARQHDIYLAADHAIKQWRSFLTSVEKTHGHGHI

SEQ ID NO: 66069 - protein, 97 aa, Zea Mays
MLSNELVLEAAKEESCGEGGELLTAEREIDICAGASGAYYKGCFWKMCATRSIPSYYQSIFPFPWTTLEARHSCFSSSGIKGALKYTLYCHCPSWAA

SEQ ID NO: 66070 - protein, 119 aa, Zea Mays
MRINEVSKEYFLKTVSNIVGDKLLKQAASQYQMQAQRSPQTNPSNYSLSGQVSGQQTAPSGSVTGDEQKGYPWAHTIPMRQAIASTRPPQFRPSSSGQMRSNTASRAATTNIFTSVWGK

SEQ ID NO: 66071 - protein, 204 aa, Zea Mays
MDADVGAGATNQPWPEPDDAHLSPPPPPPPPPASAPTPAAEAAAPTASAAVSPPAPAEANGNSDRKRRRKADDGDGCKACSCKKSRCLKLYCVCYASGSHCTELCGCEPCHNKPPQGAPWTAPVLPLKPVQTLEAGQEIVEQLIRSPMDLIRRKCTCKKSGCLKKYCDCYQGGAGCSINCKCDDCRNPFGRKGNAIEELENGFY

SEQ ID NO: 66072 - protein, 432 aa, Zea Mays
MLVDEYGSNAGFQLPNLICTKVLEEEEENSSEGRSLSFEAVTPEQDAPYNDDNEESQMPVEKHHHILEEVDGELEMEDVAPPSDIGATTKCQPEQSDTNRAPSDQRPSDAGPPLPVDRPPSPPPLPSSPPPVPVPQSAQMQPKLQMASDPMAPHPQRATYSVQSQQQHSIAEHPGNMNSSVAPLPPPPFNSSGYGGQQNQIPPPPPMAPLNPPGPHGSFPAPPAPYHGNNYHRPPTTSMPNEGYHQQPPPPPPPPNQFPSVPPEHQHRPHHWGNNCPPYPERYRYNGHDRGNHRHDRRHHGHDRQHHYDDRGYHYDDRGYHYDDRGHYFDDRRHHFDDRGHHFDERAIRGPMHNDAADQGRYSFPPGPPRIPDHFEAPPAPMHYGRPSDPPPRPCAGWSRPPRISDNYSPSRHSVEPPVSHTAGGHGGWRPR

SEQ ID NO: 66073 - protein, 138 aa, Zea Mays
MKRNICFGVQKSNFFWEKCEHIVCLEKSNFLLTDAAPVPRHRLSEAARREVQDDEQQQWRRCRRPWRGHGYGSGWRGGRAARRRGCAHRVPLIPHGLHPHDSRRAGGALPRPQRVPLPRPAPNETGCCSHPEVPIRHC

SEQ ID NO: 66074 - protein, 366 aa, Zea Mays
MGIMEDVTIIPQPVGDSSKVDLVMNLVERPSGGFSAGGGISSGITNGPLSGLIGSFAYSHRNVFGRNKKLNLSLERGQIDSIFRLNFTDPWIDGDNKRTSRTVMVQNSRTPGTLVHGGDHPDHGPITIGRVTAGLEYSRPFRPKWSGTLGLIFQHAGARDDKGNPAIRDFYNSQLTASGHDYDDTLLAKFESIYTDSGDHSSAMFVFSVEQGLPVLPEWLSFNRVTTRLRQGYEIGPARLLLSASGGHVEGNFPPHEAFAIGGTNSVRGYEEGAVGSGRSYAVGSGEVSCRMFGPLEGVVFGDYGSDLGSGPKVPGDPAGARGKPGSGYGYGVGVRVDSPLGPLRLEYAFNDRQARRFHFGVGYRN

SEQ ID NO: 66075 - protein, 472 aa, Zea Mays
MGFRQDPQFGPLINLFPGTSTEVTVPQRPAKAPVLRLDAQGREIDEQGNVISMTKPTNLSTLKVNINKQKKEAFQIIKPDLDSLAKSSVHFDERMGINQKKLLRLKRPGFQFVEEGKLTRQAELQKIKSQFGEAQAKELKVKQAQLAKAKTEVDMNPNLIEVALGVRAPKQKQKEEIPEIEPWDAKILLSATYEDVSVEKLNLDKITIYVEHPEPYDPPAEPAPPPPQPLKLTKKEQKKLRTQRRLAKEKDRQEMIRQGLLEPPKPKVKMSNLMKVLGSEAVQDPTRMEMEIRTAAAEREQAHVDRNIARKLTPSERREKKERKLFDDPTNTVETIVCVYKIRDLSHPQTRFKVDVNAQENKLTGAAVITDSISVVVVEGGKKSIKRYNKLMLNRIDWAAAVGGDEDAEAEAEADKPVNSCELVWQGSVAKPTFHRFTVHNCRSESAAKKIFVDASVPHYWDLAVNSSEGSP

SEQ ID NO: 66076 - protein, 219 aa, Zea Mays
MQNPNCMVMVDNCYGEFVEISEPAMVGADLIAGSLIKNPGGTIAPCGGYVAGKEHLVEAAAARLSAPGLGVEFGSTPGHVMRALFQGLFLGPQMVGEAVKGGLLIAEVMSAKGYKVEPLPRVPRHDIVQAVELGSRERLIAFCEVVQQTCPVGSFIKPTAGETPGYASEVIFADGTFIDGSTSELSCDGPLRDPYAVFCQGGTHWTQWALVLGNVLKVI

SEQ ID NO: 66077 - protein, 67 aa, Zea Mays
MNALFLDLVRVSESYGLKFPREFALLMKQLLYFDRYTRLLAPSMNMLRDERINISTNRQPRRTDRFQ

SEQ ID NO: 66078 - protein, 235 aa, Zea Mays
MVVVPFSLRIARNPIRLRLLPVSAARFTRLAMSTTPPAAATISVEYAKSGRSICKGCSGVIASGALRLGASARDPRGFGATKWYHVSCLPSSSYPLGPIGSIKGFDSIKDHDRAELRELEKNHKRDNTAVSPPEEQRPKKARIQMFSPAEGVPDNVTVSVEYAKSGRSTCKGCSENIAKGALRLGASFPDPRGYENTKWYHVVCFPTSSYPLFPMSNLKGFDSIEVCAFYFAKLL

SEQ ID NO: 66079 - protein, 1613 aa, Zea Mays
MGCSPEGGSAACPDCLRRLVLRDLAGSGLSFVYGLSDSPLPFAASAVVQIASDGDEGSIGRQHISSFVLVGLCGGKVPFNSQQCDNSSLENCIHKDPQAEQTLYNGDNEYTEQSDSSSCIECIEGCKSSSGPCKQPLAISTITKLAPACYLSIGHTSEVRELITGYLTSSSEEYVINSLNLLFENKISGSAGLDFLSFVGFSAFDDLHSSGCVRHPNILPVLGILETSDCCYMLQPKAPYTLENIMHYSPEAFCSDWHIRFLVYQIISAVAYLHDLGVHHGNLRPSKILMSDSLWPYLSISDTCPVKHSWGVANHKCSPNSCCFMEDCSSKAIYSGFKLQSSLDWHSHFKQWWKGELSNYEYLLVLNKLAGRRWGDPGFHTVMPWVIDFTGIPDESSDNGWRDLTKSKWRLAKGDEQLDFTYSSSEVPHHVSDECLSELAVCSYKARRLPKTILRSAVRSVYEPNEYPSSMQRLYQWTPDECIPEFYSDPQIFTSLHSEMSDLALPSWATSAADFIYLHRDALESDRVSQQLHHWIDITFGYKLSGEASVEAKNVMLPSNDPSRPKSIGRHQLFTRPHPKRLVSTPHAVYHNNLDSCARCCGKRSGATTDAVLNGCGSPNMVSEIGRLEEFEKATLFAELEYQLNPVYDYADGDPSTCFSSNKYPKKQNADQILQHDNALPAAPNFDLGSFLECFESDDNSHMGYQELLLWNKKSNSQNECHANDVFSIGCILAEIYVQKPLFDNALLSAYKEIGIMPGALQGLPSHVTLLVESCIQREWKRRPSAKHLLESSYFPPSVRSAYMFLAPLQVLSTSRERIKYAAKLASEGALKAMGEFAAEMCAPYCLSLLSSSLSDVDTESALSLLKEFLGSLTIQATKDLVLHIIQKILQAPEYSHLKVAFLQDSFIRDLWKKLGKKTYIEKIHPLVISNLYSSPNKIIASAASTVLIVSRGLLGENFVVKQILPLLLNVIFSCIDSSKMSKPEPQHSWNSFALIDSLSALEGLVLVLPVKTVIKELLQDQACLYVKVLMQIPLDLRVIQVAATALIDLCQRIGPENTSIYVLPQLKELFAELAFSHDSSGLNHPIKGFKSSDENKNKPIKVESRIDLLLLLYPFLASLVGIEKLRESCSTWFLLEQALQRLYNWKWEPSGDCSKNAENMKGQRLQPGNYMSSEFVPTKLLFNGVGWSMPQSETTKKNGRNTAASNLENETSSDNLSTSSSGNQPWFWFPTPDSSWGVPEFLGRGGGLRDELPWKIKASILYSARAHPGALRSLAVHDDECTVFTGGVGPGFKGSIQRWELPNMNCTSGYYGHEEVVNSICILSITGRVASCDGTIHIWNGQSGKLIAAHAESSTTFPLQTPSIEQANMLNQDALSGGILSNAFRGSLYTTMHYMESEGILVAGMGNGSIRFIDISQDQKLHLWKSDTAEISFSSLVSAICSCGSNKLRKGSLMASSWIAAGLSSGYCRLLDKRSGNIIAVWRAHDGHITKLAAPDDHLILSSSLDKTLRVWDLRRNLATQSNIFRSHSDGISNFSVWGQDVVSISRNKIALTSLSRPESEIGHQQLALQNLYSADRGVKHKNLSVLSTIAVLPLSRLFVVGTEDGFLKMCH

SEQ ID NO: 66080 - protein, 172 aa, Zea Mays
MSFSFYSQNISGRNDWLLFFSFAKKLEKMEHTIVRAKSSEVGCSNVERKLRQLLDITENEAYFHTRQSAFLYHLGVQTMPKTHHCLNMRLTVEYFKSGSSHVDQLNDQKLESPALHHYVIFSRNVLAASTTINSTVMNSQVSLSRTLILNRNETLRMSLAARAACSCDLCQE

SEQ ID NO: 66081 - protein, 973 aa, Zea Mays
MLRNSTHETFAEKLYQKFKDNPHFSKPKFSRSGFTVHHYAGNVTYQTDLFLDKNIDYAVNEHQVLLNASKCSFVSSLFPPCEESTKSTKFTSIGSSFKQQLQSLLETLSATEPHYIRCIKPNNVLKPAIFENSNVLQQLRCGGVLEAIRISCLGYPTRRTFYEFVNRFGILQPKVLGRSHDEVTAAKMLLDKANLAGYQIGKTKVFLRAGQMAELDALRTEVLGLSAKKIQSKLRSFLARKKYIELQQCATQIQAICRGTTARRRYENLRRDVASLKMQTCYRMHYARKNYVEICSASTNIQSGLRGMGARIKLRLKRQTKAAVIIQSRCRCYLVRSRYVRLVKATITAQCGWRRRVARKELRNLKMAAKETGALQAAKSKLEKEVEELTWRLQLEKRIRADLEEAKSQENKKLQLQLQELQLQLKDTKDLLKREHEAAKEASEKAAAVPEILADTAQVNELTAENEKLKSLVASFEEKLQNAEQKFEETEKAREELVKKATDAESKINELKNTMQSLQEKLTSTEAENHVLRQQSMKARPDNMPLLNMHRKSNLANGSLHSDEQTPHGTPMEFGRRSIIERHNESVDALINCVVENVGFSEGKPVAAITIYKCLLHWRIFETDKTNVFDRLIQIFGSAMQKQDNNADLAYWLSNSSSLLIILQKSLKPPGSSVTTPMKRPQTQTSFLGRMGFRASSITVDMDLVRQVEAKYPALLFKQQLTAFVEGLYGMIRDNVKKEISSVISLVIQAPRNAKAGLITDQGSYWQTIVKHLNDLLEILQENCVPTVFARKIFTQIFSFINAQLLNSLLVRRECCSFSNGEYVKQGLDELETWCTVAKPEYAGSAWDELKHICQAVGFLVIFKKFRISYDEIISDLCPVLSVQQIYKICTQYWDDKYNTESVSEEVLDEMKKVVNEGSGQGTSSDNTFLLNEEISLPLSLEEIANSMDAKEFQNVSPPQELLDNAAFQFLRS

SEQ ID NO: 66082 - protein, 1842 aa, Zea Mays
MRTIAEEDAIAAESMRDAALKDGALLRHLLNAFFFPAGERRDVSRQLVALWADSYQPALDLLSRILPPGLVAYLHTRSDEDSRSQYDEAPLSRRQRRILQQRRVHGTKTMAVQEQGIPPNGVEDGEPFRHISAGTYGGADVHQRHVGLYSSTHSPSPGINIDPSHTVSVPHGSVPEALSENNQQIEAPQLDSHVYSVDSNANGNLVSSLHSDFSVPAQVVVENTPVGSGRLLCNWYGFWRAFSLDHNRADLIWNERTRGELRAALQAEVHNLDVEKERTDDIVLGSSVTEDAAGSDNLPRISWNYAEFSVSYPSLFKEVCVGQYYLRLLLESGSNYRAQDFPLRDPVAFFRALYHRFLCDADIGLTVDGAVPDELGSSDDWCDMGRLDGFGGGGGSSVRELCSRAMAIVYEQHYKVIGPFDGTAHITVLLDRTDDRVLRHRLLLLLKALMNDLSNVEACVLVGGCVLAVDLLTVAHETSERTAIPLQSNLIAATAFMEPSKEWMYIDKDGTQVGPLEKDAIRRLWSKKSIDWTIKCWASGMSDWKRLRDIRELRWALSVRVPVLTPTQIGDTALSILHSMASARSDLDDAGEIVTPTPRVKHILSSPRCLPHVAQAMLTGEPSIVEAAASLLKAIVTRNPKAMIRLYSTGAFYFALAYPGSNLLSIAQLFSATHTHQAFHGGEEAALSSSLPLAKRSVLGGLLPESLLYVLERSGPSAFAGAMVSDSDTPEIIWTHKMRAENLIRQVLQHLGDFPQKLAQHCHSLYDYAPMPPVTYPNLKDEMWCHRYYLRNLCDEIRFPNWPIVEHVEFLQSLLVMWREELTRRPMDLSEEEACKILEISLDDLVLVENGSSKRPSDLSSANSGNKTENIDEEKLKRQYRKLAIKYHPDKNPEGREKFVAVQKAYERLQASMQGLQGPQVWRLLLLLKAQCILYKRYGDVLEPFKYAGYPMLLNAVTVDKDDSNFLSSDRAPLLIAASELIWLTCASSSLNGEELIRDGGIPLLATLLSRCMCIVQPTTPANEPAARIVTNIMHTFSVLSQFESGRVEVLKFGGLVEDIVHCTELEFVPSAVDAALLTAANVSVSSELQNALLRAGFLWYVLPLLLQYDSTAEENEICEAHGVGARVQIAKNLHAVHATQALSKLSGLSSDDILYPDNKPAYNALKALLTPKLADMLRNHPPKELLSNLNSNLESPEIIWNSSTRGELLKFVDQQRASQGPDGSYDLTESQSFTYEALSKELIVGNVYLRVYNNQPDFEISDQEEFCIALLKFIAELVQQWNSVNLEETIHQHGSVIEASISENDQVSDSTIEGKMDNSSGKQSTDGDSEVIINLQCGLTSLQILHCNPPCRDGALAVLYSLASTPELAWAAAKHGGVVYILELMLPLQEEISMQQRAAAASLLGKLVGQPMHGPRVAITLARFLPDGLVSAIKDGPGEAVVSSLEQTTETPELVWTPAMAASLSAQLATMASDLYQEQMKGRVVDWDVPEQASGQHVMKDEPQVGGIYVRLFLKDPKFPLRNPKRFLEGLLDQYVSSVAATHYEAIATDPELPLLLSAALVSLLRVHPALADHVGYLGYVPKLVAAMAYEGRRETMASGQATSASKAEPSEHDNSAHSEATVQTPQERVRLSCLRVLHQLASSTTCAEAMAATSAGTPQVVPLLMKAIGWQGGSILALETLKRVVGAGNRARDALVAQGLKVGLVEVLLGILDWRVGGRQGLCNQMKWNESEASIGRVLAVEVLHAFATEGAHCARVREVLNSSDVWSAYKDQKHDLFLPSNAQSSAAGIAGLIESSSSRLTYALTAPPPQPSLVRLPSSSPSPPSAPANPSGRHSYQRL

SEQ ID NO: 66083 - protein, 265 aa, Zea Mays
MGERNDLTENFENDSLSDSFSEPQISDTLCVEAQRKFTKTSAPSSSLRQSTMDSLYEFGETSRHEPAGKKEQDNVELRKTSRSFLPFDMSGQEPPFCTQEQVDKCSFGTLADDEMGYDNKPMEKSSNLERQTELSCVICWTDFSSTRGILPCGHRFCYSCIQGWSDCLASRGKVSTCPLCKASFTWISKVDEAGTLDQKVYSQTIPCEASTDVFVLGSEGYDFSGPTSGQGACYQCHFREPEELLLSCHVCRSLWVLEILLVGIF

SEQ ID NO: 66084 - protein, 379 aa, Zea Mays
MRAIALSRLYRRANAFLHSILFRDLTLRDLLRADGRRVVYILSAIINFLHYRQDKLSFLEPIVQEYSPLQERHTELRAKIAELRNAKEDHLLKEQMEAPVVQQLEKEVNALKQRLREYNKEQLSLRVATKAIDEKKQELLGKMNQADFELVKVMQEKERLSAKIVHSPEKLLRTLEEKKAVRDELRNSEKVAMQKVQEKTNTLETYTKVSEKLVKHLSKISAVHEKGTVAKASEKDVKAHKEKIGDQNLEIKALRNKAAEWQLKVLENEGILNAKEKERDQRVAENNLKMNALKSEVESEHKCLEEKEIKIKEKLEKVAELCSQADSVAEAGNKKIQEICGKYNQVCEAANMYMDGIDRSFEEIDEAAVSLKAIGQSGA

SEQ ID NO: 66085 - protein, 316 aa, Zea Mays
MHNMHTMNTKKFKTVRMSSRWQIIAYMIHMPHVLLVSYQYQIRRSFKQCTQNCSVIIGSLQQIAQQEGFRGMYRGLSPTILALLPNWAVYFTVYEQLKSFLSSNDGSHQLSLGANVVAASCAGAATTIVTNPLWVVKTRFQTQGIRAGPIPYKGTLAALRRIAHEEGIRGLYSGLVPALAGISHVAIQFPVYEKIKAYLAERDNTTVEALSFGDVAVASSLAKVAASTLTYPHEVVRSRLQDQRANSDARYKGVIDCVRKVYHKEGVAGFYRGCATNLLRTTPAAVITFTSFEMIHRSLLDLFPAEPEPHIQPLKH

SEQ ID NO: 66086 - protein, 924 aa, Zea Mays
MAPSAAVPGGSEVEGSPRMAKFLCSFGGSILPRPLDGCLRYVGGETRIVMLPRDISYADLAARMRELYKDADIIKYQQPDEDLDALVSVVNDDDVVNMMEEYDKVIATGEAFTRLRIFLFSQHLDDDAASVDVHYNVDERETERRYVDALNSLGDVKSPSSPVSVEQLFGIGGNDSGIPDFAGLRHLNVPRPTHSQRYGEMDSPWSPAYVSPGQYGVHDPRDFPISPSSARFQVGAEDFDERTPDDFVRQSPKYRHYEAHSPSHMDNLVWLPPGAVIQQNAGFPGNLSRSNNFLDGSNGCDHCRSPFHKVQGSVNDPIYMNPRWTRPVQQHFDQPSMINDYPGHHANSCPDYCRPGDHYVGGQDVRLENGVYVKEQNGGHPPMFYNESHPHDRVWHVHTKQSHQRYEDPRLHHPANGRVIEPYIMDANKVYEVHSASLARSSHESPHYYHGSSEVINDTYHNQQVGGSGSYVQPAGFEESPSHHYNHSSAYGADSFYQMQQNLPPIQSLRRRANSPVHTASPYDSPHLPISNGTINTNFVRNTGDVSPRIPGLPGYDRMPNTWTPPNGSIPYRVVGHDVHAASMENTSAFGPRSNPTAAQYVQHFIAPESIQHQPGAPLREVHPERSYPEPMPSSYVDGKVAVSALPLTDQLSRLDTNTIKKPEGPDDVNSTQNVNETTPLHAVDEPSTLPHHVVVVHEVDTKQGKPTEHESRQKQHEAGATALQECGDISEDRLNFLPELIASVKKAALEDAAETRIAQSDANGAVSPVPDDDDDNEKKLDAAAAGTTDANQDPDLQGSIDRQKSSKIESTTAEAEALSKGLQTIKNDDLEEIRELGSGTYGAVYHGKWRGCDVAVKRIKASCFVGRPSERERLVCLIFLSVPSILGFVLADVCTDITVLVPQSPSHYFLNDILSYPAGLRRK

SEQ ID NO: 66087 - protein, 559 aa, Zea Mays
MRTQAWGRGAVARLMTPFNRRAAHASSPHLLRACSSASYTIALARLRRHFTSSASFSPAYSARQDTHTFMEVVQEVLRHGSADSVRAVIRANKKSYSLVQLIAASFDVYNILCSKNDISMVLSTKEHHEIMENLSIKCSAYCSILPSVTSIPSEINPQEPSSNEAISSVSTLITETNSSKKIKGDDPALILYTSGTTGKPKGVVHTHEGILSQVQILSEAWGYRSEDQFLHCLPLHHVHGLFNALFAPLYSGSVVEFIPKFSVSGIWQRWRESYPNDASKSTEAITVFTGVPTMYTRLLQGYDSMDPDQKSASSYAAKHLRLMMCGSSALPSPLMKRWEEVTGHRLLERYGMTEFVMALSNPLHGIRKEGTVGKPLPRIEAKIIMEDGAETTTGVGELCIRSPSLFKEYWKRPEVTAESFIDGGFFKTGDTVTVDEEGYFIILGRTNADIMKFGGYKLSALEIEAVLLEHDAVLECAVLGLPDEAYGEVICAIIVPKEDAKKKAGQDSKPALTLEALTSWSKDKLAPYKIPTRLYLWDSLPRNAMGKVNKKELKKLLGA

SEQ ID NO: 66088 - protein, 304 aa, Zea Mays
MAQGAGRDPEELFEELWRACAGPLVELPQTNERVFYFLQGHLEQLQEPTDPALLAEQIKMFQVPNKILCKVVNVELKAETETDEMYAQITLQPEPDQVDLPQLPEPPLQETSRPVVHSFCKILTPSDTSTHGGFSVLRRHANECLPALDMSMPTPTQELITKDLHGSEWRFKHIYRGQPRRHLLTTGWSTFVTSKKLIAGDAFVYLRSETGQQRVGVRRLVQKQSTMPASVISSQSMHLGVLASASHAIRTHSIFLVYYRPRLSQSQYIVRLNKYLESSKIGFDVGMRFKMSFEGDDVPIKNCR

SEQ ID NO: 66089 - protein, 704 aa, Zea Mays
MTGDGEGVESSAAGERQGVPFALGGPLFVPFMVGPITTIPEFMSSALHELQALEDELGDTRDEFSNELCVDELKVLSEEELVERALQEAMEDSDSGTQPQPEDQTLDGGMSANPTPTIQAPTLSPLAERESSGLQDMADVLNEPQSSNGKPRGKEANSRCRKGETGTFTLDSPVVGESHGSAIDMSIVPFEPEEGINGQTTCRKGKKRGRHFDREVRAEILQGSYLTKADKWVQIKAKQDEDKFAARLHSFSGNSVKPKGSKSSCEKIEMARSLNLIGAPWKNKALRSDEHRPVVRPEVILCVEIYQKTYASVKSQELLLLGSQFLTDLRDNIYCLTDKVMKVAGQHDHSGYFLIEDTFYNDTRHRSATDYSKPILDWLENSSDEVTEKWDAITSGVLKKRQKDLLRGLSISNVPEFKSEKMQTTRISDLHFRPGAGYLYCHQGNCKHTIVIRDMRLIHPDDTQNQAEYPLQTFQLQRRLQKCSVCQIYLATKGVGRGHAGQQRGGHRTRSSAQTRGSGAPRPYPQRPIPARLHAAPRRPGHGPPMATPTATALTCSCRPSSPSSSSAAFRRLNIFAPVSGAHSPPRRRLRLAPLHVVDDSKNPPEERSETDKMVDGMDFGELCSDFECISSPYVESTARQVARDILELREDNRAFNCYAVSVKYKDPLRTFVGREKYRRPLWITKALENPVVSRKCQCSRRAT

SEQ ID NO: 66090 - protein, 442 aa, Zea Mays
MLPGSPVKRLLRRAAKGRREKAELAGLAAAAAALLLLCAASLRCSATARGRLWAGGVSIAAAGSGGEEECDLFDGDWVWAGGGGGYPLYDSRDCPFLDVGFRCAENGRPEASYTKWRWQPSRCHLPRFDAKSMLEKLRNKRVVFVGDSIGRNQWESLLCMLSSAVHNKSSIYEVNGSPITKHMGFLIFNFRDYNCTVEYYRSPFIVLQGRAPAGAPEIVRYSIRVDAMDWMSDRGKWKDADVLIFNTGHWWNNEKTIRGGAYFQVGDEVKMGMSVAEAYRRSIETLSDWLRKEVNTSKTHVIYRTYAPVHFRDGDWKTGGSCHLETLPDAMPVKSLDEWADLLQPVDEFLGSDLGSELAGVDLLRVTGMTAQRKDGHLSVYLSPSGPVPRYRQDCSHWCLPGVPDAWNELLYALVMRRHKKMAGTRTPDAEEGDVFSSGSSS

SEQ ID NO: 66091 - protein, 203 aa, Zea Mays
MAAGGTADFFYRESQRLGYVARSAFKVACQNLGPLEKGGIVVGVDVKKVKVPSAHCDSRVRTVCADVMTLMKRQARAMSPQERGFSVILSDMCPPVSGITTKDGAISCELGMRALSLAVGKIKLKDSNYSDTLEKYLSSTEPESDEDGVLRRGGNLVVKFLENEDISGFGKFCKVKFKKVSLLRPKATRPSSREIYMICEGLR

SEQ ID NO: 66092 - protein, 123 aa, Zea Mays
MEADLERGLIVYEEPGPEPTDLLSSAWCSSAAIRVLHAGPKDECSMALVEHPVMALGSGRSDVLAKSGRSRSLVADSSGFSTAQWKYDDLKSWLWLQKAIHPELDYDLCLKKKWIISMSCIQL

SEQ ID NO: 66093 - protein, 85 aa, Zea Mays
MSLRPSEREQMRKGNYKQTVDAEESRCRCEGQMMDMRKAKREESFQKKRCDGFPASAAGVPPMGHSTALQQKVRCPPPLFFLAPI

SEQ ID NO: 66094 - protein, 1446 aa, Zea Mays
MPGTSSTTSLTYKYLEQVGVDFDDKNSWEYLFKLYWLDLKGKHLLTIEELKSAKNYWTVPTTAGRREKEESSDELYDASNDQDATFDISSKKQRQNNSSGKRGQKRKKDGGITSRKRGISINSAGSLPNGSTGEGMSLAGDTKWASSELLEFIGHMRNGDSSYISQFDVQVLLLEYIKQNNLSDPRRKSQIICDARLSNLFRKPRVGHFEMLKLLEMHYLVKQVPTLNADSERAFDSYSAQVNHGGYNELSDKLGSDKRRKAHMKIERESTINPEDYAAIDMHNINLIYLRRSVMEDLIDEVAVFSDKIAGAFVRIRISGLGNKQDMYRLVKVLGTHKVAERYTVGKKTTDYALEISNLEKKEIITMDTISNQDFTEEECKRLRQSMKFGLTARLKVRDVYDKAKIFQSLQFKDWLENEKQRLSRLRDRASETGRRKELRECVEKLQLLNTPEETERMINEAPEVHVDPQMDPSYESAEEPDYKKAVDWTMHRNGPDLLFPGRKGTKLNSVENHTQNSLDASGHISSLPTEDVDHRLGAGSNINLNNMAPEPASLGVLSNDTEPEKVWHYKDPNGNVQGPFTLLQLSNWASFFPRDLRIWLTFESEENSLLLTEVLPKQQKDFIQPSTVTTSDKSIWAGSGQDRINSNANNSSSPSLSAECYDPTKYLKPLGGTSPSRSLKDSHALHEVQNQVNDSSTILSSAGSYVPTSSHDERVSRDRVDEWNSSQDNGGIWNPTMNHSRKSNAQQHPDGFTGKDQMLTESKCSSHMVSVLTPQQSERDPATSLSTTSRPECKTMCRQEGSSWSSATNAGVHDLQLTIALTKPETCSPTNPVEDRDSSSASAVSCQSGAPACIPQPDPTSTCNSSKIEATMDLHKTCQPDTSNESFGRLPEPQSGSLFSLKTLNLESEHPSSTPKLEGKETSMNQSGSTSVAHENLATKTRVRPPTSKIDSLQPLKERSCPTERDSITQLEHLFEENVVKRNNEVVNPVSDAEGIAVSDVLESLTEQDCEKYSTHGADCEKYSTHGAAPLQNLVPASAEEEQPQCSSPIALSPWGEPSYYQGEAVDSALWGVQDGNDMWSMPSPTPGLQPSSEEARADHGDGAFVETLPRQGDEKTEHANSSVSGSGVPEQVKPKASTASGPSLDGSTKALGWQLLGSSLEGSAKASGWKPPALSIEGIANASGSQALYPTQGSTKSSGCQRSSSSPDGSRKASGWQQSSTSPVGSGKAHGWQRSGSFTQGGTKAAGWQPSGSSTDRSAKVDGWQRTSSSPEGNRKASGWHSSGRESSKITYGASENRKSFSSHQATTPTGRHSLARRQGSSDKGAAGWEESLGNTWEASKRQQRNSDKNAGCGEALGSNRTWHPSSGNPSRSSQGNHQHDRHSHGSDSRRGSSNYPRRSDHRHDHGSGGSSRPSSRGQPQRGVCKYYENGHCWKGSKCQYLHR

SEQ ID NO: 66095 - protein, 56 aa, Zea Mays
MDDVYGRIEVFPQHFVPSKEAMETPDGLSTIHVSVPGLQDELRELHPFCIYCPFPA

SEQ ID NO: 66096 - protein, 246 aa, Zea Mays
MDFHSKATNYLVTASDDESIRLYDTQDAVVVCIALCSGKENFLSCSLDRTILLWDHRAEKPQGLLRAQRRPTVSYDAQGMVFAVAYGGRIKMFDIRKFGMGPFATFSVGTDDSEAHVVQFSGDGRRILLTTKAGRVHVLDSFEGNSIASFRAKPILTNSTLEASFCPEGNHIVSGSGDGSVYAWNVESGKVACWESTDVKPPRVRWSPGSLMFVTGTSELSCWVPDLSKLESFTISHTNTRSSSSL

SEQ ID NO: 66097 - protein, 245 aa, Zea Mays
MGSSTDHAAGARGKKQGSQLWKKALLHSSLCFVMGFFTGFAPSSVSDWTSAAAAAGGRVGSSHVVRALPAGGERHHQRNVALGHIEHHRLAGVVLFAGLGDVFDLRFFDELRGISAFGAWPVATMRRGERKVVVRGPACSSAAVTGWFSQDLGGSGTAAASASTARPGELDVHGFAFNSSVLWDPERWGRYPTSEPDKSQDSMKFVQQVVLEDFSKVKGIPSDCSEVMVWHVDTAAPSLQNKKRR

SEQ ID NO: 66098 - protein, 123 aa, Zea Mays
MADLLLLLNNGNPLWVVKLFLVSERYDRDLNSLKLSGIPPHELVPCKIQCPQLGAHTDARSYSATQIVGSNIKSIKLRQQAGVDSNLTRERVVPQADYPQQWTTLQGSGQLTVQPIGGQVYGL

SEQ ID NO: 66099 - protein, 310 aa, Zea Mays
MGGGAEIAVKRLSARSRQGAAEFRNEVELIAKLQHRNLVRLLGCCVERDEKMLVYEYLPNRSLDSFLFDSRKSGQLDWKTRQSIVLGIARGMLYLHEDSCLKVIHRDLKASNVLLDNRMNPKISDFGMAKIFEEEGNEPNTGPVVGTYGYMAPEYAMEGVFSVKSDVFSFGVLVLEILSGQRNGSMYLQEHQHTLIQDAWKLWNEDRAAEFMDAALAGSYPRDEAWRCFHVGLLCVQESPDLRPTMSSVVLMLISDQTAQQMPAPAQPPLFASSRLGRKASASDLSLAMKTETTKTQSVNEVSISMMEPR

SEQ ID NO: 66100 - protein, 1198 aa, Zea Mays
MAPTKRMEKLKLSTLLTFMRCHRGSSDDHSRIGTVGFSRVVYVNEPDMLEEEGFNYPLNEVSTTKYTLATFLPKSLFEQFRRVANFYFLVSGILALTPLAPYTAVSALAPLCVVIVATMAKEGVEDWRRKQQDHELNNRIVKVHRGSGHFEETKWKNIKVGDVIKLEKDNFFPADMILLSSSYPDGICYVETMNLDGETNLKIKQALEVTLDLQEDTKFREVRQTIKCEDPNANLYSFVGSMEWRGQQYPLSPLQLLLRDSKLRNTDYIYGAVIFTGHDTKVMQNATDPPSKRSKIEKKMDQIIYVLMSSLLMIALLGSIFFGIWTKEDVRDGGLKRWYLRPDATTIFYDPKRAALASFFHLLTALMLYSYFIPISLYISIEIVKILQALFINQDIEMYHEESDKPTHARTSNLNEELGMVDTILSDKTGTLTCNMMEFIKCSIAGTAYGKGVTEVERAMAMRKGDSLDDDIENGDYKDKKNHNSPNVKGFNFKDPRIMDGNWIHEPNKDMIRDFFRLLAICHTCIAEIDENEKVSYEAESPDEAAFVIAARELGFEFYKRSLATIIIREQDPSWNVVEKRYRKYELLNILEFSSSRRRMSVIVKEPEGRILLLSKGADRLAPNGRKYEEETRRHINEYSDSGLRTLVLAYRVLDEKEYKEFNEKLNTAKASVSADRDVKIEQAADSIEQDLILLGATAVEDKLQQGVPECIDKLAQAGIKIWVLTGDKMETAINIGFACSLLRQDMTQIIVTLEQPDIIALEKDGDKYKIFKASKKKVMSQIEDGIKQIPPSTKISTASFALIIDGKSIPYALEDDVKFKFLDLAINCASVICCRSSPKQKALVTRFVKQVTHKVTLAIGDGANDVGMLQEADIGVGISGAEGMQAVMASDVAVAQFRFLERLLLVHGHWCYRRISVMICYFFYKNVTFGVTLFLYEAFASFSGKPAYNDWFLSLYNVFFTSLPVIALGVFDQDVSARLCIQYPQLYQEGVQNILFSWCRILGWMLNGVMNAVLIFFFCITTFEDQVFRRDGQVAGLDALGVAMYTCIVWVVNCQMALSVNYFTIIQHIFIWGSIAVWYLFLIVYGSMNPRFSTTAYMVFIEQLAPALSFWLVTLFVVLATLVPYFTYAAIQIRFFPMFHNKIQWKRYLGKAEDPEVARQLSSRHRTSSQQRMVGISARRDGKAMQITRETEIEVQE

SEQ ID NO: 66101 - protein, 228 aa, Zea Mays
MEAMTGGKFLQKFRLYETRSKFYLIGRDKSRIHWRVLKIDRLESTELGVDEDPTIYTESECQELLWRIHEGNMLTGGLKFVTKCYGIVGFVKFLGPYYMVIITSRRKIGTICGHEIYSVGKSEMIAISSVTVWPNVAYSRDENRYKRLLCSVDLSKDFFFSYSYNIMRSLQKNITQKNTGQAVYEPMCVWNEFLTRAIRNHLKNTCWTVALVHGFFKQYHLFIIEDHK

SEQ ID NO: 66102 - protein, 523 aa, Zea Mays
MANTSSDTLDSSTVQEKPVVPGHIISEISSHVQKEESAVSKRRSNNEPSLCIAVIGATGELARTKVFPALFALYYSGFLPRNVGIFGYSRKKLTDEGLRSIIEANLTCRVDHHENCDDKLIEFLKKTYYVDAGHDNQEGMVRLNSRMSQIEGIGAANRIFYLAVPQEALLDVALPLADGAQTKQGWNRIIIEKPFGFTGLSSLRVTQSMLSRFEEKQIYRIDHLLGKDLIENLTVLRFSNLVFEPLWSRTYIRNVQVIFSEETSNEIQGRYFGNYGIIRDIVHSHILQTIALFAMEPPVSLDGEDIRDEKVKVLRSIRKVNLDDVVLGQLKDMSGKVDRYTKSMIPTYFAAAMYIDNARWDGVPFFIRTGMGLMTNRAEIRIQFRHVPGNIYRERFGHDIDLDTNELVLRDQPEEAILLKVNNKVPGLGLQLDASELNLLYRDRYNTEVPDSYEHLLLDVLDGDSHLFMRSDELAAAWNVLTPIIHEIDQNRVVPELYEAGDRGPINAYHLAAKHGVRWDDDW

SEQ ID NO: 66103 - protein, 66 aa, Zea Mays
MRSPFFLSLSSPFLPLLDAARPLRPSAALGTRRPTAAEPSSYHRSAAAVEPISMKSITVASLPEKL

SEQ ID NO: 66104 - protein, 75 aa, Zea Mays
MLTVQTRVISIAQKKMMAIRKPHSLIQYPLTKEKDQQIQLNRHLKGSNKGRYASEKKWTSNPPRTKVSLRSSSTF

SEQ ID NO: 66105 - protein, 130 aa, Zea Mays
MVARGDNTGESIPMLLRIPRFFDPWGGYDMIGFGDIIFPGLLVGFSYRFDRANRKGVLSGYFLWLIVGYAVGLFITYLALFLMDGHGQPALLYLVPCTLGVIVILGWLRGELYELWNFGKSPGENFVNEP

SEQ ID NO: 66106 - protein, 667 aa, Zea Mays
MGMNRGAFMPNKSSANQASFESVSRSGHCSKKVSPEEKLNLKEASSSLQTTESGHAEAEFTSAANTEHSGQSDFIFSASTFHQSMLHPQRRHNKKKSGGMGNHASSIQSLPSSAIGLACSEVSGSQQCVDLAAKWTEYNKIEPNRVAISRGARCSTSENFGDHDNCETWRLRGNQAYAEGLLTKAEECYTHGIDSFSPNEVSRKALMLCYSNRAATRMSLGKMRDALSDCQEAIDIDSSFLKAHARAANCLLALGDVEEAQKAFEMCLKSNHLSSLDHKIVEEASDGLQKAKKISGLISHSEEYLIKKAFDKIPSALQMISDALSISIYSDKLMEMKAEALLLLQRYEEVIRFCEETLYVAERNSVCLCLDKQSESNNMVNNTCFVKLWRYHLIAKSYFFLGKLEEANQFLKKNDQIKVMGCRCGNQSQDSILSFSMAISELLRLKAAGNEAFQSGKYLEAVEHYTAALMSNSESLRFLAVCFCNRAAAYQAMGQILDAIADCSLAIALDADYAKAISRRSSLYELIRDYGQAANDLRRLIALLEKQLQEDMTMPVERSESIRNNLNRANLRFSSLERDARKGASLNMYLILGIESSSSAVDIKKAYRKAALRHHPDKASNFLVRSENISDAVWRDITNEIRRDADYLFKIIGKAYAMLSDPTTRRE

SEQ ID NO: 66107 - protein, 123 aa, Zea Mays
MLFLHTITLLQAPSPPPSLPQIILPYHQHNPRRTAPKRRDAQQESIQPKNQSQKLFHLTVQRQHRSSPLSRVWELMCVQGVVKVSFAPIMDHSPSHKSQLLPTIQTRNLLRNQLFHRPRKGSM

SEQ ID NO: 66108 - protein, 933 aa, Zea Mays
MAMAAAVLEEALRWGGGSVGDDNVAARRAEEAAIRRHEAASWLRKTVGIVCAKDLPEEPSEEEFQLGLRNGIVLCNALNKVQPGAIPKIVGVQSDTAVPADGSALCAYQYFENLRNFVVVIQDFGLPTFEVSDLEKGGKSVRIVDCVLALKSFSESKKTGRQAACKYGGILKPLVSGNYFILKNCDAFMNKNARIHTEEATLNGFRGEQNLSLDCSPESYEVITSDNLSTIIRTILLDKKPEEIPLIVESLLNKVIQEYELRFANQNLMDEEKQNNLTTKEEASFAVNGSNAAQKFHLKAEINFDLQHKQIKGLRGTVSSIKSGMEQLKLHYSEEFTKLGKHLYTISNAASGYHKVLEENRKLYNQIQDLKGNIRVYCRVRPFLPGQISSLSSVAGMEERTITIMTPTKYGKDGNKSFTFNKVFGPAATQDEVFSDMQPLIRSVLDGFNVCIFAYGQTGSGKTYTMSGPKVLTEESLGVNYKALNDLFNLQAQRKGTIDYDISVQMIEIYNEQKGLAVPDASIVPVTSTSDVVELMNQGQKNRAVGSTAINDRSSRSHSCLTVHVQGRDLTSGTVLRGCMHLVDLAGSERVDKSEVVGDRLKEAQYINKSLSALGDVIASLSQKNTHVPYRNSKLTQLLQDSLGGQAKTLMFVHISPELDAAGETISTLKFAERVASVELGAAKQNKEGSEIRELKEQIASLKAALAKKEGEPENILSTRSSPSIYRIRKGNATPATPKDRQPMEEVGSLENVFTPAQKRSKMHLLGILTENNSSNSVQNCNVPQKEIGLGGWVDKMALGDNHFENSNSILELEPDTAQLPTSFYHQRYSPVQQSCRTESVPSLGLHGFDSATSCSNQEIVVSTMGLKASGVANRGASTVKKYEATSTRSTNLASKSPLLQKKLQTPTRNRNQLTSSTIGGRRTPNGKIGIAK

SEQ ID NO: 66109 - protein, 269 aa, Zea Mays
MDYLLHLLDSSEHPFETIHDFIFDRTRSIRQDLSMQNIVNDQAVQIYEDAVTFHIRSHQRLSTSCQDSAASSLCYLNMEQLTKCLLSLYDMYHVLHKCDSHSKKEAEYYSFYVLLHLGCKIHKMIDSLSLWYGQLATPVRRSKEMIFARSLLRCYRLGNFKRFFCMVAAEATDLQLRLVEPFLNEVRARALMYFNYSGYKLQHHPLEHLSGILMIEESELESLCGICGLEITRSEGTKAFVPKQTSFNLPTSMPQSNGIYVSREFERLI

SEQ ID NO: 66110 - protein, 1330 aa, Zea Mays
MTMGTVVGEMLASAVLKVVMGKLGAVIGPEVNMLWKFKDDLESIRSTLLTLQAVLNDAEKRSSREERVRLWLKRLKFAAYDIHDILEEMESNNDIGYGSFKKLSAHITIAHKMKKMRQRLEKIKEEAKLDIFNFKADCCSLDENVNSRATFSCISEDIVGRSTEKETIVAMLTTYSEEEILTICIYGFGGLGKTTLARLAFNDENVGGVFDYRVWVYVSMKFDLKKIGESILSEIDEGNCGHHGNLQEVTRHLQRVLDGKKFLVVLDDLWEDNWIQLQNLKAMLSCGAKGSKIVVTTRTGKIASLMDHCMPYKMDVLSDDDCWILFKRRAFVPGRDDPRIEVIGRDIVKKCNGVPLSAQALGFMMRFKEGVAAWEAVRDSEIWEIEDQNIMPSLKLSYCLMPCHLKLCFAYCVVFSKGAAIDKDMLIQQWIALGFIQPTSGSLTHVKRGEEYIRELVSMSFLQASMFSSSADNHHMKAARVFQMHDLVYDLARCVANEEFLFMDAKKSGMTSARNDHYRHIVLMNYVEVPMNSKAALCKAKSLHFRDCKRLQISGRSLSLTLSKFLRVLDISGCSMLGLPSQLNQMKQLRYLDASGMQNELKQESFAGLKCLNALNLSAGYFQKLPVQIVNLEKLHYLNLHGCSRLMLIPESICELRDLVHLDLSGCINLRVLPTSFGKLHKLSFLDMSGCLNLVSLPESFCDLRSLENLNLSSFHELRELPLGNHQELLILDMSNCHKIQILPMSFCNLLHLEDLNLSCCYELQELPEDFGKNRGLRILDLSNCHRLQTLPDSFTDLVNIEKLILSDCWELVQLPELLGFLQKIQVLDLSCCSQLFALPESVTKLTNLEHLNLSCCISLEKMPGDYGSLKKLKLLNISYCFKVRIPNGIANMSNLKCLMAVGLDGYSCGNKDDFNIVSSLLCMPRIDLSKKDSPIGDFHGILKHKRLHLFGLGNVQSIDEFENLGLCRHQQLNSLRLSSSYMNGNEVAKFIPDDIVLEKIIPPRTLEHFELLGYHGSEFPEWMLNLTTILPNLVHLKLSGLATCDHLPPLGQLPNLQSLVIECIPNVKAVGEVFAGGSRAFLKLRDLTISGMPNLERWLTTLSTTNEEAHVYVFPNLHHLKVSWCPKLIFEPSLPQCLLLEIDACGEILQGWTASHSQINLRPTRRLSFQFCDLSFSRGDQLHFFSSLSSLKFLTVRSCEGLDTWGESIGTLTSLEVLELSLCDIPMFLGRIASLQSLSIEMCHLPCDFSHYLLQLPFLRQLQIVCCNAKLELPGEITRAILARIPNISIHNVGCVRHIEQENGICQNVSVDKLILLIAVLYCDVVRGI

SEQ ID NO: 66111 - protein, 354 aa, Zea Mays
MPVENKKPFAPPREVHVQVTHSMPPHKIEIFKSLDDWARDNILTHLKPVEKCWQPQDFLPDPASEGFHDEVKELRERAKEIPDDYFVCLVGDMITEEALPTYQTMLNTLDGVRDETGASPTAWAVWTRAWTAEENRHGDLLNKYMYLTGRVDMRQIEKTIQYLIGSGMDPRTENNPYLGFIYTSFQERATFISHGNTARHAKDFGDLKLAQICGIIASDEKRHETAYTKIVEKLFEIDPDGTVVALADMMRKKISMPAHLMFDGQDDKLFEHFSMVAQRLGVYTARDYADILEFLVDRWKVVNLTGLSGEGNKAQDYLCTLASRIRRLEERAQSRAKKAGTLPFSWVYGRDVQL

SEQ ID NO: 66112 - protein, 615 aa, Zea Mays
MLTVPSSPLSPATGGSVKIVQMTPVTSAMTTAKWLREVISSLPDKPSSKLQQFLSSCDRDLTNAVTERVSIVLEAIFPTKSSANRGVSLGLNCANAFDIPWAEARKVEASKLYYRVLEAICRAELQNSNVNNLTPLLSNERFHRCLIACSADLVLATHKTVIMMFPAVLESTGLTAFDLSKIIENFVRHEETLPRELKRHLNSLEEQLLESMAWEKGSSLYNSLIVARPSVASEINRLGLLAEPMPSLDDLVSRQNVRIEGLPATPSKKRAAGPDDNADPRSPKRSCNESRNTVVERNLQTPPPKQSHMVSTSLKAKCHPLQSTFASPTVCNPVGGNEKCADVTIHIFFSKILKLAAIRIRNLCERVQCVEQTERVYNVFKQILEQQTTLFFNRHIDQLILCCLYGVAKVCQLELTFREILNNYKREAQCKPEVFSSIYIGSTNRNGVLVSRHVGIITFYNEVFVPAAKPFLVSLISSGTHPEDKKNASGQIPGSPKPSPFPNLPDMSPKKVSASHNVYVSPLRQTKLDLLLSPSSRSFYACIGEGTHAYQSPSKDLAAINSRLNYNGRKVNSRLNFDMVSDSVVAGSLGQINGGSTSDPAAAFSPLSKKRETDT

SEQ ID NO: 66113 - protein, 208 aa, Zea Mays
MSTSPAAADVSPLPPTAAADEAARATETVVVDERVASHVDPFLVEALDNPRHRLMDSDAASIMGTLSTGKDEPVNVDPSVDETKVSTMNSRSRVAVFKDTEKDRSDPDYDRNYKRYVRSSVPGFNLSPGVFNFVVPQFMQYDIGYVQSPGMSTNQHTMYFGQPDLTIGSSGAAVYRHWPTPTMMYPHCYDNVSPMMSQVPLYQSFNHD

SEQ ID NO: 66114 - protein, 606 aa, Zea Mays
MGKGAGAAEPSTVVLAVNGKRYEAAGVAPSTSLLEFLRSQTPVRGPKLGCGEGGCGACVVLVSKYDPATDEVTEFSASSCLTLLHSVDRCSVTTSEGIGNTRDGYHPVQQRLSGFHASQCGFCTPGMCMSIFSALVKADNKSDRPDPPAGFSKITTSEAEKAVSGNLCRCTGYRPIVDTCKSFASDVDLEDLGLNCFWKKGEEPAEVSRLPGYNSGAVCTFPEFLKSEIKSTMKQVNDVPIAASGDGWYHPKSIEELHRLFDSSWFDDSSVKIVASNTGSGVYKDQDLYDKYIDIKGIPELSVINKNDKGIELGSVVSISKAIEVLSDGNLVFRKIADHLNKVASPFVRNTATIGGNIMMAQRLPFESDVATVLLAAGSTVTVQVASKRLCFTLEEFLEQPPCDSRTLLLSIFIPEWGSDYVTFETFRAAPRPFGNAVSYVNSAFLARTSGSLLIEDICLAFGAYGVDHAIRAKKVEDFLKGKSLSSFVILEAIKLLKDTVSPSEGTTHHEYRVSLAVSFLFSFLSSLANSSSAPSNIDTPNGSYTHETGSNVDSPERHIKVDSNDLPIRSRQEMVFSDEYKPVGKPIKKVGAEIQASGIYSYTDT

SEQ ID NO: 66115 - protein, 600 aa, Zea Mays
MRGGAHEGRRQWRQVDACARNISARLDFDANGYGDLMDMIFLQLSSMARDMCTQVRRTACKSLGALAKFSTQYTEKALDLLMDMMNDDTEAVRLQALEALFSMATYGCLSVQEKHMHMFLGLLVDANVLIRDAARKIFGLVNMPKLQIFKSAVDGLVTSLEKYPEEEDIYGIMFSIGKNHGSFSANIAKHLAKEITMASDGELILDKPRVKALLIVSISAPFSDDKHKQLGIPSIIFSYAIPLLEKISCALGEVDQDSLLSYLYHKGGMPFWENRSVSAEFGESESCNVETVKIGAHIENTAKEAKCLDEVLVMKSILEIVEGVWTMRMSCNVCEVRTIFRTCKEELRLLAENSSGSIGALLSFLSEYLDAILFIVEIWQLIQLDKPYTCGLTSLDILLERLDMSVRRMKYCYIGLNRVLEVQVLELSLIAHLCRLSKIAVCSKVVLGKVLWVINRLEDLCADGSCELSDFSGEIKKACDTNRIGDNLIGNINNLFQLFHLKPTTDFGMLKVISAMLRVCDNDSENPLQYICGLPVGVSFKISLWNISGHHRLWLRMTIGESVQHTFLEFSRFEGNDEGSAPTRVDMEDRVIVWFNSLMN

SEQ ID NO: 66116 - protein, 219 aa, Zea Mays
MHARFLSAPSPASAAPSPYVRLAFTGALPRRACWKPRGPASASAPPPRPLHSLCARASMQPASPAHDGHGGPPVHGVSNTVIGVLGGGQLGKMLCHAASQMGIRIVILDPLPGCPASSVCDEHVIGSFNDGDTVREFAKRCGVLTVEIEHVDAATLEKLEKQGVDCEPKASTITIIQDKYRQKKHFSRYEIPLPDFMEYRGGWGKVWLSPNGQKQEISI

SEQ ID NO: 66117 - protein, 998 aa, Zea Mays
MLYIYMLGYDVDFGHMETVSLISAPKYPEKQVGYIVTSCLLNENNDFLRMVINTVRNDIIGRNETFQCLALTMVGNIGGKEFSESLAPDVQKLLISSSCRPVVRKKAALCLLRLYRKNPDVVNIDGWADRMAQLLDERDLGVLTSVTSLFVSLVSNNVEAYWNCLPKCVRILERLARNQDIPQEYTYYGIPSPWLQVKTMRALQYFPTIEDPNARRALFEVLQRILMGTDVVKNVNKNNASHAVLFEALALVMHLDAEKEMMSQCVALLGKFIAVREPNIRYLGLENMTRMLLVTDVQDIIKRHQAQIITSLKDPDISIRRRALDLLYGMCDVTNAKEIVEELLQAESSSLTSQYLDTAEFAMREELSLKAAILAEKFAPQLLWYVDVILQLIDKAGDFVSDDIWYRVVQFVTNNEDLQSYAATKAREYLDKPALHETMVKVSAYLLGEYGHLLARRPGCSPKELFAIINDKLPTVSASTVAILLSTYAKILMHTQPPDVGLQQQILTIFKKYESYIDVEIQQRAVEYFELSRKGPALADVLAEMPKFPERESALLKKAEDAEIDTAEQSAIKLRSQQQTSSALVVADHPPANGFAPPVNNLTLVKMPSQTVSDTQESGVSYEEAPKPPVEAPKENGTPVEVQNRDTNITEINNEIKAEPPSTSHSTSPGDLLLADLLGPLAIEGPPAVEQNPAQGLNANQSPAGDLALATLDDQSNSVQPIVNVEEKFHILCTKDSGVLYEDPYIQIGLKAEWRAHHGRLVLFLGNKNTSALTSVRALILPPSHLKMELSSVPDTIPPRAQVQVPLEVANLLASRDVAVLDFSYAFGTSLVDAKLRLPVVLNKFLQTITLTPEEFFSQWKALTVHSLKVQEVVKGVKPMPLSEMANLFMSLHLAVAPGLDNNPNNLVACTTFFSEATRAMLCLIRVETDPQDRTQLRLTVASGDQYLTFELKEFIKEHLVDIPRTQVAPPRAAVQPQLPTTAPATYNDPGTMLAGLL

SEQ ID NO: 66118 - protein, 588 aa, Zea Mays
MAYRLPHVVMGDRSGNIRWWDVTSGLSSSFSTHREGIRRIKFSPVVHGDRSRGRIAVLFYDNTFSIFDLDSPDPLANALLQPQSPGTLVLELDWLSTRTRKDEPLMLCIAGADSSFRLIEVNIDAKGSSISKPVATKERFRPMPFCLPVLFPTAHALALRMILQLGVKPSWFECNSSDKLTGDSFKVAPTFGDLRSYMIETTLPPIGDAVVAELLLKVLEPYRKEGCILDDGRASLYSAIVNKGACARFAFAAAIFGDFQEALFWLQLPQALRHFLGKSTSRSREKISQSSLHPDSEQSSRFNRIASRERSASEKFTKNAANYGQLSSMAFNQEQLWFNASERIPWHDKLDGEDALQKHVHELVSLGNLEAAVSLLLSTPPEGSNFYPNALRAVVLSSAVSQSLHELAVKVVAANMVRTDKSLSGTHLLCAVGRYQEACSQLQDAGCWNDAATLAASHLHGSDYARVLQRWADYVLRGEHNMWRALILYVAAGALPEALDTLRKSQRPDTAAMFLLACHETYSQALSESEPEDDTSVLALTPTPEQTEKLRFPSKNVADEDLIAVSEVFGQYQQKLVHLCMDAEPTSD

SEQ ID NO: 66119 - protein, 374 aa, Zea Mays
MIPGGWAAQRIGGRRVLLLSFVLWSMICGLIPLDPNRVTILVLSRLFVGVAQGFIFPAIHTVLAQWVPPQERSRSVSLTTSGMYLGAACGMLFFPSLVKHMGPQSVFFVEAVLGAAWSVIWLKFSSDPPRTDLPKVSMPKVPSRDMIKAQAGGVVAPRTVKIPWRRIIFSLPVWAIVVNNFTFHYALYVLMNWLPTYFELGLKLSLQDMGSSKMLPYFNMFIFSNIGGVVADHLITRRILSVTKTRKLLNTIGFIVSAFALMALPLFSTPSGTVMCSAISLGFLALGRAGFAVNHMDVAPKFAGIVMGVSNTAGTLAGIVGVGLTGNILEAAKASNKDLTDSETWKTVFFVPAYLCIFSSVIFLIFSTGEKIFE

SEQ ID NO: 66120 - protein, 396 aa, Zea Mays
MLRGIEKRQRNNGEDSSPEANDSGELDDRRSLECSTSTEMSSNSGHRSRNRAPDDDSFDSESSSSGPPTVKRSAAVAALLPPFSRPTPSKWDDAEKWISSPTSNRTGRTGPTAGAVPKKSALAFPDYGGRPPAVAKVVADVPTNAGPDGLAHPDLLKPGHNASVVVDGTAPAVRSVCMRDMGTEMTPIASQEPSRTATPIIASSPTSSRTPTPQRTAEFSVSNIDPKKIEMPEEEEVQMSTRQEIMDLGERLGKTTIAAWASKEEKSAARFTDTTAYKAADIGRENRAADWQETEKAKYLARFQREEAKIQAWENLQKAKIEAEMKGIEAKIERKRAREQDRLASKLAAVSHRAEAKRETAEARRNQEAARTEEQAARIRYTGHTPSSFSCWCWCP

SEQ ID NO: 66121 - protein, 630 aa, Zea Mays
MALFRRLFYRKPPDRLLEIADRVYVFDCCFSTETMDQYRYKNYLDSIILQLREQFADSSLMVLNFRDEGKSLISGIFSKYNITVKDYPCKYLGCPLLPLDIILHFLGLSERWLMLEGQQNILLMHCEKDGWPVLAFMLAGLLLYRKQYNGEQRTLDMVYKQAPKELLQMLTTLNPQPSHLRYLGYICRMDDDIGWPTQPIPFTLDCVILREIPNVDGVGGCRPIVRVYGQDIPTTDRNHGVVSPPSKAKKNIRRYRQADNAPLKLNVGSFVQGDVVLECLHVDDGRGNERLMFRVMFNTFFIQSHILLLNFEDIDVPWDADHQFTKNFKAEVLFSELDAESDASTEVAPDYDYDDDDDMDVASADEFFEAEELFSNADSQEGNKDADTLSIASTDYTSTPSAERWRNSPFSNFEPNIGIDGSRDNKVDNLGLLETVNDGKTCTSTEANTMLNNETAVVKSTLAATIDGDADSGISKSTYKVDDYMFEKGSSKQDTRMGSNQDLGQIDNVLVKEVIILETNSPKDIQMIKEVIISEVTTLKQVVDGSMMETELDETVHDSESIALAETEDTKQLNIFCKQDEGHSVQDEYAAYDNGIVIEQEESSNEENLTIRDTNSEEYHIFTVQALLRG

SEQ ID NO: 66122 - protein, 82 aa, Zea Mays
MGGFCCLRDSEAVETLAPNISTGESDPAAAVPAESPHGIEVGVEFKPVERPVEPINLDEPVKCPLPEPSILHVSHPLSSSGL

SEQ ID NO: 66123 - protein, 69 aa, Zea Mays
MASFICVKDFPQDLCMHAWHKFLCSPKWDLRSCEAKLFIKMALVSVCSISSCLSSLYLLHFYMLEACLS

SEQ ID NO: 66124 - protein, 763 aa, Zea Mays
MEAKPSSAAHGDAPAVEAPRRRGSGGKRKSAGSSFTPSKRQAKERNAAFHVPQHLLHSGPLTRAARHSPHKLAGTPPESGPASSSAATGDGVSGGQAEVDAIRPETEETPAPELPLVDEMLEAVRSRGPGVHVVPTFAGWFSWKEIHSVEKQILPSFFNGKSVKRTPEVYLAIRNSIMMKFHANPQLQLESKDLAELSIGESDARQEVLEFLDHWGLINFHPFPPAGHEESKPEESQDNSNDEKASLIEQLFKFESVQSYMTPLLNKEDVGAPPPLPSLFPEPVLIENMVAAAEPSVEYHCNSCSVDCSRKRYHCRTQADFDLCCVCYNEGKFDPGMAKTDFILMDSAEVSGASGTSWTDEETLLLLEGLEIFGGKWAEIAEHVATKTKAQCMLHFLQMQIEDRFHDGDDINQNIPVSTEQATTEKAIVETPEKMEVGDKVEGRDNADEKASEKTEGSCEETKTEDANVVNKDTQKSGGKDSGASPSTEEAKQSSDDQPIVKENSVDVDTSGEKLSNVAIDILKCAFEAAGHSPEYEGSFADAGNPVIALAAYLAGLVEDGNATTSFRSSLKSISEVPPALQLASRHCFILEDPPNELKDICVSVSKKNTDADQTKDEDMISNSIANEKKEINEKEDKSLSVEKTNNSSMSQNDHQESNIKSVSRDDCSSVEPKGNNAKESSDSTGIGDMSAIGTTKDVVAGNSKQVNDSPSVEVEAPDDSSLKSKDELNDTEDAVATPATVQEQKHSQTLENGDKNLTILNV

SEQ ID NO: 66125 - protein, 405 aa, Zea Mays
MTDLLGDGIFAVDGDKWRQQRKIASYDFSTRALRDFSGSVFKRNAARLAGIVSGKAASGQPMEFQGLALRATMDSIFTIAFGLDLDTLGGSAEGSRFAAAFDDASEFTLLRYVNAFWKAQRFLGVGSEAALKKRVKVVDEFVYKRIRERAQELSDSKLATEDTVPDSRQDMLSRFIHTATNESGTVDYKYLRDIILNIVIAGKDTTAGALAWFLYMACKHPEIQEKICQEAAKATDASETAGVDEFAQSLTDEALNKMHYLHAALTETLRLYPSVPLDNKQCFGDDVLPDGSSVSKGDIVFYVPYAMGRMEYLWGKDAEVFRPERWLDQDGEFQQESPFKFTAFQAGPRICLGKEFAYRQMKIFAAVLLRFFVFRLRDGDKASVNYRTMITLHIDEGLHLTATAR

SEQ ID NO: 66126 - protein, 94 aa, Zea Mays
MILVALHLCTRRWSATWTPPSPQALRRAAAPSHAPLRALPARLSRPQQLKDTPRRGCSTGLPMHLRRSTRQVTDEMVHQDVVAAQTQYGHAQDC

SEQ ID NO: 66127 - protein, 394 aa, Zea Mays
MSLRTTAWLSARPGHHQPVQCLSSPEKPRRRSANYQPTSWDYDALLSLDSGRPGDQVHPSSYYKMKRRIRDMLLKKVEPSSKLQTIDAMQRLGISYHFEDEISNILYSISNESTKAQYTYDNIAFTALKFRLLRENGFPTILGPLGYHNYEKFITKTPSLEDANTLLLLYEASYLAFGDEEKLDVARTFSAKALKQLMPFMLPHLREGVAHSLELPLHWRASRLETRWFIDYYARDRNMCPLLLQFAELDFNQVQYEHQKDLAVVTRWWKKIGLGEKLPFARDRLMECFHYANGIVWDPKLGTCRQMLAKVSNLIVYLDDLYDVYGTIEELVLFTNAIARWDAIPNETLPEYMKALYSIIYDTSNEVAEHALKKHGCSMHYLLQKSDSFPLVYG

SEQ ID NO: 66128 - protein, 543 aa, Zea Mays
MGSDLKEMKYRRRIGAEERPQCSDRRGGAGWAALQQDPVELLRKLDELRDQIARSCNVVAQRREPRRASRRAVSMLPAEHLEEPPPLPGYHRSRHGGRFGPGLPPPGPYAPPRPEHGERYVRQSSGHYRQYPGRQWENGGMGPGSFHHYGCACPHCLHGQRTSPQEENIPMARYFARQHESYRFERSPSVSSDYDRRSVASSLYSHRSVSKRRAEYFRKKAEHICRPVDGAAPFSVCSSCYKLLQMPTEKCIGRKQNRFQCGSCCQIVSLKHDEENGIPFAPSLSLYAPETEQSSSDQMRRDTVHQHHEDFNSMFYNSNDHSNMQNNMDSTDDNSLSSTMSNDRIGKDCGSTRSIQSKAEDLPFSPSRSVDNGSPKDILCERDTDCKVEPSVGGPVSPRSPALEDKLVDPLCAQEKCNDEDDQGMAMAYKSDLTCKGEYDVNDQYDGGISTRSKQESNEDDKDATEDEISCRSYEQKSKEDNSCNIEDSSKTYEQNSGEDDTSSLVNGSEKYQCMNIKDEDSSPGGEDTCNKYESKMSWKLEA

SEQ ID NO: 66129 - protein, 98 aa, Zea Mays
MAYVDHAFSITDDEDLVGGAVGGPRGAPVKEIAFAAALLAFGVLGVVAGSFMAAHQVGGDRAHVLGGVMFIPGFYYTRIAYYAYKGYKGFTFSNIPPI

SEQ ID NO: 66130 - protein, 225 aa, Zea Mays
MHRAGDMSNTLMSVIVEYFNSISGALFDTVSRPSTISKYVICPFLLKKVKKGCNFKVKDSLLKTLEETQKRDMIMLLILDGSHWQLLANFIELLKIHKCIKFDVNSFEKIKASEIVACRMKLTHMLIKSKQNSADPCYVVKKLDANIKKYGINSRKVITSKNLTMLMGLIDQEIEEINAEKRKRSGHPAGGQPELKDDDGQLRANSVKARDAELRCERAVKLRRL

SEQ ID NO: 66131 - protein, 362 aa, Zea Mays
MKDSQDIQSTTELQSSAQGTNEVQSQQPNPMTTDAPAGNSGSLSIASNDSKKVSREDIELVQNLIERCLQLYMNKGEVVRTLSTRARIEPGFTTLVWQKLEEENSEFFRAYYIRLKLKRQIILFNHLLQHQYNLMKYPAPPNVPLAPIQNGIHHMPVSNLPMGYPVLPQPIMPAPGQPHMDPMACGLSNGHVVNGIPAPGGYHPMRMNSGNDMVVDNGAPEAPHAGATGSVMSSEMAVSPSSAASSNHAPFMPPEIPGMAMDVPGLDSTFGSDVGNGPLQLGPDGSSRDSIRSLGQLWNFSLSDLTADLTSLGADLDVLENYTGTPFLPSDSDILLDSPDQDDIVEYFADAINGSQSDEERS

SEQ ID NO: 66132 - protein, 554 aa, Zea Mays
MFAPLVAAEPDPAATGEPVAVQALALQCFLKLCCSPDFQMLLNQIRGKAVVFTGHSLGGAVAALTALHYLCISSSSSPPAPPVLCVTFGSPLLGNEALSRAILREHWGGNFCHVVSQHDVVPRLLFCSPDAVPAHIIVGMQLQQWPAWTRHTGAVSTVTAHMADTDKDVLRQLIQTHVGAVAVEQKLAASETTGGSPYRPFGTYVLCSPEGAACVDNPTAAVQMLYATFASQSSAGAESPEAAHSCYGELVLKMPHHLLLKRWLRVDDDMPATPNYDDGVSLALEASGIDVMAMEASTARHWLKTSKRAGRRPSLNCARLATQLGRVTPCRAQIEWYKALFDAEMGYYDAFKQRRSPRKYTKVNLNRIKLGQFWDRVLSMLDAGQLPHDFHRRAKWVNASRFYQLLVEPLDIADYHRHGHHLTSGSYMTHGRERRYELFDRWWHEKGCTGAGGGITSSMSAASASSRRRSKYAGLTQDPCFWARVEEAREQTESARRERDVAELAMKLEELQEFERYSRELVATKEVSVDVLAPQSSYTLWVEDWNQLKLRAQG

SEQ ID NO: 66133 - protein, 60 aa, Zea Mays
MSRLFPRACSTEIWSSGSAPIATNSTGRGLSTTMQSKGSCQCATLVTKQHVRPWYSFVKL

SEQ ID NO: 66134 - protein, 378 aa, Zea Mays
MQSASMEEAKKNGIQQLAEETTLVQFIFGGYLRSKIKCTKCQVISKHSERILDLTVEIDGDISTLDGALRRFTSSEILDGDNRYHCSRCNSYERAQKKLTILEAPNILTIALKRYQSGVLGKISKAVKFPEHLNLSQYMCRTDDSSPVYSLYAVVVHRNVRNATVSGHYVCYVKDSQGKWHEMDDNKVKPVSVQKVLSRCAYMLLYARCSPRAPTSARAKKPKQMARSGSFPSGGGRYRSRHQAPCFSGSNSSSLFSSSDAGSSCTFSSDSTDSAGKSSMEYDRIFGTSGYMCPVVSSAVVPEGDNQSYLRQGSSWNPSSSGHDMDEAGKFARQYQGGYQAGGGAPVGGWETPSFSYADQGGLYPIWEEQMESYEAMY

SEQ ID NO: 66135 - protein, 465 aa, Zea Mays
MSPAAGGPAPTPAQSAPAVPQAIAPPPGPGRAAPAAPRRDPPGDPEGADPANAAARKTPWSMLVQPPAAASAAAAGETPESGGIIGGDASWPALAGSTRAGPKSGSSDSLKALSDASGPSPQEVPIAAPSVPPYPVVGANPIPTAQNPTSIPPPMAAASSQQNGGTTQTIPVRRGGSSGGNGGGGSRGYGSIGGRRAANSNGGDGSSGSGGDDNWNNGSLGTGSGCNSTNGDGSINLDDNAPGAGHAGGNGNGSSRDAPGNRHWNHNIRGGISSNGAGSGDGNNRNSSGSSNHWNNNPRISSGSSNGVGGRGGYRGRRDHERGANFPRNFPRVPVMPYQQQQQPGIYQPGPFYRPPPPAAHFMVPQHFYAPPFPYPADVQPYPFYVPPVEQFQNMHLVRPPMQPSWVPPQDLPNLQDDIRNQIEFYFSTNNLCHDTFLRRHMNDQGWVPINLILGFNRLYYIILR

SEQ ID NO: 66136 - protein, 547 aa, Zea Mays
MPPRRGRGKGKGRAKPRAKPTEPEPESDPELDEAAKSEIEAGDAEAGEESSAESEDSKEDESESDTESMDAEASEEAGENGTEEMDAEPEAKAVEAKAETVATEAEAKPDASDEEAGETGSDREADGKGADPKAKAEESDGEDEEGATAVTDGDSEEEAAETGGESEEDGGDSDTEGDAEESPPSPPRRSRRRKRAATPDDEAEETPTPSRRRRRRKSGERGDSPPPLPDHLRCRRSDGKKWRCSGRALPTVSFCEYHYARANKGKKLPADEEVLAVVLQRQKNKRKGRRSINPPTSPQAATSDPQTRDLPNGLMTISPGSSGPAALSTPVKIGVEIPAPIQRCYRSKNAEPLPVGPVKVVPRAMSVTKTARTCHCCGMKKAARVANCKNCDKNFCNSCINKWYSKLSRKDIKARCPACRGLCNCKPCSLGNSKGSTPKEPPKVERKILSIKISNHQFYKLLPVRLDQEQLDELELEAKIQGTKISNVCVQVAETGQSESLYCAIPIDSSTHEAGASAAIVPCSAGRHEHARPWPWDGALPPAVPTA

SEQ ID NO: 66137 - protein, 723 aa, Zea Mays
MSRERTLLDQYLKIKMVNFGKKLMADQIPEWKGYYINYKLMKKKVKQYGQQLQQGEKDRRRVLKDFSKMLDDQIEKIVLFLLEQQGLLASRIEKLGKQRAILQEQPDISGIAELREAYREVGINLIKLLKFVDLNATGIRKILKKFDKRFGYRFTDYYVTSRSNHPYSQLQQVFKHVGVGAVVGALSRNLAELQERQGSYLSIYDQPSSALKLTVFGFDPLQDPIIDMINSSVDKLTRSTNFLRFLGQHAMIVDEESPSTAGEEEIEDQKYHFMSLMLNLVNTFLYMVNTYIIVPTADDYSVSLGAASTVCGVVIGSMAVAQIFSSIYFSAWSNKSYFKPLVFSSIVLFLGNICYAMAYDMKSLTVLIIGRLLCGMGSARAVNRRYISDCVPARIRMQASAGFVSASALGMACGPALAGLLQWKFKVYMVTFNQSTLPGWVMAVAWLLYLIWLWFSFKEPNRATEVNEAPQNPASGQTVDIGRLENGIAQPLLKDSVDKQNEDEDEVDDIEETADDSRKPATSIGSAYRLLTPSVKVQLLIYFMLKYAMEILLSESSVITNHYFSWNTSAVAIFLAILGLTVLPVNAVVGTYISNMFEDRQLLMVSQITLLVGIIFSFKVTSTYYVVQYVVSALVTFVSAEVLEGVNLSLLSSVMSSRLSRGTYNGGLLSTEAGTLARVVADCTITAAGYLGVGKLLNVTLLPSLVICVASIACTFLTYNSLF

SEQ ID NO: 66138 - protein, 353 aa, Zea Mays
MSDEYVDLPVSDEDEEELEDEMDDGDGESGGGSSKKKAKQHVEQLKRLQQKDPDFYKYLEEFDKDLLGFDDDDDEIENDRETGVEEKEQYVSKEELKHVKPITMEMVDSWCNGVENEKIGSIRSILQAFRRACHYGEDHGDNSTPKLSVMSGSVLDKVMHFVLKHMDKVLRQLLGAPSYGGKKEVISELMLSKSWKRHGNLMRIYLANALHMITEMTDEQMIAFTVHRVRASAVFLAAFPSLLRKYVKALLHTWARGRGAMPLVSFMFLRDLCIQVGSDCLDTCLKGIYKAYLVNCKLSKSISGSKQQHIQFLGNCVRELYSLDPQSAYQHAFVFIRQLGVILRGALTERGPK

SEQ ID NO: 66139 - protein, 656 aa, Zea Mays
MHNPRPGGGDIVEMSSSATAEGRVIPHSGPLSKKSGARKSARFAESVSAPLSAPPPRASANNNNNNDDDDYVEITLDVRDDSVAVHSVKPAHGGGAGAGAGAGGDDPDVTLLARTLESRRSSSYGHSVIRNASSRIKQVSQELRRIASINRRGAAGPRIDRSKSAAAHALKGLKFISKAEGAAGWEAVERRFDKLAENGLLHRSKFGQCIGMKEPEFAGELFDALSRRRNISGDSISKAELLEFWDQISDTSFDGRLQTFFDMVDKDADGRITEEEVKEIITLSASANKLSKITDQAEEYARLIMEELDPGNLGYIELYACERLTRALRSSVRPVRILKVAVYPGNVLSLHFSKPQGFRYKSGQYIFVNCAAVSPFQWHPFSITSAPQDDYVSVHIRTLGDWTRELKNVFSRVCRPPTEGKSGLLRAEYDRDGSAVANPSFPKVLIDGPYGAPAQDYKQYDIVLLVGLGIGATPMISIIKDIINNMRQLDGGGDLEASDASASSSSMASFRTRRAYFYWVTREQGSFEWFRGVMDEVAETDRKGVIELHNYCTSVYEEGDARSALIAMLQSLNHAKHGVDVVSGTRVKTHFARPNWRNVYKRIALNHQNQRVGELLLLLFFFFFFVVHSSTGRHSTSVHSSNTWHALLLASLMTRR

SEQ ID NO: 66140 - protein, 194 aa, Zea Mays
MATSSSSSGPGGPYHHHRSRFGDTTLTKVFVGGLAWETPSEGLRHHFEAYGDILEAVVITDRETGRSKGYGFVIFRDPGAAALAVQNPNPVIAGRRANCNIAAFGPPRTAQPRGRGGGGGAVREPHGPDQPPQGSPYSYRLPSQMTPPQAAAVFYSPQYGGYWYPPDYSYQQGLLFIGHHAFCTRTRHQNKLAI

SEQ ID NO: 66141 - protein, 199 aa, Zea Mays
MAATSIKVAHLTTLALFSPTPNPFGPKSSKHRARAPPPISISMDPALVDPAHLQALMLACGHSCTLRLSPALSVSAVEPVDLSKLRTALAHSFVVVSVFCGARFFTHDREREGEGQRFLGLEIGLDLQGERRLVGFGRAVSDLGLTASVHDIVVHPLLQRRGIGQKIVNKITRPFFEACGFGDDMMGSTTMLYTRKTQK

SEQ ID NO: 66142 - protein, 505 aa, Zea Mays
MRLRLPPGPPTWPIFGNLLQLSPLPHKDFAQFCTKYGPLVYLRLGTIDAITTDDPEVIREILIRQDEVFASRPRTLAAVHLAYGCGDVALAPLGPNWKRMRRVCMEHLLTTRRLESFAAHRAQEAEHLCQFVWAKSQSGKPVNLREVLGAFSMNNVTRMLLGKQYFGIQSAGPGEAMEFMHITHELFFLLGLIYLGDYLPAWRWVDPYGCEKRMREVEKKVDDFHQKIIDEHRRAREARKSRSSVEEDGGNGKDEMDFVDVLLSLPGENGKEHMDDMEIKALMQDMIAAATDTSSVTNEWVMAEVIKNPRVLRRVQEELDAVVGRDRMVAESDLAHLPYLRCVVRESFRMHPAGPFLIPHESLKATTIMGYHVPARTRVFINTHALGRNPRVWDSVGEFRPERHLPAEEGARVEISHLPDFKILPFSAGKRKCPGAPLGVALVLMALARLFHCFDWSPPDGLRPEDVDTREVYGMTMPKATPLVAVATPRLPPHLYGGGGGSSAP

SEQ ID NO: 66143 - protein, 278 aa, Zea Mays
MAMRSRPRRSAGHLYHLRLPRLLFLLPFALLLILLARLPALLRRANAHGRQCMPAATDRPIPFPHPVPDPRLSLAIVTLADEDAGGPGARRSFRGVLAASARNKRAYAAAHGYSLVALPASAVDPSRPPSWSKVLALRAHLRHHHWLFWNDAERILFSVIGHNNFVESPDLVLTEDFGGVNAGVFFIRRSKWSEKFLDTWWNQTSFIQFGSTRSGDNAALKHLIDHLSAEEMQEHVRIVKMQCLFNSYPWILTLKSVHRLIFHLPTTWKGSTFSRSLY

SEQ ID NO: 66144 - protein, 544 aa, Zea Mays
MAGVDVARHAHSPAHHAVAARDHVALRRVLEALPPARRPEEIRTEADSVAEEARAEAVSAVIDRRDVPGRETPLHLAVRLCDATATEMLMAAGADWSLQNEQGWSALQEAICAREEALARVIVRHYQPLAWAKWCRRLPRVVAAMRRMRDFYMEITFHFESSVIPFISRVAPSDTYRVWKRGANLRADMTLAGFDGFKIQRSDQTILFLGEGSEDGKVPPGSLCMINHKDKEIMNALEGAGAPASEAEVQQEVAAMSQTNIFRPGIDVTQAVLLPQLTWRRQERTEAVGPWKAKVYDMNHVLVSVKSRRVPGAMTDEEFFSSSNDNDTESEGFDDVLTEEEKKQLEAALKMDSPDAGGEDQSDSFAGPRHSCFEPREREIPIEGMSVSGNVESKHDKKGWFSNWGKRAQVSKPERVKKMAPPRSSLCVDEKVSDLLFESPSNAQTRPGRHSVDVVRADDNRRIRERDSRRYVPSAENGHRRKEGSKESEGNSSFEGSTYNKTPSRYISCQGCHPSRAYDQSACDIHEIRGATAARGVRHTTFKP

SEQ ID NO: 66145 - protein, 208 aa, Zea Mays
MIHPIGDVILFVLHVRMTQVVSDCFAAAGADGQRGEELLELVRQEEAPAARDRPGHAQAAPAGRRGHQQPHGGVQRRRAHPVVVGGGGGGGAAHAATASGGIGGGELRVQLQPQQWRRERRLSAVAVGVQQQQQANSCGSLGCRSRSGVPAAGAGPSSSSSSSRRAALRTLRCPGGRSPVGVQLQHAELDGWPKPRGHHHRRTVHQQL

SEQ ID NO: 66146 - protein, 327 aa, Zea Mays
MLRRALLSSVSPLHGTVRIPSPSYSPIQALLAQWSRYASVVSSSAPPPLPPPPPSPPRGPSRSSGGGPTSSSLNPAEVAKFASIAETWWDSSGPFKPLHVMNPTRLSFICSTLCRHFRRDPNSSKPLEGLKVIDVGCGGGILSEPLARMGATVTAIDVVDKNIKIASIHAASDPTTASIEYCCATAEGLVKEKRLFDAVISLEVIEHVANPLEFCESLSALTIPNGATVISTINRSMRAYATAIVATEYILRWLPRGTHEWSKLVTPEELVLMLQKASVSVEEMAGFVYNPLSGEWSLSDDISVNYIAFGVKKGEASSTNDREANLS

SEQ ID NO: 66147 - protein, 1064 aa, Zea Mays
MSSLSRELVFLILQFLDEEKFKETVHKLEQESGFFFNMKYFEEKVHAGEWDEVERYLSGFTKVDDNRYSMKIFFEIRKQKYLEALDRHDRAKAVDILVKDLKVFSTFNEELYKEITQLLTLENFRENEQLSKYGDTKSARSIMLVELKKLIEANPLFREKLVFPTLKASRLRTLINQSLNWQHQLCKNPRPNPDIKTLFTDHTCSPPNGARASPVSVPLAAVPKAGAAYPPLTAHTPFQPPPGPSLAGWMANAAASSSVQSAVVAAASIPVPPNQAVSMLKRPALTDYQSAESEQLMKRLRPGGHGIDEATYPAPTPQPAWSVDDLPRTVACSLSHGSNVTSMDFHPTRHTLLLVGSANGEFTLYEIGLRETLLSKPFKIRDINACSPQFQNAVVKDSSISINQVTWSPDGEMIGVAFTKHLIHLHGYQPPNETRHLLEIEAHSGGVNDIAFSRPNKQLCVVTCGDDKLIKVWDMHGHKLFTFEGHEAPVYSICPHHKESIQFIFSTSLDGKIKAWLYDNMGSRVDYDAPGKWCTTMLYSADGTRLFSCGTSKEGDSYLVEWNESEGSIKRTYSGFRKRSAGVAGVVQFDTAQNHILAAGEDNHIKFWDVDNNNMLICTDAEGGLPALPRLRFNKEGNLLAVTTADNGFKILANADGLRTLRALGSRPPFEAFRPQYEASSMKVSGAPVVASISPNIGRMDHLDRNSPAKPSPILNGGDTASRSIDIKPRISEEKPDKAKPWELMEVLNPQQCHVATMPETPDQARKVVRLLYTNSGVGLLALGSNAIQRLWKWSRNEQNPSGKATASVVPHHWQPNSGLVMTNDTADTNPEEAVPCIALSKNDSYVMSACGGKVSLFNMMTFKVMTTFMPPPPASTFLAFHPQDNNIIAIGMEDSTIHIYNVRVDEVKTRLKGHQRRITGLAFSTNLGILVSSGADAQWIPQDTLSASISHASYSCNSQLVFAAFTDGNLGVFDAENLRLRCRIAPSVINSNPPVHPLVVAAHPHEPNQFAVGLSDGSVKVLEPLESEGKWGAPAPADNGIIPNGKTPASSATSNPAADQIQR

SEQ ID NO: 66148 - protein, 760 aa, Zea Mays
MNIRHHNIVLFVGYCAETQEVVVRQEGKHIFAEKRERLLCFEYLHNGSLHKHLTAEPCGLPWHICYQIIKGICLGLHYLHDKNIIHLDLKPDNILLDDDMVPKITDFGLSRLLGNGKSHTITQTRIGTWGYMAPEYLDDGVITMKTDIYSLGVIIRHMVKGRNSADTTDEEVLANWLIRLEKDPSQMMRQQTTRLLFETEYKEQIKACMDISWRCTLRKPMDRPTTQHILLTLEETEAKIKSVVGPTPPNAGQLQIAKFGPWGGDGGKTRDIRMTPCHLHSVTISSGTIIDSIGFSFTDHYGQHHTTGPWGGKEGTNKIELGPSEFLTGVSGTSGPFKNLTNVVTSLTFVTNTRSYGPFGKGRGTPFHIQTQNNGRIVGFFGRSGQYLYAIGVYTNQDARVARIGRPLGGDEGVLHGITDLSGQQRSRGGGPSGECGDSDDEPNGDFAKFGPWGGDGGQPQDIGTLPCRLDRIKISSGLIIDSIEFSYAGPDSQYRTAGPWGGHGGDNSSFQLAGSEFLTGVSGSIGTFNGHANVITSLTFVTNARSYGPFGRGRGTSFHIPVQGNGCIVGFFGRSGRYLNAIGVYTAPKPEPKAVGKQDGGDEAVVARIGPWGGVGNALHDIAERPHRLHRVTIFSGTIVNSLEYLYSDGDGQQHTTGPWGGCGGTGRKIHLAPEEFIVEVTGTFHPCAWDRTIPSVVSSLTLVTSTGKTHGPFGTQLGAAFQVPVQSDSRIVGFFAHGDNYIEAIGAYVKKLTESSNR

SEQ ID NO: 66149 - protein, 410 aa, Zea Mays
MAAFDNLIALPAAALAPAPAAPAPPSSETQLPYKSQLQIYAQKRGKLLPSYRPIHGGSLHAPLFKSEVTIDGQTFESPEYCHTMKEAETVAAKVALMSLPQEANPTQQLLLPSVNYKNLLQELVQKEGFPLPIYNTASDVSNYSAAFVSTVEIHGVTFHGKPGNTKKQAEMNAAKSAFEHFKNINHDAGSSGSANPLPVAATKQSVDGNTLRAKLEVNKSHLAEPSTEVEAIYSSTEVDKLPLPGPSMDIEVMDSTLEVDKLPLPERSMDVKVVNSSLKVDKLHFAEPITEAEVIHSSLQVDEPLIPKPGMSSSLENTPAVNGHSAPISPTITPTLISVPTATMPVSNDRCGCYMSTNRIQVYPRHTDMVIPEGAAVLPISDNQWVAVSLPYSMEQRDFCCRNPDCHLGR

SEQ ID NO: 66150 - protein, 297 aa, Zea Mays
MESSTTPTRSGISNHVPSITGSSPQSTHLVRALVRQFGRSQSLMGNQTHRSLSSSLSLVGIRARLDGGLLFLVIWWPLGKHDKLISIDDRNIFLWNVDMSNKSAKVISQGSADMLPNLSGGAWDPHNHNSIASISDSSLHLWDLRSMEKSSAIEHAHIRDVDYNPKKQHIIATTEDDFGICLWDLRMLKLPLKDLPGHSHWTWAIQHNPEYDELLLSAGTDSTVNLWLAKVSNNDSEPNSPSGSPNRQEEPLLNSYTDYEDSIYGIAWSSHDPSLFASLSYDGRVVLESVKPYLQRK

SEQ ID NO: 66151 - protein, 471 aa, Zea Mays
MWLEEVRRRERGELRARRFEAAARACRTASLALSNRKEFVTPHHGAVNSLQVDLTEGRYLLSGASDGSAAVFDVWNATEYETGFIAKHRNILLVDKQHQNGHKFAISAAVWYPVDTGLFVTASFDQFVKVWDTNSTQVVMEFKMPGKVYTAAMSPIATTHVLIATGSADVQVRLCDIASGAFTHTLSGHRDGIMSLEWSASSEWILMSGGCDGAIRFWDIRRAGCFRVLDQSRSQLGKRPLVKSALYKDHTDSLGPSPSARRRTGISKKSSSALRKIQNPTHGHMQQRLHPGLSSSQNRATAHYGAVTGLRTTADGMYLLSSGSDSRLRLWDIDSGCNTLVNFEAMRLQTGKPLQLAVTEDPSLVFVPCMASIKAYNLWSGKTFQTFRGHYELVSCCYYSEQDQELYTGSNDRQILVWSPSTPAFTKMLMRITGATEKPWSREECVLYLLTSMLLMLTNNMSRLLGLVSSP

SEQ ID NO: 66152 - protein, 78 aa, Zea Mays
MAAMGRELVEEGAAACRSSAHRGIRAEAEHAPWGTRRQGRESWRRGLLGDGEKETSSAGWGWGSAGEPPWEQAKGEQD

SEQ ID NO: 66153 - protein, 547 aa, Zea Mays
MDLVPKHQQQQQQRGIKEEEEMTVFAEHGDQQATSGAGHGGGGGRRSEIKEVDFFSAAAGGAVSRRITDEDDGGEDGGREPAGAVARGCRNTTVNTALDLLTRPAAGDGGEGTAASGRDDDTEMDVAAVEGELRQAGEENRQLRRMLEELTRSYGALYHQLIQAQAAQHHHHQASGAAKPMLPTSGVQFMDPAGRVPPPPAPAMAAGAAFSGERGGDSEGGSGSGGEAGPNDGTGTPERGENADNRAPAPAEAPLRRARVSVRARSEAPMISDGCQWRKYGQKMAKGNPCPRAYYRCTMATGCPVRKQVQRCAEDKAVLITTYEGTHSHQLPPQAAAMAKTTSAAAAMLLSGPAVSRDAGALFAGHHVAAPLFAQYHPYASAATLSASAPFPTITLDLTHSPPPPAAGLLQHRLPTPPVPAMPFPMPYGFPGAGGHRLAAAPVPAPHPPAGATLLGLDGRNRSALDTMTAAIASDPNFTTALAAALSTIMAGAGGAEPQAPHLSGAADASGDGGNGSAGTGPATAAAAGARETALHALLQRLNDSRQ

SEQ ID NO: 66154 - protein, 78 aa, Zea Mays
MIYRACVSSVLTRGIGKDRKLLVYDDYVASCLPVLFQIKAMLMHPGFNVPMSASDGQQRVWHCSHAACFPLGGVVHWP

SEQ ID NO: 66155 - protein, 53 aa, Zea Mays
MKDAKPIKTLMGTNGHLDLDTGGKSVDQKVYRSMIGSLLYLCASRPDIMLSVC

SEQ ID NO: 66156 - protein, 112 aa, Zea Mays
MPGSRYGVQPCRKEARKRTLRLRSRRPARSPRLRTLRSMGDWVCCALLEASTPAPSPTSMLRPPWEAETDEVEIHSEIRMDGDGRRREVGENGCGACVTTSAVISETACMSV

SEQ ID NO: 66157 - protein, 719 aa, Zea Mays
MTVLGKVPKPINLPSQRLENNGLDPNLELVPKGTHTWGSKAPSTTPNAWSSSSILSSKNDGSSTSSSHFNVRPTSGGGSRPSTAGSESLGSPNAWGANSRPSSASGTFPSSHLPMATNRPQSAETRPGSSQISRFADNASDNVKASIRTIDRSESSSRGPGFTLSTGDFPTLGSEANSQRGHSSKGRPTSSLGKEVSQGEQVKSLATGTGEVISPSNNHPVDIMKTEHHAHTGGAPVPATSVPNEGLQQQPYPPNFPMPPLQFDSWRAPPGHPPEGMWHRGPVPGGPYRPVGPPGSFPVEPFGYYGQFPPNSEAAGRQGSGHGGYHTKNDVYHPMPHNSYIMNQPVIPVRPVYQGPVLYDGYYGPQANFNNTNVRDPHFVGGPGILNQFPNQNDRFHPGHPQNRPGKHETVPREQLESDKLHVFHQEHPGSLHDNPDRLGGSREFERNVQPAPPLLPHPDGKQTDMNMRADTRDTFSETERTVVLTKSVPNQRGSVGIDHLSVYENTRSHHRETCDGTLRKKFKEDSSVVLDQHPVIKKNAALIEKIESLNNKARNVYAQNLPEPASSKEFKKHKKTTDVSSNDVISTTCTSDQAVSVSHISAVVQRRPNVTIEGTILGPAHSHLTEFSKAEKLGDSINNHLHRRVDSSRNSYHGPCKDRPANKFGSCGRGESYITNSLPVADLGNDIHHGQQPQIASQLQPVIVPDDMPASLDYESQL

SEQ ID NO: 66158 - protein, 1023 aa, Zea Mays
MDRSLLPPPAPSPPAPSPALPDGESPALPGAILPHPSLAAAVQPAVPFSTSRTSSLTPRAAATLQASGRLLLHQDLVRSSHSSGRGKALRWRDSSPSSDSLDVGSPSSFKDILLAGTVSASVSVTSGDIVSHGAQARTLQASVQNSSGDGGRFVRRSSPLRSLVQPMRQKPLVDRDGFTLVESRRTQKQRRRLEKSFGIQALETFKGRCFKCLSPHHRVALCRSIIRCLLCHAPGHTSYTCPRRLPPVCSRMAGRLRAPVHRLPPVHAAQCSVDAAEGPLPDVSRGRRRRLESDIAVDAGDGVCTEPHFAPTRIIPWSPSFNQRTEVLDRAIVLTVTVAINEAVEEAILDSFARRLALVHDSLSMCRLGPACLLLILPSLEMADRAFDGGRIVNLSPTTKIHVMRWSRTLNSSAAASLPFQVEIDVSGIPAHAWELETVHALLNEWCWIADLHPDCERQREVFKVTAWCSSPGSIPKEFKLEIVDPVTTDGGMLRRSLVYPIRVSVKVLDRPDMLQSLQPSPPPAEDDPDQGRRRRRRRSRRSSFGINAPGKGSTTAVLPRVSVHQRLGPRVQACGKEGVRVPRLAVHKRLGPLGIFNADKGAVKKMKRVWIPKRKLESSVSVWSPKTSSALVSPLPVAVDDAFLEATSSTVVTEDTLVGSPEVIPVDGGICSEAAIISDAPARFPMVESVLQDVNVLSEGVGLPLVESDFQNIHLMESSLSRKHLMSPSLLVYSRKRHQKLQLIDSIDENGNVGAAADAIISPASATGLAADGTYHVGQGPVIIGVVADAIVSPATAITFTSSEPISSLVEPTAAVADILMSPAGVAPSLLPSPSGEQETSQSLQREEFIKSVTRQPSKLLPAPPVILKKKDNKLPSRSVPRRSRRVAGVGVEFNASDLDRRAIKKIMKAVGIIADNVGIDQRAQEEYADLFKTSLSDIHVKALAALFGWQMFEREIGHLSALFLTMEEGFLALVSSLWESQSNITTAGTCCLVSVMHDKTLFIANLGDSGALLGKKVGRAE

SEQ ID NO: 66159 - protein, 141 aa, Zea Mays
MSQCCLDKNVRSAGPAYFANVAIKINAKFGGRNLEFANPKESLPGVTIEPTIIFGADVTHPAALDDTAPSIASVVASQDWPKVANYNGIVRAQGHRKELINGLEDIVKELLLAFEERSKRRPKQLIFQLHPYIHAIVFMFQ

SEQ ID NO: 66160 - protein, 1074 aa, Zea Mays
MGASDSSKDLLEAAEETIEELRDEAKMWERHSRKLKADLEMLKKECSEKSKQHAELAGELSAAQAERDSYRHEIEELKSSLQDVNTRQTITGTPKRSDWIDLQKELEGEVKFLRESNADLTIQLNRTQESNIELLSILQELEETIEEQRVEISKISKVKQTADPENGLLVKEDKEWAKKLSMKDDEITVLREKLDRALNIGNAGGAGSNAIYLELEKENEILRAKIQELEKDCSELTDENLELIYKLKENGLTKGQVPRISNNNELQFEKLTSRIRQLEEELRNKEMLRDDSFSESSTSNADELQRKCADLELKLLNFRSQTCELEEKFQKSQEELEQRNLELSELRRKLNGLHSTELEVFESGATWKYQSRTADLEDTEPETDTLKARFELQLQENDDLRSSKVEMENFISEIQAEKSQLEERLSVSLKESSITSKCLDEVRKDILVLSSSIDSHVSANKVLERNIIELESCKAELELHVSELEQENIELSERISGLEAQLTYLTNEKESSELQIHDSRSLIINLKDKVERQQSEMETQRLEFKQKQQESQRRLSETQDDSEVLRRSNSKLQSTVESLIEECSSLQNLTADLKRQKLEMHGHLTQKEQELDESKKRNFEFSKTVEFLEAKLSSLHKDVSSKEQSLLSELESIFQEHMEQEERINRAHFMLNKIEKEKTLEVENLKREVVSLTAQVSSTHEERESATLDAIREVSVLRADKAKLEANLQDVSTQLRHYESQLEDLRKESKNKIKGLVDSLNASKQSEEMLTSDAEHMKKLMEAARSNEDTLRKTSNELELKLKSSDYEKQQMLEEISGLKLQVQKIMNLQDEVFKLQSSLDEAKFGKGKLEEILRSVTEECEELKAQKAMLTDKVSDMQETLRNGEEEKRNRIAMQAKLVRLESDLSASEASHVHEAELKNELSRIKRSNSEYQRKIQSLEQENEDLTRRVQTMEKGFEQMSHVKENLGKQELGGDNQAAIQSKIELLETKLAEALEENKMYRAQQKSPMPEGQPSAGAGDGKEGNTDRILQLEGELRDMKERLLNMSLQYAEVEAQRERLVMELKAMKKGRWF

SEQ ID NO: 66161 - protein, 55 aa, Zea Mays
MSRREISSRRGSSRILQSCSIFFQVAEINSARATNIELLFLVCVFKRLKCHFRKE

SEQ ID NO: 66162 - protein, 134 aa, Zea Mays
MMTTTMNISMPMKKLTLLFRTFLNAGFALIVKVVAFMGMVIYRFYGDELREMFGYEEHPYAFYAMAILAIVLVGLLYGFFIAIICGQRITERHYHVLAKQELTKEYIVEDLEGADHVPDLDPSHVIELKILGLY

SEQ ID NO: 66163 - protein, 2111 aa, Zea Mays
MDHDDTDFQSQNFQLAGEGSNKFSSGLRPFALPKLDIEDQLQGHLRFDNLIDTEAFFSVQGHGNSWIEVLSTGSSVVDFSSSAAESCSISKTNNVWSEATSTESVEMLLKSVGENETTGDMDNNAHLKLSGMDSQIDQSSVHPKSSNSLPDSTVVPTEEDQSLSTHSRMTDDLDRSQISHSIMTADLSNTESQLEHFRPFLMDKKAEQAVDSVGEKCIAGEKLSSSNNAPGSYPAIDNYFGAGHDDRSLDKLNIPSTGVDSKNLNNEPFPELAPLQNIYTDSYHFKEDTTESEAGVTPQDSKFRHINENKVEGGLQELQSLSCAGQSLGAVNLSSQASNETLLSESSDGLLEAITNPVKMLHRSDDTCNKVNSTPQPSFSAVQHGAEGLENSVHRSNEFVVKEFSIGSNSLLSHQPEADPKFFNPHPISSLSPKSKISDATCVPEETKNVGSNSINTCCTGDESKHVVLENRQYSVDNLKSGDMGEKMSGEEIPAVSGNIDQMIENDHEEKAANATGTSKDKVDPSDSIALENFAADTFNASEDSDIPSLNHKRSFEEHESSALGVEPKNTNLLQSTSGLQEKISASVISSSSGITPTIVTDNFDISEDKNGCSIGVSSVDSPALLAEKDLNMSTVNTEEPFKEGVKSALGDQHNGISSGSGQGGEMPAVPMDSKIAVYSGTVSATEREKFKEQPNSLGCLTTGETQDKSGNHPHAHSLKCQTDRSSILADSMDPTTASTLGGKVAVKIVKTPLNASDDLNAHMQDIVLNQGTDCSSGTVPSQGNEGSSLLEPGNGDGICTGVTCGSPSVISCAESCPQEGGHGSTALLHHTLCGQSEDPEDHGASVDGIQSSKQCNTRNIESAPGSQETSAAGGDRSFSFEVGAPPNVAEKAHSPVWSPFPKYITSQSSKMATENTQAGGSLKDTSDDSKKISTVESGKEQLSERKVTESSGGGLSDNCNIDDIIKGRSSPPRQHPIPECSVSSADLVNFPFTDPQHLQLRAQIFVYGALIQGTPPGEAYMVAAFGEPVGGGKPTWEAAWRAAFERFQYKKSPHVSLETPTSSLIGSSVPEKASKGTAITTVPASKKVGKTVAPAHPAVTLHSPTSDFPFGSSTFNLQRGTHLDFSQAVSPFAYNSHMRHPSPGVAPWYTQSPGPRPAAWLIPPQNLIFDSSMQPVIPTNETAKGASSKNISVSHTVSSGVLPSLAPSIVSSPIAVVSDGKQKAASSSKRGTTSQKSRKKKKASASSEQQPVIASPHLKMNMPSFTPAIKHTAGLTLCGSKPVPNMGQIASEHNYQITGGMDSDQRIIFSEQIRGAVEQSAAQAKSASIDSVEAVKHKEGIWSHLSTISRNKLPPKVEEKLTSVAAAAEAAVSVAKAAAEAAKMASEAALQAKMMADEALSSSISVMSMHHEADQYNVISSPPILSSSTPASSLKTKNKSHAPGSIISVAREAARKRVEEASAAAKRAENLDAILKAAELAAEAVFRAGTIIGMGEPLPFTLRELLEAGPNGYWKSASARNKSGSCNDNPVTETLEVDAPANFNKSGRKRGRKPKYDQALPNSEPSSSCKELQSYGIHSGVGHGVVEDVPITVSPNGNNVTSPINIIWNGIEKGSAVEVLSDKGGFGVAWFSAKVIDINGNNVFVNYDNHNGSGPHEEWVPLRQEGDKPPQIRLAHPATLSKFKTRKRLRETAGSCLWVIGDHVDAWVNNSCWREGVISQNYETDETKYDVHFSVGGGGESLVVDAWSLRPSRVWKDGQWVEWSHARERKSKSNKGDSPPEKRQRIDLLQTGGNLSVLGEVGGSSKDNNINNAKNPEELKPLSLSQGEIVFNIGKSVVENKSDSLAFRRPGLQKEGSKVVYGVPKHGKKKKFMEVSKHYDAGQSDKISEGNSSNRFVKHLMPQLPRPRENASKVDPIRGRRVGETRSRLPKPTKSHNVGASSVPGKDSLPMQMHVPNSGVSERSSSFAGSSTSTSNNEKPTSENNNPVLGVGLRTEVSSGPELQTASTVPSSKPNVSTTNRAKRKYVPTVSNTNRGILKTSEKSSSDSAEPRRTTSDSAEPRRSNRRIQPTSRLLEGLQSSLVISKVPGEKVHRSNYKSASSRGRTQAHG

SEQ ID NO: 66164 - protein, 710 aa, Zea Mays
MAKTKPMAAAGEKKKSKGKKKGKNGPAKVAMKARGAAAEERNNPFEAIWSRRKFDVLGKKRKGEERRVSRSRSEAIRKRENTLLKEFVESAKSSVFHDRRIGERDDTLPEFDKAILRQQRERLAKLKRESKYNLSDDDEDEINIHNVLLSENDDFDEEVPLDDGSDEEGKMVLSKKRLSLQSDDHPSITDLPQETHQGQKSKKEVMTEIISKSKFYKAQRAKEREEDEHLVDKLDSDFASLAQTRALLSLTESAKVKVNKTDSSTGLTGKEFSNKAKADTYEKLVKEMVMDQRARPSDRTKTPEEIAQEEKERLEKLEEERQKRMLGTADTSDEDDGNENDNHMKLGNSKPISGDDLGDSFSLDESTVKKKGWVDEIYEREGRKIGDDAAASDDGESDDENAGDDEADDEDSDSSDNDFGNMSARDWEQSDDDEVDVGDDEMEDFKEKGQEINDKVVNKDAHNLKGESNVKPQVKDGSIPFVIDAPNDLKDLSSLLDGRSEAEIIEIISRIRACNSIRLAAENRRKMQVFYGVLLQYFAVLATQSPVKFRIIDILVKPLIEMSGETPYFAAICARERLIHTRTRLCEDIKVPGKSSWPNLKTLLLLRLWSLIFPCSDFRHVVTTPLLLLMCEYLMRCPIQSGRDVAVGSFLSSMVLVVTKESKKFCPEAIGFLQSLLVTSLKGKVETHLHNQGWCTFICGRMFKRFCYYT

SEQ ID NO: 66165 - protein, 355 aa, Zea Mays
MSAPMEISFSAPPPPPDAASTAAASPLLEPAAAQMLPPVAAVSSSQPMQQTAAAAAVVAPSPADDKVLVSVEVLLHATSVARHEDVQVAVERMLEARSLSYVDGPVPIPADNSFLLENVKRIRISDTDEWVENHKVLLFWQVKPVVHVFQLSEDGPGEEPSEDDTLSSFNEWALPAKEFDGLWESLLYEVGLKQRLLRYAASALLFTERGVDTCLVSWNRIVLLHGPPGTGKTSLCKALAQKLSIRFKSRYSMCQLIEVNAHSLFSKWFSESGKLVAKLFQKIQEMVEEESNLVFVLIDEVESLAAARQAAISGSEPSDSIRVVNALLTQMDKLKSWPNVIILTTSNITTAIVYW

SEQ ID NO: 66166 - protein, 82 aa, Zea Mays
MATAQAASASPTHHRASPGMSPPQPPYPSAARIADSACFPQYTASLKCLEANQDKTKCQQQFDDYKECKKKEVCPCVIPVPL

SEQ ID NO: 66167 - protein, 78 aa, Zea Mays
MCRDERRRVGRVRRVWHQAGNDTIHVLRSSDGVPWMVSTNSGEAPRTAGKKCEKEKESSERKRARLWVEEERSLVWVL

SEQ ID NO: 66168 - protein, 121 aa, Zea Mays
MGRGGSTPRKPGRHGGAERVEERKKPRKVAGGRWSRGRAMGTSWLGKKLSREEHAAGKGAGAPWRAGAGDPGHGELAAPETPGWRSGRARTASGGDAATMELGAVHAGCRARAEAPGKKKT

SEQ ID NO: 66169 - protein, 997 aa, Zea Mays
MSSLVERLRVRSERRPRYALDESDDDLPLRVGAGKGKDQQNDAPAERIEREDAKEEACQRCGKSDNLVSCSTCTYKFHRKCLVPCLNITSDKWSCPECVSPLTEMERILDIEVLEAPREDSSSTEPRSKKMERYLIKWKGLSYIHCSWVSEKEYSEAANIHPRLRTRLNNFRRQKEAMKIEAERSGEDIVAIRPEWTTVDRILASRKNLVGDREYYVKWNELTYEECTWENESDITVFQPEIERFNEIQFRRKKSGDKGKATREPRQFKESPTFLSGGTLHPYQLEGLNFLRYSWFHNKRVILGDEMGLGKTIQSIAFLASLFEDKFGPHLVVAPLSTLRNWEREFATWAPQMNVVMYFGAAASRDIIRKYEFYYPKEKLKKLKKKKSSPSNEDKKQSRIRFDVLLTSYEMINMDSSILKNIEWECLVVDEGHRLKNKDSKLFGQLKDYNTKHRVLLTGTPVQNNLDELFMLMHFLEGESFGSITDLQEEFKDINQDKQIEKLHGMLKPHLLRRFKKDVMKELPPKKELILRVELTRKQKEYYKAILTKNYEVLARRNGGHTSLINVVMELRKLCCHGFMIDEPDLEPANPEEGLRRLLDSSGKMQLLDKMMVKLKEQGHRVLIYSQFQHMLDLLEDYLSYRKWTYERIDGKISGADRQIRIDRFNAKNSTRFCFLLSTRAGGLGINLATADTVIIYDSDWNPHADLQAMARAHRLGQTSKVMIYRLVSRGTIEERMMQLTKKKILLEHLVVGRLTKANNVNQEELDDIIRYGSKELFEDENDESRQIHYDEAAIERLLDRDQVDGDESVEDEEEDGFLKGFKVANFEYIDEAKAQAEKEEARRKAAAEAENSERNYWDELLKDRYDVQKVEEHTAMGKGKRSRKQMAAADEDDIHDLSSEDEDYSLEDDISDNDTSLQGNISGKRGQYSKRKSRNVDSIPLMEGEGRTLRVLGFNHAQRAMFLQTLNRFGFQNYDWKEYLPRLKGKSVEEIQRRRA

SEQ ID NO: 66170 - protein, 116 aa, Zea Mays
MTVYVEVKEFHPCVCMDLENADLRMMRVMEAYQVKEFHPDVCKDPEIADLRMSERWRSIRECSSLLSIVKHVLQDYSVVLCWFTVPQTILKRTDEERKVYSIVEDFELQFKEKEDC

SEQ ID NO: 66171 - protein, 1047 aa, Zea Mays
MPRFALWPKCREVDVAALAGPAPSLLPRGPPPPRYPTVQDLNSSGESETQGLRQSLEEQTGEAEAEAMLHGGGSRAPAKPRRPSSHSHSRQRAPSPPTPSRRASGAVASASHESKEQSALEAPVMSSVEETSGLSNKPSAVPAKKDTPKQVEFTHCSPGIVGRLMGLDTVPRPKKSLDRCQSDTRGNRRHLSGVARGVDSASSGDQACNTSSDELPAFNDVFEVTEMENMAMHGPLQPGNQEPYLTNIEADLEFVRQKFLDVKRLATGEGNMNSKEFSEALEVLHSKRDVFLEILQENRTAVSGFSGHILSHSGLQCSSYTSNAAAAAAAQPFEKEIPCGMEGVCDGMHVIPKEFEEPVPSMPPRETSVTPVAPLAPNEGKSKGSCRRSEIVVLKPNLQRKSFTPVLSQIVVLKPNLQRKSFTHVLSSQEASQYKQKRDTQHLKPPHHSKQFSVARNDEVLEGERGFALQKARKQAHRSGSRRRSSQEEYNLEADTEKARVSSTSTSHEDTVPIYSSIHSSGPSVSRKARKHLSKRWQMTCQSDSEDSIPKGIKTLGEMLGLSDRDAPRETTHMVGSDPNFSPYNVREVPDSPLGISSKDGWKTGIYCEDDSRAGISRNFLRSKSLPASSTTSTKLSCRRQSAPTCRLPILKDILNAPTDESENAHIRKRSPIRNAKQRNEKATAHLGRENMLPEKEIHVTSEIARHSICVSDISRASNIHTEKCPDDAIKTEDQEESDSALQHDYKKKTQGFMGCYQTIATSSPETKEVISIQNQDCIELKEERNPSVEIEADQVYTRTAESASIASAECCDCSSPSALSQQSSGEETYSGIFKSINVGIQELKEQLKMLKMEDQNDICGDYSDTLSSDEFDNMNISIYRTMEEQLSMFKDGEDRDFSYVQDMLASACDLPEHLEDWQVSSDVFLCLENKYSKLVLWSKSDRKLLFDLVNSILADMTIPDIGLCSKLMMKRWPEIDHGQLTEIVRQMVQKRSNCGHFFLEDVQPLPLDHGSEVELVGTKIAMMIHDDIMTDFIVGIMSQENLLVIS

SEQ ID NO: 66172 - protein, 1008 aa, Zea Mays
MAPSAAVPGGSEVEGSPRMAKFLCSFGGSILPRPLDGCLRYVGGETRIVMLPRDISYADLAARMRELYKDADIIKYQQPDEDLDALVSVVNDDDVVNMMEEYDKVIATGEAFTRLRIFLFSQHLDDDAASVDVHYNVDERETERRYVDALNSLGDVKSPSSPVSVEQLFGIGGNDSGIPDFAGLRHLNVPRPTHSQRYGEMDSPWSPAYVSPGQYGVHDPRDFPISPSSARFQVGAEDFDERTPDDFVRQSPKYRHYEAHSPSHMDNLVWLPPGAVIQQNAGFPGNLSRSNNFLDGSNGCDHCRSPFHKVQGSVNDPIYMNPRWTRPVQQHFDQPSMINDYPGHHANSCPDYCRPGDHYVGGQDVRLENGVYVKEQNGGHPPMFYNESHPHDRVWHVHTKQSHQRYEDPRLHHPANGRVIEPYIMDANKVYEVHSASLARSSHESPHYYHGSSEVINDTYHNQQVGGSGSYVQPAGFEESPSHHYNHSSAYGADSFYQMQQNLPPIQSLRRRANSPVHTASPYDSPHLPISNGTINTNFVRNTGDVSPRIPGLPGYDRMPNTWTPPNGSIPYRVVGHDVHAASMENTSAFGPRSNPTAAQYVQHFIAPESIQHQPGAPLREVHPERSYPEPMPSSYVDGKVAVSALPLTDQLSRLDTNTIKKPEGPDDVNSTQNVNETTPLHAVDEPSTLPHHVVVVHEVDTKQGKPTEHESRQKQHEAGATALQECGDISEDRLNFLPELIASVKKAALEDAAETRIAQSDANGAVSPVPDDDDDNEKKLDAAAAGTTDANQDPDLQGSIDRQKSSKIESTTAEAEALSKGLQIADFWKEALILSSLHHPNVVSFYGVVRDGPDGSLATVTEFMINGSLKQFLRKKDRTIDRRKRVILAMDAAFGMEYLHGKNIVHFDLKCENLLVNMRDPQRPICKIGDLGLSKVKQHTLVSGGVRGTLPWMAPELLSGKSNMVSDKIDVYSFGIVMWELLTGEEPYSGMRAAEIIVTLDKPMTSW

SEQ ID NO: 66173 - protein, 78 aa, Zea Mays
MFTNRIPYPSTKSSELGTNKRNHDRDITPASINPTRPSITPGPSLALFLPPLRKSTIRNKAKSVGQKNYTLTEISRHY

SEQ ID NO: 66174 - protein, 229 aa, Zea Mays
MAAVPSGFLLITGPPGVGKTTLVMRVFETLRGSHPNLNIRGFYTREVREGGERIGFEVVTLDGRTGPLSSCKVSSASPSGWRLKTRASNGHKLSKACLLTKRKRKFILYDHFIKSLSKQLRIIPSCANTLSISSLQSTLLIVLVQFMGIALTCIKVLSHSRCTIGCCISPNIMAAILALSLLYHVVCILYFDEMLPHFGTGSHHFPFTSFVFSITNLNNLNRTTCISHI

SEQ ID NO: 66175 - protein, 716 aa, Zea Mays
MGRSKAREGNKRNETKRNRSSINESSKDEEKQLMHLKLMGWRHFPVNIDRLSHVRVLLLGAGTLGCEVARLLMTWGVRKLTVVDSGSVVMSDLAKQSLYIDKDCGVPRVSAIAPHLKERCPAVEVESIQLEIPMPGHPVSSSKMASVLDDCKHLQTLVAANDAIFLLTDTWESRWLPTLLCSSENKIAISALLGHDSYLVMRHGAGPGTSGGTDEVTTQKLSTENALGHQRLGCCFCNDTASLINPISYETLPGLTSVASGKAVELFARMLHHPDEIRAPGDTAGTETEHQLGLLPHQLRGSLPKCDLFVELNNSSVNCTACSVAVLSEYRRRGLDFVMQAINYPAYLKDFTGISDSKRPDTCPKIPPNISVNSDKISDVRCLLLGAGTLGCDVARILMDCGVRKITVVDSGHVVVSNLARQSLYTSDDRGAPKATAILRHLVERCPSVDAQGIKMEIPMPGHPVSPGEAAGVLQDCERLKELVLSHDAIFLLTDTRESRWLPTLLCTNENKIAITAALGYDSYLVMRHGAGPGISCEASSVVTAIDKMSTEDALGRQRLGCYFCNDVIAPVDSVSNRTLDQQCTVTRPGLASIASGRAADLFRRMLHHPDGIHAPGEIAGTGSGHEHGLLPHQMRGSLSQYNILTLLGYSSSNCTACSHAVLYQYRRRGMDFVMQVINEPTYLEDLTGLTELMKSASCSQVEWVDEIDEDDFVEV

SEQ ID NO: 66176 - protein, 241 aa, Zea Mays
MPDQTSAAAAGGAAFDRCLLALYLISPLTVLALRFISAPYGKLSRPGWGPVLPAPLAWFLMESPTLWLPPLVLLRWPPPPLSGPLAALPAALYAFHYVHRTLVHPLRLARLRRAPAPVPLLIAACALGFNILNAYLQARSFALHAGRQASPFRCLAGLALFAWGMRTNIAADKELLRLKEAGGGYKIPRGGWFDLVTSPNYFGETVEWLGFAVVAWTPAAWAFFLYTCANLGPRARDHRRW

SEQ ID NO: 66177 - protein, 57 aa, Zea Mays
MTMTSCFKIFSKHPTIAKGGPARQGHRYCSGVLLMHHNDAISETTTRLMQEQARASS

SEQ ID NO: 66178 - protein, 366 aa, Zea Mays
MAGRGASPAAAAAVQVRCAGCRGVLAVAPGMTEFICPKCRMAQRLPPELMPPSPPKASPTPPPSGPTPPPPPPPSLPPPPPPPPQPVPHPLTRRSAPRAQGVDPTKIQLPCARCKAVLNVPHGLDRFRCPQCGVDLAVDLSKLRHFLASAGPGFFPPPLPPPPPPQPPVPMPHLPFLPMMPRLPLPMLPMLSPAELPEEINERHHHHLPTGARAGFFIGDGAGVGKGRTVAGLIWENWQQGRHKALWISIGSDLKYDARRDLDDVGAKCVEVHALNKLPYSKLDSKTFGITDGVVFVTYSSLIASSENRSRLQQLVQWCGSEFDGLLVFDECHKAKNLIPEAGSQPTRTGYVTSSTGCLLFSDWCI

SEQ ID NO: 66179 - protein, 985 aa, Zea Mays
MVMAPAILLAVLVLAAVAAATASAFAVASNNATVVAGKLNVHLVPHSHDDVGWLKTVDQYYVGSNNSIQGACVMNTLDSVVDALARDPARKFVVVEQAFFQRWWAEKSPTIQDIVHKLVDSGQLEFINGGWCMHDEAAVHYIDMIDQTTLGHRMIKKQFNKTPRAGWQIDPFGHSAVQAYLLGAELGFDSVHFARIDYQDRATRKADKGLEVIWRGSRTFGSSSQIFTNAFPVHYSPPDGFGFEVLDENIIPVQDDLSLFDYNVQERVDDFVAAALAQANVTRTDHIMWTMGDDFNYQYAESWFRNMDKLIQHVNKDGRVHALYSTPSIYTDAKHASNESWPVKYDDYFPYADSTNAYWTGYFTSRPTFKRYVRVHSGYYLAARQIEFLVGGRSSLGLFTSSLEDAMGIAQHHDAVSGTAKQHTTDDYAKRLALGAAKVEKGVNTALACLTSSNGTCGSSVVKFSQVVVVYNPLGWERSDFIRVPVNDQNLVVKGSDGNIVESQLVEVDNVTRNLRKFYVKAYLGITTHKAPKYWLLFQASVPPMGWNSYFISKSTGAGYNSTEHVSDVVSPSNSTIEVGPGHLKMSFSKASGQLNRIFNSISGVDLPVQQSFLWYRSSEGDASDSQASGAYIFRPDGNTPTTVSSSVPLKVIRGPLVDEVHQQFSSWIYQITRLYKNKEHAEVEYTIGPIPVDDDVGKEVITRLTANMVTNSTFYTDSNGRDFLKRVRNYREDWNLQVTQPVAGNYYPVNLGVYVADEKYELSVLVDRAVGASSIQDGQLEIMLHRRLLKDDGRGVGEPLDEVVCVDQDCQGLTARGNYYVNVEKLGHGAHWRRTYGQQVYSPFLLAFTHEDETSSKSYSVAKAGMMNANYSLPDNVAIVTLQNLDDGTTLLRLAHLFQAAEDPRYSKVAKVDLKKVFGKRTIKELTETSLSANQKKSDMKKLSWRVIGNTETGPAAVKGGPVDSRALVVELGPMEIRTFLLKF

SEQ ID NO: 66180 - protein, 276 aa, Zea Mays
MAVRATVSRFPATPEALESCAVQWGVAVTPFAAVDERGQPPTTGAGGDRIPRCEHCWAYLSSHCDLERWGWTCALCGTLNGFDDEAERRFQRPDACPELNSSFVDLEIAVDEAGAGGDGVQALPVYVAAVDLACSEEFLELIKSALLAALEALIPGSLFGLMTFSHKIGLYDVQGPIPLVKNVFIPPDLEEDGLPVALEDAMPLLSFLAPVDTCKDRIAAALETLRPTSSWERGAASGHEEDAVLLGGRGFGTAMSALIEYLSSGYGSTFALDTAY

SEQ ID NO: 66181 - protein, 84 aa, Zea Mays
MPKVWKMSRRNVVAIDPIQVYYVEGILEQLAFVEESKRKEDWVVRNQERRAAKRNRIRDEHKVVVRQPKDSPPRSTTGSVTSCG

SEQ ID NO: 66182 - protein, 382 aa, Zea Mays
MAAPLAPLTAAAVLRLGSRGLRHRILLASLRPCSSATPPHRSALPAAARRAPPPPRRFAHTLAASAATAISEGQADLVPGSTTSTKGRIYHETYGCQMNINDMEIVLSIMKNEGYDEIVPDPESAEIIFINTCAIRDNAEQKVWQRLNYFWFLKREWKANVAEGRAKSMRPPKIAVLGCMAERLKEKILDSDKMVDVVCGPDAYRDLPRLLQEVDYGHKGMNTLLSLEETYADITPVRISDNSITAFVSIMRGCNNMCSFCIVPFTRGRERSRPVSSIVREVGELWKVGVKEVMLLGQNVNSYNDTSEVEELEPGKNWQLSEGFSSMCKVKNMGLRFADLLDRLSLEYPEMRFSTNRQYSGAGTNAEGLHSRSILRTCPQNS

SEQ ID NO: 66183 - protein, 503 aa, Zea Mays
MSNRPRHAAPRRLASSSTIRRLIQDGDLAVPGSSAEDVAHALRNHRPELRRKRLKPLTEAVRRVLSSDFDDDDDDDSASRGHQGAHATLSSTTSLSDESAHPPPPPYFDATKTMLRSQYASQTSKQNPGTNQQLEIEMTAEKARRLITSDCGGGGGDAKPEAPVSEGVVNGDKWPRFADLGGMDQVLDQLVVEVVVPLCHPELPDYLGVRPVAGLLLYGPPGCGKTTLAHAIANETGVPFYKISAPDIVSGVSGGSEENIRGLFQKAYRTAPSIVFIDEIDAIASKRENLQREMERRIVTQLMTCMDEFHQNIGGDGSDADSSEKKPGYVIVIGATNRPDAVDQALRRPGRFDREIYLGVPDVNSRKQILMMLARKLRLEGQFDFLKIARATPGFVGADLKALVNNAGYLAMKRIINKRRAQYCSEVKVKWWKQLSWDAGEMESVHVTMNDFEEATKLVQPSLRREGFSSIPDVTWDDVGGLDSLRKEFHRYIRCIKSPEDCD

SEQ ID NO: 66184 - protein, 424 aa, Zea Mays
MELYPGYLQDHFNIHKLSRLQPLPTSGAPARYVTSGPVGAMGIYERQRHLVPTGVWGEPFRLDADAVAMPLPLAAFPSVTVATPAPLDVVEPEAEEIKLGKRLLQAQQDDVPRMQEAPPSSDSFSHDDDDARPRDKVQRRLAQNREAARKSRLRKKAYIRNLETSRVKLAQLEQELIMARRQQHGAYGVGGGVAPPAAPVDPRVAAFELEYAHWVEEQSRQATELRAALQSHAPDVQLRVLVDAALAHYGALFQAKARAARSDAFFVLSGVWRSPAERFFLWIAGFRPSDLLKVLEPQLSPLMDHQASEVRKLQNTARQLEDALSQGMSKLQQTLVDTLMTVDVSPDGAGGGYAGQQMACAVGKLADLVDFVDKADHLRQQTLRNMHKILTPRQAARGLLALADYGQRLRALSSLWAARPREPA

SEQ ID NO: 66185 - protein, 910 aa, Zea Mays
MFVKKLVERASKKQHIGSISSLRPENVSPRLAFHYGVPADAALLAYDPVLHVLAVATRNGQIKLFGRDNTQALLQSPSPLPSRFLQFAEGQGVLLNVNTQNQIEVWDIDAKKLCYLHPAEKAITAFSVLQKSFYIYVGDSSGSVSPLKLDLAQRCLADLPYWIPFTESYGSTTSAGNDVEVVFVSPQPLSESNRVLIIFRDGVMSLWDIKASKAVSISGKTTQQQSQKEAKNVTSACWVCAKGSKIAIGYDNGDLYIWAIPEVTSTQNSSSMGGQNLPIQRLNLGYKLDKLPIVSLQWIPSDGKAGRLYINGFNDHGHLFQVLILNEESESRIVKMVLPIAESCQGMELVTGLSDPNKHRQSALALLLKSGHICLYDDSEIERYLLHSQSRSPPTLPNCSYVKLPYGDSGISVAKFYTSNPAALASLDEDYFSSATKYPCLFSMKGKGQTLTSFTNIHKTRNLYITGHLDGTISFWDASCPHLLQIFMIKQQNKDDTSTGNPITSLQFDMSSSILLSGERSGMVHIITFKKDSSDNIFSFLNAKQGDNYDVRSIKLKGAVTTMSSISKSKHFAVGTEKGIVSVINVEDATILYQEQFECRLPGGIASLQFEIYSHNGYDKDILIIAMEDSSIFVIEEETGKLLNPNPVQTDKPSKAILLQMLELSPIDTPAVSDNQDTVSKESLLLLCTENAIRLFSLGHAIQGTKKIINKKKLSSCCCFASLIHSSSNDIGLILVFSNGKLEIRSLPDLSLLKDAFLRGFVYSRNLNSSSSITCSSDGEAILINGEETYFFSTLCQDEIYRHVDSISTVYRKENSTREDSSFVVKSPKEKKKGLFGMIMKDNKGSKSKESDAIGSEQCIATTSEELASIFSSTNFAPPSEGRNSSLRDDENAELDIEAKRSTFPWSKQR

SEQ ID NO: 66186 - protein, 139 aa, Zea Mays
MDLVVGPNLWYGDRTRLTPKQEEAALGLSRACGSGIPAYICTMKKSNVVKRQMVFSRQFSKRHIFGRLGTYGCETRVFAGRDLFGSKLNFSMIHGGLRLLGGWPLFVKSHRIEAEHVCAFMFQEEEEGELSLRADLVIW

SEQ ID NO: 66187 - protein, 51 aa, Zea Mays
MAMGLRAEATVSSHGSHFLHAQRLPLVAAREGTTSTVGFELGVWAEKQRHR

SEQ ID NO: 66188 - protein, 293 aa, Zea Mays
MVSAPRPCSPPIRRVTATEDEKENAMEYGLPSSHALNTVCLTGYLLHYVLTYGEHGSLTVAAGLSLALLLVMLVGIARIYLGMHSLTDVVAGIGFGIVILAFWLAVHDHVDAFVVSGQNVATFWAGLALLMCFAYPKPEFPTPSFEFHTAFNGVAFGIVYGIQQTYFHFHAPDAPIVFSAELPFLAFAGRVLVGIPTILAVKSCSKALSRWLLPVMCSTLGIPIVSSCYVPALKIDGGSSKSRQAAGGHLQRLLSHFPQKAYDVDTGIRFVQYASLAWSVVDLVPAIFAHLDL

SEQ ID NO: 66189 - protein, 398 aa, Zea Mays
MVYFTSVQSDTYLETQYFSCSVEEKTAGMPTLLSLEVTGDAIEGTTMFASKRYWGGEEGDTMFRWILTNSDGTEKEIEGATSSSYTLKCNDIGFYISVLCKPVRNDGVDGSLVSTEAIGPIIPGPPTCQSLELAGSMVEGGRLTFHAVYTGGLRGSCIQEWFRLHDDGHKDKLTADECLDLDLADIDCRIELMYTPVREDGVHGLPRSVTSDTILPGEPKGVNLILPECFEDNEISPIKTYFGGKEGTGKYTWFRNKEKLDNLEFDLVAESSEVVGETLKYKPSLNDVSSYLILYWVPTRRDGKVGDPLMAISDDPVMAAFPSVSDVHLEQKSSDVYCGLGIYYGGYEGLSLYRWYRESSDGTRLHIDGADSVTYEVTDADYSCRLLFGWDKWRRKTL

SEQ ID NO: 66190 - protein, 467 aa, Zea Mays
MNGQYKSTLVCPICKKVSVTFDPFMYLSLPLPSTTMRTMTITVFSTDGTSGPSPYTISVPKSGDTRTLINALSSACSLRDDERLLVAEVYNNSLIRYLDEPSEVISLIRDGDRLVAYRLPKDNEDAPIVVFRNQRMESSLSSFGRKSWKTFGTPLVSSLPDTVTGSNIYNLFLKVMTPFRVSRGDAAVADQTLGESSLVDETEDINMSSDASEHTSINNNSVEDETGTEDVMQFFLTNERIPDQRMKIEMDLSITVNDPHKRLHVAVCWEDSGLDQYNFSSLNSLPEVYKAVLFSRRPQDTCSLYACLEAFIKEEPLGPEDMWYCPGCKEHRQASKKLDLWRLPEILIIHLKRFSYSRYTKNKLETFVDFPIHDLDLSKYIGHRCQDVPHNYRLYATSNHYGSLGGGHYTAYVYHEGKKGWYDFDDRHVGPITEDSIKTSAAYVLFYRRIQEDSLDTVTDIDSDIPT

SEQ ID NO: 66191 - protein, 258 aa, Zea Mays
MADADAKSQPPDAAASPDASISSPSSLGGGGGDAADADAIEKQLAGLGIAVAGGFPEPSGWDDGPVPVPIPADVLVGGDEGAGEKPRAPAPAPTGAVDVKVRFPRRPGEPDCSYYLKFGTCRFGMKCKFNHPARKKKTSRVRGVGSNGSGSNSSSNKASSPDDDQAPKEEYEGLVPDISDSMGFDDKGSLSSSENHRNMSYEVIDMKRGKLEPKEKVCEEPEKAIHFTKLDETNIATQKVWDHVFNPFSNFLALYRPV

SEQ ID NO: 66192 - protein, 180 aa, Zea Mays
MISCCLVQTLRSNILPCSRILQLTMYLNLLHGSSQFMHEHIQVGTVKRAIEKGKSNAATSKYQDTSRTNHYSAQDNDDFLSSESDRQLLLMRQQDEELDELSESVQRIGGVGLTIHEELSGQERILNDLSLEMETTSNRLDFVQKRVAMVIKKAGIKGQIMLIVFLIVLFIILFVLVFLT

SEQ ID NO: 66193 - protein, 174 aa, Zea Mays
MLRSQSRMDSTTAAATAAAAAAPAPVLLVTNDDGIDAPGLRFLVDRLVAAGRYRVLVCAPDTDKSGVSHCITWRPALRCKRVDIIGATAFGVSGTPADCASLGISGKLFDGLVPDLVLSGINIGNNCGYHVPTFCIMQHIRSNCHHIKLAFLAFVASSCHIERQMLDVTLSTLL

SEQ ID NO: 66194 - protein, 447 aa, Zea Mays
MLASHGFGALWYILSIQREDTCWRQACINQTGCDPTSLYCGYHSLANNSFLQNACPTNSTANPDPIFGIFLPALQNVSQSTSFFEKLFYCFWWGLQNLSSLGQNMKTSTNTLENLFAVFVSTSGLVLFALLIGNVQTYLQSASVRIEEMRVKRRDTEQWMAHRLLPENLKDRIMRHEQYRWQETRGVDEEGLLKNLPKDLRREIKRHLCLSLLMKVPMFENMDEQLLDAMCDRLKPMLYTEGSCIIREGDPVNEMLFIMRGTLESTTTNGGQTGFFNSNVLKGGDFCGEELLTWALDPTSASNLPGSTRTVKTLSEVEAFALRADDLKFVATQFRRLHSKQLQHTFRFYSQQWRTWAACFIQAAWHRYCRKKLEEALYEKEKRLQAAIVSDGTTSLSLGAALYASRFAGNMMRILRRNATRKARLQERVPARLLQKPAEPNFFAEDS

SEQ ID NO: 66195 - protein, 576 aa, Zea Mays
MNLRTFGSMCGDNGVTVSPACSKKKKVYLFGTQSSGSGSESGIQTQKCTKSKGANESGNNSGSNDDEAGMGLNARDDSDNGSGTQAQNSWTKLAVEIDSPQAMSLDQLADPANSTCAQVIHSKSEICSHRWLPGSSNRNCKKQKYTNDDFKGKDLEIGGPRNLYMDHQSSPNERPIKAADHENNSKESMIENLEEPTVRAADLIGSMAKNMDTQQAARAAEDTPNFSSKVPEGKGKNDQHDNYVLPSLELSLKRSRSCGDGANDTVNDDEQRNSALRRSNLSAFTRYHTSAASNQGGTGLVGSCSPHDNSSEAVKTDSTYNMKSNSDAAAIKQGSNGSSNNNDMGSTTKDVVTKPSTNNERVMLPSAIKANGYTSTFHPVQQWMVPDNATAGKAKADEVANNAGRNSHPGDVQSNLTQQHRPTLHYVHFENSGSGALQCGSSNVFDPPLEGQATNNYGVKAGSNSGSNKGQNNGSTAGASTAAANAGRTDTEIRAIDKSGPGGGSGSGNDTYVRRLAASMTPRQEQLKKYREKKKDRNFGKKVRYQSRKRLADQRPRVRGQFVKQAVQNQEGDGER

SEQ ID NO: 66196 - protein, 297 aa, Zea Mays
MASAAGSAGGAGAGSGGLKTYFKTPEGRHKLQYEKTHSPAVVHYSHSGKTVSQMTVAYLKEKPAGQGSTPSTPSAGSGMRSAAARLLGTGNGSRALSFGSNGTSRAVSGSSRMGGGIGVSTSASGSQGMANYDGKGAYIIFNTADTLFISDLNSHDKDPIKSIHFSSSNPLCHAFDPEAKDGHDLLVGVFSGDVYSMSLRQQLQDPGKKPVSYQHFVNRDKDKDKDPSQGGAASSRSTCVAWVPEREGIFVVSHADGNLYVYDKCKDGNTDWTFPTVKDQSQVLISHAKSSKVSQAT

SEQ ID NO: 66197 - protein, 263 aa, Zea Mays
MEVTPNHTLTVTGWAAMNESAGKVEPFVFKRRENGPDDVTIKVQYCGMCHTDLHFINNDWGITTYPLVPGHEITGVVTKAGRNVTGFRVGDRVGVGCIAASCLDCDHCRRSEENYCDRVALTYNGVFWDGSVTYGGYSRALVADKRFVVRVPDALPLDAAAPLLCAGVTVYSPMKHHGMLGHPGARPGSAPTASSSAPTTRRCGTRPGPSTTSSTPSPPSTRSDPSWTCSRSAASSCSSPRRTSPSSSPPSRSSSGRGPSAGA

SEQ ID NO: 66198 - protein, 63 aa, Zea Mays
MERRNEGEEETDARSPLIAKNETVAGVQSGALGAAWGTRASRGGDARRELGGSGCCAGLCAQG

SEQ ID NO: 66199 - protein, 243 aa, Zea Mays
MVSLSTWFRYAAHKFDYCISLSLKKYNVGQISSTQLTDVIFKNFFHGKLTYVCQTKGEEAMAPIVSPTGGAVLVRKLANLSPTSSIAGQVNLLNAVSCSHGCHVQQFPCMRSSVDSVPCREVFVGDVVLLKDPEKSGNFVIRRLAALEGYEMVSNDEKDEPFVLEKDQCWVLADNLVLKPKEARDSRLFGPVPMTDILGRVIYSLRTAVDHGLVENSGMATKLDGPVLAVELDVEELAKNNKA

SEQ ID NO: 66200 - protein, 819 aa, Zea Mays
MLQLQPPGFLPIPRRRVTARGRRARPVIAFNSQWKIPDVDTDAVRERVRSWMSLARGAIADAGRAAREGGRHKEEPEGGKKKQRKEVTVEEQAFVAVPEVTVEPRVPQGWLSLDAVVSIEQFARLNGLTGRQVQRIFESLAPEHLHNDARSLVEYSCFRYLAKDNSDFHPNLKELAFQKLIFVTMLAWEDPYNEDSSPLSSLDNYSVLGRLVGEDAFARIAPAVAGVADVSTAHYLFRALVGAEKGLSFDLWTTYLAELLKVHHGRQTHQTGDNFLYDEKVLCIGSSKKRPVLKWEENTAWPGNLTLTDKALYFEAIGLSGTKKPMRLDLTNQNSRAEKTKVGPFGSKLFDSAVSVSSGSMSDEWTLEFVDFSGEMRRDVWLAFISEIISVYRFIREYGPGGDDPAIHNVYGAYKGKKRAVSSAANSIARLQSLQFIRRLYEDPAKLVQFSYLSNAPFGDVVLQTLAVNFWGGPLTTKARSANHRSTQWHRSSEDPSSGRTHVYDIDGSVYLRKWMTSPSWTSSHSANFWRNSSVKYGIILSKSLVVADKNLVEKAMVDCKEKSKVVERTQATIVAATIEGIPSNIDLFKELMLPFAIVAENFKKLQRWENPRSTFCFLLLVHTVIFRNMLSYVFPFTLMTMALSMLAVKGLKEQGRLGRSFGKVTIRDQSPSNTIQKILALKEAMASVENYLQNLNVSLLKIRTILLAGQPEVTTQVAFVLLASSAVLLVFPFKYVLAFFTCDLFTRELEFRRETVRAFMNFVKERWESIHAAPVVVLPYEGAESSPKTLPAEVSGQAEPQNVQRGSGYVSSKNGISS

SEQ ID NO: 66201 - protein, 464 aa, Zea Mays
MGGACQQLSVDGDARTPANDRDPAGLLQHDDTENQQQQQACWERFLLKETLNVLLVESDDSTRQVVSALLRCCMYQVISAENGQQAWAYLEDKRNNIDLVLTEVFMPGVSGISLLSRIMSHNICKNIPVIMMSSSDAMSTVFKCLSKGAVDFLVKPIRKNELKNLWQHVWRQRCHSNSWTKLAVEIDSPQAMSLDQLADPANSTCAQVIHSKSEICSHRWLPGSSNRNCKKQKYTNDDFKGKDLEIDGPGNLYMDHQSSPNERPIKAADHENNSKESMMGNLGDATVRAADLIGSMAKNMDAQQAARAADTPNFSSEVPEGKDDFKGKDLEIGGPRNLYMDHQSSPNERPIKAADHENNSKESMIENLEEPTVRAADLIGSMAKNMDTQQAARAAEDTPNFSSKVPEGKGKNDQHDNYVLPSLELSLKRSRSCGDGANDTVNDDEQRNSALRRSNLSAFTRCKT

SEQ ID NO: 66202 - protein, 154 aa, Zea Mays
MESREGLVDLPQEKNRLFHAIKDRITYLIVLLNSCCLLAVHYQRNKTKYCCLAGVLVPCVYMKYNLYPAFLIIFQDPGYPLLKKLIGESGAKDLVREFLFEGVGSLGTKSFLEYFAEYAQEDGTVNKKRSMAGKSFGTRPWDAHGLFVGDAVDG

SEQ ID NO: 66203 - protein, 431 aa, Zea Mays
MADGGAGAYREFKALAEAADRKFARARDLPLYGGGDHHSRKAFKAYTRLWRLQQERRRELVAAGLRRWEIGEVASRIGQLYYARYLRAAEPRSLVGAYVFYEAIYSRGYFGAAAAAVGTDGGGGGVSRHQALLIRYKELRFIARFLVVAMLMRRAEAVDHLAARLRALVEETKAAYPKTNFKEWKQVLQELGRFLKADGAYKGSRSLRYDNLFDSYPSNLVSIARFHSKRVLKLKEAVLTSYRRNEIKFTELTLDTFRMLQCLEWEPTGSYQIAAKELTENGTVSDQSGPSGLIDIQLSTEISDGSLPSNPQKAIIYHPTAAHLLAVLATICEELSQDSILLIYISASGSAEQSFASQKFGSSSSRARAASAFPTDKPNSHNSSDNHLWLGPRGSGGPNNLYPDDLIPFTRYPLFLVIDSENSHAFKAGHT

SEQ ID NO: 66204 - protein, 1656 aa, Zea Mays
MTPKAPRITRELKPDWRSRGIFSTALLHQSSRLQRALSGDSYITGLLSDLEKALQSGVLIIKLHYAIDFLDLVSRYYPHEVSRAASLVLSGAVSNRSFQPYESHIPYLLHFLVDYNLYGMGHIHVKNFKFRPPLPVDFHPKSSLRRKAQSDNLEINSPTVWISSTVSHSSILGSSAPSHHLGGTNLSFAIRQSSSMLEADSRVEGILNEKYKMYTSLSQTTEDTKMVQSLVAVWEELERLRLLEETKYADLGRPLREEVLKDFLHGIKYESALSVLFSQEGPHHKVSTIEESERLERCLKSLTDIIGTVTFSQDNYCGNIDVGNSADVQNDKPDASLCSGSLEQNMQIISPERNSEYPVSSSVHQRTLSQLSDKGEKHLDAEALGLLSWLASSQAAEESTDDELTNEVILSPLFANKSIEVAVESAQLDFDSASQQECQDILDSVDPIRAVEEPNIHTSYLDSVKKKRQHGDADDSCSAMSPQKDLSASKKSTIDKDYHDTIGSTDSESSSFLGVHDSVCHSVRDLMRRRRSFRREQLEFGCSGAATCTMDKESETVNSGGLEFHDFTSDIPNLALTRMAFVQKPPLKDDACSGLESPSDCEQRGCRSPRPLAEKSGLADLLPFFNQNMEENKQNESFQDMESTGDVLGVPTHFQNDGSALYLLTHALSPPSAGAVGHWLTQQSSSSIFSGYTNYDGVAADKEEAHSSTLSRNSPTRFTKENSANKMHGDVMGSALSYKESKHLDEWHDFSQISAGNEKDRLTPLSQIGFRDPASIGGGQQLTILSVEVLTESRGELRPDPRFDAINAVSLAIEDDADNTVDVHVFIRGNNVKSHRRNLDGIAGCNINVFPEEKDVLNNLISAICSIDPDILVGWEIQLGSLGFLAERAAYLGIGLLKRISRTPHELNHPPKIPVDNSSQVLSETSSADDIIDDVSENDWSHTHASGIHVGGRIVLNLWRLMRAEVKLNNYSLEAVADEVLRRKIPLIPSRILNRWFATGPGRGRHRCIEYISNRARINLEIMNQMDLVNRTSELARVFGIDFFSVLSRGSQYRVESMLLRLAHTQNYLAISPGNQQVASQPAMECLPLVMEPESAFYPDPVVVLDFQSLYPSMIIAYNLCYSTCLGKVFPSKSDVLGVSSYSADPHTLVDLKNQLLLTPNGVLYVQPEIRKGVLPRLLEEILSTRIMVKQAMKKLSPSQQVLHRIFNARQLALKLIANVTYGYTAAGFSGRMPCAELADSIVQCGRRTLETAISFVNQHPLWKARVVYGDTDSMFVLLKGRSREEAFRIGKEIASSITAMNPDPVTLKFEKVYQPCFLLTKKRYVGYSYESPEQNEPVFDAKGIETVRRDTCPAVAKILERSIRIMFEEQDLTKVRTYLERQWTHILSGKVSILDFIFAKEVRLGTYSARASTLPPAAIVATKAMLSDPRAEPRYAERVPYVVIHGEPGARLADMVIDPYGLLEVGSPYRLNEQYYITKQIIPALQRVFGLLGADLNKWFNEMPRPIRSTLAKRQFAAAHGSFSRDGSFIRLGLNNKTSAKGGRIDTYYMSSHCSICGDMIQGSESFCNNCLKSEAVVATVVAGRTSKLEREIQHLAAICGHCGGADWIVESGVKCISLACPVFYERRKVQRELVVVSESAGEAGYYPFCCAELF

SEQ ID NO: 66205 - protein, 847 aa, Zea Mays
MANPTATKHAFKRILTSLLKPGGGEYGKFFSLPALNDPRIDKLPYSIRVLLESAIRHCDNFQVTESDVEKIIDWENTSPKLAEIPFKPARCILMDNTGVPAVVDLAAMRDMMPKLGCDPYKINPLIPVDAVIDHAVRVDVAGTYDALDRNEELEFQRNKERFAFLKWASNAFHNMQVFPPGSGTVHQVNLEYLARVVFNEDGILYFDSVVGTDSHTTMINSLGVAGWGVGGIEAVVAMLGQPMGMVLPGVVGFKLSGKLRDGVTTTDIVLTMTQMLRKHGAIGKFVEFYGVGVGELSLPARATIANMSPEYGATMGFFPVDQVALDYLKLTGRSDETVSMIEAYLRANKMFVDKHEPETERVFSSHLELDLSEVEPCVSGPKRPHDRVPLKEMKSDWHACLDNEVGFKGYAVPKEQQGKVVKFDFHGRPAEIKHGSVVLAAICSSTNTSNPSVMIGAGLVAKKACELGLEVKPWVKTSLTPGSVVATEYLKHSGLQDYLNQQGFHVAAHGCATCVGNSGDLDGSVSAAITENDMVAAAVLSANRNFEGRVNPLTRANYLASPPLVVAYALAGTVDIDFEKEPIGVGKGGKEVFLRDIWPSNQEIDEVVESSVQTHLEGMSMTPPAAPPTVTEAYCLLNLGDSITTDHISYSGKIPEGTPAAKYLLEYGVEPKNFSSYGGRRGNNEVVMRGAFANMRIVNKLLDGKAGPWTIHVPTGEKLYVYDAAMKYKSEGHDMVIIAGSEYGSGSSRDSAAKGPMLLGVKSVIAKSFERIHRSNLVGMGIIPLCFKAGEDADSLGLTGRERYTIHLPTSTAELSPGQDVTVTTHDGRSFTCTLRLDTQVLSAPRI

SEQ ID NO: 66206 - protein, 311 aa, Zea Mays
MAVQYMRRIIQKRAKFDIMDLNVLRLAPKMFIPVLFGHGLNDMFIQPHHCDRIHQAYGGDKNIIKFDGDHNSPRPQSYYDSVSIFFYKSLHPPLLPAARSKLHMGAFKVGNITNENFFFEIINGLRPANTAGCSSSTDAPNIPHDGTSVIELLSDSMNQLSIKNENHLLQDFLLDENHSLPEIDSDSVGSRLQDKRSRRNEESFSFTSSNRESWGRCSSLGAASDESFSGDNNDKQNLTVKALATPVRQNQRQSQRKPIEKAKQKKIQALWKKIKREKVEMGDSLSSRLKMCLGQSPQHKRNRSSGTITTS

SEQ ID NO: 66207 - protein, 328 aa, Zea Mays
MLAKKFHPDTNKDADAEKTFQEVNRAYEVLKDNDKREIYDQLGPEAYERQASGGDPGGPGFPRGNPFGDIFGDIFDNAYRGGQDVKVSVELSFMEAVQGCRKTITYEADTFCGTCNGSGVPPGTVPKTCKTCKGSGAIYMQKGIFTVECTCSLCNGSGKIVKSFCKTCKGEQVVKGKTSVKLDIAAGSDDNDIMKVFGKGGADVDRNKPGDLYVTIKVREDPTFRREGIHVHVDSVLSIAQAVLGGTVTVPTLTGNVTVKVRQGTQPGEKVVLRGKGIKARNSPVFGNQYVHFNIRVPTDVTQRQRELIDEFDKEECADRERPAVASG

SEQ ID NO: 66208 - protein, 79 aa, Zea Mays
MVLGHLNYADCGSTSPRSPPSPTPLFSPLGARNPLLRAIVDRRNHLRCGDKVPSKQEAAEHLARTMKYWPPAPNLPNRT

SEQ ID NO: 66209 - protein, 1297 aa, Zea Mays
MDTHAIDSEHEAEASEPRSLNNRPSVSGNREVVVGRNSNTPVHIVNTEDDNSKTHGIRGRISANSTVAVSANVDVFGPIQSPSVHIMNIEDADINTHDITGQDNPDSSLLPISAKVDILAPIQSSGEKRDTVRTTNSPNLQEVKEKYVGARTQDLASGVLGPQSTSKMPVFRNHVDTLNGTLDVLKGHTDHVSRKYSASHDQTDVAEVLLTSPLRGNQSVDELDSSKVDRWQHQEKDRPSGSHITAAGYLNADAKLNNHEFNPKPRSDSMSNYIKNTNNYKKTSRNSFLQEGYSVNHMVSPQRAEESTLRGYSNLSTLETRQQKVIQPADVQSIAGNENPKREDGLDGACAQKRKSLVSPASINLQTEDLASETGPLDSPFVSRVSDASERIINLVEANAVNLGKERSSFSTSRQARSRKTSLKHGGPINGIKLSEYSSSDKNVKSLQKGRMSFKAMTESKCAMSSSATVQDGKTSAGFPFQDKDGESTHSSGNAANQDCLNEIGNAFTKDPAHDKSVHSSNNSQVVPSYRNASSRIEDPVKVNGNEMAVASNSELEKVVSDATVKESTKQFQDTSRNVQAETSYSKKAPTTIRRNAGVKRHRSADIEAEGSVINSAKKVVPESWPAKGSVINSAKKVVPESWPAKVIHGEHADPASKNGYSTSCAAELKTNRPKKALICRVTNTVAKRTRGACAKKDDARVSSSLEFSKVTSQENFEIISPKKLDTANADEQRRNSPKKIQNTRVRNRATKRSWKSDTNMSNDTVMDKAETVAAGALSDDLLPTDNVEDWPKKLSSHGSVSDCETLSPKTISKARIRNAASNRKIRTVDHKSGDKFGKIGSAVKSETKAFSSNRTEGISCNISKVIADPDSEKSNKDVVREVSGLFCQDSCTIDKQGSYNSKLRSSTRNKAPTPDHEKENRLGSSDLNSKPNRTGSLRSKSDAKSIKKNTRVLSKHQRGNRSEPCTLITSKPALFILSGNSEQRRGYRSILRRLKGRVCRDSHHWSYQATHFIAPDPLRRTEKFFAAAAAGRWILKREYLTACIEAGKFVDEEPFEWFGTGFNDGRTISFDAPRKWRNIRQQMGHGAFYGMQIVAYGQFILPTLDTVKRAVKAGDGAVLATSPPYTRFLDSGVDFAVVSESISRTDAWVQEFISHGIPCVSADYLVEYVCKPGQPLDRHVLFETNCVASKSLEKLTKKQVEMATAEKSEPSEDDDPEDLSCSACGRRDRGDVMLICGDEAGEAGCGIGMHIDCCDPPLDAVPDDDWMCPRCAVPEPETETKHARGTERRGRGSRRR

SEQ ID NO: 66210 - protein, 94 aa, Zea Mays
MFAWILRGCRDECSASDQLKQAHDVFKAKEVVLQKKISQEVERAKEFTKSGNKQAAMQCLKRKRYYESQMNQVGSVQLRINTKERMIADHTGNK

SEQ ID NO: 66211 - protein, 429 aa, Zea Mays
MEVQMAAQGPKSMGRRRSSTPCDSQHGGGADTKPVPGYLRPSAGSCHHVCKYGGTHTFEDHNRPQPRPPRKQQQPAAESHSHNRVLVKVRSVFRRPSKAAADKSSGVESVEWKDIVAYDTVPLPPHGSSSPKHDGTSAQFTGGSKKKDVMKGKRSHGKAKTHEQVEGQKPRAAALLVENMGTNYQEMLQGYQILPPSLLQSRASLLRDLEKEMMVHHDAADAGEGRATPTYSPDPEQCAAAAESSRPIPAHRRVQSMSISSRSARHPFARQASRNSGAFKLRSRSTRAPAVLPPPDEEKPARLRSRRGGENPSVTTERGIHLRIRSLRKRGVGASAAGTAGFVVPAVALRHQKTLEKNKSQRLYNNLIEETATRLVKTRKSRVKALVGAFETVISKIANDSIRLDPIQPVTILIRDVLFGQSGHTDRWA

SEQ ID NO: 66212 - protein, 90 aa, Zea Mays
MGRAPCCGKVGLKKGRWTREEDEILARYIEEHGEGSWRSLPKNAGLLRCGKSCRLRWINYLRAGLKRGNITEEEEDVIVKLHATLGNRAT

SEQ ID NO: 66213 - protein, 55 aa, Zea Mays
MQSSMPGSAHGDFVLPATPDNRNSSVVTTPSLCSQGSDPGMALMVLSPAVGNGEP

SEQ ID NO: 66214 - protein, 305 aa, Zea Mays
MNSGYLYKLRRKYGIVEHWVYLACSLMPWEAFDPSQRRWMRLPRMPCDECFSCADKESLAVGTQLLVFGREYTGLAIWVYNLLTRSWSPCAPMNLPRCLLASGSSGEIAIVAGGCDKNGQVLRSVELYNSETGHWETVPGMNLPRRLASGFFMDGKFYVIGGVSSQRDSLTCGEEYSLETRTWRRILDMYPGGTSASQSPPLVAVVNSQLYAADQSTNVVKKYDKANNAWDVVKPLPVRADSSNGWGLAFKACGDRLLVIGGHRGPRGEVILLHSWCPEGGEDWEVLSVKERAGVFVYNCAIMGC

SEQ ID NO: 66215 - protein, 511 aa, Zea Mays
MADEALDQPPDATPSPTPATPPVPATPSPTVLLRPRREAFEHGLLPIPKLIFPEGTLAQTLAQLKEKLAASAPDGRVRAAALAEALQIPQEQAALALATLAAVLPAEDPALGDGAVDGSAADIRDMLLFLYIQSYKRLVPRSAHKDSPVVADVWPSTSAFDGYLSALSPIQLVRSNSRRFMPSQADEEIHQLSYLQKHMANILTLLADSVEGDGDDSLVLTMETFEHLGFLVQFSEGTSLSQAATFFACSDPDMPDVPVPAAQVLDWMSQKIAFSLEYSAERSAAKESNQQTMSDLDVTMAEANTSHPRNSTPSANPAYYRNVTFVEGFSKTSVVKHASDVKGNSIKVLNCHDSVIYILAPLKYATVYGCSDATVVLGAVGKVVKVEHCERVHIIAAAKRICIANCRECIFYIGVNHQPLVLGDNHKLQIPSWFGDERQGTTNRNPFPLPEIYGTSQSKKRSALEDIQKMIRELQLDENRKRELATALHVQFKDWLYASGNIRQLYCLQGD

SEQ ID NO: 66216 - protein, 364 aa, Zea Mays
MNRIDRKRRSPFPAPACLGYLLPLPPSSHHTDSRHHWPAGLFVHSLSLARSPARPPASLSFHLLNAYKYSTGSHVHGRNVHLPSLPPHGCWLLLGRPSHTPAVALSLVWSSPASPSLILSSAAPACQCHHPPAVRIIFGPNPSKWSRRRGGAACRRSESGTTTTTAAARSSPRPRHRRSWRPAATSGSSTRRPRGSHRRRRRPAGKFGGRRPTGPHAAAAASGPVPRRLRGRPTPWSHRRRPCHARRRRARPALPGRAWCAASTRTCTRCPRRTCSTTRICHRGGRRRPAGACGWVASASVAFRLINYFLYFFIHVSTPSLTVLLFRLCNVLVFLFVSRLDFRLCNVLVFFSFWTRASIVQCGQ

SEQ ID NO: 66217 - protein, 489 aa, Zea Mays
MLPAVAAASPGLSHLPRYHHLGRRFHLRRHRLLPAIPARLSCGATHARRLLLAGAFAKGEGSSGQDVDHSAGATNSGSAYLGLFVRLLGLDNDTRDREHAVCTLYQYSLGGRKSIDEIMQFPGCIVLIISLLKSESILACEAATGLLRNITSVHIYRKMAGESGAMEEIINLLCKSTITPKILEQCLCTIWNFSIDEKWRYKVLKSDVLMKIVGYLDEEDIQVKEAAGGIISNLALSSSSHGALVEVGVIPKLVHLLQTKEDDYKIIRKEAKSSLIQLATDDCYYSLIIEEGLVRVPLVGSAAYKAFKPLPHSWPSFPDGSKIQRSSHPSKYGATELLLGLSVNENDTKPDEAKINAMIGRSNQQFLARVGAIELDDQGQEESGSEKNDMYTILPWVDGVARLVLILGLEDVSAIKKAARAMGDASINEHMRTSFKEAGAVKPLLQLLKHKDVHVREAGAYALEKLCVRYFIFPYFKSLIKVIIPLNAL

SEQ ID NO: 66218 - protein, 723 aa, Zea Mays
MTMPASSPSVGSACDPPPPPPPPPPRAMKRELAFALQSLSEISASHGRTRSGRPISSLPDPSASASLKRRKRSDPPAPAPAPAPAPAADLVSPPTPPIDAEPPNQPLRDIIQPLHGSNPPTASDHRFDSNADQEVLAMEVIAKPNLPAEEDIAADDSAMEVTAKSNVAAADGVSKPNVSAEDTASKSNVAATVAVAPTLLETAIAAGNDQCDTSNSNGENLQQQAVENVLVSTTMLAEDTVTPAAAAGLKPARRFTRSLLKNNKPDKEESASCESQATPDGSKDASVGFTLLLEKPQRRFTRSLLKTKVESSLVGSDDVLDSASDSPPSVKKMEMKMSKKVACLTKHPGNIRELLNTGMLEGMPVMYIIPHSKKAVLKGVITGCNIRCFCLSCNGAKAISAYYFEQHAGSTKKHPADYIYLGNGNSLRDVLRASDRSPLEALEETIRSSIDPVVKRSRINCLNCNELVLPSSHENVLCQVCLESKQPQDPLTASYTCNGSSSLSRSSKEALLRNISSGKKGGSAGKVTNKDNRLHKLVFNVLLDGTEVAYYVDGQRKVDGYIKDHRIYCNHCNRVVSPSAFEAHAGEGSRRKPYDNIFTSNGVSLHELAMKISKDMELSERETDDLCRECGQGGDIFPCKICPRSFHPACVGLSKVPAEWYCDSCRNLVQKEKALAKNKNAKAAGRQAGVDSIEQIMKRAIRIVPISDDLGGCALCNVRKSIM

SEQ ID NO: 66219 - protein, 630 aa, Zea Mays
MLMKRQKLLIRVGVPTILQTGELLQSMLIFLLVKQQHNFQILADAMGLGKTVMTIALILSNPRGEFSNCIKGDTRYLGDRATRGYTSTSSVRGGTLVVCPMSLLGQWKDELEAHSAQGALSVFVHYAGDKTSSLMLMAQHDVVLTTYGVLSAACKTECNSIFHRMDWYRIVLDEAHTIKSPKTKSAQAAYRLKSECRWCLTGTPLQNNLEDLYSLLCFLHVEPWCNAKWWQRLIQKPYENGDDRGLKLVRAILRPLMLRRTKETKDKIGNPILVLPPARIEVVECEQSEHERDFYEALFRRSKVQFDKFVAQGSVLNNYANILELLLRLRQCCDHPFLVISRADPKKYADLNQLAQQFLEGVQQSSSGRQNVVPSLAYVEGVVEEIRQGATMECPICLESASDDPVLTPCAHRMCGECLVSSWRTPDGGPCPLCRRHISKSDLIILPAQSRFQVDAKNNWKDSCKVKTLVTMLESLQRKQEKSIVFSQFTSFFDLLEIRFTQKGIKFLRFDGKLSQKHKEKVLKEFSESQDKLVLMMSLKAGGVGLNLTAASNVFMMDPWWNPAVEEQAIMRIHRIGQKREVRVKRFIVKGTVEERMQQVQMRKQRMVSGALTDEEIRGARIEHLKMLFK

SEQ ID NO: 66220 - protein, 125 aa, Zea Mays
MTTSLAVGRSKPGCSFLPSFSFKDVHHPRWSGGRAKSGVRPPRGLVTRFFLQHSEEKGVHQPCGGGEPQLRGAGWLQAVSCSVSGPLGWTASVPPPTLPPIVWLEAWLPVHRTGDGRAVRRSPHP

SEQ ID NO: 66221 - protein, 928 aa, Zea Mays
MPPGSASAAAIATRFATHWIADALAGDEYIDFSVLKVLVGASSKPLAGAPEFTRERVALRCIQEVSSVIAAGGDAADTAGVLRVDGAQSCQNVLFQLMREVGSPGDLEKDLLPHFSQDIQEYLCTEKFMLPETSFQMLKQVDPLLTSMALQSQMEHNDTEQCDNDQSLRSSHRCVNIEKPVFVFPTDVVNESETGNLQKDPPAPTSVFHQPCMPQSRSYVPPQEDTIDAVGLGTRSSERIPIVEGNMSVGSVLASDGCDAPLQGSITEPFSQQDKHDHTATVEPKSCKQKSPSLSHCADGDGANDGGSSNQSSKVSIHEGLSSHATVTSGFDRISDVLPTDASGPEHLPECITAQDTNMISQLDSRKAHLSALQQDRGEKVTQDLEDISANIGLVEKDHVHGDLTLQSASVLLSISCNGANQGSKSETNLQPGIVATEDRMALEEQNADKSHLEFSDTNMANQALHDDCSVMKNNAVHGGLTAQTAAVSQNCNVTLHDKTSEANCFSEPENEKNIQKNNCHTYVPGSSQDRGGESAKETSNELKSKDASPEIFVHFEDQYIIDTLEGLSQQDLCLKCGKGGQLLECSRCFLAVHSSCLGSSATFEGTNLFYCPICSYKKAIEACKKANKTYCEARKNLAALLSKTQVTKQVQPGDAHENEVNNLAHQVKEPNQQRRKQKINAIGKGYPKEVLTEKVPFQNSGSSASINIHSVLQNNNEIQVKDSEKRRQAVDEEGRKEASNDNSSHETGSSSQIRCDSPLNQDVEADQDGNLTASNQPGGSDESEATSSDDSGRPSSSWQSSRYWRCTRHNKKGLQDKEPAVSSKSKEDQQMPTSPAKRKSANPQKHYSNPVARARRRRKLWWTAEEEAMLKDGMAKFSPHNDGQISWTQILQYGRGVFNIARLPCDLRVKWRNMQMKERRAVSYTHI

SEQ ID NO: 66222 - protein, 169 aa, Zea Mays
MGRGKIEIKRIENSTNRQVTFSKRRAGLVKKAREIGVLCDAEVGVVIFSSGGKLYDYCSPRTSLSRILEKYQTNSGKILWGEKHKNLSAEIDRVKKENDNMQIQLRHLKGEDLNSLQPRELIAIEEGLQNGQTNMREKQMDYWRMHKTNGKMLEDEHKILTFRMVILPI

SEQ ID NO: 66223 - protein, 696 aa, Zea Mays
MAGIDLNTVEEEDEEEAEALPLPGPGGRGAVCLELWHACAGPVPPLPRKGSAVVYLPQGHLEHIGGDAARGAAASAVPPHVLCRVVDVTLHADGATDEVYARVSLLPEDEDAEKRAQAQARVREDEDRRDGEDGGAMRPLARTPHMFCKTLTASDTSTHGGFSVPRRAAEDCFPPLDYSQQRPSQELVAKDLHGTEWKFRHIYRGQPRRHLLTTGWSAFVNRKKLISGDAVLFLRGEDGVLRLGVRRAAQLKIVTPIPAPHNQCSSNSNLGNVAQAVATKTVFHIYYNPRLTQSEFIVPYWKFTRSFNQPISVGMRCRMRYESDDASERRCTGIIIGSREADPIWYGSKWKCLVVRWDDGIECRWPNRVSPWEIELTGSVSGSQMCAPSSKRLKPCLPQVNPEIVLPNGSVSSDFAGSARFHKVLQGQELLGFKTHDGPAISASQATEARNLQYSDERSNNNLGIPRLGVRSPTGIPGFPYHCSGFGESQRFQKVLQGQEVFHPFRGGCLADGHIRTAGMYQPDGRHVSGAAYKWSAPQGYDFPQPAKPVFLLQESSPSSVMMFPQTRSKITHLEYEYSRHEDGRLDRTVPTQDMGRSNQTLSLWPHLVSGEAIEECTGTVNMHSPVSGAEHESNNESTVENGCKIFGISLAEKIRSCDEADSCSAKCNSRLQPLKSQMPKSLGSCWATACCWQGG

SEQ ID NO: 66224 - protein, 95 aa, Zea Mays
MSTTQLKGSKEDAEAKQDQGFLYVKVSMDGAPYLRKIDLKTYKNYKDLSTALEKMFSGFSTGEMSRVTLLSRMARQYVIVFHFDVDGVRSTSRSL

SEQ ID NO: 66225 - protein, 390 aa, Zea Mays
MASSGVRNGVGPRMSAKPDRQGAGATPKTAAGKHRVSSAGGAGAYRRTSSGPLPAAAGGRAASDGAVSSRVRVAVRLRPRNAEELAADADFGDCVELQPELKRLRLRKNNWESETYEFDEVLTDFSSQKRVYEVVAKPVVESVMEGYNGTVMAYGQTGTGKTFTLGRLGEEDTAARGIMVRAMEDILADITPGTDSVSVSYLQLYMEMIQDLLDPVNDNIAIVEDPRTGDVSLPGATVVEVRDQKSFVDLLRVGEAHRVAANTKLNTESSRSHAILMVNVRRSVKGRTEMDVSISGENGLSSSLVGSLRPPIVRKSKLVVVDLAGSERIDKSGSEGHTLEEAKSINLSLSALGKCINALAESSPHVPVRDSKLTRLLKDSFGERISVLYL

SEQ ID NO: 66226 - protein, 531 aa, Zea Mays
MVLGNNSPFPSTLSSPRDAQKYGVPRPISLQGDEQPKIQYNQMVNDRNLHEPGVSAPGTTPSGVDCGPGALMMPSAPAMGTVAGLNRGMPGAKPGFPRISSPVMLNAVPSGNLFPNSGQGVLNTVNVHPGAISGPGNSILRPHDPMQTFRPGQGMEEHRQMSEFDMPVSQGSGQATIQFSSMNSSFSSPPVQQPQRPHQMSQSLHMFGNPHHSQIQGTSSSSQQQAYAVHLAKERQMQQHMAPQQHSDLSGASAVPNVQSNTQTLQQGQTSSANSAPCSKSQHQRQQAAQNLPDSSSSPNQPATFTQQKQKKQQEQQQSRQNEPQRNRGSQQAKLMKSLGRGNMMAQTPPIDCTPTNAASTPSKNHVSEKLVQHGQGHFPANTTPVPSMPQPRLVTSLPQSPTKVADIGNQGLKKGGSLSQAMLALQQPPHGSKSTLTTQLQQRQVNPPQNNNGRAVVQQNRQMNSDCRTDLHVGQVRHNQMVPTSMPQSADSCSPVLSSVNQQKREPSLNQTSVTSPSNLLRSPKDTSFG

SEQ ID NO: 66227 - protein, 215 aa, Zea Mays
MIIFDPCLMHLTYCNFYVNLKLGVNQHRERGLNMGLGLQRMNRARRGKLPIVITEGRIRPVAPIVAAKFATECNIAVRNHVLVLKSWKEYEKHPGLFKLFTAKLSAKFDINTEDALVKNACFQMMRNALRQQRYKLKKQYFDPFPLHLVRKTSPIKSTSDEQWNDLVEHWKGPKNMATCEHNKGNRGKVKFHQTTGSRSYMVHVENLFHKIILLS

SEQ ID NO: 66228 - protein, 793 aa, Zea Mays
MMEVGLNPGEELDFGDNQEDDDDAGDISPASKELAAMVAAAAAAETVELDDGGAGVEAAASAAAAASSSSAAARYGDDRTPRDGMVFKSYEEVLNFYKRYALRTGFGVCVKKSSFTKAGLCRRLVLVCNKWGNGKEDACYQARPTAKTNCQATVVARLLGDDLLHLTDVNLEHNHALNPSAARFLRCYKTLPSGLSKDLVVRAARGECSVAGDIDVPIFDEWGRLKTGQADVLAINAFFTQMQAKLPNSFYVMDFYVEGHLRSVLWADSRSRAAYQYFSDAVWIDTACLRNKYHVPLVSFLGVNHHGQLVLLGCGLLSDESTESFLWLFKSWLTCMKGQPPNAIVTDECVAIKAAVREVFPKTRHRISDWHVVRSISEKIGDLPEYEAMRTNLVTVIYDSLNDNEFEARWKNWIDRFSLQDNEWITFLYENRHLWAPAFLRDTFSAGLCTVSQRESPSTFFEDAVSSETTLVTFLASYMTLLDNKYKMEQQDDFDSLNSSRLLISKYQMEEQLSRLYTLNMFMKFQDELKATMHCQVQLDGSASSFIVIDLTEAGSEMLNKKYEVVHCMATNRMECNCGLFQFHGIVCRHALSVLKWQQVYDIPPCYVLNRWRADFKQLHYLDNPSKDLATSNHVERYDYISLQFLRLVEIGMVSDEKYRHAVRLLKDMKETLLDDNLCRDLEQKLTPAERAIVNGDNHTQPGSSEGGAAKKRRGRPPKKNKEINMDSMDPLLVSSDVTQKDTFHSASTTSNLGTHVRTHGIVDLMKSIQASCHLIAVTGCNLATRTILVITN

SEQ ID NO: 66229 - protein, 59 aa, Zea Mays
MNAPYVLRYTPTVILFLTTINLVLFHFPRFNTQGAYYSIIPYFYYRCLYLFNMMCFPLL

SEQ ID NO: 66230 - protein, 332 aa, Zea Mays
MALVRRCLCGSEEDCRALLGMENLRLFSYREIRAGTNNFDQSNKLGRGGFGTVYKGVLRDGTEFAAKVLSSESEQGIKEFLAEIESISQVKHANLVRLLGCCVQRKKRILVYEYLANNSLDHALKGAAADLPWSTRSGICLGTAKGLSYLHEEHEPNIVHRDIKASNVLLDRDYLPKIGDFGLAKLFPDNITHISTAVVGTSGYLAPEYFVHGQLTKKADVYSFGVLVLEIVSGRRVSQTIQSDMFPVREAWMMYQQGRLLEIVDASMGSYPEKEVLRYIKVGLACTQATPSSRPTMRQSEWDTTRKGTTELEAQIPKKRGHILLQDDYNIL

SEQ ID NO: 66231 - protein, 72 aa, Zea Mays
MCMGGNLSTLNSRAVDLRSCGHKRVPVHTMADLILAVRCRSIGSQQKIPLRPNHFTKETLYLFAFNPQSTSG

SEQ ID NO: 66232 - protein, 57 aa, Zea Mays
MFHCGNLDHSTLLVHALWGDWNALIIDAVQFAGYLHHIFDQLICPGKSMIFGCGIHT

SEQ ID NO: 66233 - protein, 128 aa, Zea Mays
MGHRRLFVLSLGLAHLLLIATAHAGGGHARGAATDDAVAHQGMSMVGSRPPSCAGRCWWCGARRCEAVQVPITPQQQDKSRRHGKSGGGGGGSIPSSTRDGGRGGASSSYDDRSNYKPLSWRCRCGGG

SEQ ID NO: 66234 - protein, 922 aa, Zea Mays
MLVSVAADDSGWQESPSQAVLFADEIAAVRAVLGGTLSEASIIAALSQCGGNAERAINAILDDAEVVSAPKRAKVELDVGGVPVQVPVAVKVKAESIDVGAVAPAAVKVKAEPIDGDVVGSQQSDGSSAKATAKMKSEPAEWSAKTPDRFVPDARSVGAPVAVASAGAGISIVPRQNKRPRQEVGTIELTTTHPVPYLNSRPIRALPPMPPMGGDGEVYDPKPIQMVPPLEIQMHDPRTTLPAPSPIDIEMYQQPPRPPPVDVEMCEQRSRPRPRPLRAVVPASVTDMRMVVAPPDGEFGDFPVERDWMLVGKSYVPGLSTNRGRRRLDAGEIVHFAFPSYEKIYGGLKMTAKKAAALAQIVRFSTKRAGEIGKLSPEWTQCLVPLVNSSKVKIQGKLVFPTMELRLMQEILLYVSFYIHKSVLAEMDNSPCDMLDHANVDFTPSPLHKLLSLLNLKPSNKDAFSLDDLTTRKLKQILRGNNNNGDDSTPVLGHTFLEQGADEQAISEAALNKLVGTAETFDLEEAEPPTTLVSVLKPYQKQALFWMSKLEKGIDANEETKTLNPCWSAYNIADRRAPPVYVNLFTGQATTQFPSMTETVRGGILADAMGLGKTVMTIALILSNPRGEFSNCIKGDTRYLGDRATRGYTSTSSVRGGTLVVCPMSLLGQWKDELEAHSAQGALSVFVHYAGDKTSSLMLMAQHDVVLTTYGVLSAACKTECNSIFHRMDWYRIVLDEAHTIKSPKTKSAQAAYRLKSECRWCLTGTPLQNNLEDLYSLLCFLHVEPWCNAKWWQRLIQKPYENGDDRGLKLVRAILRPLMLRRTKETKDKIGNPILVLPPARIEVVECEQSEHERDFYEALFRRSKVQFDKFVAQGSVLNNYANILELLLRLRQCCDHPFLVISLHSNSLKGCSRVRLEDRT

SEQ ID NO: 66235 - protein, 571 aa, Zea Mays
MGPPAYTASPCTGSALFSNTRAPPPPPRLLIRWGPGPPSAVGRHGGRVTPSQERRGPAPSQERRRPAPSQERRRPTESSSQSHQLQERKRHWKAGEFPGTAADGGGGGGRRPALGNRHSKAGEFPGTDGVRPAPAPPQGKRHWKAGEFPGAAAAPGSGTPRTPLKNVKKRLDARADAKAWACTVTEALADRVSSKNWQEALQVFEMLKEQPFYHPKEGTYMKLIVLLGRSGQPTRAHQLFDEMLQQGCQPTPELYTALIGAYCRSGLLDEALQLLNDMKSSPLCQPDVYTYSTIIKACIDAARFDLTDAMYKDMAERSISPNTVTQNIVLSGYGKAGRLDDMERVLSDMLDSVSCKPDVWTMNIILSLFGNRGEVELMERWYEKFRGYGVEPETRTLNILIGAYGKRRMYDKMSAVMEHMRKLAFPWTTATYNNVIEAFAEAGDAGNMEHAFNQMRSEGMRPDTKTFCCLIDGFSRAGQFHKVVGMVKLAERLDVPVNTPFHNAVLGACARADDLVEMERVFRRMKHTQCEPDASTYSILVEAYRKEGMTDKIYALHQENPALVPADFVMS

SEQ ID NO: 66236 - protein, 191 aa, Zea Mays
MHLQLSTTCNKRPEDSDYTVDVLTRCSVTKDNSGKKTMKVVPLKARGEPVVVSLSLSQIDGLSSIRMYIPKDLIPVEVRENTLRKVEEVLLRFAKDGVPLLDPEEDMKVQSKSFRKATRRIEALESLFEKHDIRNSPHIQQKLKVFHAKQELSAKIKSIKKTMRSSTALAFKDELKARKRVLRRLGYCILF

SEQ ID NO: 66237 - protein, 696 aa, Zea Mays
MRDGAPAPRAGGGFFSARSLSNCMRIVSSGASTAASTLRSAGASLVNSMASHEEDASRDQVQWAGFDKLECGGGLLRQVLLLAYKSGFQVWDVEHADDVRQLESRHDGAVSFIQVLKDPIFTTESGDRFADTRPLLALACEGTHTGSGKNHDTNVPVFDGTNGAFHSIGGENLPTVLLFYSLRTHEYVHTLRFRSAVYSIRCSPRVVAISQATQIHCFDAATMEREYTVLTSPTVAQVSGYGPLGLGPRWIAYSGNPVPVPDTGRVSPQLLSLSPSVPPPGSNGSVVAYYAKESSKQLAAGIATLGEVGYNKLSKYYADFIPNGNGTIKQRSSVYKANGVTNGHLIDSEYAGTVIVRDIVSKLLIVQFRAHTSPISALCFDPSGTLLVTASVHGQNMNVFRIIPPHGTSEAGQIGTYVHLYKLQRGITNAIIKDISFSDDSDWIMISSSRGTSHLFSISPYCGSTRFRYSDNNPVENDYTVDSSVNHTAHWSQNSATSLSLSQKTLFVSGPPVTLSVVSRIRNGSNVFKGAVHGAAAFATGASTPISGAIASTFHNRMAGDIDSDGSLRMKYYLLVFSPSGSIIQYALHLSAEQDSGLDFRTSPISYGPERETDTKFVIEALQKWDVCYKRNRRDSAESFAYSDFENGENNKLLLKAMWKGTSIYPFDCSVERQKLSADENRNLYISQNTLSSYGG

SEQ ID NO: 66238 - protein, 444 aa, Zea Mays
MPLMCSAGGDCACTRYASSSIPGFPAHCTTALPPSSPCSCCLYILPRDSQGRSRPSKSASTLARSQQSLARQHWRRPARARHGGGEAKAAAVPVPAGGGRELGAAGGGGAVRPAGAVLLHLRRLAGGQRQQQLHRVAGARQLPALRHRLRRRPVGALHQRTHHRRCHRSTSGFRQLHPAVRRNERGPAPGRRQLRLRRRRHPRRDRPAAGRADPVRGAGAELPDGGADAGEHPGRPGHGVGPPEPVHLQRGHGQQRLPQQLLHAGLLQHGQPVHPGAVRRLAHRRLPPPPAGAVQLRRAQGGDDRGRPGRVQPQRAGPLQRRRRHLRRPHRRRHPDVQPPPRRPRRRVQRAPRRALHLHQRIQHLRRHPRQRRLLRVHGDQRRVLRGGQEQRAGDVPAVPGAVRQQGPAHHRRPPVLPRRVAQRRLPDGHQHARLHLILILIPP

SEQ ID NO: 66239 - protein, 304 aa, Zea Mays
MAIVETAAAAAAAAAAADHTAPPREEEAPGAAADAGEREMRDLEDLLSKLNPMAEEFVPPSLASPISGAGAGHGALTPAPLSPAAYGFYPVNAGFAVASPGHRGVVSFPAVADAHAGRGMKKDGAGGFGGHGHGHPGRRRTNSRTSMAQRDEAIRRTVYVSDIDHQVTEENLAALFINCGQVVDCRMCGDPNSVLRFAFIEFTDEEGARAALNLSGTVLGYYPVKVLPSKTAIAPVNETFLPRSDDEREMCARTIYCTNIDKKVTQADLKLFFESICGEVFRLRLLGDYHHSTRIAFVEFVMVS

SEQ ID NO: 66240 - protein, 137 aa, Zea Mays
MTPQKLPDLVEHNPLIAVDVLSKLINSPDVDAYFDAIVHMDMSLHSMEVVNRLTTAVVLPPGFVHDYISNCIRSCEDIKDKYMQNRLVRLVCVFLQSLIRNKIIDVQDLFIEVQAFCIAFSRIREAVGLFRLLKSVE

SEQ ID NO: 66241 - protein, 881 aa, Zea Mays
MPPGGRRGAKQRSNWTREPQLGDLVLAKIKGYPSWPAKISKPEDWKRKPTPKKFFVCFYGTGEIAFVPLADLEEFTEKKKNDLLDRALKVQRKYVQQFNVAVEQICKAYNELPKTSEAANVALPDQSEKTTEHLVRSPDIGGTPGLGQMEDDPPTDCSSTSGQGSGTEEDVKDGGHEIGDNSLAVPQKKASLQQDPKHPKTKKSAASKSGFDMYTEQEHSPTSLRAERQIEEVKIEEESCHLEGFVLEPNLEVVCALEVPKNFKSNKLLRNAESKENEHVGVGSPTGRIAVEAASDVVLNMSAEEESREFKKSKIMTKQSLTTGSEKRDNKIVHGKPDKQLTGKSSAGFSLNQKSLTGSGQHKMDSSADTRPAKKARLMDRAGETDKTVAKSETKLNINYENHNAVKHEQSTAVETCKNTILKTGIGDDRARKSGGAVSPISKLHSEIMEPASGSSVTQSTVADSLKKGSSRKEDVSRVDRKLVKPKRRACRFDDDEDEGQQTPLHRTSAKSLSTHIVPTEKPGSRGNFASHVGNASGKKPGPAREEKSRSVRMSPVKHEPVFSSPSQDKVHARHQLMGRNLITGSVETPVIGNKMSLVDGKSSAQVKMPACSEVKKLHSTSKPLQVTSGKSHSRNYPASEKIALVPKSEETKAKSKPATSVEHKVATTLSTERTGKRDHLKEERSSSVDKAAYSEPNPDSAKSIKHLIAAAQARRNLMASALAKFDGSSTDNSAITSTSYGLPRLSPSPVFRIPSPPRIAFPESPGQRILKSPMELDNGHGKSPKSRQASGSPSGGSDAAIARDALEGMIETLSRTKDSIGRATRHAIECSKYGIAGEIVELLIQKLENEHNLHRRIDLLFLVDSITQCSHSHRGFKIVA

SEQ ID NO: 66242 - protein, 541 aa, Zea Mays
MSQYCLFLGFLEKVLLLLGECGAQWFRRYTKFYGTSPRSAVNLVEDALMKYKHWEEEIDKWQTPVLQDERLPEWYKITLFNELYFLVAGGTVWIDSGSLVSDADNKSNPEESNLSHEIDDKENVGKFLYLEGIEYFMWCTYDVHFYASFALLDLFPKIELSIQRDFARAVLREDNRRVRFLADGTWGIRKVIGAVAHDLGAHDPWHELNAYNIHDTSRWKDLNPKFVLQIYRDFAATGDKSFGKDVWPAVCTAMEYMEQFDHDGDGMIENDGFPDQTYDAWTVQGVSAYCGCLWLAALQAAAALAGSLGHDDYAERCMTRFVKAKTVFEARLWNGSHFNYDSGTSYSSRSIQADQLAGQWYTASSGLPPLFDEDRIKCTLQKIFDYNVMRVKGGRMGAVNGMHPNGKVDETCMQSREIWTGVTYSLAATMLLHGMEHQAFTTAEGIYTAGWSEEGYGYWFQTPEAWTIDGHYRSLIYMRPLAIWAMQWALSPPRSILEAPKVNTMDRAHISPGTFQFLQDSVRKMTPKNGCFGNTVINLDC

SEQ ID NO: 66243 - protein, 179 aa, Zea Mays
MLSAFSWRPYILKQEHFMILGKIKGNKDDKGLETETWYDLALLYLGMAQWRDAEVCVLKIRSISPYSALAWHATGKIYEAKGLRKEALGAFFRALDLDPKHVPSLISTATVLQQLGDRPLPSIRCFLTDALQLDRTNHVAWFNLGLLYKEEGGRSAAEAAECFQAAAFLKETAPSEPFR

SEQ ID NO: 66244 - protein, 72 aa, Zea Mays
MAAGGAGPAQHQAPNGASVSISNGGGAAAATPPQGSAASTANGAAADGYDSDGYSFAPPTPSTLSMSIPPEL

SEQ ID NO: 66245 - protein, 678 aa, Zea Mays
MATRLIVVVVVSLHKPCCLVMNFRTADFWLPSPKLRRMITKTCAICLTTMKPGQGHALFTAECSHTFHFHCISANVKHGSSSCPVCRIKWKELPFRGPLPAELPQGNARINPVHGYQNGGHMTIPRPLPLPRARSFGRLHHLATLLPDADPGTFNDDEPLDLSCEEANGTQQGCLRTVEIKAYPEFTQVPENTSERNFTVLVHLKAPPAQHLLQSSSDLGDGNGVSTTRAPVDLITVLDVSGSMAGTKLALLKRAMGFVIQNLGSSDRLSVIAFSSSARRLFPLRRMTESGRQQSLLAVNSLTANGGTNIAEGLRKGSKVIEERQSKNPVCSIILLSDGQDTYTVSPTAGVHKGATEYCALLPSTTTNGSQQVPVHVFGFGADHDSVSLHSISQTSGGTFSFIETEATIQDAFAQCIGGLLSVVAQGLHVKVESLHPDVHFGSIRSGSYSSRVSDDSRNGSVDVGDLYAEEERDFLVSVNVPPGCGETALLKVGCVYKDPLMKETVNMSGVQVKISRPAFVSAQSVSVEVDRQKNRLHAAEVMAEARLSAERGDLANAVSLLEDCRRMITGSASGQSGDRLCQALDAELKEMQDRMASRQRYEASGRAYVLSGLSSHSWQRATARGDSTDSASLVQAYQTSSMVDMLLRSQTMSRPSTPRPAPQIRHAKSFPARPQPR

SEQ ID NO: 66246 - protein, 409 aa, Zea Mays
MLLCGWMLAQALFAGGRTHFVETCGLPISTYFSALKLLWLMENVDAVKDAVRTGDALFGTIDTWLIWNLTGGVAGGQHVTDCSNASRTMLMNLKTLDWDKPTLAVLGVPVEILPKIISNSEKIGVVAKEFPFAGVPISGCLGDQHAAMLGQLCQKGEAKSTYGTGAFILLNTGEEPTQSSHGLLSTIAYKLGPAAPTNYALEGSIAIAGAAVQWLRDSLGIIQSAAEIEKLAETVPDSGGVYFVPAFNGLFAPWWRDDARGICIGITRFTNKGHIARAVLESMCFQVNDVLSSMHKDAGEAGEVKSAEGEFLLRVDGGATVNNLLMQIQADLLGSPVVRPADIETTALGAAYAAGLAAGVWTKEKVFAGLHKENTTVFRPKLDEAHRKKRADSWYKAVSRSFDLADLSL

SEQ ID NO: 66247 - protein, 87 aa, Zea Mays
MIARVSCGWRHCVSQVQGAFMFCATVLGCSWCFLVPKHGAVVTFKLYSLLNEYAELLTSCRLFSKEKYILYSKILDRYRCRLQFLSF

SEQ ID NO: 66248 - protein, 193 aa, Zea Mays
MTGKKAPVPPPPPPQAPKPPGVVPPPPPPSSKISNAPAPPPLLGRGRGNTTGPTKGRGIGLAQQSNPPKKASLKPLHWVKVTRAMQGSLWADAQKQGNQARSPDIDLSELESLFSTAVVTSTSEKGATRRGSAINKPEIVHLVDMRRANNCEIMLTKIKMPLPDMIENCAPLYIKQIKKRSIEDPPYGGQAYK

SEQ ID NO: 66249 - protein, 166 aa, Zea Mays
MRMAYCPAAHFFLFLVQWTDCNLAGALGLLRILIYKVYADGTTTMCTHERKASIREFYAVIFPSLMQLHERINEVEDRKQKAICLERYRRRDEDPKTVVSEIDDNIEEECGICMEINVKVVLPTCSHAMCIKCYREWYESALPFLKVLIILAIMLFRQLCTPACSR

SEQ ID NO: 66250 - protein, 333 aa, Zea Mays
MAVPLPQQPGPYTSGSLGYFHLRLVGPAPALLLVRTDRLYSLSHSRRCGYRFRLRLLANPHRRRAPDLLLSTYGCDLRLTHRSGIGSPSVNGRPLRAGTPTELAVGDEVSVLRCGARYGFIVERFVSCGGFEVDAASTAGSCAEGLVFRAESLRKRLRAISESEDPLSLLRDCSGIGNLDVDIGPKKWRQDGAAELCLDNPITPASKENVLQGDCNFERDKFDHDFDVVNDGDPELFNGSKGCRDDSSEKPGCGSGNEEQYHSEGCYSDGSTFFLNRLADTGSNTQTEPQSGVTLPQLLHPVNSLVSQLLQDSPASTSDNSMPQQGEMLECKQ

SEQ ID NO: 66251 - protein, 322 aa, Zea Mays
MDSHSPTSAAPPAAAETARYTYSPRLRWQPEVEEYFNTAYGRDHFARISEALAHPSCYSCIRVNTLKSSTDAVMHKLLDLVCKNELSAVINGLEVVELNGGDQSQEGCSLVHKCPYAGLENVLFVQGSGPHVLHYGSQPDQAVKEVVVSRKCAESVLRGAQVYVPGVLACSSHVEKGDKVAVSVAIEQPVKEDGWAVGITRGTVLQGLQSDAHYEERKGLYIGQGTAAMSRSAIFRVPHGIAVEMTERVYKLPSFNDVLEGEIFLQNLPSVVTARVLDPQSGERILDMCAAPGGKTTAIAILMRDEGEVVALDRSHNKTIDL

SEQ ID NO: 66252 - protein, 662 aa, Zea Mays
MEKKTVHVPAEGNGEIENGTSSSQNPETLEHPVLLSASQTVPNNLGIRKNYKRAANRGKKGSQGLTGQAYTLRSSDIDVRVLRSTSGSKTTSTEHVQPPGQPAAKRRKRSRASNKNSTDEFSQIRKRVRYILNRMNYEQSLIEAYASEGWKNQSLDKIRPEKELERAKSEILRCKLRIREVFQNIDSLLSKGKIDESLFDSEGEISCEDIFCATCGSKNATLGNDIILCDGACDRGFHQNCLNPPLRTEDIPMGDEGWLCPACDCKLDCIDLINELQGSDISIEDPWEKVFPEAAAMANSSKQDEAFDLPSDDSDDNDFDPNMPEEHVASKEEGSSEEEEDDDGGSDSDDSDFLTCSDDLEPLIDKKNVDDLGLPSEDSEDDDYDPAGPDSDKDVEKKSNSDESDFMSDSDDFCKEIKKSGGHDEVSSPPLPDVKVGDMEKNTAQSNTTSSADDPMETEIDQSVVLPVSRRRQAERLDYKRLYDEAYGEASSDSSDEEEWSGKNTPIKSNEEGEVGSPAGKGSRVAHHNELTTQNTKESLHSLHGSVDEKHGDLTSNGSNIKDRKGHFGPVISQVNRWFENRRHFARLASSRKGISPDKHSPQNTNSPVTPSMQPKEPEGTVMEESNVCINRDATISKKAVSSKVGSRKNLSKSSPKSRVRS

SEQ ID NO: 66253 - protein, 189 aa, Zea Mays
MKLSTRETLAFGKSLPGGARAEGDGVSDAGGAGEGGGGVVVGVAVGARAGVLEELRVRRRPVVQLRLRRPHQHLHLRRRPRLHHHLLSRRATKPEIVERPWSNGGGTGRPDAADAAAGRWARRRPGRAGRDAGRQLLARQPRHGRRAAGAGAPGLAPRAAPARSRRPAAGAVVPAAATHPRHGHARTCA

SEQ ID NO: 66254 - protein, 240 aa, Zea Mays
MGSLGEVGDGKEIFHGHGHSDPVVDELNRLQNLLREKERELGHAYSEIKGLKVTEALKDKAIAELSKELKRQDERMRSMEKQLEQKNLEVKRLNNERKEALSAQFAAEATLRRIHSSQKDEESVPFDAIIAPLESDIRKYRHEIAVLQDDKKALERHLKLKEVALVEAGNILHTALERALIVEDVQNQNIELKKHMEIYHEENKLLEKANRQKVLEVEKLTQTINELEESILATGGKEDP

SEQ ID NO: 66255 - protein, 1273 aa, Zea Mays
MPDNTGLEIGLKGSKGAPMPGTEGRVAKDLKKAPASLEESNASRDEDPGGGPALTGKKRKDRRGSADDNRNVTRRVLRSDAMKLRAEAEAPCGAGVEVSKTDSLERKHCDTTVEAEACKSSVLMEVACNGGEANGLVNLDASDVSEESTRCSDNNMGMPGVPATDFSQDGGLAQGSIAESDDKTVKSDEVSAVTHSEQNDSQAGINSYNADEAQDNKVRHGPCQDEVIDSAITNGANTSTDLTKTSPTSGSESVKQDDSKQENNLVHTEGVILHSGDPKVENHSQIEDTCTETEISLTGNGRCAADNHTDRTGYTKQEERGSPVNETNDISAHDIVFTRRGRKSCEAKQGTCEEESRFEKRVTRSATVRQREVSGSLCKTTTNETALGSRGRKGDIIAHYTRKVSSAVSPKGHHAELGECNTSMENQTVKQKVVDRRDSGATKNDNDANDTKNKESEKTEINLKTQPPVGSVSIVNKTTVGAVSVVGQSISGSAITERNDTDHTDSDGVKYENMTLVQKLLLSVGAKIVASKKRVLEAGPDKTTGRSPIALPSMKKTRNTSSDPEIDQPDKSSGEKLIGNNCDLGNKRVLRERQHQNQTYLSSRSSNQSNQNAIKQTQDQSDDDDISSDTSYRRTRSGRRRGAARLAVPKQEDSSDSEEVVVVKKNRRKRKKSVHKHRAGSKLKHTSGSPPKTGRLGRPPLVKSECGCLPLQPGKGKMNVPEGTGALREEKQKISDQIKAMLLDAGWTIDLRPRNGRNYMDSVYIHPSGKGSYWSVTKAYYVFRADMESEQKESSKDHILSKKSVGSPGKRQVSSSSGCTLTDDILSKLKRVVVNKRTTKVEIQRLRQKKEKKNTTNSTRLHLGNERKKRGGCALLVRGSNKESGSTTDGFVPYEWKRTIFSWLIDLNVLSVNTKLNCLDESHSKVLLEGFVTRDGINCSCCSEVISVPEFVTHAGSEVNKPYRNILVDGLDIDLLHCLINAWNMQSDAERQDFFPVSIEGDDPNDDTCGICGDGGNLICCDGCPSTFHMSCLGLEALPTDYWCCSNCSCKFCHEHSSDDAEDTADVDSSLHTCSQIHNIWYHESGILSMTSAADDVRTWREELARARADLEQARSAILQLVIYSRQRWSLTADQRRQRDCRRLCMGSWRDVQCGSGLPSSGYDTWLPGAASSTASSGLPSSGCGTWLPDVASSTTSGNTVAGYGLQQGWPILSHVDSKNKSGWVVLSPLELAVAQAVRLVSCHVLAFAAWKRLFPWDPGWHMLGSLFYLLIN

SEQ ID NO: 66256 - protein, 128 aa, Zea Mays
MASLPVPHTLPRVSPAIVGAARGRAAVRVRTATAALGGGCGGGGGMEQRHGDAPHSPVKEKPVMSNIGKSTNILWHNCLIGQSDRQKLLGQKGCVVWITGLSGSAFWHTLHSLAPPALMMADEELKPI

SEQ ID NO: 66257 - protein, 72 aa, Zea Mays
MSNSDLELSVALNSKKVWNPLEITEAKELLVSFEEEADWALLGLCSLILHRYMTSYFLYNLSNSLSMASISF

SEQ ID NO: 66258 - protein, 835 aa, Zea Mays
MLPRKRGVDAGEDQDLHNKALRAAAVAQDKEKVVAEMGGRAPEIDEDLHSRQLAVYGRETMKRLFGSNVLISGLQGLGAEIAKNLVLAGVKSVTLHDDGKVELWDLSSNFFLSEKDVGQNRALACVPKLQELNNAVIISTITGDLIKEQLSNFQAVVFTDMSIEKAVEFDDYCHSHQPPIAFIKSEVCGLFGSVFCDFGPEFTVLDVDGEEPHTGIVASISNDNPALVSCVDDERLEFQDGDLVVFSEVHGMTELNDGKPRKIKNARPYSFTLEEDTTSYGTYIRGGIVTQVKPPKVLNFKTLKEAIKEPGEFLMSDFSKFDRPPLVHLAFQALDKFRTELTRFPIAGSADDVQKLIDLAISINETLGQEVVKACSGKFHPLYQFFYFDSVESLPVEPLEPSDLKPENSRYDAQISVFGAKLQKKLEQSKIFMVGSGALGCEFLKNLALMGISCSQNGKLTVTDDDVIEKSNLSRQFLFRDWNIGQPKSTVAATAAMAINPKLHVEALQNRASPETENVFNDAFWESLDAVVNALDNVTARMYIDSRCVYFQKPLLESGTLGAKCNTQMVIPHLTENYGASRDPPEKQAPMCTVHSFPHNIDHCLTWARSEFEGLLEKTPTEVNAFLSNPGGYATAARTAGDAQARDQLERVIECLETDKCETFQDCITWARLKFEDYFSNRVKQLTFTFPEDAMTSSGAPFWSAPKRFPRPLEFSSSDSSHLNFLLAASVLRAETFGIHIPDWAKNPKKLAEAVDKVIVPDFQPKQGVKIETDEKATSLSSASVDDAAVIEELIAKLEEIFKTLPPRFHMNPIQFEKDDDDNDVDVPLVSIYFR

SEQ ID NO: 66259 - protein, 238 aa, Zea Mays
MQAREAQLCMSDTCSLHENGHDEISIKAMGQAINKTVMVVELIKRRVGGLHQNSATESVDITDTWEPLEEGLLPLETTRHVSMITVTLSKKPLDTSSPGYQPPIPAEEVKPAFDYDHEDSYPTGRGRGRGGGRRGRGRGMSNGPSPPAYGYNEEWGEEGDYYNRGRGRGRSRGRGRVRGGYYGGGRRGGYSYGYGARGGYYEEQDEYYDDPEEYAPPGRRGRGRGRRGMPWRGRGVYY

SEQ ID NO: 66260 - protein, 83 aa, Zea Mays
MHHVQERRAVPRRRSHPCLCVLARVVSRTHVGGHAHAPEAVPASRSHCSRRHARAMPEPRRPKGSDHAQFIPSSDWLPGFSSI

SEQ ID NO: 66261 - protein, 395 aa, Zea Mays
MALVKSDAEEDWSDSDFDDASDSEVAEALDWLDAVEGPDGSARPHVAFFSASGGGAAARRPNAHGGVLSRPLQPLSNRTQKLASHISATPLEEWEGRMNVAMSNSVTTAIRDSIRDTAIGKIRNTEKADRATVEQAIDPRTRMVLFKMLNRGVFNNTEKADRATVEQAIDPRTRMVLFKMLNRGVFNNINGCISTGKEANVYHATKTDGQELAIKVYKTSVLVFKDRDRYVQGDYRFRHGYCKHNPRKMVKTWAEKEMRNLLRVRAAGIRCPAPLLLRLHVLVMEFIGKGGWAAPRLKDAALSDDKLHESYFEIITTMRTLYQTCKLVHGDLSEYNILYFEVVNLILNIPFPNILYFSSLLFLISILMYLLPRVTCILLMFHNPSILITLQLWIF

SEQ ID NO: 66262 - protein, 125 aa, Zea Mays
MHAACPTPGGAGARVGVDPSSAPAASPLRVAPFADLAAGRAATVGTCARVRAHVSGTRPSVQRWSPARARRRRGRSSGGQAPPRRARARSAHPTGAASPRGRMLVACAALGRLDRGRGGCGRRGS

SEQ ID NO: 66263 - protein, 577 aa, Zea Mays
MTGGGSSTRRPAAVARSRGRPSEASEPDPGARRAAAAAAQRRGRGNPGPLRLMDVRPRTLAYFVVASFALVSVTFVVYTGGWWEEVEGEGAATLRKVMRSVTPLPAPRMMDLPQFQNNHKESLYWGTYRPNVYLGIRARTPLSLIAGLMWIGLKNGQYFLRHVCQDSDELRTFGWTAHNGRDYGRQVLVDHGLFLTTSFLKEKGESSGYGGDWAVRLDANNERSGLSDAEESTTHLFFYIADETGNPITMGSYEPSSRGSVLLASGLHEEIGGWELYLRSEDNLEIHRAGFKSMSMHNLSDLVQQAVATNAMQSGNLNLPDITEDSSNIMVYQVSIKSPAQIDIVFLSGSASKSPVIEERISKLTGPMLSDRLETKQKEFEERYDQIFNVNNKVQVDSKELSVGRAALSSLLGGVGYFYGQSKIALPKGFTQKNGDKYISYWPAALYTAVPSRSFFPRGFLWDEGFHQLVIWRWDVHISMDIIGHWLDLLNSDGWIPREQILGAEALSKVPEEFVLQYPSNGNPPTLFLAIRDLASGIHAQQFSDEEAEKISSFLERAYIRLNAWFQWFNSTQSGCY

SEQ ID NO: 66264 - protein, 83 aa, Zea Mays
MVAIAHIGADVDASSTAVRHHWTPYSAHRQARPWPRLPGTLTSTIICTSACSLLAMAGLTGSVLCSGWFARRTSSFLALGFPV

SEQ ID NO: 66265 - protein, 622 aa, Zea Mays
MKSAYQRRLLSDAESARWLNHAIDKMWPVCMEKIVSKLLRPIIPWFLDKFKPWTVSKASIQELYMGRNPPIFTSMRVLPETSDDDHLVLELGLNFLSAEDMSAVLAMQLHKSVGLGMTAKMHLTSMHVEGKILVGVKFVRSWPFLGRVRLCFVEPPYFQMAVKPLINHGLDVTEFPGISGWLDKLMDTAFGQTLVEPNVIVINVEKFASTPSENNWFSIEERPPIAYVKLEILEGTDMKPSDINGLADPYVKGHLGPFKFQTQIQRKTLSPKWFEEFKIPITSWEATNELVMEVRDKDPMFDDSLGQCTISLHDLRGGQRHDKWISLNNVKKGRIHLAVTIDDISEDQNTSSLDQSLKQADTELPVSTSVCSEVDASEPPEEKKVLMDEVEHINIDGQEQPGGLYVHRPGTGVPRTWESRKGRARNPDTQIHQEVDKQKEVPTPKGSGQGGLFNVGSFFRWNSRKGSSRNLDASPPATPGSQSVTELDPKLPQTPRPNLKELGEKRTSIKIVVDEEASPADKVGGAENSGEDVAKVIEKNAGEPGRSLTSTLSRKICRRRADDRLSDIPEKIEARGSKPVSEGPILVRGEPMITVDHPTTEHSDGGGTEQDAVGAKVATQTS

SEQ ID NO: 66266 - protein, 294 aa, Zea Mays
MGKETHFVRFGSKVVRYQPQGRMVEIYGKEASGKTTLALHVIKEAQKNGGYCAYIDAENAFNPSFAESIGVDSERLLIAQPDSAENSLSIVNTLVGGSVAVVVVDSVAALIPKCEIEGEIYTNCGDIQSHLMTRALRKIQYTLCRSETLIIFVNQVRTKRTSSNPGIYKEVPCGGNALGFYAAVRMRTSRRELRYSEDEATGVGISVQIIKNKLAPANLKKEAGIDITFGKGICHESEILETASSVGVILKDGCGYWINNEFLAGKVEAEKFLRENAAVADEICNTVRNEFLQR

SEQ ID NO: 66267 - protein, 135 aa, Zea Mays
MARDDGAKAQSGALHRHAANPATRCLDLMDDGCYTLLDRTRRSSWKVAHLGLGQQGPRTRDTAAFIPHQQLRRRIPQCTPINRLNARCSLFRCPPWTILPTHRGHDAALHESTLAAALGAHSPSLQWCRGSSSSF

SEQ ID NO: 66268 - protein, 117 aa, Zea Mays
MLLICYHKKKESRIECRYPCPHHQLCASIAPERLRYSLLNGARRAVPAAQGRPRVDGAEGWRAVVPVTSNSSALHTTLIDDSLLAYACALSHDSWRRVEKRILLARRCDGIAEGATV

SEQ ID NO: 66269 - protein, 554 aa, Zea Mays
MESECRETLPLAGAALPLSTPAREDSRGAELLGATPSSPSTEAEAGDQPPRAAKGTGGRIRWASREESHANGFDDRGVRIEAPTGRLHRRRRRSTLSAGDSTRLLPRLGVRRSRTRAPVHRSASSDLHIYRFPLMVLHTHQLLKECPPMWNPQYWQPNPYDFPSGSNIQFSSSHLTIPSLSQQQNEVGGFANRGPWNHFVGMMNPSYPCPPPPLAAGQMQPPSHFVTLPNNSSNPMDPIFLESEAEHSAQEVNSPSKEGGTPGKGKKMKEQNFTPEEDLLLCTTWLEISCDPVISTGQRKEGLWARIDKRYNEMRGEYPKRVIRALTSRWDKIKADCGKYASLYARVLRENQSGLTDYDKTSMATTLFTTENKRGFPFMHCWTKLKNEPKWQAIVQGTSLRGAAGMSPVGSATPTASVNDLDSDSLGLTGKRPLGRDSTKASRKKAMSTSSQSMKYLTRIHDLQMARLKQSEDKVEKKEAHYEVFKDLEYKKLQVQQEQIEVEKTKLKFQERKEKNDELKEAMAVDLEDIAEDLRPAFIAKRKALVDWFVNNPN

SEQ ID NO: 66270 - protein, 178 aa, Zea Mays
MQSQDYLFVREFVAFIASVLLKCCKQEDSSDMEIILGGVASISDEISWFKNEATVWGVDLASVSPLKANLEYHRFLRSFTEPEISYAVAVTTFWTIETVYQDSFGFCIQDGNKTPPELLGTCQRWGSAGFRQYCQSLQSIVDRCLANAPADAVQSAEEAFVRVLELEIGFWDMSSSRS

SEQ ID NO: 66271 - protein, 215 aa, Zea Mays
MAAASAAPAQHKHQLRQSSVSWQPTIVSATTDYIGFAQPRKGGGHAMAHAFASPAPHLGNIASIAMAPAQHFGLASGAVTVASGGGGEPHAEMTHFSFLQDHFMPVHAAPAPAPASAPAGEYNLDFSMSSGLMGVNTRGALQSNSQPHISGHHHQQQQLQRLSTPLDAPNIPFLYSSAAAAAAAVTTPTTADGQFAAFQLWNGFQHADMKEKGKH

SEQ ID NO: 66272 - protein, 52 aa, Zea Mays
MESGRLIFNAPGSGAGQMLFLDCGAGGGPGGGLLHRVMKAGDRCLALKKGAA

SEQ ID NO: 66273 - protein, 60 aa, Zea Mays
MRPPRGRGGGGRFGGGGGRGGGGGRFGGGGRGGRFGGGFRDEGPPAERCRRSCTRARETR

SEQ ID NO: 66274 - protein, 303 aa, Zea Mays
MLIPTGYVAVLGKPNVGKSTLINQMVGQKLSIVTDKPQTTRHRILGICSEPEYQIILYDTPGVIKKEMHKLDSMMMKNVRSAIGSADCVLVVADACKTPEKIDEMLEEGVGNKDIGLPVLLVLNKKDLIKPGEIAKKLEWYQKFTNVDDVIPISAKFGHGVDDIKEWILSKLPLGPAYYPKDIASEHPERFFVGEIVREKIFVQYRQEIPYSCQVNVVSYKSRPAAKDFIQVEILVEKESQRGIILGKDGKSIKMLATASRLDIEDFLQKKVYLEVEVKVKENWRQDERLLKRYGYGGEIQAL

SEQ ID NO: 66275 - protein, 238 aa, Zea Mays
MLKEECQRVSTEGQNMRTELSEKFDHAIKGVSAKLEEQRVERISQLEENNTLRSKLKDLADQYNITQQKYAHQLKEKMLELELADLRLQQHQEKAAQEHTQMQLYAEQVSQLMTTEKNLRLQLASDGERFQHFQDALSKSNEVFETYKQEMEKMISVIKNLKKENEFLKGKCENSDIAIVKLIEERELTKKQIEKLKNQREKLESLCRTLQAERKQGPSASIPDAPSSQEVSATSQES

SEQ ID NO: 66276 - protein, 65 aa, Zea Mays
MMGELSYFLGFQVRQLKDGTFISQTKYTQDLIKRFGMKDAKPAKTPMGTDGHTDLNKGGESGQIS

SEQ ID NO: 66277 - protein, 393 aa, Zea Mays
MELNTLAGRTYNDITQYPVFPWVIADYKSKTLDLESPSTYRDLSKPIGALNPARLKKFQDHYSSFKDPIIPKFHYGSHYSNPGTVLYYLARIEPFSILYAQLQGAKFDHDDCAFSDVARTWNSVLEGMNDVKELVPEMFYLPEVFTNVNPSGRLGSVALPPWAKNAVDFIHMHRKALESDHVSTRLHEWIDLIFGYKQRGKGAEVANNIFPHVTYDGMVDIDKITDPVQRRSVQNQICYFGQTPSQLLTVPHIRRRSLTQILQLQTIFRNPSEVRSYVLPSPEHCNVPASTMLVSNDCLVVIDSNVPTAHVALHHWQPNTPDGLGAPFLFHHGKNAINSSGGAIFRIFKGSSGSAEDYQFPRAVAFAASAVQSSSAVVVTCDKEVITGMQITL

SEQ ID NO: 66278 - protein, 460 aa, Zea Mays
MLLRPFLRRGAAAAAAAVSSNGARAIALPDPPAALASLLLASRSYAKAKGGGKPASSTSNRGKVRAKDPRGVASADDAAGAEFSAGGGGDDIDTEFELPTDPLPPTYDPALDVGPGGRPLFAFTDTFGSFAHRDANIYVDFTLDEWNAMLPEGLPAGMMKEFQETRRCAVMVRKSFLDLRDNFRRIVDPAVTTNLKDTRKQIVLDGPRSCGKSIALAMLVHWARTEGWLVFYVPQGKDWTHGGFFYRNTYSDFFDTPVQAANILQLPCQIFERIPLGEGAGVGMMKGVDTMEMPEGSTLYDLIQTGITQTHASVGVMVRLRKELSLVKDVPVLFAIDQYNSWFTFSDFQEPVTVRSCRSIHAKELTMVNAYRSMLHNDMMVGAFSHSTAVGKLRQELPDVPSDARLIFPRYTLDEAETACHYYMRQKIIRRENFSEEKWKKIYYLSNGNGAEMRWLAAFV

SEQ ID NO: 66279 - protein, 296 aa, Zea Mays
MEVPWLLLVHGSVTALVVVSFLCGQWPIFEGTFIQSINHFLTFGAYHYLLRFVQSVCGTGARDLVLGVEGYCCDRPNPILQVFYVAIIGVTYFIIVQTSFQYIPGYYVSGLHRYLSVVAVSVGAILFVLTSFSDPGTVTAENVSQYVSSYPYDNIIFVEKECSTCKITRPARAKHCRICDKCVARFDHHCGWMNNCIGEKNIRYFVAFLVWHFLICLYGALILGFILAGEIKERKIIYILTVYYGIDNSFSGLFPHVAQVCSRNTFDTKFPLLFHNCIPEFHYHGNEITKFTVLEL

SEQ ID NO: 66280 - protein, 370 aa, Zea Mays
MEDDDTEGVGESTCPPAADRGGSSSAGGGGGDSHSYTDIEKEVFDRLMEKRIPEVVADPVAFREELRRHFERLPLSYAVDVNVDKAEDVLLHRRILNECAHPENRPIFHVGFLNCIPPSVDPQYNTQSISTSENGNCGGSQDSTLRKFEPCEGIEDLSLTGQKVVVDSVASSSRGDEEILHVHEIIFSTIDKPKLLAQLSALLSEVGLNIREAHVFSTTDGFCLDVFVVDGWDTKETDTLLQILKETAARNHASLSNPTNSAASERVLELQEKIGDSNIDRNFLQIGEKIASGSSGDLHRGTYQGMDVAVKFLRTEHVNDSSKVEFLQEIIILKSVNHDNVVRFYGACTKQRKYVIVTGLCPKCPPFSRP

SEQ ID NO: 66281 - protein, 599 aa, Zea Mays
MAIPDAGAVRRVRCPRCHCVLEEPGAPVYQCGGCGASLRAKNRTGTSAGDTDLPPPPQSSHLDASDVATTSRSGTPTPPHGGSTPNATATGHAESADPVPPRNRVSDQVALVEKRGREQTSAAQEVHDGSATRNAGGNRDATSESLDDSDKRTKRQIESTDAARKRHSGEAAAQPQYHQHQDGHQQLAPKPSAAQPARGQEEEEDAGEKAPSPSRRAELQEQHLGPLRKKILKTVDELKGDLSQLFSKSPELNAPRARPPRLPKQEGYVSRAAAAAASVLPARARHAAAATDGYRGSAARAPLKPRQAAAPPPRGLPSRRYRQCRAHPGSHDVEPRSCSHGHGCCRHHGKPECSSCRGYCCRPRAQPPAAKDPKRRLAPRNHCRPVLKGAPFIVCSSCFKLVQVPADFAVSSRTVRKLRCGSCSTVLSYSYRDPARKKAYQDSVDRCSTVGSELHGGKGDEGPDPFAPFIDGFGLSSYSTEDEQRLPVSRNTSFDTLDGTKGVGRLHRLMGYGSASELLRHSPDLYESFSERTTPDVRQHDRKGKAVCIDDDDDNYDVDDSDEEEYIGALKRSAAKGSGWSLPWMPGKGTPATGGIRIR

SEQ ID NO: 66282 - protein, 1281 aa, Zea Mays
MMMSDDDDAEPQLNAVEGYYFVDSKNEKEPVCFSTLPFWFGDTDDLPDGKKKLVLRGTGDPGVKVYDEVVACRLGLEGKQPEFAVLTAKGRRWIRLIRPLNSYEEMIRTVLITAQMLHFLRRKPHEPEKTLWNHLCKVFNKFDVPPSEDDFRNHCSLMKQFAAKDPVLAKSEILRVFIEGKSRKKFTEVGADHIDVKQPFITDDEGIDEMNVEDVDNESDEDDDEYLFDSICAICDDGGDILCCDGPCMRSFHAKEGSGEDSCCVTLGYTEAEVEAMKLFLCKNCEYKQHQCFICGVLEPSDGEAAKVFLCNNATCGHFYHPKCVAQQLHPINIDEASELEKKITEGFSFTCPIHWCFHCKGLEDRTQEPLQFAVCRRCPKSYHRKCLPSEISFDENEEDDIIIRAWELSKRILIYCLDHEIDSELETPVRDHIKFPKIEKPLQFVKKGSSLLPKKKKRTYSETVLEQSPKDTVKRKSKVHMLEREQNKQDTREVSAKSFTQNLVDTPVKKKAKLKEKIQLPYVAKDHFISSPKSVKEQEQELVPLPLSAIRKSSFPKVDSETEKRVITILGNKVSSLTIKDVTRNCSLPSTHVYSGRLTDKIPLGKIERSVQAVEAALKKLENGGSVNDAKAVCEPEVLRQLARWHSKLRVYISPFIHGTRYSSFGRHFTKVEKLVEIVDFCCGANDFSRLMKEKLDKVQKKCHFKNYDLIQPQNRFCFEKRDWMTVQPNELPHGSQLIMGLNPPFGVKASLANKFIDKALTFKPKLIVLIVPKETKRLDQRRTPYDLIWEDSECLSGKSFYLPGSVDLNDKIVEGWNASAPPLYLWSHPGWTKKHMQVAEEHGHTCMGKIACHVEESNLSDDLSVRKQSDATNKLNSRSGKETPFNDRMSNLLDDGSARKQARSEEEKRTLGKIEHHVKKANIPDNLPVKKEPEASSKVMSHSGKDRKIGRYNRRRHDNRSSKGTPDHTESLPPEKQVEVAYEETRVIPSKKIAHNEKKSAQYNYEQTAAGMPNMRSRGGDSDMSISPPVSCNARSKPMSYSLTRPIEHLDTNAHLLAEEPSDSVLNRVPNHDSYLAIKEEYCDGFKRKNDPIFSHIDDSSRMRGSSIEEVTKPYITAPNSDPWSKGDGSFYRHPSSEDLNANADVLMPGYSARYGQIGGDSNPQASMVPLATDSRLHGGTVADNYLSARYSLGSSGARVSQPAPTVPPFGLSGASSQRGSVMDRYSYGLSGPTGTQRSVIDRYAPSLDGTNTTRSRSSLPEQYPFGQPGSSGGGWPHH

SEQ ID NO: 66283 - protein, 223 aa, Zea Mays
MYNKSIARARSSCKIVVPILHWESTTFSRPSIALICFGTIALFPSVLLPSSPFMWLAGMTFGYLYGFLIITVGMSIGMSLPYFIGSAFHCRIHRWLEKWPKKAAFVRLAGEGDWHHQFKAVALLRISPFPYIVFNYASVATNVKYYPYIAGSMAGTIHETFLAIYSGKLLQSLAVATSQGSFLSVDQIIYNGIGFIVAAASTATITIYAKKALQRLQAEEEIL

SEQ ID NO: 66284 - protein, 278 aa, Zea Mays
MAVVPAAPVVLGVAMVLVVLAASAGAAGQLRMGFYAESCPGVERVVGDFVRQHVRRVPTVAAALLRLHFHDCFVRGGPSWRVATGRRDGTVSAMQEALDDIPKHTMTFPQLASLFASKGLGVRDLVWLSGAHTIGIAHCSSFADRLYGYPGGGVGAAGNDTADPALDATYAANLRRRKCRAAGGGYAEDGVVEMDPGSHLTFDLGYYRALLKRRGLLRSDAALLTDAAARADVEGVAAGPEEVFFQLFARSMARLAALQVKTGAEGEVRRNCAVVNGG

SEQ ID NO: 66285 - protein, 387 aa, Zea Mays
MEVDGEAQHFRLFSKRAKPKLKPEVQPQPEPEPPSRDPAAAEAYLDPAPTIVTETGQADDAADAAGTAPATFADLGLSQWLVDACEALGMRRPTAVQRRCIPRALAGADVLGIAETGSGKTAAFALPILHRLGEDPYGVAALALAPTRELAAQLAEQFRALGAPLGLRCLAAIGGFDSLAQAKGLSRRPHVVVATPGRIATLVKNDPDLAKVFSRTKFLVLDEADRILDVNFEEELRVIFGCLPKKRQTFLFSATMSDNLRSLLELSGNKSYFFEAYEGFKTVETLKQQYIHVPPQGKELHLWHLLSVMKGKTEDPIRSAIVFVSTCKDCQYLDLLLEELRYPAVALNSHKSQAQRLSALNRFKSGLHVITSTGLDELQELQGEGSL

SEQ ID NO: 66286 - protein, 84 aa, Zea Mays
MLGWSLTCYLSCSGTRYISSRREFSQLLSVNSRALLFLGFIRCRRGAAACRHAPHAFCNSAPDSGDAYAICMNWYNFEIKSCHC

SEQ ID NO: 66287 - protein, 184 aa, Zea Mays
MKDRRGSSSVGGGERFAVFPFSMGCMSQSAVSVADPGDKKAQGDPSSTAAATVARGSSEEGAGEAMTKEKAVASSAAAATATAPGLVAAGVSRLMKGIRSLSQMFAGEDGGEDEDDEEEEREMVIGYPTDVQHVGHIGWDGHNSKAGAAAAAMAGMVNAFSLPSSLSLRHLDMAMDRAVAHASA

SEQ ID NO: 66288 - protein, 50 aa, Zea Mays
MLWKHRNGVVFNGSHPNLVVTVRLAREEAFLWSLAGAKGFSYLLAQSRVV

SEQ ID NO: 66289 - protein, 1115 aa, Zea Mays
MVTPPTVEQEDEEMLVPRQEAVDTDAAQPMEVVAQTEVVSTAESQPVEDPQTSRFTWTIENFTRFSEKKHYLEVFVVGGFKWSVLIFPKGNNVDHFSMYLDVADSTSLPYGWSRYAQFSLAVVNQIQPEFTIRKETQHQFNARESDWGFTSFMPLSELYDASRGYLVNDTVVVEAEVAVRRIVDYWTYDSKKETGYVGLKNQGATCYMNSLLQTLYHIPYFRKAVYHMPTTENDIPSGSIPLALQSLFYKLQYSDSSVATKELTKSFGWDTYDSFMQHDVQELNRVLSEKLEDKMKGTVVEGTIEQLFEGHHINYIECINVEHKSNRKESFYDLQLDVKGCRDIYSSFDKYVEVERLEGDNKYHAENHGLQDAKKGVLFLDFPPVLQLQLKRFEYDYMRDSMVKINDRYEFPLQLDLDRDGGKYIAPNADRSTRNLYTLHSVLVHSGGVHGGHYYAFIRPTLSEQWYKFDDERVTKEDAKKALEEQYGGDEELPQINPGFNNAPFKFTKYSNAYMLVYIRESAKEKIMCTVDEKDIAEHLRVRLKKEQEEKEHKKKEKAEAHLYTIIKVARDEDLKEQIGKGIYFDLVDHEKVHNFRIQKQMPFSCFKEEVAKEYGIPVQFQRFWLWAKRQNHTYRPNRPLTVHEETQSVGQLREISNKAHNVELKLFLEVELGLDLRPLPPPEKGKEDILLFFKFYNPEKEELCFMGRLFVKALGKPSEILAKLNEMAGFPPDQEIELFEEIKFEPNVMCETIDKKLTFHYSQLEDGDIICFQKSPGAEYDAPVRYPDVPSFLEYVHNRQVVHFRSLEKPKDDDFSLELSKLHTYDDVVERVARQLELDDPAKIRLTPHNCYSQQPKPQPVKYRGVVHLSDMLIHYNQTSDILYYEVLDIPLPELQFLKTLKVAFHHPTKDEVVIHSIRLPKNSTIADVIYDLKTKVELSSPNAELRVLEVFYHKIYKIFPLHEKIENINDQYWTLRAEEIPEEEKNIGPNDRLIHVYHFKKDINQTQQIQNFGDPFVLVVHEGETLAEVKKRIQSKLQVSADEFSKWKFAFISMNRPDYLQDSDVVPTGFQRREVYGAWEQYLGIEHADTAPKRVYTVNQNRHAYEKPVKIYN

SEQ ID NO: 66290 - protein, 680 aa, Zea Mays
MVFQKWSSSSEMESCGGGQVPEMPRVPKSARGKRSVRKKEAQSPAQMSAIDLLATVAGKLFDEGAGSLGNTSAGAPALAAFAKDALVKQEQCDEQMKLFKHEATDQDSCNESAILPHIVLQRVVNNARNEDPKAKSEVQDKESSMISYTKAELGCNFGVIADRWSPESVESGAFTGDAVARLMMTAPAGFHKNAPEMYSLLDSMDVDVKPPPLVSSDSTGEMPLHGDKIHRSTSLPRAPKGVGFFAVDRDDDDDKSSGCTHPSTATNKDFTSNCKAEYNRVRKLLTSKHRKVAPARIHKSDLSYSDVERKPSFRYKKMHTRQRTQRSTFKRRKLFDRHLALASEFGTANGKGNTKVAGRNSNAVSLEANKGTNSMPFQKSCGSNDCHVKLRIKSFNVPELLVEIPDSATVGSLKKTVLEAVTAILGGGLRVGVLHHGKKVRDDSKTLIQAGIGQDDMLDNLGFSLEPNCTQNPQVQAPEDVSFLENIDTTEPLARITPADSSSKLGEVDVSQELALTPLAMNYQGSDHDSVHSPGAVSSRDKDSRALFLVPAADPNAGAVVPANKTKRSPEQGHRRIRRPFSVAEVEALVLAVEKLGTGRWRDVKLRAFDNAKHRTYVDLKDKWKTLVHTASISPQQRRGEPVPQELLDRVLAAQAYWSQQQAKLQPKTPSLAEARLLTQ

SEQ ID NO: 66291 - protein, 165 aa, Zea Mays
MTMKQSRFKRICVFCGSSQGKKASYHDAAVELGNQLISGETVGEVRAVADMHQRKAEMARQSDAFVALPGGYGTLEELLEVITWAQLGIHHKPVGLLNVDGYYNSLLTFIDKAVEEGFINPSARRIIVLAPTAQELMDKLEEYEPYHDRVASTLNWETTMDHLAY

SEQ ID NO: 66292 - protein, 162 aa, Zea Mays
MDLSSRWAEPLKEAEGEVDQWMAYWCRVSRKQVGKTSSPCAPAIPRTATSIARRPAPAPPPPLHAPASPHSSTSTARAGQPPLLHLHRAPEAPAPPPPLCAPASPLLHRIRKASQRSSGPRKGGNTSLIRSRSPGSSIQWSGSLKPGTSRRGRGRCRIGRQC

SEQ ID NO: 66293 - protein, 616 aa, Zea Mays
MATPDDGPAPAGGRKFWRSVSWSEAREPPPPAPPDVAGGQSRRGLPPPPLTPRSMSSKARSCLPPLQPLAITRRSLDEWPKAGSDDVGEWPNPTTPGASRAGGGGGGSSPAKPGEGLRLDLSSLRSQGRKDQIAFFDKECSKVADHVYLGGDAVAKNRDILRKNGITHVLNCVGFVCPEYFKSDLVYRTLWLQDSPTEDITSILYDVFDYFEDVREQGGRVLVHCCQGVSRSTSLVIAYLMWREGQSFDDAFQFVKAARGIANPNMGFACQLLQCQKRVHAIPLSPNSVLRMYRMAPHSQYAPLHLVPKMLNDPSPATLDSRGAFIVHVLSSLYVWVGMKCDPVMEKDAKAAAFQVVRYEKVQGHIKVVREGLEPQEFWDAFSSMPPNSDSNTKISKDQIDSASKSDPGSRKNESYDADFELVYKAITGGVVPAFSTSGAGDETHLPARESSWSLLRHKFISRSLARVYSDSALMKDFDPRVQHLAAEASTSPPFLSPSSLSSDSSVSSKSPLSQSSNEGASKPSGMESIHSPSKTSSIAERRGGFTLLKLPSLQKDLVLPPRVPSIVLPPRAPSSIRRTEDASDNSTNGVKQLTSEFCSEKCTGEEKQLKWCMYG

SEQ ID NO: 66294 - protein, 175 aa, Zea Mays
MRRSPPTPPSRPASETPSSPGSTARDSSPPRRSPGSRIRTSSSTTSSRGLRRPASQTSRSVPSRDHERSARIPRLRRPSRRPRGRRVADGAPGGEGYGHCRRPPRAPALRVIRLPTRGWTARSRRRCTEEKVESCHSCASSRRGSRGRLCSTSTRRRFFWAMMLLQSQQAEVGVG

SEQ ID NO: 66295 - protein, 251 aa, Zea Mays
MAHPSAAAAAVSSTAPAANPSSGAREEGGARSPPSPSPSQRGRAKVVIVMGATGAGKSRLAVDLAAHFAGVEVVSADSMQLYRGLDVLTNKAPLHEQNGVPHHLLSVIDPSVEFTCRDFRDRAVPIIQEIVDRGGLPVVVGGTNFYIQALVSPFLLDDMAEEMQGCTLRDHIDDGIGLTDEDEGNGFERLKEIDPVAAQRIHPNDHRKIKRYLELYATTGALPSDLFQGEAAKNRNGVGLVTPDSTAVSCG

SEQ ID NO: 66296 - protein, 69 aa, Zea Mays
MGEAHSDEFCHCQGCAGKYALLRDEENPRLAIFERRLPCCGCGIGWSTLCQVEDHRTTSVQGLLPSTFR

SEQ ID NO: 66297 - protein, 311 aa, Zea Mays
MSSLAYPLLRLPCRCSIAPAPAPASQLPAPVCLSASASANAGGDLTAREKRAQRRERRELRATDWKEEVQDRLIHEPARRRKKPPKRSWREELNLDLLAELGPQWWLVRVSMAPGTDYVDLLTKAISRRYSEVPFKIYNPSIQVKRRLKSGAISVKSKPLHAGLVFLHCTLNKELHDFIRDTEGCYGFIGATVGSIKRQIKKPKPIPVDEVESIIREEKEEQERVDREFEEMENMGNIEPFSKPVEESELMLMNKIKKQFKKSSSQGGTRHSAFSPGATVHVLSGPFADFTGSILEVNRKNKKESCVYVSQ

SEQ ID NO: 66298 - protein, 853 aa, Zea Mays
MPMDPSAFQIIECAEAPNTGVVSSKFALNVACDSPMDLNLTNVGTSDNILYTSEFAVPGRTEDRSMQVDFHDAKAALHKPNLPLEVVDTDTHDLQSSRNTESTILPSFGDDPMKDSSGALNNGLGRSTSSQVTELTHLHRSHPPADYNPFSLHSHDSPSVSGNSEHSVPTALTLGNNIYFSSAESEGQPEENHNLLDVNLGFDVTTTEFGNVVKRKGESGNDLMNAGSQNWLTLPLTVSCLDNASAVSNGRIGLEQIVDEGVPVICQDHDIMLDIDQRGSIDVLSGQDHNLKLCGISIPQAVLLATEERNKDVDDEIVRPGRDLASQISVDSDHTYHGSTEDPVGMSSTTPDSVSSWIEAIVPEANKEHQSCKSSLLPICSSEKVSAPKEDSKKALSDSVVNSVVKSPPRINIASSTVLKVPTKQVALPGSLLEPPRLNQNARNRTWRRDNASSSNSSLHVSQTSGLPPKLPLKKNSKSQNSYIRKGNALIRNPANGNHLHSSSSLDSQNKLSKPVMRRSMNFVRNVDSKDAAHSHISVERPKTPPLPLHTKSISCAVNVLEPLSQNLQQQVLETEKEDSSGQVNSGADNLSIISLHKSEALDAGKAIYVRPKLNQLVAQGRHLGESSNISLDKVTLLQPSATSDLYFKKRKNQIILGPSTSDAPSSKDTFQAENIKSGESKVLMSSSSNNNITVAKDRLHKALQTTNTVRSFSHVWTLNGQNPRKKSYVGASHMKVLPRILPWKRKIFCQNFRGSYSSLLNTSSIGIMRKLLQTRKRSTIYTVSTDGFSLRKSGVLSIGGSSLKWSRSLEKHSRKVNEEATQAVAEVERKKREKRKRQSLRSKGRNVVPFFI

SEQ ID NO: 66299 - protein, 92 aa, Zea Mays
MLPLSLLKTAQGHPMLVELKNGETYNGHLVNCDTWMNIHLREVICTSKDGDKFWRMPECYIRGNTIKYLRVPDEVCDSGAGTKMSREQRRKG

SEQ ID NO: 66300 - protein, 91 aa, Zea Mays
MRVMMVFQFRYLVESQESAYRPRLSRTSGISHPKQVRLQACENVDSLRIKFLIEPLASIQLSFTSTTTRSISGLDGSTTPPRDGGKLATTA

SEQ ID NO: 66301 - protein, 502 aa, Zea Mays
MAFPRQNMTYRERHCPVENEKLHCLIPAPKGYVTPFSWPKSRDYVPYANAPYKSLTVEKAVQNWIQYQGDVFKFPGGGTMFPNGANAYLDELASIIPLADGTIRTALDTGCGVASFGAYLMDRNVLTMSFAPRDSHEAQVQFALERGVPAVIGVLGTIKVPYPSRSFDMAHCSRCLIPWESNGGMYMMEVDRVLRPGGYWILSGPPINWKKYYQSWKRSKQDAEEDQHRIENIAEMLCWDKIFEKDDIAIWQKQGNSYSCHQKDGHASKMCKVQDSDDVWYKKLESCITPPIEAAQLKKFPERLSAIPPRILEGQVPDITEEVYEEDNKLWKKHVNTYKRVNKLIGSSRYRNIMDMNAGLGSFAATLHSSSSWVMNVVPSISERNTLGIIYERGLIGIYHDWCEAFSTYPRTYDLIHGNDIFSLYQNKCDAEDILLEMDRILRPEGAVILRDNADVLNKVRSMVAGMRWKSKLLDHEDGPHVPEKILISVKEYWVGSEEQNS

SEQ ID NO: 66302 - protein, 254 aa, Zea Mays
MVVCSTRKSFKDSLKVLEADIQHANTLAADFSRDYDGACLQMRMSYSPAAHFFLFLVQWTDCSLAGALGLLRILIYKVYVDGSTTMSTHERKASIREFYAVIFPSLMQLPKGISDVDDRRQKAACTERYRRRDEDEGKRPVSEADIEREEECGICMEMNGKVVLPSCSHAMCIKCYRQWRSRSQSCPFCRDSLKRVNSGDLWMLTDCRDVVDMATVTRENIRRLFMYVEKLPLVAPDNIFYAYDSHRGRGCSSS

SEQ ID NO: 66303 - protein, 240 aa, Zea Mays
MAQAKQASEEAERLATARAKVGMQMAEKQGRIATLDIECATLKQTLELLRQETASTFVKLCEKRLFYTKRTETLTVKLQEQQEWFSMKNKITRQEPHVAKSQSKQNFIEGEKHVIFNSEGSLDKFNKPGKLYTQLVSAQLKIQDIKSQRSALLLEISRIKQILEQEKNIIPGFPAALQQMDMKSLEEEYKALQGDKSGEVEYFQSLDETINGMKGILDPVKCQCGLEYNLKLDGEAMDIS

SEQ ID NO: 66304 - protein, 1269 aa, Zea Mays
MCRAAPEHEEEAPQFGSPVEASSPPRPPLVRDSERDEEETKHNRAVRSCRNWWPPAPRKKLPRQQQKGGGRGVVVSRIARAMPLSRHTVRSEYALGGRDLYRGADQHDPEAVLDGAAMAGLVGVLRQLGDLAEFAAQVFHGLYDEVMSTSARGHGLMLRVQQLEAELPLLEEDSCQRNYLHVVASNRGVDWHPNPRVDHGVVAGGDTPRFIMESVKQCRGPPKLFVLDKYDVGGDGACLKRYTDPSSFRTGSACPTTLLQEGTRDDRRPLRAVEISPNLQNAEIFRSPNAADNFSKLETGSSAGALDEVPTNRRRLKFRQLNGSVFQSFRPLMQNLHEKPSSEERLITGDHSKVHVFMVESPEPGAEERDVMVDTSDNMEKGKLTVRRKRSVSEEALSRSSDARSAGSSRGGYDSELDIYVDALTTMDSEDFSAPESGAREQATEEEEEEQRCNGSVTSAVSNGTRDITKKTKEVKENSKKIASKRSKYVGSMELTASKVGILPRELSEKHAPFSGSLRYMAKQLLELRYDGTQDSELYDVEADGVGRDVKYQEISDHAVEAKESDAVHKILSGSPYDDAGLGKCPQEEINHGQEHDVPPTDSPHDSAPDEGNGFQDSNMAYLVGIITSSSSQEGEGCTSTALHENSSMAVLNHVLEHAQERFGEDLDKEVDVDIHTEAISENTSDKCEDLKEVSIYTEQVNVEDMEEINESDVYALDDERAEYIEQQVVSDGSISSPVSSKQSDDPCWITPLTLADEDDTVACKVVDRPEGDHVILSETFKGIDLPNVVTESVINSKHDMPNNGQYYLHPKATFGQDLCLGSYKIVGENGEVPLCSSTTATTTPELTVNTETKHEFHQAVYQEPSNSFNSSAEVFGDPLAPDSRDDAPSVISSFDWMLNGATQKSFNIFPSHPTNGNAEENGSSEDVPPLPPLPPMQWRTNKIQTGPSPLSAKIGRPPRPKPSVKQQQSEASHVLQENSLHKGLSLQNELVQANISSDHEKNQILNIDFRESHHQEGEEYDAQDSNPFASSEVECLAEVASVKSENLHPLQLPELIVVLEEAWSEFGNIKFMPEQEGKFQLSNGLSVWNDLCTSGLSSQKTSEKPEFFADYKGKEFSFAGSDEVADSEENKPNGAVKHLQNPDLPAQQKDDIHDCDGKVTKFSSALEEDSSQSPTHTVSGPPRYPLLPVTSHDRSMIRKAPTLVQPSSMLADEKNTLLEQIKNKPVLAKRPDVMGGPKTNLQVVAILERAHAIRQAVADDDDDDNWSE

SEQ ID NO: 66305 - protein, 391 aa, Zea Mays
MDFPGGSGRRPQQQEPEHLPPMTPLPLARQGSVYSLTFDEFQSSLGGAAKDFGSMNMDELLRSIWSAEEVHSVAAASASAADHAHAAARGPVSIQHQGSLTLPRTLSQKTVDEVWRDLTCVGGGPSSGSAAPAAPPPPAQRHPTLGEITLEEFLVRAGVVREDMTAPPPVPPAPVCPAPAPRPPVLFPHGNVLAPLVPPLQFGNGFVSGAVGQQRGGPVPPAVSPRPVTASAFGKMEGDDLSSLSPSPVPYIFGGGLRGRKPPAMEKVVERRQRRMIKNRESAARSRQRKQERETGKRLGTATRRNGLWYMDHEGTNGTICTMLATRMEEKEVAVMLLHCRLGHLSFDKICKAFPDVMSGVDKSKLLCDACEFAKHTRTSYISRGIRSISP

SEQ ID NO: 66306 - protein, 190 aa, Zea Mays
MYCYTSSDIVKEFNKHDKEPSKYIKHWTGTKPKTGAKYTCDIGYERFLGPEIFFNPEIYNNDFTTPLQVVIDKCIQSSPIDTRRALYKNIVLSGGSTMFKDFHRRLQRDLKKIVDARVRASNSRLISGDAKAQPIEVNVVSHPIQRYAVWFGGSVLASTAEFYEACHTKAEYEEYGASICRTNPVFKGMY

SEQ ID NO: 66307 - protein, 272 aa, Zea Mays
MADSGEGRRVCGMPEKAQLHVAMLLLQFGYAGFHVVSRLALNMGISKLVFPVYRNIIALCLLVPFAYFLEKKDRPQLTLNFVVQFFLLALCGITANQGFYLLGLDNTSPTFASAIQNSVPAITFAMAAALRIEKVRLDRRDGVAKVAGTLACVAGASVITLYKGPTIFGPSGSGGGGGLELAAVGGDKNWTLGCVYLIGHCLSWSGWLVLQAPVLKKYPARLSVTSYTCFFGVIQFLVIAAFMERDAEAWKFHSGSELFTILYAVSIYLSTD

SEQ ID NO: 66308 - protein, 230 aa, Zea Mays
MYKLGRGNRDKVQQFMTITGASEKVALQALKASDWHLEGAFDFFYSQPQVSVVNTRHLEDIFNRYKEPDADMIMVEGISQFCNDLQVDPQDIVMLVISWHMKAATMCEFTRQEFIGGLQSIGVDSIEKFRGKLPSLRAELKDDNKFRDIYNFAFTWAREKGQKSLSLETAIGMWQLLFAERNWPLLDHWCQFLQTTDPQLSNYDDEGAWPYLIDEFVEYLTENGLVQRKR

SEQ ID NO: 66309 - protein, 1000 aa, Zea Mays
MQLFDCLLTEVHERCKKGLSLAKRLNSTLAFFCYDLLSIIEPRQVFELVSLYMDKFAGVCQSVLHDCKLTFLQIICDHDLFVEMPGRDPSDRNYLSSVLIQEIFLTLDHDDLSQRAKAARILVVLICKHEFDARYQKSEDKLYIAQLYFPLIGQREVLVVILQIVRNLDDATLIKAWQQSIARTRLFFKLLEECIIHFEHNKTGDNMLLGASSRSPDVEHPASPKYSERLSPSVNTYLSEASRHEIRGTPENGYMWNRVSPQLSSPNQPYSLREALAQAQSSRIGSTARALRESLHPVLRQKMELWEENLSTAVSLEVLGITEKFSVAAGARSITTDYAKLDCVTSILMGLLSRNQSLAFWKAFLPVVYNIFNVHGATLMARENDRFLKQIAFHLLRLAVFRNDSIRKRAVVGLQILVRNSFNYFKNTTRLRVMLTITLSELMSDVQVTQMKFDGSLEESGEARRLRKSLEEMADVRSKDLLKDCGLPVTALEAAPEGSSDNRWSWVEVKHLSKCLVQALDAGLEHALLGSVVTVDRYAAAEGFYKLAMAYAPVPDLHIMWLLHLCDAHQEMQSWAEAAQCAVAVAGVIMQALVGRNDAVWSKEHVASLRKICPIVNTDVSAEASAAEVEGYGASKLTVDSAVKYLQLANKLFTQAELYHFCASIQELIIPVYKSRRAYGQLAKCHTSLTNIYESILEQEASPIPFIDATYYRVGFYGERFGKLNKKEYVFREPRDVRLGDIMEKLSHIYEAKIDGSHTLHIIPDSRQVNADELQPGFCYLQITAVDPVMEDEDLGSRRERIFSLSTGTVRARVFDRFLFDTPFTKNGKTQGGLEDQWKRRTVLQTEGSFPALVNRLPVIKSESLEFSPVENAIGMIETRTAALRNELEEPRSSEGDQLPRLQSLQRILQGSVAVQVNSGVLSVCTAFLSGEPATRLRSQELQQLIAALLEFMAVCKRAIRVHFRLIGEEDQEFHTQLVNGFQSLTAELSHYIPAILSEL

SEQ ID NO: 66310 - protein, 64 aa, Zea Mays
MATETGRATPLFCSGDRGLWLFVGPFIWEWTVLDAQHVFEWLLQPHTDKGKKVGLPLQSPPKRV

SEQ ID NO: 66311 - protein, 272 aa, Zea Mays
MEFMGTVTIDDFFSGHAAALAGGTTMHIDFVIPVDGNLTAGLESYKHKAAKAAMDYGFHMAITKWNDEVAREMEVMVKEHGINSFKFFMAYKGSLMVTDDLLLQGLRKCKSLGALAMVHAENGDAVAEGQQRMIDLGITGPEGHALSRPPILEGEATARAIRLAKFINTPLYVVHVMSIDAMDEIAKAKREGQRVIGEPVVSGLVLDDSWLWDPDFTIASKYVMSPPIREAGHGKALQAALSSGILQVLITAHSTPHRKLLVLMIFGRFPMV

SEQ ID NO: 66312 - protein, 367 aa, Zea Mays
MQNGGLMLKQQMFSEEAPLHIFTSSELDKATSNFSDDNIVGRGGFGTVYRGILSNQVVVAIKKAQRVDQTQTEQFINEMIILSQANHKNVVQLLGCCLETEVPLLVYEFITNGALFHHLHNTSVPMSWESRLSIAVETASALAYLHLAAKMPIIHRDVKSSNILLDDNFTAKVSDFGASRPIPHNQTHVTTLVQGTLGYMDPEYFQTSQLTEKSDVYSFGVVLIELLTRKKPIMDDIAEDIRSLALQFSMLFHGNKLLEIVDPVVAEEAGVRHVETVSKLALRCLRLKGEERPRMIDVAIELEALRRLMKQHFILKNESLLQESCCNEEMSIDAPSSLFLGVDGISDDEGMEIIPLTCPSKILTSYP

SEQ ID NO: 66313 - protein, 677 aa, Zea Mays
MASRAIIRRRNDILRHTHVPILSPSFTSTIGQGQFDCEVDHQRSVCYFSKESLADSNHAMAHCTLNKRKLCHLSSGFAWHPACEVSLPTYGSRAQNFVFPLGVRCFLQSVRTTSNTTAQGQVHIMDKKSEDEKQKQQKKEASPEECDQAVEGLSTAKAKAKAKLEEVQKTDQSVVQKLWAKLLGIGPALRIIASMSRADWAAKLKHWKDEFISTLQHYWLGTKLLWADVRISSRLLVKLASGKSLTRRERQQLTRTTADLFRLVPFAVFIIVPFMELLLPVFLKLFPNMLPSTFQDKMKEEEALKRKLKARMEYAKFLQDTAKEMAKEVQTSRSGEMKQTAEDLDEFLNKVRKGGHASNDEILSFAKLFNDELTLDNMSRPRLVNMCKYMGIQPFGTDHYLRFMLRKKLQDIKNDDKMIQAEGVESLSEYELRQACRERGHLGLLSTEEMRQQEEEKRQEKDDKAKLEEPKATEEDLALKEMTEPTVREKEELKKAKTHDKKEQLCNISQALAVLASVSSVTKERQEFLSLVNKEIELYNNMLAKEGTDGEEEARRAYKAAREESDHAAEAAVGEKVSSALIDRVDAMLQKLEKEIDDVDARIGNRWQLLDRDCDGKVTPEEVAAAANYLKDTIGAEGVQELISNLSKDNEGNILVEDIVKLASQTEENNEAEETAR

SEQ ID NO: 66314 - protein, 556 aa, Zea Mays
MKETECTLADLETRYMKANDTIKEKQYLIENLLKSEKVLVGEAQTLRSELENTAGDLHGLFSKLERKEKIEDKNGSIIQYFHSQLIQEMNVLHRTVSTSVSQQERQLKALEEEMQSFVTSKGKVAGGLQEHVRKLKESFNSRIAELHGFANELKHKSMLSFENLNSQVTTHTSSLEDCMKDLLVDADELLIALQNGLSQHEVNFATFIEQQHEGLSRNLEGTKFVSATTMNFFRTIDSHALGLLKILEESKMEHQKQLFQLQKKFEAVVADEEKYLMEKVAGLFAESNARKKNMVQDDICSLNRTVSESSNNLQTETTKLHDFTSSMKEQWEGYMKKTEEAFQQNVSSIEQKRGFLAGNFQQCKEKVESCSEQWITAQNLVLALGRRNAEAIGLVISDGNEVSNQLGARISSAVAAGFEDNDISSKSLLSCIDDSLKLDHGIRENVKSIVMTSRAQLHDLEHGHYEMTKAITGNADRSLGEDYKVDEATCSTPRRREINIPDSQSIIELVTPLEDIVKSFWDSRTPTKPALNAKGKQQLVGSTTPETQRAPLSAIN

SEQ ID NO: 66315 - protein, 299 aa, Zea Mays
MNSLAFPSCPSALTPASTTAPASSPFPSPRIKIRCPRQEDAAHYHLRLRDRSSSQTVIVAMAAAAPASSVKEVLPSPLTSASEPPPLFDGTTRLYVAYHCPYAQRAWIARNYKGLQDKIKIVAIDLADRPTWYKEKVYPENKVPSLEHNNQVKGESLDLVKYIDSNFEGPSLLPEDPSKKQFAEELLAYTDAFNKALYFCIVSKEDVSEEAVAALDKIEDALGKFNEGPFSLGQFSLVDIAYVPFIERFQIFYSNIKNYDITKGRPNLQKFIEAEWPNANSFLDNALSRRNFNSWIGIF

SEQ ID NO: 66316 - protein, 60 aa, Zea Mays
MVLGRPTEVMLFTNHDLFFLAYFELTSSVAHGYVYYHVSLAHGYVYYYVSVLFCLLLCIT

SEQ ID NO: 66317 - protein, 299 aa, Zea Mays
MYGVVVAALGMLSTIATDLAIDAYGPISDNAGSLSLSTATTIGGAPNTVAPCAPAWCGDLAISYPFWLAGTHLPKCGYDQGFKVTCDKAKDDGTCNIDKFVNASFVPSPPFEIEPQQNQELFFVYDCNLRAPQLPRSWTPLRCGNNGSFTWLSGEYRPEDSSMAMPGNCNVAMIPVVAYEGATAADYQWFVEGGFFLSYYLTDTEDDDYYDQCQACSYRAGHGQCRTIVSDNGFQCYCSDGVYSTTACGTKRANWKTTIVVVVESKRELNQECSIYIGLSCMEAITESRILYLYRSQPF

SEQ ID NO: 66318 - protein, 195 aa, Zea Mays
MGYSAAARHRRAGADGRPRAARAVPVQIPLRPTRFADAIALCVQVKKYLQSIQLDLIAPILYGSGISGAAAELLAPAGSCNLQPEPEFRPPMWEVLQSLVRQRLVQRANMARTQSHSRRHGEPVTASRDVLVVCSSTGWTDEKHMLYLRLLEETFVHQLHGSGCIFKGLFNCSPRYCRQMKSSKQIVKYTTPGQV

SEQ ID NO: 66319 - protein, 278 aa, Zea Mays
MPMKHRRLQSLNLEAETQENVEQHEDVQDPQPELTIGFPEGEAPTRNKSFKIIWQNGVVREVFRNFRTAELWDLKGGRVLVETDKNGIPNQWSESILSSYLGELAQNSSFAPLHIPRWDNKLFKGPKERIIKDVEKKFIYSSETKWSTRDWILKTVNKRWRDYKSDLKKQYFNPDKRSFDQIEKDVPDGVNENQWSFLLGIWCSEAHQKLCRTNAESGKKQRHPHTSGRKSHARLKKEMTRRKEASLKLIFGTSLIRRGMGTMSIKMCKHLWVRPSMN

SEQ ID NO: 66320 - protein, 503 aa, Zea Mays
MAAIASASPRTLIPPRPRHHGAAPSPSTSDVSSLRLLRAHPRHVRRSRGVSISMPVARSRSFVFSPRAVADSKSSQTCLDPDASTSVLGIILGGGAGTRLYPLTKKRAKPAVPLGANYRLIDIPVSNCLNSNISKIYVLTQFNSASLNRHLSRAYGSNIGGYKNEGFVEVLAAQQSPDNPNWFQGTADAVRQYLWLFEEHNVMEFLILAGDHLYRMDYEKFIQAHRETNADITVAALPMDEKRATAFGLMKIDEEGRIIEFAEKPKGEQLKAMMVDTTILGLDDVRAKEMPYIASMGIYVFSKDVMLQLLREQFPEANDFGSEVIPGATSIGKRVQAYLYDGYWEDIGTIAAFYNANLGITKKPIPDFSFYDRFAPIYTQPRHLPPSKVLDADVTDSVIGEGCVIKNCKINHSVVGLRSCISEGAIIEDSLLMGADYYEKLIKNSLPKKVAFLLVLGKIHASGEQSLTRMLELETMLRYSMLTMFKKLQWRQTGTSSKVELSQ

SEQ ID NO: 66321 - protein, 134 aa, Zea Mays
MAARASSTVLPTPSLSLWRSDHAPQAPAQSRPSRALSPSSSSPTARSLLAAVGLHLVLRLVVAAPSPSSVGRFFPTQADPMPLRTYLSSSLLGGSHSSCACTAERLPARAAPCPFLCSSACSSCCRARSLSLSR

SEQ ID NO: 66322 - protein, 123 aa, Zea Mays
MAPLMGLFLPRRQWREGESNREGVTDTRHSWRGLMDVVAGAARVFGARASRRHRGAAVGLGCRSGARTVAASGRLARARLLGRGSGCCARWARGEQGTAVRSLVLLCGYAAGRDARGEREARE

SEQ ID NO: 66323 - protein, 75 aa, Zea Mays
MSRTKNVSTPGGGDDEDPRRPFRQVKGKTVYLEQQEGRKKRRMDRAARAAAAAAADAEQAELGDQPQTPSDQIAY

SEQ ID NO: 66324 - protein, 753 aa, Zea Mays
MPEAYDMGENVNQEKRFAVAMQRYKDPKANDKMNPFAEQEAWEEHQIGKSKLQFGSKDKKPSSDEYQYVFEDTIDFVKSSVIEGTQPEDDSDKEDVEAKDILKRELQDERKTLPIFKFRDELLKAVEEYQVIVIVGETGSGKTTQIPQFLHESGYTAKGKVACTQPRRVAAMSVAARVSQEMGVKLGHEVGYSIRFEDCTSDKTIIKYMTDGMLLREFLGEPDLASYSVVMVDEAHERTLSTDILFGLVKDISRFRPDLKLLISSATLDAEKFSDYFDSAPIFKIPGRRYPVEIHYTKAPEADYIDAAIVTVLQIHVTQSPGDILVFLTGQEEIETVDEILKHRTRGLGTKISELIICPIYANLPTELQAKIFEPTPEGARKVVLATNIAETSLTIDGIKYVIDPGFCKIKSYNPRTGMESLLINPISKASANQRAGRSGRTGPGKCFRLYTSYNYMHDLEDNTVPEIQRTNLANVVLTLKSLGIHDLVNFDFMDPPPSEALLRALEQLFALSALNSRGELTKTGRRMAEFPLDPMLSKMIVASEKYKCSDEIISIASMLSIGNSIFYRPKDKQVHADNARLNFHTGNVGDHIALLNVYNSWKETDYSTQWCYENYIQVRSMKRARDIRDQLDGLMERVEIEICSNTSDLDAIKKAITSGFFHHSARLQRDGTYKTVKNPQTVHIHPSSGLAEVRPRWVVYHELVLTTKEFMRQVTELKPEWLVEIAPHYYQLKDVEDSGTKKLPKGQGRAAL

SEQ ID NO: 66325 - protein, 467 aa, Zea Mays
MASSSSAATTSGDSQGLKARDACIVGVARTPIGALLGSLSSLPATKLGSIAIQGALKRAKVDPALVQEVFMGNVLSANLGQAPARQAALGAGLPNSVPCTTVNKVCSSGMKAVMFAAQSIQLGINDVVVAGGMESMSNAPKYVAEARRGSRFGHDVLVDGMLKDGLWDVYNDFPMGMCAELCSDQHSISREEQDSYAILSNERGIAAQDSGAFSWEIVPVEISSGRGKPPVVVDKDESLAKFDPVKLKKLGPTFKTNGSVTAGNSSSISDGAAAIVLVSGEKAKNLGLEVIARITGYADAAQAPELFTTAPALAIPKAISNAALQTSQIDYYEVNEAFSVVAIANQRLLGIPSGKLNLSGGAVSLGHPIGCSGARIIVTLLGILRQKNGKFGVAGVCNGGGGASALVLELMSGSNLRRPPYSPPFACTATHPPVKPAPIWMSPYLAVPIYAPNSLHPPSKSRWNKQV

SEQ ID NO: 66326 - protein, 97 aa, Zea Mays
MQLFVGTYGLACYNNAYFARVGGISLSEMNYLEVDFLFAVGFDLNVSPETFGHYCTVLRAEMLYLELEGPPPPAASTSLHRCCLSEDDDGSSSTSSS

SEQ ID NO: 66327 - protein, 453 aa, Zea Mays
MSDAEIERRMKEANAQAFHQTATNFVMPVAPAQNFVSSSVAPLAPPLSMMPPPFSQPVVQPGFSDPLQGSPAREEGEVPESELDPDTRRRLLILQHGQDTRDPTPPHPAIPPVQVPVPPVQPHGNWFPTEDGINPSNLSRGSAGFTVESDSMPYEKKQPPHPSFFHGGDSPMSSDRFGYQNQRFPSQLPHTEDHHMLQNHAPPKYRSFSGEELATRHVPSSQRNHIESGRHFSQYAGTSAGVLEGIAVKCGSKVEYRSTLCDTAELQFSIEVWIVGEKFGEGIGRTRREAQRQAAEMSLRNLANKYLSSDPNKLTDMKQDAFGSNRNIFGYSGNTRDDMLPLSSTSEESRFMKMEENNSRKTGDSVTALKELVQIGRQILGKGVGLTWEEAKLQAADEALGTLRSMLGQLGHRRSGSPRSLAPNFNKRFKPDFPRTVQRVPYGTYSRIEGHAP

SEQ ID NO: 66328 - protein, 437 aa, Zea Mays
MNSIEPFNRLVKLAARAFYDDVSMKGDNQPKTSRGDNRGMAVVVLDALTRRPWVREEDLAKALKLHSKQLRRILRFFEEEKLVTRDHRKESAKNAKAHNAAAANDGQTVAKEGEEKVKMHTHSYCCLDYAQICDVVRYRIHRMKKKLKDELDSRNTIQHYICPSCNKRYSAFDALQLLASEEMGDGDDNVRKRRREKLKDMQQRIEEQLKPLVAQLDRVKNLPAPEFGSLQTWERAHIGAFAIGDPAAADSSRNSQGQYGTPMPYLGQTKVEVDILSDGEKEGAESGKDGSELKVIPPWMIKDGMNLTKEQRGEKIESQKLEKSEAKDDKKQDLKDDQSVQEEYIKAYYEALRKKQEEEEAKNRMQQEGKISVPDSQTERQVGKKYKRDDDDDEDIEWEEHQPTAAGNATETYKLADLNAEAQESGDDEDDNVWEEG

SEQ ID NO: 66329 - protein, 97 aa, Zea Mays
MVSFEMNDLKKIGLGLTGFGIFFSFLGIIFFFDKGLIAMGNILFLSGLGLTIGLKSTMQFFTKPKNYKWILANPCCFPPKDSYYWMDFSTTVCHIVP

SEQ ID NO: 66330 - protein, 507 aa, Zea Mays
MRYVDFILLGGDLFHENKPSRSTLVKTIEILRRYCLNDQPVKFQVVSDQTVNFPNRFGKVNYEDPNFNVGLPVFTIHGNHDDPAGVDNLSAIDILSACNLVNYFGKMDLGGSGVGQIAVYPVLVKKGMTSVALYGLGNIRDERLNRMFQTPHSVQWMRPGTQDGESASDWFNILVLHQNRIKTNPKSAINEHFLPRFLDFIVWGHEHECLIDPQEVPGMGFHITQPGSSVATSLIDGEAKPKHVLLLEIKGNQYRPTKIPLRSVRPFEYAEVVLKDEADVNSNDQDSVLEHLDKIVRNLIEKSSQPTASRSEPKLPLVRIKVDYSGFSTINPQRFGQKYVGKVANPQDILIFSKSAKKRQTTGDHIDDSEKLRPEELNQQTIEALVAESNLKMEILPVDDLDIALHDFVNKDDKMAFYSCLQRNLEETRNKLSSEADKSKFEEEDIIVKVGECMQERVKERSLHSKDGTRLTTGSHNLVFNYLSLNIFSFCIFPGAGYWTASNSYNL

SEQ ID NO: 66331 - protein, 580 aa, Zea Mays
MQMYAPTTLVPARDFWTLRYTTTMEDGSLVVCERSLSGSGGGPNAASTQQFVRAEMLPSGYLVRPCEGGGSIVHIVDHLDLEAWSVPEVLRPLYESSRVVAQKMTTVALRHLRQIAQETSGEVVYALGRQPAVLRTFSQRLSRGFNDAISGFNDDGWSVMGGDGIEDVVIACNSTKKIRNTSNAGITFGAPGGIICAKASMLLQSVPPAVLVRFLREHRSEWADYNIDAYLASSLKTSACSLPGLRPMRFSEGQMIMPLAHTVENEEILEVVRLEGQPLTHDEALLSRDIHLLQLCTGIDEKSVGSSFQLVFAPIDEHFPDDAPLISSGFRVIPLDVKTDGVSSGRTLDLASSLDVGSAAPQASGESPDDCSLRSVLTIAFQFPYEMHLQDSVAAMARQYVRSVISAVQRVSMAISPSQSGLNAGHRMLSGFPEAATLARWVCQSYHYHLGMELLNQSDGAGEALLKMLWHHPDAVLCCSFKEKPMFTFANKAGLDMLETSLVALQDLTLDKIFDESGRKALFSDISKLMEQGYAYLPSGVCMSGMGRHVSFDQAVAWKVLGEDSNIHCLAFCFVNWSFV

SEQ ID NO: 66332 - protein, 429 aa, Zea Mays
MICGVSAVASLWGDSGKHGNKIQLDSETRLFLYQMVGTWGQLLFPKPWKEFRLWYDDHKAKGLKPILQGMKTTGWYKKMGERIWTPWFVKFVHSRGYFNIYTNFLKERALSVSHRDAGVNYEKSVGPDSTLLDGKNLDFNLWELQPLKKLKWYDFCFNEALPGRIVRKNSELGSMLKSLQLKSTVVLVTLYSIEERFARNLICHLDKAGMKNTIFLGDNSEFLDDLAHRGYPVIDGVNFLQSIRLSSLQGSDGFVQETLVISYVIKACLDLGYNLWLLNGNMISLGNKLIEPSDQSVDFFTADEGLMFIRSSLDMKNKWNELAMSRVKAMCTSSDLSVSIKQKSFVHMLTEVMASSAGVRLGKLDEAMRVIELGPNTSNRSILEDKSNVLFWSRSRASDSVQKQLENMDLWLVDSDSSCSSVVCHQKQK

SEQ ID NO: 66333 - protein, 65 aa, Zea Mays
MWYVRIKSGARGHGRNLAHFAAPPVAAALLSEILCRGWRHAFFFFVSSSSSSPLLQLVCTVLPRD

SEQ ID NO: 66334 - protein, 106 aa, Zea Mays
MAPRPAANHQATAEQGAKHLGRPSGAPSARAPRPPPAAPERPTGRRAEQSFNSVPDRVFLIQVAASKTKIYMVLELVNGGELLDRIQAASEGKLPEQEAAKQLPRC

SEQ ID NO: 66335 - protein, 243 aa, Zea Mays
MEVPWLLLVHGSVTALVVVSFLCGQWPIFEGTFIQSINHFLTFGAYHYLLRFVQSVCGTGARDLVLGVEGYCCDRPNPILQVFYVAIIGVTYFIIVQTSFQYIPGYYVSGLHRYLSVVAVSVGAILFVLTSFSDPGTVTAENVSQYVSSYPYDNIIFVEKECSTCKITRPARAKHCRICDKCVARFDHHCGWMNNCIGEKNIRYFVAFLVWHFLICLYGALILGFILAGEIKERKIIYILTDG

SEQ ID NO: 66336 - protein, 338 aa, Zea Mays
MAAGSQEQGDGLIDKIRGDIAILTLLAEVLCLLDMIVNSFAHTISTKPVDRYTRPEFTDDGPMAINAGRHPILETLHTNFVPNNIFLSEASNMVLVMGPNMSGKSTYLQQICLIVILAQIGCYVPAQFASLRVLDRIFTRIGNGDNVENNSSTFMTEMKETAFIMQNVSSRSLVVVDELGRATSSSDGLAIAWSCCEYLLSVKAYTVFATHMERLSELSTMYPNVKILHFEVDLRNDRLDFKFCLKDGIRRVPHYGLLLARVAGIPTSVIDTSTSITSQITEQEMTRMNANCEEYWSLQMTYQVVQRLICLKYSNHGDDYIREALQNLKESYSAGRLT

SEQ ID NO: 66337 - protein, 111 aa, Zea Mays
MRTLVLPPKVGFPPSVPAADRLHKPAARSGVAGELQHRHVLRKEIASGDVRYPLRGVPGSGDGERFLLSPAHERRAPPPAQLTIRRSGGSQVPWRTTSMKLLTGTLVPEYT

SEQ ID NO: 66338 - protein, 1523 aa, Zea Mays
MADGQHIQAASEEVDSIHFSFYSDDEIKRISIKKITKSERLDAKNLPVPGGLLDPAMGPINDIDICKSCGQHSVRCPGHFGHIELAKPLFNPLLFMSLKNLLHVTCFHCHKFRLNKEQVDRYVNELELLVKGDIVCAKNLEDSVEEAYLSKEDENMNKTTSGDNSSSVKDKKTWTSIQLKEVLSIFSKIMKKRQKKCAKCDMKSPTISSPIFGWLVKDTKASAVRTNAIADFKLKGDGDIHNSGETGVSGLEEESSSPGMVSKDSINEVRGLSDDTIKELVASSGKKHLLPTEVESILKDLWKNEARFCMLLCDFQKNMSSEPEKRRGYEMFFLSSLLVAPNRFRPSTSSSLGIMEHPQSVLLSKVQESNLALQHNNASSNHMDVLQRWMDLQRSVNVLYDSSKGLARSEKNAHGIRQLLEKKEGILRQKMMGKRVNYACRSVISPDPYLAVNEIGIPPVFATRLTYPEKVTPWNTKRLQEAIRNGADIHPGATHYRDNNSMYKLQAVPAKRRSIAKMLPASRGSICQPGRDPNCEFESKVVYRHLQDGDIVLVNRQPTLHKPSMMAHFVRVLPGEKTLRMHYANCSTYNADFDGDEMNVHVPQDEISRAEAMNIVDANKQYIGPRSGDAVRGLIQDHIVGAVLLTKPDTLLSREEYSQLVFGSCVPSSNCGSHHPAKVSAIEDYDTLELVHPAIWKPRPLWTGKQVITTILNHLTKGCPPFTVEQKGKIPKEYLKEDPSAQKEKEDPSARKEAHSAKKGKREDPSAQKEKDSSVNKEKQEKIQKQKQKDRSELVLYIHNNELIKGIIDKAQFGKYGIVHTVHELYGAYTAGILLSTFSRLFTLFLQLHGFTCGVDDLLLLPEKDKLRSKILSGSEVRSNEVHWKFTGADEDHKGDLVKLHMEVEKAVRSNGESDTATLDNDMKNALNGITTDVNKILFPDGLQKPFPGNCLSLMTTTGAKGGPVNMNQISSLLGQQELEGKRVPRMVSGKTLPCFPPWDISSRAGGFISDRFLTGLRPQEYYFHCMAGREGLVDTAVKTSRSGYLQRCLIKCLESLKVSYDHTVRDADGSIVQFCYGEDGVDVLKTSFLNEFKELADNRKAVLAKLGGCSKDPTLSKCNGYITELPPKLIDKAEEFLKHSKECCRYNIEAKELKELLKVKFLSSLVDPGEAVGVVAAQSIGEPSTQMTLNTFHLAGRGDMNVTLGIPRLKEILMTASDNIRTPVMKCPLLEHISEDDAKMVVAKLRRVRVADVVEKIEVCTVPFYNSNGRVSTLYKLQMKLYPQDQLESGLTIDECQATLRTVFVEAMEHAIEKHLDLLYKINEIRAVKIEDTEGSLLNGDEESQSRHADGGDTGTSDDDDQNDNDVDLGTDAEKMKRQEKDEMEYDDDTETEEGMGSESEESDEDPAESGDDSQEADKEHTISKSETTSVDDLPYSVKKGKKSKDDRGTAKLEEKNQNEGRLDDQKQGQIKKRRKKLKHTIHVESSDLDFEIHYAFHDEPHILLAQRPFHYRKLRYSRWHG

SEQ ID NO: 66339 - protein, 1444 aa, Zea Mays
MDFIQIYLRTQQVYEVGVDFDDKNSWEYLFKLYWLDLKGKHLLTIEELKSAKNYWTVPTTAGRREKEESSDELYDASNDQDATFDISSKKQRQNNSSGKRGQKRKKDGGITSRKRGISINSAGSLPNGSTGEGMSLAGDTKWASSELLEFIGHMRNGDSSYISQFDVQVLLLEYIKQNNLSDPRRKSQIICDARLSNLFRKPRVGHFEMLKLLEMHYLVKQVPTLNADSERAFDSYSAQVNHGGYNELSDKLGSDKRRKAHMKIERESTINPEDYAAIDMHNINLIYLRRSVMEDLIDEVAVFSDKIAGAFVRIRISGLGNKQDMYRLVKVLGTHKVAERYTVGKKTTDYALEISNLEKKEIITMDTISNQDFTEEECKRLRQSMKFGLTARLKVRDVYDKAKIFQSLQFKDWLENEKQRLSRLRDRASETGRRKELRECVEKLQLLNTPEETERMINEAPEVHVDPQMDPSYESAEEPDYKKAVDWTMHRNGPDLLFPGRKGTKLNSVENHTQNSLDASGHISSLPTEDVDHRLGAGSNINLNNMAPEPASLGVLSNDTEPEKVWHYKDPNGNVQGPFTLLQLSNWASFFPRDLRIWLTFESEENSLLLTEVLPKQQKDFIQPSTVTTSDKSIWAGSGQDRINSNANNSSSPSLSAECYDPTKYLKPLGGTSPSRSLKDSHALHEVQNQVNDSSTILSSAGSYVPTSSHDERVSRDRVDEWNSSQDNGGIWNPTMNHSRKSNAQQHPDGFTGKDQMLTESKCSSHMVSVLTPQQSERDPATSLSTTSRPECKTMCRQEGSSWSSATNAGVHDLQLTIALTKPETCSPTNPVEDRDSSSASAVSCQSGAPACIPQPDPTSTCNSSKIEATMDLHKTCQPDTSNESFGRLPEPQSGSLFSLKTLNLESEHPSSTPKLEGKETSMNQSGSTSVAHENLATKTRVRPPTSKIDSLQPLKERSCPTERDSITQLEHLFEENVVKRNNEVVNPVSDAEGIAVSDVLESLTEQDCEKYSTHGADCEKYSTHGAAPLQNLVPASAEEEQPQCSSPIALSPWGEPSYYQGEAVDSALWGVQDGNDMWSMPSPTPGLQPSSEEARADHGDGAFVETLPRQGDEKTEHANSSVSGSGVPEQVKPKASTASGPSLDGSTKALGWQLLGSSLEGSAKASGWKPPALSIEGIANASGSQALYPTQGSTKSSGCQRSSSSPDGSRKASGWQQSSTSPVGSGKAHGWQRSGSFTQGGTKAAGWQPSGSSTDRSAKVDGWQRTSSSPEGNRKASGWHSSGRESSKITYGASENRKSFSSHQATTPTGRHSLARRQGSSDKGAAGWEESLGNTWEASKRQQRNSDKNAGCGEALGSNRTWHPSSGNPSRSSQGNHQHDRHSHGSDSRRGSSNYPRRSDHRHDHGSGGSSRPSSRGQPQRGVCKYYENGHCWKGSKCQYLHR

SEQ ID NO: 66340 - protein, 448 aa, Zea Mays
MKDTLTAATGAVVPFHLSLLDEGDVSKLVLGYAHCGMVAAARWIARGVTPCLREAVRQCPEYQIKIVGHSLGGGTAALLTYILREHKEFSSTTCVAFAPASCMTWELAESGKHFVTTVVNGADLVPTVSTASIDDLRSEVTASSWLNDLRDQIQQTRFLNVVYRSATALGTRLQSFSGARERVAGAGAFLRPVSNKTQVVMKQAQNVAQAVARSRSAFSSWSCMGARRRGVGVVTACSKDDMRVETHVTSTVESKSVLVEHCGAKTIEELQYTAASVSVHDAAEEEEALLSEHETSRENAEEETTEGELWYEFEKDLDRQAEMEARTREEEAAAAKEIMEEESAVLKGVDDRQSFTPDSLERQQFYPPGRIMHMVAMPPTDADPDDPVAADECCVGIYETPRDLYSKIRLSNTMINDHYMPMYKKMMETLIEKFARDEDCYCTGSTAE

SEQ ID NO: 66341 - protein, 54 aa, Zea Mays
MKVDISGVNVEKFDDKYFVREKKATKTEGELFIHRRCNQGPATTQEGRPEGGGR

SEQ ID NO: 66342 - protein, 222 aa, Zea Mays
MHAPEEHMPNSVKEIWNLATQPGFLAYVVTALLLVGALVLFFEPRYGQTNILIYLGICSSMGSLTVVSIKAIGVAIKLTLDGVNQAAYPYTWLFLMVAIVCGVSQINYLNKALDTFNLAIVSPIYYVMFTTLTIVASGIMFKDWAGQSLSSIASELCGLITILSGTILLHTAEEGANNSAALLPWPLDKGSISWCINLSSDNLLKNVEEDYFTALQSSPAPV

SEQ ID NO: 66343 - protein, 362 aa, Zea Mays
MAMPPKPGDPPQRSPARSPNLNLPCPLPPVPGGPPAPSAAGLPPPRASHHRRARSEVAFRFSDDLAGGVGGGFDEIGSEDDLFSTFMDMDKIAGADRDRAAETSSPPRPAKHRHSASFDGFGMGAAAGGLAGQQDGGGGMFGEVMEAKKAMSSEQLAELAAIDPKRAKRIIANRQSAARSKERKSRYITELERKVQTLQTEATTLSAQLTLFQRDTTGLSAENAELKIRLQAMEQQAQLRDALNDALKQEVERLKIATGEMPKSNEQFNMGMQHVSYSGPSFFHLPEQHVDIQLPHHFQQPPRNVQMLSHPNSLSDMAQQDSLGRLRGLDIGKGSMAMKPEAEVVVKSEGSSVSAGESNTTF

SEQ ID NO: 66344 - protein, 652 aa, Zea Mays
MATGADLTSPTGAAAAAAAARKDRHIVSWSSEEDGVLRAQIALHGTDNWTIIAAQFKDKTARQCRRRWYNYLNSECKKGGWSREEDMLLCEAQKVLGNKWTEIAKVVSGRTDNAVKNRFSTLCKRRAKDDELYQENGVPCSNTNAKKVLTETGRLTPGGAGSLVHIKQTSYNLKENLVPNMKLFELEKSTQDARQPLATISSNNQDNVNTVKSQNLVPTTKQLLGPEQHCVKREGNFLKKDDPKVATLLQQSDFLCSLATKIKSDNTSKSMDEAWQQLQDHLVKKEHNKVPENSGSEIASLLEELDDLIVDPYERKDEDEQKLSEHNGRTDVDNDHCNGSSQTSIVVTTNMVPEEMMGDCPVDNCNEDSSLCRKVLSGSTEPCPGAKMTGCGNLSEDQVAEGSVLQRVESISPVITDIDDLLVDPYESEAEDEEKSGEQNGQIDVHAEQCFGSSQTIIEVISDMAPDEVMETCSADNREEHSSICRNVLSGSMAPCPGAEIPTSEKMSELAEDSRLQCMEFASPVLANFASKECGETPEPQVLNEIVEDSRLQCIEFNSPAHTILPDKTGAENFASPSFDVVAKDSKPPSLEFTSPAHTVATFQPYADGIPTPKFTASERSFLLSVLELTSPGSRPETSQQPSCKRALLNSL

SEQ ID NO: 66345 - protein, 70 aa, Zea Mays
MNPSRRLHAGSRTRACPRRRRRCWTRVFRVYVNGVGSKRSSLNGPCLLTSVVIHPYGLILQNEPTMKKSK

SEQ ID NO: 66346 - protein, 263 aa, Zea Mays
MMYSPPRTDPDREEEQCFSIGSMQEGVQLYSSTGDAQLNRNMNTGKCLEDGKRKGSGEDSSSLRSLGETSALQREVSMECADEKAGDARAKREDYVHVRAKRGQATNSHSLAERFRREKINERMKLLQDLVPGCNKITGKAMMLDEIINYVQSLQRQIEFLSMKLSAIGPGLNCDLDLQDILCTQDASSAFPGYNLQTSNVHINLYRASEEGFSHRNRIIPSPANVHVTRNAQLSAFPQRGVIWNEELCSIASDRNADSMKVE

SEQ ID NO: 66347 - protein, 106 aa, Zea Mays
MEMHGSEPITHAKEKGARSTSESAVCALRGGVRTFLARCDLHARDACSILILPPVYYQLQLACSMSALPGVRPSAGSASGQSLSSRPSSSQAPHARHRAELPPNPG

SEQ ID NO: 66348 - protein, 128 aa, Zea Mays
MHKQRIGGGRRRRTPSRPLDRSSWSPNDTQTVIQITDPRNPRLARLPAPAEPRMATATEDGGASRDRRRGPSLSCARAEPPSHEPLAARTSLGRGCRSLHRATVVAARAFGAAIAAHASRNRHRRSCV

SEQ ID NO: 66349 - protein, 131 aa, Zea Mays
MRLPSAASASRLPSSLFLQPRARTRCVPSSSLACRASSSSAAGAGDGGSRKPWLFVGLGNPGKVYQGTRHNVGFEMIDVIAEAEGISLSSMQFKAMVGKGRIGDASIMLAKPQTFMNASGRAAGFIFQDTT

SEQ ID NO: 66350 - protein, 238 aa, Zea Mays
MAAANAPIAMREALTLTSLGIAPQFVTFTHVTMESEKYICVRETSPQNSVVIIDMAMPMQPLRRPITADSALMNPNTRILALKAQIPGTTQDHLQIFNIEAKTKIKSHQMPEQVVFWKWITPKLLGLVTQTSVYHWSIEGDSEPTKMFDRTANLANNQIINYRCDPAEKWLVLIGIAPGAPERPQLVKGNMQLFSVDQQRSQALEAHAASFATFKGNLVFLRNKPTSSSPQISRMIFL

SEQ ID NO: 66351 - protein, 413 aa, Zea Mays
MMERSLLEVLATAAQGGTEGTSVLSMLKYAVLPIAKVFTVCFMGFLMASKYVNILQPNGRKLLNGLVFSLLLPCLIFSQLGRAITIEKMIQWWYIPVNIVVGAVSGSLIGFVVASIIRPPYPYFKFTVIHIGIGNIGNIPLVLIAALCRDPSNPFGDSDKCNQDGNAYISFGQWTFDGSEEDGIPIKASGENTVPQVGKYPMNTNSSTVPENEPLLSAGEVQKERATSVGTKIMGYVKCVVKFLKDKQLLQPPIIASAFAIAIGVIPFLKNFVLTDDAPLFFFTDSCLILGEAMIPCILLAVGGNLVDGPGEGSKRLGVRTTVAIIFARLVLVPLAGVGITMLVDKLGFIPEGDRMFKFVLLLQHSMPTSVLSGAVANLRGCGKESAAILFWVHIFAVFSMAGWIIFYLSLLF

SEQ ID NO: 66352 - protein, 289 aa, Zea Mays
MRGLTRAAKRAGEMAFNAGGGAVNWFPGHMAAASRAIRDRLKLADLVIEVRDARIPLSSANEDLQPVLSAKRRILALNKKDLANPNIMNRWLNHFESCKQDCISINAHSSSSVNQLLGFAELKLKEAISKEPTLLIMLVGVPNVGKSALINSIHRIATSRFPAKDKNKRATVGPLPGVTQDIAGYKIATQPSIYVLDTPGVLVPSIPDMETGLKLALTGAVKDSVVGEERIAKYLLSLFNIKKTPLHWERLLHRKEEWCEEICSSNKKDNSLRRTRLNNSDAVYVQGSN

SEQ ID NO: 66353 - protein, 558 aa, Zea Mays
MTCLTLLHILHLLISHQRWAVDLNSFACQSLKYNHPQTEVRNEKADEFLALLKEWAVLCEKYVHQDVDSNLAGSEDQEDADTLDKDEFVVQKLIGIRYDGTGRKKGVYFKVQWEGYGPEEDTWEPIDNLSDCPLKIREFVQEGRKRKILPLPGDVDVICGGPPCQGISGFNRFRNRDEPLKDEKNKQMVTFMDIVAYLKPKYVLMENVVDILKFADGYLGKYALSCLVAMKYQARLGMMVAGCYGLPQFRMRVFLWGALSSMVLPKYPLPTYDVVVRGGAPNAFSQCMVAYDETQRPSLKKALLLGDAFSDLPKVENHQPNDVMEYGGSPKTEFQRYIRLGRKDMLDWSFGEEAGPDEGKLLDHQPLRLNNDDYERVKQIPVKKGANFRDLKGVKVGANNVVEWDPEVERVYLSSGKPLVPDYAMSFIKGKSLKPFGRLWWDETVPTVVTRAEPHNQVILHPTQARVLTIRENARLQGFPDYYRLFGPIKEKYIQVGNAVAVPVARALGYCLGQAYLGESDGSQPLYQLPASFTSVGRTAVQANAVSVGTPAGEVVEQ

SEQ ID NO: 66354 - protein, 279 aa, Zea Mays
MDVEARKDAAPARGKAVRRFLVALNCGMLALGAIGGPLLSRLYFSKGGHRQWLSAWLETGGWPLLLVPVAASFGARRARDRGAPVLLTPPRILLAAAGLGVATGVDDFVYAYGLAYLPVSTSAILISTQLAFTVFFAFLVVRQRLTAASVNAVALLTVGAVVLGLHVSSDRPPGVTRGRYWLGFSLTLCAAALYGLVLPLVELAYRRAAGGGRAVTYALVVEMQLVMGFFATAFCTVGMVVNKDFQTSRFLRDSNRPQWMSGKRLWLCVRFLCADLYQC

SEQ ID NO: 66355 - protein, 574 aa, Zea Mays
MALRCIGNLVLRNPQNLDSLARKQVGEEPHVQPALNAIFSIILRTSVAQEFVAADYVFKCFCERNPNGQALLASTIVPHPNQGNMHEPAIDMPFGSVLLQALVSSDVNGDMEACCRASSVLSHIVKDNMQSKDRVLQIQLETLTPSLGRTEPVLHRIVTCLSIAASTEGENNQNNQPEEPYIQPVILRLLIIWLVDCSNAVNCLLESAVHLNYIIELASSKRYTACVRGLAAVVLGACILYNASHEKGRDAFAVADAISQKIGLTTYFLRFDELRRSLAHPLPEQHHRKELSRSSANSMSDFQEIEEDETNKDDQHPVLSEIFDSQFVNFLSKLEADIRENIMDIFSRTKTATALLPTELEQKNGEVDGEYIKRLKSFVEKQCNEMQDLLARNAMLAEELVRTGGGTTTDTSQRPNNGRERVQIEALRQELEGARRQIEALETDKSQIEAEANNQRNLAVKLESDLKSLSEAYNSIEQANYRLDAEVKTLRQGGSVPYPDVEAIKAQAKEEAEKDSEAELNDLLVCLGQEQTKVEKLSTRLAELGEDVDALLQGIGDDTAIPDDDDDDDEDSEE

SEQ ID NO: 66356 - protein, 594 aa, Zea Mays
MQGLAVSCQLPPAAAAARWRPRASSSNREAVLQCWKYELSQDHYLGGPLRIGQSQGSLHRHRSTNFLRPAAAAISVEQDEVNTYLPKGDMWSVHKFGGTCMGTPKRIQCVANIVLGDSSERKLIIVSAMSKVTDMMYNLVQKAQSRDDSYAIALAEVFEKHMTAAKDLLDGEDLARFLSQLHSDVSNLRAMLRAIYIAGHATESFSDFVVGHGELWSAQMLSYAIKKSGAPCSWMDTREVLVVTPSGCNQVDPDYLECEKRLQKWFSRQPAEIIVATGFIASTAGNIPTTLKRDGSDFSAAIVGSLVRARQVTIWTDVDGVFSADPRKVSEAVILSTLSYQEAWEMSYFGANVLHPRTIIPVMKDNIPIVIRNMFNLSAPGTMICKQPANENGDLDACVKSFATVDNLALVNVEGTGMAGVPGTASAIFSAVKDVGANVIMISQASSEHSVCFAVPEKEVAVVSAELHDRFREALAAGRLSKVEVINGCSILAAVGLRMASTPGVSAILFDALAKANINVRAIAQGCSEYNITVVLKQQDCVRALRAAHSRFFLSKTTLAVGIIGPGLIGGALLNQLKNQVLEQQAAVGGEEGG

SEQ ID NO: 66357 - protein, 150 aa, Zea Mays
MSVESEEKLSLLLYTPFPMARIQLLNDNKSSYSSFDILLCRSRMFSERNIMLTWFQRYEAMIQAFIICSFVPFSITGNICFGSPPSTTTLPPKGMSRAFSYVSPTISLRDLSNASKHCLFVIRASSHIIRSVSIRSFARFVPLFISHIDN

SEQ ID NO: 66358 - protein, 159 aa, Zea Mays
MKMSILMGVAQMNLGIVLSYFDARYHGNALDIRYQFIPQMIFLNSLFGYLALLILIKWCTGSQADLYHVMIYMFLDPAGDLGENQLFWGQKELQILLLLLALIAVPWMLFPKPFILKKLHKEVMIWKMFLKNISGSGMTEESYKQRKVQEVFEKYIPGS

SEQ ID NO: 66359 - protein, 266 aa, Zea Mays
MEAAAAVQKLAESAVPLHLTTELVQRGPVDIEANSYSVLDDAAPSLAPSILQLAVHAEEEQVLVTTPTKCSTMDLNRGAYSVPNLPVKPQFFDVGKDCNWARGIRRTEIQLADGKNCELHRCWTDILDAISKAQHLIYITGWLTILVRDDINSVDLLTKEGLLTTHDVEIAKGEQEIMNEVLPAESRSSRFGVAMDLADIWPCYESKPSDAQGYAIKGIPNLRNTCYRSAVLQCLLMLGKLLERILPSTWLAIQGCSRTGIETTGM

SEQ ID NO: 66360 - protein, 272 aa, Zea Mays
MIRKFGHLDHPTKARKTRCHLHLRLLHHHQGTPNSTPNASGGTKSSKKSGGQKKSLEAAGSMQPSSKKQKKSGAPQEQSIDELNDVTAASGVNIRDNKEIDICREMLDKMGYPKLELGLSAMPKDQLADNLAYNSLKGLILSKALMAQKDAEDESTRIAFENLRSEVISLRNEALEKDKILLSLVERLKSSDARLASLSEVEQKMEKFEKKKEADAKRIADLEYALSIQARLQRFEVEGLEKKLDEITENFNVEQTEREISDTKRLRVQKNV

SEQ ID NO: 66361 - protein, 321 aa, Zea Mays
MDNLEAQTYETFEKDVVKYTQYRRAVAKALVDRVADDAVSTTRTVLMVVGAGRGPLVRASLQAAEETGRKLKVYAVEKNPNAVITLHSLIKLEGWESLVTVISSDMRCWDAPEKADVLVSELLGSFGDNELSPECLDGAQRFLKPDGISIPSSYTSFIQPITASKLHNDIKAHKDIAHFETAYVVKLHRIATLAPPQQVFTFTHPNFSPNASNQRYTKLQFEMLPDMGSCLVHGFAGYFDSVLYKDVHLGIEPNTATPNMFSWFPIFFPLRKPIYVPEGSPIEVHFWRCCAPTKVWYEWAVTTPTLSPIHNSNGRSYWVGL

SEQ ID NO: 66362 - protein, 134 aa, Zea Mays
MFYLLYQLGRRSLFIIDNQLSFVSFVLFLGSSISVMHVQSRVVYLPAFLLPLASPDAQTVGMFWLPRVQSYIQAKHLPLCYELGRAPAWRLARTTESRTRLFCLLLIVLISGLRQADAMGSYVVGVLASSDLAG

SEQ ID NO: 66363 - protein, 97 aa, Zea Mays
MKLKNINCARNNFWRSMHEDSVRENADSEFKATVSQYITAGSLTNHQEDKMLDNTKVSQASIYRNLWIEAEASACKLKYELQHAHLGLRQQKASMSQ

SEQ ID NO: 66364 - protein, 841 aa, Zea Mays
MKIAFLMSLVLSLFLLPNGICKSLVARPSVVNIGSILRLNSTIGGVSDVAIRAAVEDINSDPTVLNGTTLHVETRDTNCNDGFLGMVQALQFMETDVIAIIGPQCSAIAHIISYVANELQVPLMSFASDATLSSIQFPFFVRTMPSDLYQMAAVAAVVDYYQWKIVTAIYVDDDYGRNGIAALDDELTARRCKISYKTGFRSNAKKSELLSLLVTVSNMESRVIILHTGSEPGLKLLSLANGLNMMGNGYVWIATDWLSAYLDANSSVSAETVNGMQGVLTVRPHTPKSNMKRNLVSKWSSLSKKYNHSDLRTSAYGFYVYDSVWTVARALDAFFDDGGRISFTNDSRLRDVTGGTLHLEAMSVFDMGNKLLDKIRNVNFAGVSGQVQFNAQFELIHPAYDIISIIGNGMRTIGFWSNYTRLLSTTPPEDLYSKPPNTSLANQQLYDVIWPVTYRFIPFGNGTENPHFDQLAQMVADNDFDAAIGDIEITMSRTKIVDFTQPFIESGLVILAPIKKHITNSWAFLQPFTLGMWCVTGLSFLVVGVVIWILEHRINDDFRGSPWQQLITIVWFSFSTLFFAHREKTMSTLGRGVLIIWLFVVLIIQSSYTASLTSILTVQQLDTSIRGLDDLKHSDYPIGFQVGSFVKEYMIKELNISQSRLKALGSPEEYAENLKLGPKKGGVMAIVDERPYVELFLSTYCKIAVAGQDFTSGGWGFAFPRDSPLQVDLSTAILTLSEDGELQRIHDKWLKTGDCSSDNTEFVDSNQLRLESFMGLFLICGAACVLALLIYFGITLRQYLRHEQPGSAISADSGSSTSKRSLRKFISFVDERQRSPKKNGP

SEQ ID NO: 66365 - protein, 430 aa, Zea Mays
MMATGRSLAGVYSARATRPMPLRAGARAPCAGAAAAEPAAEHVRRLVAEFDPAVPLDSAVTPPSGWYTDPDFLQLEIDSVFFRGWQAVGHIWQVKNPNDFFTGRLGNVEFVVCRDANGKLHAFHNVCRHHASLLACGSGHKTCFQCPYHGWTYGLDGTLLKATRISGIKNFNKNDFGLIPIKVATWGPFVLIRFDDESTEDNVYDTVGNEWLGSASDLLGTNGIDTSLPHICRREYIINCNWKVFCDNYLDGGYHVPYAHGDLASGLQLQSYETLTYERVSVQRCESAPAEPDDFDRLGTKALYAFVYPNFMINRYGPWMDTNLAVPLDSTRCKVVFDYFLDKSLLDDQCFIKKSLEDSEQVQIEDIALCEGVQRGLESPAYSVGRYAPSVEMAMHHFHRLMHANLRSTTALCQRKLANNCSNGSAFREY

SEQ ID NO: 66366 - protein, 579 aa, Zea Mays
MAVAAGVSEPPIVEQVITEFFAKSLHIILESRSPYDSSRNFIRPSPPSSPLAGSQPRDRWFNLALRDCPAALENFDLWRQSNLEPLVIDIVLLQRDNTKTTSVGASRIIERWIIKYETSRSGNIIKNSGKKARSGSSQDHSLYRRAYSGSTVLFRSLYLVVRLLPAYHLFQELNSSGRICPLNLSHKISSFVEPFTRAEDAEMKHYAFAPIETLFGSLSLSVSYVPVLDLAAVPEQSSPMPPELIKDYVGSPTTDFLRKLDSLPSDGIAPGCFPMTRRHSWSTEHGVRQSASPFPMSSEPHGCLQPRMPTDNSPTAYSHPHNTPSSGKERNTVNEEYYPSPPLSPSPSHSPSSYPRNPFFRYESPPSSIPTVMAGGGCSRLPPSPRRNDKQQCSSQNENLSHSPNNKSIVSKDLVKLSGFRNEKSLQKVLSFSNDDLVYFRGLKLTRTSSKLFIMDELDERELVFAWEDKDTIIDQLNRVDLSDREDHESSQDLGGSLTRSPDAAIEPSSLQRVMTEEHGSGASSSAGVPSSLLRSRTAADTLEELNKYKEIRESILNRDKGHSCSTKLLEEKPADGDR

SEQ ID NO: 66367 - protein, 736 aa, Zea Mays
MASGQKQQQHLPNVPRWTPSPPRRQARGDAHDEEDAESALGASSSMRSTDEASFPFGSGRARSFPFPLTQPSLEISVVAAANGTAGSGGGGADGPVAREKSLRRADEGVVVSWEDLWVSAAGGNKGGRVPILCGLNGYARPGEVLAIMGPSGCGKSTLLDALAGRLGSNVSQKGDILINGLRQKLAYGTSAYVTQEDVLMTTLTVREAVHYSAQLQLPSAMAAPAKRERAEETLREMGLEAAADTRIGGWMHKGISGGQRRRVSICMEILTRPALLFLDEPTSGLDSAASYHVVSRIARLARREGMTVVAAVHQPSTEVYGLFHGLCLLAYGRTVFFGAAAETNQFFALSGFPCPSLMNPSDHFLRTINKDFDKDIEEGLNGETKMTTAEAIDTLVNSYKASAYMEKVTRQIADTREAGGAVVKKEWQASFLTQSLVLTKRSFVNMYRDLGYYWLRFAIYIMLCLCVGTVFYDVGHSYGSILARGSLLNFVAAFLTFMAIGGFPSFVEDMKIFGRERLNGHYGAAPFTIANTVSAAPYLALISVVPGAIAYYLVGLQSSFGHFAYFALVLFTTMMVVEGLMMIVASAVPDFLMGIITGGGIQGVMMLNGGFFRLPDDLPKPVWRYPMYYIAFHKYANQGLYKNEFLGLTFPSNQAGGSATAATLSGGQILTDFWQVEMGYSKWVDLAILCGMVVLYRMLFLAIVKLTEKVKPMIKGFRFRNTAQSVHVVDRGSGSP

SEQ ID NO: 66368 - protein, 58 aa, Zea Mays
MPFRLKGKKEGAHLTTLITMVWFIVKAKSAQFFQACLTMALNIVINNHQDGEISENMK

SEQ ID NO: 66369 - protein, 194 aa, Zea Mays
MQVQCGGPSYQVQLGRRDGMVSQASMASILPGPNVDVPTAIDLFARKGLNSFEMVSLMGAHTVGVTHCSVIHDRLFNFNGTGSPDPAMDPMYVWILTTYACPRGQAFDNIVYLDDPSSILLVDRSYYSQIMKRHGVLSVDQALGDSSATAWMVKFLATTDFFPSMFSYALNKLAALDVLTGTDGEIRKSCRRTN

SEQ ID NO: 66370 - protein, 220 aa, Zea Mays
MRTWLPQGLKDFTSNNSELYLMNLKSDSTFDLVCKVFHVHVENNNSIFYVWDGTDTPAAEFPAILDAEAAKSLSLHEGPPLSREILCTMPDFGTVLRIFSDRFVNKVSYMQKNIYWARFWNITCKQNFGIWKGTFSDSGGVRLLSNKDDSVVDRLKMYDSRIANRVRRRPMASIPSSVTDVEYEDAGYASLMKSLTHHDVLLLSHFLQLFISFISVFDLV

SEQ ID NO: 66371 - protein, 294 aa, Zea Mays
MATSSAGSMTPRSPITTPRSNHIDMLLAGKNAINESDDLPQIVELADIARCIANTPLDEESALSQMVTCIEDLQEIVNCRKHESLTVQTFGTRIEKLHREKYLQLCDSVDMDKVDSASTIMDEEDNVVRSLRASPVHPIKDRTSIDDFEIIKPISRGAFGRVFLAKKRTTGDLFAIKVLRKADMIRKNAVESILAERDILITVRNPFVVRFFYSFTSRDNLYLVMEYLNGGDLYSLLRNLGCLDEDVVRVYLAEVVLALEYLHSMHIVHRDLKPDNLLIAHDGHIKVLGCPRLV

SEQ ID NO: 66372 - protein, 56 aa, Zea Mays
MVRGTLWWRRWARGVTGASSIAPWRHLTTADPRISMGRAQHHVIHDEQVTEDSEAQ

SEQ ID NO: 66373 - protein, 88 aa, Zea Mays
MLLLFQKITNLIKLMSGRRGTVLKMMEVLRCGKVRQSLYCLQVLWNMILLLISILCSIGTWHVGGVLAVSRAFGDKLLKQYIVVDPEI

SEQ ID NO: 66374 - protein, 826 aa, Zea Mays
MAAAACAGAEAGRGCGGKDALFVELWKACAGPLSCVPPLGEKVYYLPQGHIEQVEASTNQLAEQQGTPLYNLPWKIPCKLMNIELKVEPDTDEVYAQLTLLPDKKQDENTSTTVEEEEVVVPPALPATNEGPHIHSFCKTLTASDTSTHGGFSVLRRHADECLPPLDMSQHPPNQELVAKDLHGAEWRFRHIFRGQPRRHLLQSGWSVFVSAKRLVAGDAFIFLRGENGELRVGVRRALRHQTTIPSSVISSHNMHLGVLATAWHAVNTDSMFTVYYKPRTSPAEFVVSRDRYYESLKRNYSIGMRFKMRFEGEEAAEQRFTGTIVGIGASDPSGWADSKWRSLKVRWDEPSSISRPERVSPWQIEPSVSPCHVNPLPVRFKRSRSSVNALPSDVSTVTREVMADSQQNSLTRALHNQGRTQLTVRYHDNSDVKTTQDLTVWSSGTEQQRNNIAAQTKLCLEGWTPTRSPEGYNQIFSAFKPLKDIHNPLGPFPSQISGTHSNSWDTADARYPVQQANYSMLPGTWSLRPHNSGFRMNQQNYLVMPEGANFTGKSAFTSLQDHGTDKCSTGCFGHIESSSHTDHASSSLIRPQPLVLGNGVQKSKGTSFKLFGIPLGSPEKSEPLVSPPSVAYDGKLQTSPSEKGNQLDVVEVDNCSHPSKTVKPLDGPQSDSITENNQPSPEATLNIQNKVQSSSTRSCKKVHKQGSALGRSIDLTKFACYDELIAELDQMFDFDGELKSPCKSWLVVYTDNEGDIMLVGDDPWNEFCDMVHKIFIYTREEVERMNPGALNSRSEDSLSDSLGRGVASRDPRGGGSTSALDSENC

SEQ ID NO: 66375 - protein, 104 aa, Zea Mays
MLEKIALCCFMFLTSNDYMQTTASESGLFDHLVNVWEFKPGPVPGTCDIYFLVNFKFQSPLYRQVASMFFKEVVSRLVSSFSDRCFRIYGPAVPVLENSYGQRR

SEQ ID NO: 66376 - protein, 902 aa, Zea Mays
MNAMQDLPSIAMSSNQNESGGGGGAGPPLPTAFKSPSTDGKSGSRRSTRFKDEDEYVEVTLDVRDGGGGGDDVAVLAIKDDVRDDTQDAASLLDRPAPGGAGGGLSSKLRAARARLGRIASGKRAAVPLSALLRRDPDRARLDRSVVTALRGLQFLNQAAVTEGWPEVEKRFHRLAVDGFLLRSRFGQCIGMVGSEEFAAQIFDALARRRGITAMVLTKDQVREFWEQLSDPGFDAKLQTFFDMVDKNADGQITEEELKEVLTLTASANKLSKILERVDEYTALIMEELDPDSLGYIEIANLESLLLQPPSQAPTRLVTHSSNISQLISQRLAPARDDGPLRRGARAVLYFAEDNWKRVWVMALWLAINAGLFTWKFLAYRRHPTFDVMGYCVCVAKGGAETTKFNMALILLPVCRNTITWLRSRTRLGAAVPFNDNINFHKVVAGGVAVGVALHAVTHLTCDFPRLLHASAAAYEPMKAYFGQRRIPNYWWFVRGVEGITGVIMVVLMAVAYTLAHPWFRRGKLSEGNPLRRLSGFNMFWYSHHLFVIVYVAFVVHGVCLYINRTWYKQTTWMYLAIPILLYAGERLLRALRSHGLTTVRIEKVALYPGNVIAIHMSKPHGFSYKSGQYIYVNCGEVSPFEWHPFTITSAPGDDYLSMHIRCRGDWTASFRALFAQVCRPPAAGQSGLLRADFASSTAAGGGGKLPKLLIDGPYGAPAQDYRKYDVLLLIGLGIGATPLISIVKDVLNNISDNKDEEQPAEFMTRRVYFYWCTREEGSFEWFRGVMNEVAERDARGDVVELHNHCTSVYEEGDARSALLVMLQALHHAKSGVDVVSGTRVRTHFARPNWRDVFKRVACNHQGQRVGVFYCGDQKVTPELRRLSQDFSHKTTTKFVFHKENF

SEQ ID NO: 66377 - protein, 136 aa, Zea Mays
MSRLPLSSALPVHLSSDPVLTLPSAPTPLVSGQAVTTSPTGATTPPTHLPRWCCRIFKQAAHPTRTREPARARINNGNLARGSPRESHAPSDQRRFLPRPPSFPGPLARALRSRAPPTRETLSHGHSCGCRSSSCG

SEQ ID NO: 66378 - protein, 379 aa, Zea Mays
MAAWAVPALAAAAWALRAAVWACLAASAMLVAEAAYMGLASLASAAAMLWRRPDARYRWEPMPGGCDVEAATGADFPMVLVQIPMYNEREVYKLSIDAACALTWPPDRIVIQVLDDSTDPIIKELVELECQDWATKKINIKYEVRNNRKGYKAGALKKGMEHIYAKQCEFVAIFDADFQPEPDFLLKTIPFLVHNPKIALVQARWEFVNYDVCLMTRIQKMSLDYHFKVEQESGSFVYSFFGFNGTAGVWRVSAINQSGGWKDRTTVEDMDLAVRASLKGWEFLYVGDIRVKSELPSTFKAYRHQQHRWTCGAANLFRKMAWEIITNKHSCMGAGLYSHCNHMYERHQKSLVSPFDALLDSLRECYVHAPHACCCNRFT

SEQ ID NO: 66379 - protein, 268 aa, Zea Mays
MFMPDTNKESLLQTMLMSRTHREESQLAAKIEYECKMRGAQRMAFHPVVGGGANGSIIHYSRNDRKIRTGDLLLMDVGCEYHGYLSDLTRTWPPCGRFSPAQEELYSLILETNKECIKLCKPGTSINEIHNHSVKLLIKGFQELRILEKGKSIQYNYLNPTAIGHSLGMDIHDSMTLPKDKPLEPGVVITIEPGVYIPAAPVLNERAPSRYRGMGIRIEDEVLITDDGHEVLTASVPKEVSHLTTLMNMGRGGSAADAHGHELRAACS

SEQ ID NO: 66380 - protein, 76 aa, Zea Mays
MQHLTANQKPCMGWRPAGARLGARGRERRRLRGKRGVHESRRSAGAVRREGKRWHWQCRTVSYVMGSIDRARAPAC

SEQ ID NO: 66381 - protein, 224 aa, Zea Mays
MDMLAFSGCNHGLSPEEAEELKKMRYAYPWWRDKEIDSQAKRLQGLCPLTPEEASLVLKALGFQKDALIYIAAGEIYGGDRRLEPLRAAFPNLVRKVMLLNSEVLRQFQNHSSQMAALDFIVSTASDVFIPTFDGNMAKLVEGHRRFLGFRRSVVLDRRKLVELLDLYTNKTMSWDNFASSVQEAHKNCVAQPSCRRELKNRPKEEDYFYANPHECLANSTLCS

SEQ ID NO: 66382 - protein, 53 aa, Zea Mays
MVRERRRLAPKYCTYCNLLAVAAAAIGHLACARSRQGRARAPDHCRSADCFDD

SEQ ID NO: 66383 - protein, 469 aa, Zea Mays
MNTPSMSIGVSCSAAVDGVNGCLTYSTCRSRNYYYQYSHTTNLQISPVDQMPLPRKLKKSIQRNAYFLTQKRKLVPHCSSDLSTSCRGVPNYLSINVLQDQSNTKQGAIRKALVILNPNSGFRSSRDVFYQKVQSTLKLSGFKMEVIETAYAGHAKVLSSTVDLKKFPDGIICVGGDGIVNEVLNGLLSRDDFDVAIRFPIGIIPAGSDNSLVWTVLGIRDPVSAAIALAKGDFTPIDVFAVKWIQAGVTHFGLTASYYGFVADVLQLSEKFRVQLGPFRYVVAGLLKFLSLPQYRFEVDYLPSSLQGRSSESRPLAEKRHEQLSDDGKVRRGTQTNGRIKDDWVTRNGEFLGIFVCNHFCKPAQGLLSPVIAPKARHDDGSLDLILVHGSGRLRLFCFFVAYQLCWHLLLPYVEYVKIKEVKVRPVGSTHSGCGVDGELLDGERGAEWQCSLLPAQGRLLGQDPGAFN

SEQ ID NO: 66384 - protein, 874 aa, Zea Mays
MGQIDRHVFRRDYNFFLSRNSTIFDIDIEAFQLKPWRQQGADLTDYFNFSLDEEGWRKYWCSMKQLRLGARSLVNETSGLEQESYKLKSAKAMSNVANDSGSEGRNDIGKPKGRAIHVEGSACERVPSADLWRPIQRDSDVVIQVNMTLSPSNQSTSDDSSKLNHKGVATERVFDKEVYDGGSSEGVGSKLDRRDSYFARDQSPSPDYSDVLSGESKENHYFKRSNRHSDFRDFFEATKLQDEHVKSDFYCYPSKPDRENSESCRRGYTPSTDDRNMASKLLWMGEAPFTGRGKSGDLFLGHNSDRDFKSRHKARKGQRRQSLDDRRNAIFVEKEKPTDSYHSTCDRKFVKRRSSSSSLRTNYHNSVCNQSYEQRYSPLEKKALKNDEHYFSDESNYHHRQSLSCDINEGDIDKCFSSAKEWQRDGDHIYHSMVKTDMPDANDGRMYRDRYSPEKKIARHDHSMDVEFSHYTDYRFCEWRSLEVRGRYRDKGKFAKSNDGHFRHANHLELYSGLNNFERDKPATGFPVMSSRNRCIDNKEVCNAKMTQNNCHGYHQKNKQHDSSFCIGNIPRYALRTDTYAEKGHFVLPIKRKLYSDLGSMDQRTLADLPLLKGRLMHGQSIASDRRIYALKLHKSTKKINTEAICSSSDMRNINTLSNICVGRRHELDNADNIHLNDRKIKFEREGNELRRVIEDNQKGSHPVDKDLHTSRHKHVHQKLWKQNLSHRHSGNQDLEKSADQNCLNKDVEIEEGELIEEDHNNIIYKSKLKQENVVLKSVIETSSAEQLQVNNATSKDATCNNRATRESDEKHILEVMEKMQKRRERFKEAIAPKKEVGDKKDLSALACSTDFIQNQRPARKRRWGGNCWMLEMP

SEQ ID NO: 66385 - protein, 386 aa, Zea Mays
MRRWESKQAAAGASWRQEEGVVVGETGGGRIGRGSESRGHACLTARPVRSAAAAADMGDSGGSVVSVDVERISFGGKEHHIQTNHGSVSVAIYGEHDKPALITYPDIALNHMSCFQGLLFCPEAASLLLHNFCIYHISPPGHELGAAPILPSTPVASPDDLADQIADILDFFGLDSVMCLGVTAGAYILTLFATKYRERVLGLILVSPLCKAPSWSEWFYNKVMSNLLYYYGMCNVVKDILLQRYFGKGVRGGSAEPESDIVQACRSFLDQRQCVNVWRFIQTINERKDLTENLKQLQCRTLIFVGENSQFHAEAVHMTAKLDRRYSALVEYKACGSVVTEEQPHAMLIPMEYFLMGYGLYRPSQINCSPRSPLNPFCISPELPLS

SEQ ID NO: 66386 - protein, 578 aa, Zea Mays
MTNDKCDKLQTLFSEDDWKLVQLVLTLFRNVLAIQEITLTQKASGEATHLLFLSDNFLELMFQENVMDIILVLTQHIDEPSGYLKEENLLLMEIYHYLFLGRDPGLIARASNKGLKDGSKSLCKGNPSSASANSLLKIRNVQRGPQKRIAWDNELLYVPKEGITEMLRSFMDQFLSGAYNILMQSVCGDIMDEHHSIEKSDITTFFKVARFVLAFQHEKASNDQKSAKGIQPSGVSPSNEPDDNLPFHGDICGPVAATLNEDMFNIVISRWRETYEALKETNDYKTLSAAGSLMKNMIDMIYLVLKVLPEDSRESQTARVLLYKLFYDQTEHGLTQFLLNLFRSFDSHKQPKSDLVDLLETIHIMLQLMEKLQARGALRVAKKTKKVRRKKSTNDKKENSEPKVDNAEPNDANPTDGTKCSPETLPDLRSEGPALESSPSEPGKVDTSGAHVLDTLVDTVVNIESTAHAEGDPSCTDSGVMKRNLIEEEGETSDSSVDHQPATSEVDFNVSRLISSLANNSVVQNICWLLKHYKSNSYRTNHYIICMLRRFCEDLELSPMLYQVKEMPTYVSSQSFLL

SEQ ID NO: 66387 - protein, 656 aa, Zea Mays
MPIIIIATHKRQMILLSSKEQTNIQTVPGYGSSSYYFQNNTWNGGSTGNNFAQSYQNYSPSDTNAQQSSTSVPANSLPYQQQYNQWPYYYNQSVPSASSNPVAGNSTTDNLAVNTPSSYSYPNSQPPPPGTTSWKSNSSASVAPPMQVPGVLEHQNQYGNQAEGHYNQGPGVQWSQNHYAYQTQPYPQKINSNYSQLSNPEDQLRTVDSNGPSTNLSSNHVSENFKPNLLDSVTMNTSSESKIQVPINPRIAQGFSMVIPKNEKKSSGLDLSRKPAYVSVSMPANDAKASQVGPDARSIPFSLRNYAMRNLNRCKNDTQRAACRSIMEEITKKAFAEGTLLTKNWDTEPLFPLPESVVGMAGASSDLSPFLSVSTPRKRVKSRWEPVVDENVTNKVEQIAKGLISSNVHSTLDPKNRIPNPVRGSSWDRGKFLQSCQASSNKVNQRPAKKQKMASNLSQIQNGSASSDSEKEHDLTKHYASATALANSPEEKKRREHRSKRFEKSKDSSLKSRNASANNDGMASFRARRAISSLRTRTYEEGTLAVEDMDWDALTVKGTCQEIEKRYLRLTEAPDPAKVRPEDVLEKALAMVETSEKNYLYKCDQLKSIRQDLTVQRIQNELTVKVYETHARLAMQAGDLPEFNQLVKRSQTRCSC

SEQ ID NO: 66388 - protein, 61 aa, Zea Mays
MEAASPQAIRSRGDVETPATRRRRRRRRLHQAGSSTRRSSPPNYPRTGSTSLRNYTRNGYR

SEQ ID NO: 66389 - protein, 335 aa, Zea Mays
MHLQSLEHVLQMSVSAPMVRMNVLVYATCFADAASSSELSLAYVKLIQQLAVFKGYSAAFCALKLAEKKFPSSTSLHIQLLGMQILHERALHRGHLKVAQQICDEFGVLSSSVSGVDIELKTEFSVRRARTLLAAKQFSQAAAVANSLFSTCYKYNMQVENASVLLLLAEIHKKSDNAVLGLPYALASQSFCKSFNLDLLEASATLTLAELWLDLGSSHAKKALSLVYQSLPMILGHGGLELRARAHVVLAKCHLSDLKFSVLEDPEAVLDPLNQATEDLQALEYHEMAAEAYYLKAMAYNHLGKLDEREEAAARFKDHVTALETPHNEEDSLKY

SEQ ID NO: 66390 - protein, 469 aa, Zea Mays
MASSDLAESLLPGGGGGASASHDEYEERAYDSEDKISIAVSDSDGEDDGTPASRPPFSWRKLWRFTGPGFLMCIAFLDPGNLEGDLQAGAAAGYQLLWLLLWATIMGALMQLLSARLGVATGKHLAELCRQEYPPWATRALWAMTELALVGADIQEVIGSAIAIKILSGGAIPLWGGVVITALDCFIFLFLENYGVRKLEAFFAVLIATMAVSFAVMFGETKPSGKELLIGLVVPKLSSKTIKQAVGIVGCIIMPHNVFLHSALVQSRKIDTNKKSRVLEAVYYYNIESILALIVSFFINICVTTVFAKGFYGSKQADSIGLENAGQYLQEKYGTAFFPILYIWAVGLLASGQSSTITGTYAGQFVMGGFLNLRLKKWLRAMITRSFAIIPTMIVALFFDTEDPTMDILNEALNVLQSIQIPFALIPLITLVSKEQIMGSFVIGPITKLDCYGISDAYQRVSYTIFLHY

SEQ ID NO: 66391 - protein, 366 aa, Zea Mays
MQFEFIKDMPRVAQQEFPIDISFLVGKLVFVWMIMLYFPVILSNLVYEKEQKLRTIMKMHGLGDMAYWIISYCYFLLLSLLYMLFLVSFGSIFGIKLFRLSDYRVQFVVYFAYINLQVSFAFLMATFFSNCRTASGSWSTLMELFPPFCLYRIIYEFSPPPSPLYRTDFSGVHWEDLSDHKNGMLDILIIMAVEWATFLLLTFFVDEFGTFRNGIRKTVSIFRSNTDQSSHTCQMQTIQLEEFLPSVETDRTDVSRERETVQQLLRESDSNFSVICDNLKKVYHGKDGNAEKIAVAGLSLSVQRGQCFGILGPNGAGKTSLISMVSTNSLRCIKLACIHIPDHNSGKYIGCISCTIVIRKSVVSFL

SEQ ID NO: 66392 - protein, 265 aa, Zea Mays
MLRSNLESLNPRNHPLLQDPDSPGLTSLTRGDRMVQRMLLAELDKPASKSFERRRLLSYENKQSMTTTVKEKPQTGRRWGYFPGIDPHLGFSEFMERFFEHGKCSMRVFMVWNSPQWAYDIRHQRGLESLLKQHPDACVVMLSETLELESFHQFVKEGYKVAVAVPNLDELLESTPTHVFASVWYEWRQTKYYHLHYSELVRLAALYKYGGIYLDSDVIILKPLTSLRNSIGATNHVSGNSRFGGAVLAFEKQRCQIGTATSLTG

SEQ ID NO: 66393 - protein, 149 aa, Zea Mays
MVAALTNESATSKSVYFAHCTSEMIFITHLLTEQPEKLAGPLLADTYVTLLKGRNAWYGQMLAKGELSPDMGDSIKGKGMIQGISAVGAFFELLSQPSLSVQHPEENKQVAPAELCPILKRLYRILIKRFVLCIITTLHIWRVYSVLEE

SEQ ID NO: 66394 - protein, 503 aa, Zea Mays
MELSRISTEKFDDAVKSMTDAGFLKETVEQALKKLIILYEENWEHIEADNYSTLVEALLGHSDPKAGQKKRAEKNLNVDSDHYNKKLKIKGGQTPRSSMHGSAKKELTEEADSLEERTTGNQLQTSRAETTITGENSCTLLESQDPCTSETPTVMCPKVLGSNRHNGIKRQYHDVNDITRGEECVSIPIVCGEDGVLPPPFHYISQNTTFQDACINLSLARIGDENCCSGCFGDCLAEPLPCACARETGGDFAYTRDGLLKEGFLDACVSMLREPLKQPHFYCKGVCPIEQIMKGVSSAKPDACKGHLIKKFIKECWIKCGCTRNCGNRVVQRGITRKLQVFLASRKKGWGLRSAENLPRGAFVCEYVGEILTNTELHKRNTELYGKNNKKAGKARHTYPVNLDADWGTEGVLNDEEALCLDGTFYGNVARFMNHRCIDGNIIAIPVEVETPDHHYYHLAFFTTREVEAFEELTWDYGIDFDDVNHPVKAFKCHCGSTFCRGR

SEQ ID NO: 66395 - protein, 848 aa, Zea Mays
MSQTNWEADKMLDVYIYDYFVKRNLQATAKAFQAEGKVSSDPVAIDAPGGFLFEWWSVFWDIFIARTNEKHSDVAASYIETQLIKAREQQHQQPPQQQQQQQQIQMQQMLLHRAAQQQQQQQRRDGSLLNGTASGFSGNDPLIRQNPANANSMAAKMYEERLKLPPQRDSLDEASIKLQQRYGENVGQVIDPNQALLKAAAAGQSSGQILHGTASGLSGTPQQVQARSPQQPPTAEQNIRTEINPVLTPRAAGTEGSLIGIQGSNQAGNNLTLKGWPLTKPFMQSPQQFQQLQFLTPQQQQQLLLHAQQNLSSSMSSDVDTRRLRMLLNNRNVVLGQDGQTNSGGDVIPNIGSPGQSGGSRNDIDILIKKKFALLQQQQQQQSHSQQQQLQQPALSGQQSQSSNQLLHQHGKPGVGSLPIDGNLPNSFGFPEQGSKKRKKPVSSSGRANSSGTANTAGPSPSSAPSTPSTHTPGDAMSIPQLQYNGGPSKPLMMFGSDGTGSLTSPANPLGDVERLLEDGSLDENVESFLSQDDMDPRETMGRCMDSSKGLGFTEVAKARASTNKVVCCHFSLDGKLLATGGHDKKVVLWFTDVLKRKSALEEHSSLITDVRFSPGMTRLATSSFDKTVRVWDADNPDYSLRTFTGHSASVMSLDFHPNKEDIVCSCDSDGEVRCWSINNGSCVTCVRVFNGGATRLRFQPRQGKYLAAASEKGISILDAETLQVCRTPLQGHVQIIQSVCWDAAGNYLASVSEDSVRVWSFTSGNYIECIHELICSGNKFHSCVFHPNYPNLLIIGCYESLELWDIREKNTVTISNAHDGMVAALAASSASGLVASVSHDQLVKLWR

SEQ ID NO: 66396 - protein, 246 aa, Zea Mays
MAIIMSSWSENYGDPSESKDLMAQFKVAAKAIASDEKIALLGAIQSLFEGSMYTFVFLWTPALSPNEEDIPHGFIFATFMLSSMLGSSIASRLLARKLKVEGYMQIVFSISAVTLVLPVATNILVPTSSVKGGSVSIGGSLQLLGFCTFEACVGIFWPSIMKMRSQYIPEEARSTIMNFFRIPLNLFVCVVLYNVNAFPITVMFGMCSIFLFMAAILQRRLMVVSDQVHKSSTTQEMIGEDEPLNP

SEQ ID NO: 66397 - protein, 93 aa, Zea Mays
MLLLQGVILMSTVEGLVWIMQEAPQVPHQEDQANWLEGSYQKCSGGLLISLESGNSLTFQLDKEKNMWFKRSHTSRSSFRSRWRLPVTLWQQG

SEQ ID NO: 66398 - protein, 202 aa, Zea Mays
MGTVVDAPAVVAEEVTENMLGGKKVTAVFVLGGPGSGKGTQCANIVEHFGFTHLSAGDLLRAEIKSGSENGTMIENMIKEGKIVPSEVTIKLLQEAMIKNENDKFLIDGFPRNEENRAAFENVTKISPAFVLFFDCSEKEMEKRLLGRNQGRVDDNIETIKKRFKTFVESSLPVIEHYNSRDKVKKVLMDFYLARGTPTALR

SEQ ID NO: 66399 - protein, 84 aa, Zea Mays
MPATGDASAPLDDDKEEGEEHAIGNNQKRQKRCTSWVWEYFTKKNMVIEENGKKYEQVWGHCNFARCKAKYRAECNHGTTGFSN

SEQ ID NO: 66400 - protein, 224 aa, Zea Mays
MAIDERSVHGGAALVLRLLVCVVAARAVSAVADDNMLRNGDFEEGPYIPPDSQWGVLVPPVDEDDVSPLPGWNIMAYKKSVKYIDSAHFAVPRGARAVELVSGVETALLQEVYTTVEGSWYRLEFSAGDADGCASSYDDGSSSGMKVKAYAGTAETTVDVDFRDAGGSKRGKIEFRATASPTRVVFVSLGYHTKSDNSGTLCGPVVDDVSLVPIPQPYARRLLL

SEQ ID NO: 66401 - protein, 181 aa, Zea Mays
MMPRRVASVPVPDWLEALLATRFFLACAAHPASPRNECNMFCLDCTGAPPPPPPAFCYYCRAHRHSSHRVIQIRRSSYHDVVRVSEVEDVLDISGVQTYVINSARVLFLNERPQPRGAGAAAGKAAASPYNCEICGRALLDPFRFCSLGCKVLPFFFLSCGCRLFRPPTHPPSRCPASFIR

SEQ ID NO: 66402 - protein, 124 aa, Zea Mays
MCSIKCAASHASSISYSSPRHLRALPARCFIKRSEQHAVDTRRVFAVFCATPSATPSEPRGEKTLAALAAIIFLFLCSVKLLNGCVCLIAASCQCHSSRTRVRYKTGRVNHVLAQPKSDPVQVD

SEQ ID NO: 66403 - protein, 59 aa, Zea Mays
MACPGSDFSPAPSRTGPPARALPLPQPVASCWFAARPVYASGEVVSSLCSPVESFASRA

SEQ ID NO: 66404 - protein, 701 aa, Zea Mays
MEYCPRTLRQDFETYISSFDVDHAWHLFRQIVEGLAHVHSQGILHRDLTPSNIFFDVRNDIKIGDFGLAKFLKLEQLDHDQYLPTEALGVSMDGTGQVGTYFYTAPEVEQKWPQINEKVDMYSLGVIFFELWHPFATAMERHLVLSDLKQKGDPPLSWESKFPRQSVLLRSLLSPSPSNRPSAVEVLQNELPPRMEDEWLNDVLRMIRTPEDTYVYDRVISTIFNEDRFAKMQGQHDSSKKSTGNIDNSELLDTIVEVAKEVFKRHCAKRFQISPLHTLEWNFTKNRGNTVKILTQGGEMLELCYELRTPFVMSIASNQTSSFKRYEISWVHRRAVGHSTPYRFLQGDFDIIGGTSPIPEAEIIKVALDLGTRFYDSKTLVIRLNHGKLAEAICSWAGVSQDQRQNVAEFLSSTIVQYWPNEADRKSQWSLIRGQLLQDLRLSEEVVEKLHKADQRFCGSADLVLARLRGTLFYDESACKALDDLSALLRCLRVWSVEQPITTIDVLMPPSECYYTNLFFQVYSKEGNHGPGFHEKLLAVGGRYDWLVEQAWDETSKSKPPGAVGVSIALEKFLPNNPSSDLGLRRLLSRVEPSISVLVCSRGGGGLLTERMELVAELWKANIMAQFVPQEDPSLQEQYEYASEHDIKCLAIMTESGLSQTDLVKVRHLDFKKEKDVEREGLIKFLSDAMCSQYKNPTIWS

SEQ ID NO: 66405 - protein, 194 aa, Zea Mays
MAEFGLQAVLNPSQMFLTEHDSDSEIMAGLAVAVILDGSRTFALEVQALCVSGYHRSGQVVGIPQSRADVIISVLIKQAGLKLQDNIVFLNVVSGFKLTETAGDLAIAASICSSFLEFPIPNDVAFIGEVGLGGELRTVPRMDKRVIAISKLGYKKCVVPKTSEKLLRPLDIDIEILPCSNLKQLINTVFRPQG

SEQ ID NO: 66406 - protein, 200 aa, Zea Mays
MEMGDSFEYYWEMQQYLESEELSLYMGTQDDALSCYDSSSPDGSISNSSWAPAGVAATASEKREGPGGAAAANKNILMERDRRRKLNEKLYALRSVVPNITKVRAQVQSVRPSALHRIARGIDGRWTRRRSSRTRSSTSSSYRRRSGGRCRRSRPARGRAAAATGTARRRAWSCSSPPPPRRPWRSWSCACRRWATACWW

SEQ ID NO: 66407 - protein, 258 aa, Zea Mays
MPDKSKKWHPKFYRRDVSRTCMLTGQWLDFVCDNHVQEGDICLLLPTKDEIRCTFMVYVLHETTHSSRGEAGFQMGGPCPGASGVASEIHVEEEPTTGEHVSSESDMREIPHESLSRGDSDDQFEPPYFVPCKSPLSESQKRMVEERVRAIRSEIPICVAVMKNNNVGVAQRWMLELGSRYGSVYLPTKGQTILLQCGGTTWKAKLMFHNGRRWFLNGGWPNFARGNGLRVGDICLFELKKKDSKLTMAVHIIRREKF

SEQ ID NO: 66408 - protein, 1119 aa, Zea Mays
MGNLCWSTNRERWRRTAPSPSVPACSDLPAAVSSFADAFVDFAVSDIFFPTFPSSSSLPPRPKTPTTFLPSPSRLVAIGDLHGDLPKSLSVLRLAGLVPPSCTPTPPPPPASSWPAGPTLAVQLGDILNRSDDELRLLYLLHRLSLSAETRGGAFLPILGNHEVMNVSGDFRFATPQGFHDRAVCGGVLACAGFAAWAAEAGVAGAAGCWRTGVAGAGAVYTASLIVSRDCLKLNSTLGLWTCFCPIRSKPNPLPSYIDIGSWAGLVNPRRRKKYMLPSANWQEMKKLSSGKKSGKGDGLGRPGESLDSQARQIAVRSPLPWREAYQSSPQIPRYSPLRLRSRLRRRAPPSPPAPHRATPMYSQLVDGDSDSEGSLISDISASPPRGRSPSPPPPPPPPPEHRPNPKHTATVKPKPPKSKAKPKLAASACTAAVSPPPLPSAALSDPHGLVSRIAAAPALVTATSTVSSSSFRRLVQSRNPSFDPAAAFSAPTPAPTLAPTEIATAATAQCPAPDAPPQTRPKRVHPNSVSEVVPPAAEAEQPKRPRGGAEGNFVRLNINGYGRRRTFRNAQARRPTKYRSWRRQRHGGAKPQGRGDEEGDFVAEAMIEREKKRAGGDGGVLEAVEAAREDPSEQNLENLLRIIYGYNSFREGQLEAIQKVVAGESTMLVLPTGAGKSLCYQVPAMILPGLTLVVSPLLSLMVDQLMKLPAFLPGGFLASNQTSDEFHETLQRLRGGEIKVLFVSPERFLNEEFLLIFRDGLQISLVAIDEAHCISEWSHNFRPSYLRLRASLLRRKLNVQSILAMTATATTQTLEEIVTVLEIPSDNLIKTSQIRDNLQLFISMSNNRLKDLLLLLKASPFVDMKSIIVYCKFQGETDYVSKYLCDNNITAKSYHSGLLMKNRNRVQELFCSNKIRVVVATVAFGMGLDKSDVEGVIHYSLPESLEEYIQETGRAGRDGRLSYCHLFLDSTTFYKSRSLLHSDGVDEYAMSKFLFQVFSCENSVGCICSLVKESTSRKFDIKEEVLFTVLTQLEIGGQQYLRLLPQFSVTCTLYFHKTSPQLLADKDVLVRSVLDKSETKGGHFVFDMTKVANDLSITVNEVFDHLQQLKSLEKFHLN

SEQ ID NO: 66409 - protein, 94 aa, Zea Mays
MLATVLSAEGGREWRNWGGTIVNCAQTPSEGPWAVPGSFPKPPRWCSSIVSGVCDGRRATISRRTLTLPHNDAPPWIAPVASSSVVRTFFLLFA

SEQ ID NO: 66410 - protein, 201 aa, Zea Mays
MGHLRTHPALKIFLSLHITHMAEPKYFNPVGAHPSGYLGEDPCGTPNNLMPFVQQIAVGRRPSLTIFGNNYATKDGTGVRDYIHVVDLAEGHLFALKKLFESSSNIGCEAYNLGTGKGTSVLEIVNAFEKASGKKIPLIMGQRRPGDAEILFSSPAKAERELHWKAKYGITEMCGDLWNWASKSPYGYAASESPKLNGSSR

SEQ ID NO: 66411 - protein, 500 aa, Zea Mays
MSSVFGRLSISRSPANEIGSDTLLGCSMSGSKESPVSTSASMRGLSKPPGKGDLRLSRSISTPLLSPRVRLNPNFIDRQKNQAATAVPLPEPIVRFKANLSSDAGMLSRKSHASAAPMYRSRSNSSRYGIMESSSIPVLALRHSSRKDAGPVHSEAATGELADIEPQNIEKEGLVANHGKEDGKLVPVIASRSSKIVEEVGYRRITNDVGCKRVTLESGLRVNSDMDYRSRAPESHEVQQLIHLSEPAGLHGKFIRESSGAGDNNCSGSICTESAEFNEVDIWYRVSGFDKWNPAAARNPEFASIHRNEVIGIRQLMESSGKYVVDDRPSSSNYDNIQYVTTLYSSRLHPSLSGKLSASASYEDDISGLVENHQEFIHVMKSRLTKLEVVYRCWQRNDIKGSIDATWRMLDFAVTNDIVNALMENRNCITLDVCASLLRLTTSLLESTYDRHMSIALRMILSFVKSFGPTISSALLAIPPVGVDLEAEQRCFFLFISLKL

SEQ ID NO: 66412 - protein, 303 aa, Zea Mays
MQKPVASVVSLCPQLWHRHFRRAPLLPRARGLPSSSPILTRRRSVLPRSTSTHLAAVSTAAAAAAAPSATPYPVYDRLLPCPLQDDPPRIEHLVAREDEVAADFIARSLGLPPLYAADLIEFGAVYYALVAPQPPPYASPEHFRLFREVTEPSVLRRRASIKGKTVREAQKTFRVTDPNQRLEAGTYLRVHVHPKRFPRCYQIDWKSRVIAVADEYVVLDKPAATSVCSSLPSTFSFVGGLRALNFLDSSCRIMECVSATLALHFVEHSLHVFNSMSFESPMNYDIDFSFTIRLSAQNKIHIH

SEQ ID NO: 66413 - protein, 236 aa, Zea Mays
MLSALMDYLKSCWGPASPAGRPRKGSDATGRQDGLLWYKDGGQVVDGEFSMAVVQANNLLEDHSQVESGPLSTSEPGLQGTFVGVYDGHGGPETARYINDHLFNHLRRFASEHKCMSADVIRKAFRATEEGFISVVSNQWSLRPQLAAVGSCCLVGVVCSGTLYVANLGDSRAVLGRLVKGTGEVLAMQLSAEHNASYEEVRRELQASHPDDPHIVVLKHNVWRVKGIIQYMSHTR

SEQ ID NO: 66414 - protein, 274 aa, Zea Mays
MIEDVELLEEKAKVAKHELSVAGTGILAKVEELREMITYAKEANDMVFPSNPHAGKVLGEKAILTTEARELLSRHQRLSDERNKYLVIIEEIHQILAERLVAAQQEIAAAEKENAEKEAAAQAVLDEQEKMMNSIVEESRKLQKEAEENLKLKEFLVERGQIVDMLQGEMAVTCEDVSLLKRVVDERLPLSKLQRSAMSSLSSSLHSSHHKSWTSSDKAIRSPDKHTLAEPASPVGKDLDGNECTVEVSDGNDSGEGILKRVDSKEDVDGWELC

SEQ ID NO: 66415 - protein, 61 aa, Zea Mays
MMLHMSSGIKTMVELVARHTLDRAVGLERDVSKPAIPVIMIPAVAIRPVDGVNPDRCARGR

SEQ ID NO: 66416 - protein, 581 aa, Zea Mays
MDGCDCIEPLWQADDLLMKYQYISDFFIALAYFSIPLELIYFVQKSAFFPYRWVLIQFGAFIVLCGATHLINMWTFTTHTKTIAVVLTVAKVATAVVSCITALMLVHIIPDLLSVKLRERFLKAKAEELDREMGIIRTQEETGRHVHMLTHEIRSTLDRHTILRTTLVEMRRTLGLAECAVWMPSRSGTTLQLSHALHTNAPLGSVVPINLPIVATIFNSNRAERIPHTSPLASVKAQKSKYVPPEVVAVRVPLLQLTNFQINGWPELSAKAFAVLVLMLPPDSARKWRPHELELVEVVADQVAVALSHAAILEESMQARDLLLEQNIALDAARREAEMAICARNDFLAVMNHEMRTPMRAIISLSSLLLETKLTAEQRVMIETILKSSDLLETLSNDVLDISKLGDGSLELEIAPFNLHATFTDVVDLIKPVAALKRLSVMVHLAPELPTCAIGDRKRLMQIILNVAGNSVKFTKEGHISVSASIARPDSLRDPYALDLHPVLSDGSFYLAVQVKDTGCGISPQDMPHTFTRFAHQQNATNKLRSGNGLGLALSRREHLAGKRRRREGLYRNVLCEARTI

SEQ ID NO: 66417 - protein, 992 aa, Zea Mays
MWATLHKPVAHANLRLLLTVSAFSGPLHLGTASAVAAAVTTRRSSSSRGVAATAMPSSSPPPLPPAEETTASAAALAPEGGFSLTEPSFLESLMPKKEIGVDRFLAAHPEYDGRSALIAIFDSGVDPAAAGLQTTSDGKPKILDVLDCTGSGDVDTSKVVKADADGAIVGASGARLVINPSWKNPSQEWHVGCKLIYELFTDTLTSRLKKERKKKWDEENQESISDALKQLNEFEKKHPKPDDTMLKKAHEDMQSRLDYLRKQAEGYDDKGPVIDIVTWNDGDVWRVAVDTQTLEGNNDGGKLADFVPLTNYRLERKYAIFSKLDACSFVANVYNDGNLVSIVTDCSPHATHVAGIAAAFHPDEPLLNGVAPGAQLISCKIGDTRLGSMETGTGLVRALIAAVEHKCDLINMSYGEPTLLPDYGRFIDLSNEVVDKHRIIFISSAGNNGPALNTVGAPGGTSTSIIGVGAYVSPAMAAGAHCVVQPPAKGMEYTWSSRGPTADGDLGVSISAPGGAVAPVPTWTLQSRMLMNGTSMSSPSACGGVALLVSGMKAEGIPLSPYSVRKAIENTAASISNAPEEKLTTGNGLLQVDRAFEYAQQAKKLPLVSYRISINQVGKSVPKLRGIYLRGGNACCQTSEWTVQLDPKFHEGASNLEQLVPFEECLQLHSTDTSVVQIPEYILVTNNGRSFNIVVNPANISSGLHYFEVYGIDYKAPWRGPIFRVPITVIKPIALLGEPPLLSISNLRFQSGHIERRFINVPFGASWAEVTMRTSAFDTPRRFFLDTVQICPLKRPVKWEAVVTFSSPSSKNFSFPVEGGLTLELSIAQFWSSGIASHEPTCVDFEIVLHGISIDQKVSTLDGESPLLIVARSLLASEKLVPVGTLNKIRIPYRPVECNLSSLPTDRDKLPSGKQIIALTLTYKFKLEDNAEIKPHVPLLNNRIYDNKFESQFYRISDSNKRIYSSGDVYPSYVRLSKGEYTLQLYIRSVYK

SEQ ID NO: 66418 - protein, 66 aa, Zea Mays
MVNLVAVLNTELDHTLDELSKARVEIAELHAERAERRHQEDGSPAPVGTQHPYRSPPCGHHAYGTY

SEQ ID NO: 66419 - protein, 533 aa, Zea Mays
MPIMCYIPATHLVLAQAIRFHPKVPGLWIYAAAWEFDQNLNVAAARALMQSGLRSCPQSEDMWIEYLRMELTYLNKLKARKVALGEDVKTLQKKDNDASQWKEENKELFMPLNEQVKDPKEPGSAGDALEEKEDLFWRQGLLIIQTIYHGAVEALPSSLTLRKKFLEILNSVDLAHSDELKLEVLDDLKRDFSHSEDYWDWFARLQLSNLNSSSNSNRKDAISNKLNRSIQVYDEAIRKLPNSKMYSLYAKFWMDVIYTDREDSVTLFQDSEFDASEFTSSILKVYENAESCGCLTEDLACQYISLYLKLERLEEAKTLAEKLCDGPLSNAANLWSLRFTMEINSIATAPGSSSLSKENLSSLLDLFSTVLSKLSVTEAERLWHMAMKLFSHDKVCFEKLVKCAMLSLSLAGGSDSGASVSSAIVGWYLQRDGVKHARKMYKRLLALPRPSLKFMQYCIALEANLASLGDNGALKDARRLYDSALDLYPQEREVWRSYYDLELKMGTSESANAVYSRSRKVLGDSTALTAPRG

SEQ ID NO: 66420 - protein, 111 aa, Zea Mays
MLVPSPLSSRDVPTVLHPHPTQCRCPGRGVSFLPCPTRVNQQARSSSPSAYGGRPCSTLPQECDSPRRTALSRGPRLALPPAPRRRGGVLPRPHLPDDPGATRGCMHCVGE

SEQ ID NO: 66421 - protein, 951 aa, Zea Mays
MHAGTTRGDGGTRGLQRRFGCMAGIFQIFDRHRLIAGAGRRAARQAQKRLPPPSSAPPGKTQHPKSSSDVLVQSSSASKIVLEKTLSKCTTENSSLSIESSSDSSSSSPCTSFSSLDGNKSVQQELPYTSEELFAQRPLKSSPSLREPDMNAKSGHPNAGFRDIVKDCINRDSGGLTVKTSVHEARRNGQHKDSPRPLLLSKSMDGTCIIGIDRTTNVPANVNGSRRCLQEQSRFSCDDRRLLRPTETQESKRSSSRPKELPRLSLDSRKESLSPGSRQKDLGYKRTDDILLDTLRPQDSPSHSRANSVIAKLMGLEEATNATGVLTADSCEPTRSPRPAQTTQYGHPSRSPRGTCQDSCSMQLKNESSVLKTKPSPRILTEAAPWRQQERSVTNICREAEGRPRIASVYADIERRVGGFDFLECNNKDFRALRILGALNVRDAKNKNDSSGRPMATHRTGYDLTTSGSFQAPIVVMKPAGTTEKHGVSLASVAPIAGLRSLRKLPARYSSFTGTNEASTNENIHLQMSRAQLKSEETVSSASSPRPTSSSNPRNVLKKAEPERRSRPPVSPKSPSKKSNEAVSPKGRTRSKPSQVKSHRDEVLHSTGNRISLAKQVDVSVIDCPKPPGGNSTFVPPSNAAATASHKAPSILDSDQNIHSLDNIPSPVSVLDTSFYHKRISDSFKDGETHSSEECWNPNSLPDTPQSKASSEANQIKPENLEVLIQKLEQLQSMNEEDASIKEVMASVTANKDHQYIYEILLASGLLHKEHSITALPAQLQTSNYPINPELFLILEQTKPDLVFAFQAVSGTKKTCKPYTGKLHRRLVFDLVNETIAQKMIICRSGSQPAKFLQSRKLSGWQLFKDLCTEVDRQIKCTGEEENGNMILDEDTVNGTKDWMSFDTMLHGIVWEIERSIFKGLIDEVIGGETIEKMQFGQRKLQRQLSFSSIN

SEQ ID NO: 66422 - protein, 382 aa, Zea Mays
MGNCAAYRLAAGGSGDGGDPVAVCRDRKRLIKAAADRRFALAGAHAAYAAALRSVADALDVFVARHTAPAPILITLPTPSSSPSASPKPTQVQVQGLPSLATPPPPPPQEGEEEEEAPASPPAEEDGDGGVQTPEMECPYYYAPPAVTPPPPPLPAASPVGGWDFFNPFYGTEEVAAAISDEEMRAVREREGIPELEEAEEEEGAKAAAAAETKPPKAQPSLGLGVLTPQEEARDACEMAGNNGGLEVAVAPQGRELLAALKEVEELFAAAAEAGKEVSAMLEAATRVPDLKENSSKIIHAITWHRSPSSVSSSYRSELGASSNSLSWTDKSETRSDIFEDYGGMKSGSHSQTLGRLYAWEKKLYEEVKIKSDKPMRRNVFS

SEQ ID NO: 66423 - protein, 81 aa, Zea Mays
MIRPSSVGWRWRSCRAVQQGSRPRWVKLPYVGQGHGFLRDLHRPADPPFLARCLPLKKPARGGQPMRVLAGGFFVGPSDDD

SEQ ID NO: 66424 - protein, 917 aa, Zea Mays
MACPDIIPPGPSLRTMPYFKPAPSLRQEYHECATCHAPAKTRCSRCKSVRYCSGKCQIVHWRQGHKETCQKWLGSGSSSFGGSSTEATEQMPFLANLNSPLPGGDIHLRDMNFDTLSEPSFPTTDGYNLDTDPFPADRSNMNRSNQGIHMSENGAVGVSFEKNNYNAADEIHSSEILSGNKVSNNYFGSDAMSGNGDATYPAKSNAQQPSSCAPDVRKQSKASITVYQPDMSVYLTSDMVSSCEGSYVSAGEPLQRSLSSGRTIGKVTVVNKRPSYPSSKVVSAQKSQDKVSTSYQNDAHEKNPCNKNDQRSTPTCESSQSTSSNLLKSGTSKVEVLKKPSKFLKTSLVALINDNKRNKVLFPYEDIVKFFQYEARGVSPRGLFNCGNSCYANAVLQCLMCTKPLMIYLLLRLHSKDCCSKNWCLMCELEQYASTLRESGGPLSPSRILSNLRNIGCRLGGGTQEDAHEFLRHLVMSMQAACLDGLGGEKHVEPSLQETTLIQQMFGGRLKSKVKCLRCYHESERYENIMDLTLEIHGWVESLQDALTQFTAPEDLDGDNMYKCGRCSAYVKARKQLSVHEVPNILTVVLKRFQSGKYGKINKCVTFPDMLDMVPFVTGSGDNPPLYFLYAVVVHVDTENASFSGHYISYVKDMQGTWLRIDDSEVQVVSVNQVMSEGAYMLFYLRSFPRPPRIYIEKGLPVTSAKRHTSKSSKGSKHDRKQTELLFPANDQAYGVYDFRPDGEGYAQDQHAELRSRAFHHADDAFADSVSADFSEATSSEWSLFTSSDESSFTTESTRDSFSVVDYGDNAGLDPISSIFGPSYAPEHGAPGSFVSRTRFSPSSPQTRYFSESTGFVSDSSMPAHPHGIVHRGRYPDSRACASSAEPLASAAHQRSGYGRYPLSRDGFVQTSGFCQM

SEQ ID NO: 66425 - protein, 1127 aa, Zea Mays
MLSLRSSACKIQGPERLQAPLIEKAWRSLCNTQAACKSYLRPGLSAKARDCDRGHARTYGEGSYNTNKMSTVPGNRILSMESTGQPSERVSLQNNSSHQTVGICSSMRSHQNNHVVQEDMRATNQYNFARTNAALHQSMAADNMCSYDKFDAMDDDILATIDVDQIVMEHYQATNAPRGSASHNMSTPPGNKCSVNGMDEANLPRELSELCNHQCKLAFCREAMTHLQEMKDELLAVANELLDDDGELNPQHSQELHKRRLHLKKLVQLLEDHMTRSAQDEERQISHSMASTTSTQQHLPPMTPGSTFTMDSNRFQSQVYVGNGPRDSDLCYSPAPYSCSDNLSTPLNSVWKSYTPKVIDINYTEGSGDRKWSSTNFPWTKELEAKNRNKFGNHSFRPNQREIINATMSGHDVFVLMPTGGGKSLTYQLPALISSGLTLVVCPLVSLIQDQIMHLSQANIPATYLSGNLDWSEQQEIMKDLMSCRYKLLYVTPEKIAKSGALSRLLDNLNSQGHLSRIVIDEAHCVSQWGHDFRPDYKSLGVLKQNFPKTPVLALTATATARVKEDVVQALALENCIVFKQSFNRANLRYYLRPKTKKCVEDIDLFIRTNHSKECGIIYCLSRMDCEKVAEKLRDCGHKVSHYHGSMDPMDRTHIQKLWSKDKINIICATVAFGMGINKPDVRFVIHHSLPKSIEGYHQECGRAGRDGQPSSCVLYYQYSDYIRVRHMITQGVTEQTGAPRDLSSHEQALKTHKDNLLRMVSYCENDVDCRRLLQLIHFGEKFDPSLCARTCDNCLKESGWVEKDVTNIARQLVELVTRTGHSHSSTYILEVYRGSMSQNVKKQRHDALALHGAGRHLAKGEAARIMRHLVTEEILNEDVKKSDMYGSISSVLKVNHLKASGLLSGKHNIVLKFPASDKASKMRNLDASLLPQTNKNVQQQSEVDVKLASMLYEALLSLREQIMEECNEGFNAYHIFKTDTLKEMSIRVPRTKEELLDINGLGKTKVKKYGDRLLATIEDFLSKHPNPRRNSGGGGGGNEHSDAAKKRRGSTAISAASYGDYDFDERTGQQSKKRAAKTRTVSAHGPRCTDADLDGPEVVEVDGELRSVRKPVAYGNGRVLPKWAPL

SEQ ID NO: 66426 - protein, 259 aa, Zea Mays
MLLLGPNPQQDNGCPAPAPAPAPDEAKSEQLAAPSSNTKQGGESAYSKEDGSHNLNEGHDVSSKAAIGSKQPCMPGAGITNLDLILSQMSRMRNQIPSGGVTQPPIGAEPSDRWLKRLQLGVPDPDVLGSKTKRPKVGDSPPPPRQINRSFDVALPCNPGKQEEQSLNGGGKVQGRAPPIPEKSVNRWIGRWCQGGTPVFREGPGQGRQATKPAGRLSEELEGQFFPSTAAMAMMGRAMHKLRPCEQQQKGPFVVWKID

SEQ ID NO: 66427 - protein, 320 aa, Zea Mays
MRTGIEAAEYGAELQRIVRYLGVSNGNMQEGSLRCDVNVSVRPVGQSEFGTKVEIKNMNSFSAINRAIDYEISRQILLHKEGQADQIVQETRLWDESSQKTFTMRKKEGLADYRYFPEPDLPEVVITSDYINEISKSMPELPEAKRRRYENMGLSMQDVLFLANDDNIGHFFDSTLEHGADAKLAANWIMGDIAAYLKDEKVSIDEIKLTPLELSELIASIKNGTISGKIGKEILAELIAKGGTVKAVIEEKDLVQIADPAAIEAMVDKVIADNPKQLEQYRAGKTKLQGFFAGQVMKASKGKANPVLLNKILGEKLNAK

SEQ ID NO: 66428 - protein, 363 aa, Zea Mays
MLEFSLSKLFFRTANFTMKYMPYNLGEDCPVFDNLFEFCQIYAGGTLDAARRLNHKICDIAINWAGGLHHAKKCEASGFCYINDLVLGILELLKYHARVLYIDIDVHHGDGVEEAFYFTDRVMTVSFHKYGDLFFPGTGDIKDIGEREGKYYAINIPLKDGIDDTSFTRLFKTIIAKVVETYLPGAIVLQCGADSLARDRLGCFNLSIEGHAECVKFVKKFNIPLLVTGGGGYTKENVARCWAVETGVLLDTELPNEIPKNEYIEYFAPDYTLKVPNLNMDNLNSKTYLSSIKVQVMESLRYIQHAPGVQMQEVPPDFYIPDFDEDELDPDERVDQHTQDKQIHRDDEYYEGDNDNDHDDGTR

SEQ ID NO: 66429 - protein, 306 aa, Zea Mays
MSVSSHFEELRVNVSELTVEELRVPEYLQFKEQLMEEGFKVEAGRTYHRTVLEILDQLEKIWLTLMDEYDLYEVPGIYRLHGISLLLLRRYQIITRQIDGYCGSQKFEARCASRMIKGYLYMNFMARGSLENHLFRRTLPLPWSNRMKIALGAAKGLAFLHGGPKPVIYKDFKTLNVLLDVEYNAKLSDFGLAKAGHQGEKTHVSTRVVGTYGYVAPEYVMTGIRDKLLTSVATYSRNYVPCLSVACWFFTLFSELVVILVFTPYWIVNWLNIFVRRHKTKVPLQMFFFQVKLCFSFLHAVKVVRL

SEQ ID NO: 66430 - protein, 470 aa, Zea Mays
MEESDAAEGVAVQLIDGEGEFAAEGAERFMAAAGVAGCGLSYAVVSIMGPQSSGKSTLLNQLFGTNFREMDAFRGRSQTTKGIWIARCVGVEPCTVVLDLEGTDGRERGEDDTAFEKQSSLFALAISDIVLINMWCHDIGREQAANKPLLKTVFQTPLEHLEPVLREDIQKIWNSVAKPEAHKDTPINEFFNVQVTALSSFEEKEDQFREQVQQLRQRFSNSIAPGGLAGDRRGVVPASGFLFSSQQIWKVIRENKDLDLPAHKVMVATVRCDEIANEKFGCITSDTEWLDVESAVQSGPVPGFGKKLGNIVDVHLQEYDKEAVYFDEAVRKGKRQHLESRILNLVQPAFQKMLTHLRVKALEKFKTGLNSSLESGKGFAVSARDNTECSLKEFEQGCADAIIKQANWDCSKMLEKVRRDIEDHALSIRESKLSEMTRHAKVMYGKLKEILITSLAMHNFLLDLFAYLIL

SEQ ID NO: 66431 - protein, 89 aa, Zea Mays
MPNNICREGLRSDTSCDGTSQVIRPTYSCPCLTDIRHPADVPKSLDKLCIFPYLTRNVSPVLQTLQNIGDKEMRKQLHKLTFIKKVRLR

SEQ ID NO: 66432 - protein, 931 aa, Zea Mays
MKLWDWDDDWKCIQKFGREHTDSILQVAFSPNDSFASVSSDHTIKLWCLKSPTSECTLHGHSDKVNCLDFVTHDGQQYLISGSQDCTAKAWALKEKECVQTMDVFMSPVVSVISLPDTPYITTGSADGTIHLWSSANFRLERILSLGLCGPVWDLRLIGPTRIVIQPNNYEISVIMDIDTGSEASSSAPSNELIQVDPKELRFPVAQEVSSTLEIRNVTDHHVAFCMWSLNHTANYIPVPNIEVLSPQSMRQVVITRIARREPVPADPVDDIVYVKGTTVVQGTTSADVTYDMFDGTRTGQILQPAMELNVVLVADSEIIHKARLPWALDVHPTMPWIMMAQGDYQIRIWNYKTRIEKPIAIKGREVTSAKFIMHKQWILAGCSSGLVYVYRYEPEKKKSVEKIRVLQGHSNAINSLAVHSTKPCVLSASKDGKILIWDYENEWELMKTFDVKSPVQHVAFSPKDSNMFASAQDKTVKIWDWHSGNCKSTLSGHSDLVLCLDYFSQGDQLYLITGSRDKTAKIWDCKTRSCVRTLEGHTDVVNVACCHPDLLILITGSLNGSVRLWDLNRSTTFRYELIFDLGEVYAIASLKGTRIVIGHEIGLALVDIDLEGKKDGYVKSNVAIMDSKNDTDQNMKELSPTASSSEVQKVSSIIALETLYKMKSSESSIDVHPTETWMVITSDKYVHIWDYHTREVKQMMDTKGAKVRLAKFIARKQWVIAGATSGFIFVYDYDSKKEIIHVLCNHTEPIKSLAIHGTEPLVLSASVDGKILLWDYANDWHLIKTFDARSQRLVQVAFNPKDTNMFASAQGKTVKIWDRQHDECQYKLDGHSHQIECFDYFSGGDFDKLYIVTGSQDKTAKIWDCENAGCVQTLEGHAGPVRAVCYHQNLSLLITGCSDGSIHLWNSTTFRSRPCGRGFEYVRRRTTGLA

SEQ ID NO: 66433 - protein, 163 aa, Zea Mays
MPGFILRWSSPRPSCIRRITWFLAFPEEQHPIVLQIGGSNLENLAKATELANDYSYDEINLNCGCPSGKVAGHGCFGARLMFDPEFVGDAMSTIAANCDVPVSVKCRIGVDDRDSYEELCEFVDKVISKSPTRHFIIHARKALLSGLSPAENRKIPPLKLVHP

SEQ ID NO: 66434 - protein, 382 aa, Zea Mays
MASGADAAALVTSGADEWAAACPPLRRNLQLLAPDEVELAKMLLNEGQIHLFEHWPEPGIDDDKKRGFFDQVRRLNSSYPGGLVSYIKNAKKLLADSKAGKNPYDGFTPSVPSGEILNFGDDNFVSLEAAGIKEAHNAAFVLVAGGLGERLGYKGIKVALPRETTTGKCFIQHYIESILVLQEASCKTVDDGCQKKIPFVIMTSDDTNALTIKLLESNSYFGMEPSQVKLLKQEKVACLADNDARLALDPSDKYKIQTKPHGHGDVHSLLYSSGLLEQWKSEGRKWVLFFQDTNGLLFNAIPSALGVSATKGYNVNSLAVPRKAKEAIGGITKLTHVDGRTMVINVEYNQLDPLLRATGYPDGDTNSETGYSPYPGNINQVY

SEQ ID NO: 66435 - protein, 60 aa, Zea Mays
MVGRRCCDDARTMLVVRADATDGDGMGVGDSAAWGKGLRIRWRRDWRRRERRTRGEGQRI

SEQ ID NO: 66436 - protein, 131 aa, Zea Mays
MRPWKRVIDPSPDHLVLGKNTDYSELQNYASLYFTEISELLRRLPRVILLMLKTNDCLRAVSHALVGGSSLESFMIIGRVSSEAVLDAKRMNRRSFLDGLKIWLEEALLEARFFTLKLMLCVMQLRKLLPG

SEQ ID NO: 66437 - protein, 367 aa, Zea Mays
MAKPPNSIGRSSMPRSNEGLRLIFSAVIGIMLGYLFGISFPTVNITKLHFPSSIISYIEDRNSGITTQTLLNHAWASANNRKKNSSESNTDEIPKIYVPTNPKGAERLPPGIVVSETDLYPRRLWGDPSEDLTSEPRYLVTFTVGIGQKANIDAAVKKFSDKFTIMLFHYDGRTTEWDEFEWSKRAIHVSVRKQTKWWYAKRFLHPDVVARYDYIFIWDEDLGVEHFNAEKYIELVRKHGLEISQPGLQPDKGLTWQMTKRRGDQEVHKVTEERPGWCTDPHLPPCAAFVEIMATVFSRNAWRCVWHMIQNDLVHGWGLDFALRKCVEPAHEKIGVVDAQWIVHQAVPSLGNQGKSDNGRAPWEGVR

SEQ ID NO: 66438 - protein, 55 aa, Zea Mays
MRILALKLTNCMINSRCPLGQHRVNRQETVPRIDDHDKGPTQRDMYYEYRKSRAP

SEQ ID NO: 66439 - protein, 1061 aa, Zea Mays
MAFFAEDVHRLASASVDGRIFVWRIDEGPDEENKPQITGKIEIAIQIVGEAEAYHPRICWHSHKQEILFVGIGNCVLRIDTTKVGRGKDFTVEGPVKCHLEKLIDGVRLVGKHDGGVTDLSISQWMSTRLASGSKDGTVKIWDDRKQVPLSIFKPHDGQAVYSVAFLTAPERPNHINLITAGPVNREVKIWASTNEDGWLLPSDSETWKCTQTLELVSSLEPRVEEAFFNQVAVLHQASLILLANAKKNSIYAVHVEYGPDPASTRLDYIADFTVAMPILSLTGTHESQPDGEQVVQVYCVQTMAIQQYGLELSLCSPPTADSTGFGRDPAISRVYEAALEMAGTEPSIGTSCTDSYSVTALSKQPNVDQSAELDLKPSAPPLAYSEGDSSMPLPFTALAPKIEVPGSGPAPGTRDIEQSAFNYTNTTNRNMERDALKRQDTPMPIRKDILGKDEPRDGQSNVPMLPNPHMVFQVGGNATRLVTPSEIISGTLSSAENNDVSESGGENRDVSSGSSWVAEVEPKHIDESKPDQNLGLEAVKETQIVCENMAKTSMEQTVEMITKRSVTTDKHSVEESQSSSDRPASDQTCGTDENVLKKFVEMPEKIDYSASREQPSLFTKEKVLHPQTSGQPSPPVSAFNSTEPHEPLSSTYLPVSSFPEDAATQGMLQQLLDHQKDMEKQLSTVVPVSIAKEGKRLETLLGRTVEKSFKANIDAFWVRLQEENTKREKADRERMQQLCTLITSSINKDLPSNLEKSLKKEISSLGPVVARAITPVVEKSITSVVSDSVQKGVGDKVCNQLEKSITGKLEATLAKQIQMQFHTSGRQALQDALRTSFESLLVPAFEQACKTMFEQVDGAFQKGMSEHSNAIQQQVEAAHTPLALTLKETINSASSITQSFSSELLDGNRKLLALVTSGNAKAHNTSALQPINGPMGGPQEVEAPLDPMRELSRLISERKFDEAFTMALQRSDVSIVSWLCSQQLAIDIHNETSRKVQWMTDVAMAINPADQIIAVHVRPIFEQVYSQLAHQRTLPTTTASDGTSIRVIMHVINSVLLSYK

SEQ ID NO: 66440 - protein, 117 aa, Zea Mays
MYPIISILCNGLLNFFLFRDANGSTLLKGFRKPSPNNNLLECTQHAYDICTVDQGSLLKQLANKSISGGVAAVLAERDKEEMEMDIAKLEVGSMETSVICRSDGPLILAYLRKPRQT

SEQ ID NO: 66441 - protein, 332 aa, Zea Mays
MGDPPTLKRPKLEKADDDSTYCPRPSSNGAAPVRTPGATAAIGAAPGDDVEEEDDIAEEAVIALIAHRERDVERCKLKLLHYQSLLDTAEMKLEEAHSRLARFRDRKPPPTRSEPKPPTPPIQREHKPSPPPIQRDLKPSPQPLIQKAPSPAPQPSARPQLVIPGTSNRPTPRPEPMPGLKRAAAPSSSSSPAPPERSRKEEKKPKIKMEQKEHQNLIPSVGKSSATVLRFQGGNLVSSQHRRKLRCLELCPANDQLVVTSALDGLVTLWQVETRGPSLSFRGKTDFFSPKHRWPEDIAWHPDGETIFAVYTADNGDSQVSMTNLISGQGSR

SEQ ID NO: 66442 - protein, 2522 aa, Zea Mays
MNIVRGVADLLRKAPPPPPAPDAGAAPTASFSAGDFDDAPTPRVVFSGSLEEGALNALWKNYENALDKVEKEKSLQIFVLQFVETFRDWDPNPIEQLVDQELGNNETVVGCSCGHPSEVILILIQEISLITSTFTESGNSPVSPTNHYSGQQNNLGLSSQILQVLECLEILTRSLHNCRVFSYYGGVQKITSLLKAAVAQLKNLNCLLAAEDQSADEAVKNSRVMLNILVCIITIISNFMKLDITVGRIPHITDTTKHTPSCNHLAAVTSSSPDRTISDTLRHWQQKATVLVMEARCVNWLVELLHTVQRLNLKEQCIDLSLHFITLCILRSTVSGTRAQNHLRSIGGLEILLDGLGLPSSKFSVPRQSSISKNERDEILLLQIQYLQTLSEAVFGNVNNLQILFENGRVHKFANCICWPAFMIQMFHWQNDSTKASLTLDSVSGPTYSLDRTEWIDYSIKLSNAFCSFVLPSEDIGYCSDEIAVSQIVLSIPLAYLEQSVRWIIRILMTVFLCIRACTKETELPHHIKIFAKTLQYYVIRMFKRVLISTPALLPAFREEGVWDLLFSGNFFYFGSSIEDTCFHTVTDIQNGNVSSNRISIHSESLYRTDVKILQVEAISFLEFAATLHENTYNMPECSALLDALEHCISDPLLVSTLLKSFRVILQLATEHTLASFESLDVITRVLKAACRQAQELRNFSNFLCSNVSISQDSSQFKNIEGRTEDTLICTELALSLFMEYVTISIDGRILVLHNADCIDCLFDLFHEQNIREHVLEQVLALFRLPSSSAEDHTAKLQLCSKYLENLARANEKEKVNTELLIDLLVNMREIIMMDHMYYQNLFRDEGCFLHIISLLNGNFNKVTDERLVLNVLQTLTLLLEGNDASKNEDAVVLLLNILQKSSTSLQHYGLVILQQLLKQSITNRTSCFRAGLLSFLLDWFSVEERDDTVIAITELIQILGAHSICGKDIRKIFALLRCEKIGAKHKHTSLLLTSLSHMLKEKGPEAFFEFSGHDSGIDIKSPFLWPYNRGISFSCWLRVENFPDSVYLSKTSVCSVTTQAPTKAMEIPFYYSYNWEGFLRRKPVEVLCRWGASIIREVWASEGRSLFSVSSALDNADKNTFQATIMGGTKLCSRHLPQDIIYCVGGVSVFFPLFTQFFDAASDIEKCCHTSVVNDKLVAEVIELVATVLDGNVSNQQQMYLLSGLSILGFLLQSATPQLLTTKTLSALKYMFDILRNCSMSKVLLKDAISQIYLNPQIWVYASYEVQRDLYMFVINYFETDGRLLPLLCGLPWVIDIVCRYYWEKADSRHVVASKPLFHSVTKQVIGERPEVVEIRKLRLLLLSLAEMSLKIKVSPDDIRALVAFIERSQDIACISDVLDMIIRALSQGEVFSSFVGNVNYLGGCCIFINLLKREFEPVRLLGLQLLGKLLTGIPSEKKETKLFALPLGQSRPISENLTKEITAAPQFFLNTMSERLFKFPLSDNLCAALFSVLSGTSAQQVPQENSEPDPSRDRNCNILSLPPFSLPQILICIFRFMHSCKDSSARTRILNLLLGLLDSNSSNIEALMEHSWNSWLETSTKLEVFKDYKSVSKGDPDDVKADEISLVRNLYSLVLSYYLRFVRGGWHQLDDTANYFLLKTDQGQLSCSDLLRDILDDIAGSLLHKSVEDNIFLLQPCCDNVLHFLNLIQELLISQMGIRLLFLSPSISEESSHDNIWKEDIKSTVNDILNTESHGQFTRFSDVNEVSDDWWSFFDKVWSIIRNLNGKGPSKFIPKDPNVEVASLGQRARGLVESMNVPAAEKVAVVSGGGGIGTALGIKVNRFAEKATTSREEIIPRIFFHLVILYLCKAGLENASKCVIQFMSLLPILLISEDDQSKNKLHFLIWSLLIVRSQYGQLDDSARFHVFSHLILETIIYGKSMLVTNILERDDSVDVNNKETGFILSFIQKNRVLAAAANEVKHMKAVQADRLKKLQDLRMKLNECSATEIKLAQAIEDEIHLTITAVLSADDNRKTACQLAFREDQQIIRDKWIHISRALMDERGPWSANPFPNDVVTHWKLDKTEDRWRRRFKFKRNYKFDERLCQPSQSRNESTATLADQLYISAKITQKMKQFLVKGVRGITEDSSYEQFEDTNDASESSQSNPSESQNLNNAADTSDHHASAHYKKEPSSTNGDNDYTKVLCSVRCVFVTPKRKLAGQLDITRTVMHFSFEFLVEGTGGSSVFSKFKDKKDSDCKNELGGVDRLDGCRDSMIETNGVLMQNQSNKIKRHKRWNITKIKGVHWTRYLLQYTAMEIFFDDSTAPIFLNFSSQKDTKNAGTLLVSLRNEALFPKGSTKDKNNIISFVDRRVGLEMAENARERWKRREISNFEYLVILNTLAGRSYNDLTQYPIFPWVLADYTSEKLDFNKSSTFRDLSKPVGALDENRFKVFEDRYLSFCDPDIPSFYYGSHYSSMGIVLHYMLRLEPFTTLHLNFQGGKFDHADRLFQSIESAYINSLSNTRWGTYRRCCSPSMGKGIA

SEQ ID NO: 66443 - protein, 326 aa, Zea Mays
MPTINSSEQSPDRRSQDLEGKEYENIDNIQAENQVEFYGRNQHGGSDVYMRDRRTEEATGSLSNIDEYGHNSSVRYNGLGSLRSALPASGGKESLVLGYVRGASEVRSGRLIAQGPPAGSGPRSSEKILNVSGNTKTQKLRTHVTRDALAFDPQVPMEKVSGARKSIGQGPHAGSGPRPSERILNVSGNTNTQKLPTHVTRDDLAFDPQVPMEKVADARKSHVKIAHANDMSMTTDKSKDLIQSSSMLEAQKATSGAAGSNTTGQPEGGSDSRTVFVSNVHFGATKDALSRHFNKFGAILKTHIVTDGVTAQRILSSCTKNQQSRR

SEQ ID NO: 66444 - protein, 220 aa, Zea Mays
MMETIMVSAACGVMNSLLRKLATLLEKEYMLLKDVKHNITFLRNELASMNLLLFKLADIEDLDVQVKEWRNKIQELRTRVVEESDRRYRYKLDDSTFRPEMMEIDHRLKALYVDTNKLEGIDSPVEQIIQWLTGNGKHDQELNIMAIVGFGGLGKTTLAMQVYNKFKDKFDCTAFVSVSRGPNIKKVLMDLLKDVGAAIDTTDDEMRLINKLKGHLTKKR

SEQ ID NO: 66445 - protein, 807 aa, Zea Mays
MEGEAAAAEAVARIRLVRCPKCDKFLPELPAYSVYVCGGCGATLQAKKKNSAQSSDDADNGNVKYLEVLECIPQASARKHGASTTDKSETSKIADVHSKPVYGNHDRIQTGPSPSNLNTSIRDDGKEAKYRHIRYCENGEMGQSLRVRDMSPKSPINHISDNNRSEYHLKQRYSYSTKECPGERNLDGPSKVRGLEKDRAEILRMLDELRDQVQQSCNATNGASGIAPSTAAADSNSSHGTSDRLSQLRQVAPQLHQNGSHHSPSLNVGSPSVSRVYAPLPAQQDCVRYAEPISHARASSYPASLYPWRNFDNYFFGQHDPDPLLSCRHDGFYHQAACSCLHCCHQEFLPIQGNHIGFHDQRAPYLLNNYGAYPVDSPLLGQQRYSARVTNTTLQQNHMRVNVSKKAAQTCEPVAGGAPFTICCNCYEVLQIPRKQSLSGNEYKLRCGSCSHAIIVKLDGNRLNVSEFALCTRLSDGQENDMGTDGQTQDNRSIPAYHLSVGSPASQERDLHSNLSESENNHTPLGTDSEGTSLSRDLPAEDSAVSHVPNLPHHSHSGSSPTEHFGVGSRSTHSEPEKVILLTESSKQTSVRGICVTNKMQSPNNEFDVPEYTDDTLNDQQDTDHPRTTKASDSFLTNLIKRSFKINNGLRNRRARVYVNGFPISDHVVRKAEKLAGSICPGNYWYDYHAGFWGVMGHPCLGMIPPYIPEFNFPMPKNCAGGNTSIFVNGRELHQKDLDLLVTRGLSDSPGRSYVVENSGKVSDEVSGEELYGLGKLAPTVEKMGRGFGMRIPRFIKRQANLVQLDF

SEQ ID NO: 66446 - protein, 206 aa, Zea Mays
MLPDDCCHIVAEEISSPIAAHILDFYYGDGLGDDLFAAVTATSGPFPATDDDVSSSTATTPPICGYSEDTAAAGGATAYTPLTSFDTTLTALLEEEQHHGLDAGFLPQIDGLSEVAAYYPTATDEASIGQFDQMGLPETLDEQVPPPVQMSSSASALMPLATDYDECFMAAVAAGGFMGLDGAMYQQTGAVLPGSDGTISTGRLHV

SEQ ID NO: 66447 - protein, 99 aa, Zea Mays
MEPAMRHSLSRFPRESNPALMKNAVPQQVQKAGEVAEQRRVEHAGEQVLPEVEHLEDAAERGEADGHLALEVIGREAQRDQAPHAAEGGGGELAREAET

SEQ ID NO: 66448 - protein, 404 aa, Zea Mays
MEELLLKKKTINTGDSLEIHSQKVEKLKVLATSLANSSSKAEKRILDHRRQKEEALNFRAKKENEVIAVEKDLTAEISELEKQKDELEAQLKKVNISLNAAICRLKQTREERDQFHEANNQMIFTLQAKENDLSKSIDSCNMEASVVKTWVNFLEDTWQLQLSYNEQKETKTNDELERCTSSFLKLTKHHLSYFKEVLSPSIERIRTYVDNLAVLNSREESIEHEGDDEISVQTSPQKSLEEEYLETEKKIVIAFSIVDRMKKMFYSEQAANSRQDDAEVRTLFSEIEKLKEVFESVERPTLDIEVRKAKDPMKDKSGSNRSAKDKSESSHSPVQVPSSPKDVPVESPKSPVKPEQTMDPDSEFAKLELEFGKVNRDHEEIGGWDFDELEEELRADLSKSTNPK

SEQ ID NO: 66449 - protein, 74 aa, Zea Mays
MTSRARPHPRRRRPPRLRAPTDRSTCAISARSCVHDHAPCRPPPRSSPPPDAHSPTHGSAKQVHYFFELFACVD

SEQ ID NO: 66450 - protein, 75 aa, Zea Mays
MCKLNTKVVMWRLCCCNCQVDETDRCESHVKATTNKIDGVTKGLRDSATAKVEPHDDAPPIDVDVLSLDDLIKNC

SEQ ID NO: 66451 - protein, 431 aa, Zea Mays
MCKEGLQSLFPMEEIAIMGMWELLPHIYSIKRKIEDSANAAMLFQPHAVVTIDSKGFSFRLLKQLKCRSNQKVQSPLHIHYVSPSFWAWKGGESRLSKLHNFVDHMLCILPFEEEICRLNGLPATYVGHPLLDDAIGLNMGTELCSDKSKYQRSCEAFRLEHGLSPGATIITMLPGSRMQEVVRMLPIFLHTVQNLRHTFDELSLVIPVAPHRDVRTYIENVVQSEPFPVVLIPGGSLKERYNAFSASRAALCTSGTAVMELMLARLPCVVAYQAHFITECFIHLRKKINFISLPNILLNSLVVPEILFGACTAKNLAAKLSEVISNDQIRQMQIESAGQVFRVLYEPIKKRDTLLREEIDYSGLSSNFLSPSMIAALTVLYMDKHQNTACRNLVVESEAKKSLVLPTWSGFHACCSCTTGVTRQQATGYV

SEQ ID NO: 66452 - protein, 175 aa, Zea Mays
MCLGLTRRLLLDPAIHEEFTRLKNLVEEKEKKIKELQDNVAAVNFTPSSKLGKMLMAKCRTLQEENEEIGTMASEGKIHELGMKIAVLKSQNNELRNQFDVLYKHMDGVTNDVERSNELVSILQEELEAKDLELTRLKEVLAQKGATQDAPVETSDDAGNGQEADSDTLQVKAES

SEQ ID NO: 66453 - protein, 328 aa, Zea Mays
MPLAESPPWRRKATDFFSTSSVKLKQAGQSAGDNIVDVAGKVGSVVKSRWAVFQEARQQQQQQQRPPHETVQERIITAAASTGLLFRKGISETKEKVAVGKVKVEEAAKKTADKSKSILNNIERWQKGVASTDVFGVPIEATVQREQSDRAVPLVLVRCADYLVISGLNNEYLFKSEGDKKVLQQLVSLYNEDSGASLLEGVNPIDVGALVKCYLASIPEPLTTFSLYDELRAARVSIPDLRNILKKLPNVNYMTLEFVTALLLRVSRKSSLNKMDSRSLAVEFAPLIMWRQGDTGTDLRNHLKFTLKPPPKIVDTTSNAATWDLLGV

SEQ ID NO: 66454 - protein, 662 aa, Zea Mays
MAAAEDAEGDRVIEVVSAGALYHRGGDWERKYWSCSRGKDRYPYPVGYHAVRHFTGISYAMEIQQGPRGPIFLVTSTEGDTAIGQTPDIAWKNFQKKTGAKVKNWQRRKSFPQRIDGAELFGFKNASIQRLLRELIVDSTGAVELNEPCEVTSEAGAHLVCKDASDVSEAEDPSVCLGMESGTPKRSIEPSQVENTLAVHYPDMLTAVDKCNVSTHKNTNEGDTVGRALLQDVSDSRCTLPLLEEVPKNAQSTSLDDNLGESSLVSSQQVGLSSGSYLNSEKSDIELAEKEVAKSMMSILLPQAIPLLMKSYKRKKFKHKNRENSTVSVKTVSAYNPSDSCCRGVTVPTIVGEGTNGNSSEMCDHGGSHHDKVKNGFANEDCRNDDLVVKLDEMNDYVADSFEDDAQILGDNTTKSMGNHHHYSEYVLSRGPNEKSKLLNGKSEVFEYQASVHNGKRAPDVVYNHENGQYMLSDSLVACLEDEFGGEDSSHPANYNQFNGDVKQFEQQFKELTAVIKNGSSVPVDVSYHKNTDNGSINVCAQAFARNGPGVSRNEECLANILPAPVHSNAHNDAVTSGKHDVSSTLNLPPACEAKSTLLVMRDGQHHTEVPAIDQKENRFHSVVIIIPVTCRKMLYILPLSTKGRNSHFSRSEMIRSSTTVI

SEQ ID NO: 66455 - protein, 206 aa, Zea Mays
MPPLPRARAILLPVPPPLPRFQRHRRRPPARAHHPPPPSGHGRQRPRRRARRRHALLPLLPDPPHELLRAPLLPCVPLSLTLRAGSRHCALRFEAGNLRRRPLRGGLRRGRPHLPRLRGLRFGLRRGRLRQLRPRRRFRLPRRPRHRRHREGRRRALRRSVPRRHRQERAGCRRRRGGDLLRREGLRGREDLPGRTVDAADRRAGG

SEQ ID NO: 66456 - protein, 96 aa, Zea Mays
MPLPPAAREPLRGCSFPFFYFASVGLQFPAPPCVPGNGKLTLMIAGRLLSLAAISLSATRPHLPPNTVTPSAAHAPFLNGRSEEGDGKDPCREKSS

SEQ ID NO: 66457 - protein, 588 aa, Zea Mays
MIRFLRNSLFALGIGRNMLTMKRDLMVLFERGLAYVGTDYHSNILWDEYIKYEESLEAWSHLADIYTRVLEHPIQQLDRYFNCLKELASKHSLSEILTAEEASLYVVTSETTAQAPDGEAHPDDVDKLGQPEISSSTDAESLAKYVSMREEMYRKAKEYESKIIGFELAIRRPYFHVKPLDNPELENWHNYLDYIEKEEDINKVIKLYERCVIACASYSEFWIRYVQCMEDKRSLDLANNALARATHVFVKKQPEIHLFSARFKELNGDIFGARAEYQHLYSDLCPGFLEAIVKHSNMEHRLGDKELSCSVYEKVIAAEKGKEQSQLLPTLLIQYSRFLFLAIRDLEKAREILTVLHEQLNLTKPVLEAVIHLESIFPCEKRIEFLDSLVEKFVTPESSQGELASLVDKEEISSIFLEFLDLFGDAKSIRKASTRHTTLFSCKRSILPSKKRKADDAVVSDRDKFAKTGSVQSATGTDPNASNPPVWPATSETSGHQWGASYAQQAAYPAYGTYDYSHQMPQPAPQTAAYGAYPPTYSVQAYTQQSYTQPAAIPAAPVPAVVPAPTPASAYPQQPAAAPQPYYGTTYY

SEQ ID NO: 66458 - protein, 784 aa, Zea Mays
MAALDDKAMTDLETLEEEEVLRRLGTAEEAGLTDNEAARRLRLHGPNVVVLSHHEGSMLHGFLMALFSLWGWDHVFPKYNNMVRVILNSMSWVTVLTIVVSLAITSAGQRSCELAIIIFVVATCLIACFTAMLVLEYAKAPLEAKAHAPRAKVLRDGNWRDVHAANLVPGDIIFLKVGDIVPANARILRFQKIDTMTCWAKRSVDCAHGFLLYYAWTVSCGQGTAVVIATGRGIPRSTLRLYPQRYARPGQLKEGAMLTGCFCASLVLVGTFAEIVLRFLFQKQNYRGMPLDAHFMPLIGGIPMAMPTFFYLALALGSVRLCFLGIASRGTVALEDLASVDVILFNMTGTLTCNQPCFVRDKIEMFADSVNKDHAIVLAARASRSQHELYIEPIDAAILSLLDDPEQARLGVQVLEHHASFFVALKLMFQTTYIDEGNRFKCCVFKGDPAKVAHHCGSSKEVKEKISMIMDELALDGYQAIAVGHQVDSCWDFIALLPYTDDLRSDSADVVDSLIDLGLDIRVLTESPLSTTKQIFTISSTVHLDPAGLTPILIVMKFGVRVILHLWNFDLSNILAFMITACNYCTSFAMLFERVELNKSPDKWRVQKIITSGAAFGSYIVLTTAIFYRVATTANPFACKFKHISLMGSDEEIRSALFLQISTVNQAIALFVHSDGCCIIRWPGPFVTFAFVVSQTVATQKVVHGDLNFALTKGIGCVRAGLIWLYNLVLLLALVLVCRKWRHAKMTSEKLLTICLRSAILHIVLTWFLYVILDVRVQQPVSSR

SEQ ID NO: 66459 - protein, 700 aa, Zea Mays
MSTIATPPPPSAAQEKAASRNKRKYRAETPSTELGPFGLEYPLTTDCVGFEFMSPEKVAMAAAVAAAEGVSLDLLQNSCENCKDLHPTAEDLLECQRYVNWGDPNEMQLEEILLKSLDTTFDNSVSLITTMGYSEAAARAAIMRTAAQYDWRESLAGFGEAAVEVLKTEGDMLPREGASVEDMRKIEEAVLGSMVTLVTEAQPFNTPGDVMYCLLMSDMNVANACAMDYNSFSLPAVSAQVIAQPVAGNYEPGSGSNLSVSITNPQTGVTFRGKLTPVPPGSYGAIKADSSTAQASPNVSNTEPSVSDKTQCVIPNIEPKKHHVPICDHSEDQPFVAAATQSVKNDKSSPSKRGGSKRDSFHRQKLTNYDKSSRALGSKGSLRSGKQSSSASAVLERKCRSFSDSTTSNLKGSSRVAKGFAASISGSEVSVDLSFTGTLSPSPSFDAKVVSNSNSAPAASTDLSLALSSSDSLTPSLSHDSNTEVVDSSSKINFSYDEEQKVWIPQDKKDEIVLILVQRQKELQAHTRDWTDWAQQKVMQVAHRLAKEKDELQSLRKEKEEADRLQEERHHLEESTRKKLLEMESAISRANAQLEKAEASARRREVENAQLTLQMEAAKRHAAESATNISELVKKDENSRKRSQRWQSDRALLQEDLAAQKSRLSRVQEHLQHAKELKDQVQSLQNSRAGSVSSHLTNPG

SEQ ID NO: 66460 - protein, 499 aa, Zea Mays
MTDMNSDEILEVPDTPDRLQQSKYHVSSSIVGRDGTMAAANPSPQRKFRIRFKNNSVQGSSSQNNGCSILPAALDTDHIFKQAEAAQILELSKDYKAKFSLQKPDSTRISVDSEKRAGKHGFDQSRSISNNISCSVTGGRNPTFQVKDGEVGQQDAGHQSANFLDIGPGFPTIQVGKPGYRLCTRTTDKLKGVTGADVCPGSSSGEVKGDLITNKVIAGPTSPLRVFPRRHVGQKRLVRNGCISPSNIAKTDAKVNEKQEMCSLSEHLDHPHQPDAFDGGDVIDLTENSPIMTRQRSEVNNKLMSGHNMDTRAAKKLRTDRFGRTLVRQSKCHANNSSCSEVSLSGLNNNGKGIDCDILDSDQTGEANLRGVDLSTAGTYLNKNFSDISTEQGWRTTHNHTSKLPISFMGNITSSSGWESGSSTTRSNQNHGSAGGKHSSVSGANIIVPDKIGNKTIMLGRERRKQTSTSSHIGESSSAADEPRDLVRVDSLIELLILP

SEQ ID NO: 66461 - protein, 661 aa, Zea Mays
MDYDKSRRSNSKKRTHSNSDDGKRKRLNTRHDDTSMFSEPIETIYRILCPVKKIGSVLGRGGDIVKALREETKAKIRVADSIPGADERVIIIFNYQNEPEPTDEAAEEKNSDGLGNFKSHCFAQDALLKIHDKIVSDEIHDEVANDEKSESADDVTARILVQGNQVGCLLGKGGSIIQQLRSNTGAGIRVLPSENLPQCALKSDELVQISGAPSLVRKALYEISTRLHQHPRKENRPLEEIIDASTQRKRESPTLQHEYSMLPHLHSDHTPPIPLLDPYRSGPQYPVTETEEFSIRILCASELIGSVIGKSGANVRRVEQQTGARIKVQEIDKDASGERLIIISSNEIPAEPISPAIEALILLHDKVSAPSEKHHSSTRLVVPSSKVGCIIGEGGKVITDMRRRTGAEIRVYSKADKPKYLSFDDELVQVAGPPTIARGALTEIASRLRTRTLRDTSTANNPPPFAPFDDPPVDMPSRKLSLYGGPATDPPYGRPANDPLYGRPAIDPPFGRPTNDRPYGRTAVAPPFGRPANDPPYGRPTNDPPYGRPSGSIPYGRPNGSAPREPSDAYPVDYFSKREYPSGSPMFTSNAPSAAYERYAAPTRFPTREFPSAFSPGVDHMPHHSYRDHVPTDSYSSRGTQQLGITRGGNSDAYDYTEVHP

SEQ ID NO: 66462 - protein, 371 aa, Zea Mays
MVTFMDIVAYLKPKYVLMENVVDILKFADGYLGKYALSCLVAMKYQARLGMMVAGCYGLPQFRMRVFLWGALSSMVLPKYPLPTYDVVVRGGAPNAFSQCMVAYDETQRPSLKKALLLGDAFSDLPKVENHQPNDVMEYGGSPKTEFQRYIRLGRKDMLDWSFGEEAGPDEGKLLDHQPLRLNNDDYERVKQIPVKKGANFRDLKGVKVGANNVVEWDPEVERVYLSSGKPLVPDYAMSFIKGKSLKPFGRLWWDETVPTVVTRAEPHNQVILHPTQARVLTIRENARLQGFPDYYRLFGPIKEKYIQVGNAVAVPVARALGYCLGQAYLGESDGSQPLYQLPASFTSVGRTAVQANAVSVGTPAGEVVEQ

SEQ ID NO: 66463 - protein, 506 aa, Zea Mays
MQKRIYVGRGMHESQVSLFKYTFFWILLLCSKFSFSYFVQIQPLIKPTKDVMGVHNIHYEWHEFFPNASYNIGAIMSLWAPVLLVYLMDTQIWYAIFSTIFGGMTGALGRLGEGFEGFLDLCEKVFFLIQCPGAILPLQVSPNKRTEAAKFAQLWNEVICSFREEDLISDGAAENFLLHREMDLLVVPYSSDPSLKLMQWPLFLLASKIPIALDMAAQFRPRDSDLWKRICADEYMKCAVLECYESFKLVLNLLVVGENEKRIIGIIIKEIEGNIGKNTFLANFRMSALPVLCKKFVELVSTLKERDASKFDNVVLLLQDMLEVITRDMMVNEIRELAEFGHGNKDSVPRRQLFAGSGTKPAIVFPPPVSAQWEEQIKRLYLLLTVKESAMDVPTNLEARRRIAFFTNSLFMDMPRAPRVRKMLSFSVMTPYYSEETVYSKSDLDLENEDGVSIIFYLQKIFPDEWNNFMERNNCKRESEVWGNDENVLQLRHWASLRGQTLCRTG

SEQ ID NO: 66464 - protein, 480 aa, Zea Mays
MDDIVPVKTNTIVKPRPLQAASIPGLLGIFQNEWDALMLSNFALEQQLHTARQELSHALYQHDAACRVIARLKKERDDARALLAQAERQIPASVAGAAPAAVVSNGKRVIEDEIGPDGKKIRPGINPVMIDELTECNAMLSAQRKKRQVPPTLAPIDALERYTQISSHPLHKTNKPGILSMDIHPSKDIVATGGIDTNAVIFDRSSGQILCTLAGHSKKITTLKFIPRDQLFVTGSADKTVRIWQENENGNYNCVHTLKDHTDEVEAVTVHVTQKYFVSASKDNSWCFYDISTGSCLTQVGDASGQEGYTSASFHPDGLILGTGTTDAVVKIWDVKAQSNVAKFEGHVGPVTAMSFSENGYFLATAAHDGVKLWDLRKLRNFRTFSPYDLDTPTNTVEFDFSGNYLAIGGSDIRVYQVANVKAEWNLIKTLPDLSGTGKVTSVKFGVDAKYIAIGSMDRNLRIFGLPGDDQMEESNTAAE

SEQ ID NO: 66465 - protein, 319 aa, Zea Mays
MAGGGEGDRVGVGGAQQFVDRSKVRILLCDGDATSSREVLRLLCNCSYHVTCAKSPRQVINILNYEGGEIDIILAEVDLPVSKCFKMLKYIARNKDLRHIPIIMMSNRDEVSVVVKCLRLGAAEYLVKPLRTNELLNLWTHVWRRRRMLGLPEKNFFNDNFELVLSEPSDANTNSTTLLSDETDDRPKGNTNQETGTSKQLEYESNPSVAEPDQREKMEGVPGSALDASKKSSPRRAFSRPIKTNLRVAESSAFLAYVKPSTPATSSFDSELQRGGSRLDSLDNQGNCSSATDRSDTGTDVNIRSKEAFEMPAQYPMGW

SEQ ID NO: 66466 - protein, 544 aa, Zea Mays
MEGNQILVQSEQSLIPGVQTLVIGQEFADVDTCRRAVKDMAIALHYELRVVKSDRSRFIAKCSKEGCPWRVHIAKCPGVPTFTVRTLHGDHKCEGVLNLHHQQATVGWVARSVEARLRDNPQIKPKEILQDIREQHGVAVSYMQAWRGKERSMAAVNGTLEDGYRLLPAYCEQIVKTNPGSVATYGGIGPGNAFQRLFVSFHASIYGFLNGCRPLLEIDKADLKGKYLGTLLCASAIDADHMMFPLAFGVVDSESDDNWNWFISELRKMLGVNTDKMPVLTILSERKRQVVKAVGSNFPTAFHGFCLRYVSESFLDEFKNTKLLNLFWSAVYALTASEFDAKAIEHIRHQLTCWFAERQNLAQSYNSVLVPSAEKLVSEAIHDSQCYQVLRANKVEFEIVSSERTNIVDTEARSCSCRRWQIYGIPCAHATAALLSCGEDPRFYAHDCFSVMKYRETYSQPIHPIPDRSHWSNSSPGLQGVASKADVMMLSPPNIRRPPGRPKMKILKIESMKRPKRIVQCGRCHLVGHSQKKCSLRSCDSYPH

SEQ ID NO: 66467 - protein, 445 aa, Zea Mays
MASEIEVLEDTTTSSTSLVAAASTAPSAAEGAGAPAENESLKNDVYTAAAYGDLEKLQRLVEGEGRPVTEPDGGGYYALQWAALNNRVAAAQYILEHGADTNAVDHTGQTALHWSAVRGHIQVAELLLKEGAKMDAADLYGYQATHVAAQYGQTAFIYRIVAKWNADPDIPDNDGRSPLHWAAYKGFADSIRLLLFLDAYRGRQDKEGCTPLHWAAIRGNLEACTVLVQVGKKDDLMVKDKTGLTPAQLAADKNHRQIAFFLDNARRVHDRGCGANTRFGKLSKLGLAPFLWCTIIGMLITYVHSVILGQYVMTMTAPFGMFAWSGVFLATAGLVMFYKCSRKDPGYISINTRGSQNQRDDEPLLKMELENPALLFGNWSQLCITCKIVRPVRSKHCSTCDRCVEQFDHHCPWVSNCIGKCVLSSDLFLNCNCRRTNGNSSCSSP

SEQ ID NO: 66468 - protein, 154 aa, Zea Mays
MDIGFRICASIISSCQLGRRHVYFHSCAPILASSIVSFWCTADFVCVKCIRLSQVGDFRLCSLQPRRRRRRRSVHNGCLLCGRIDATTHYGYLELAFKQMAETADASNALDHRLHYLRLTGNACAARALVWWVWENSNAHAANIHCSNHHGARL

SEQ ID NO: 66469 - protein, 504 aa, Zea Mays
MPSSPIPAPCCTALVRAYRTDKTKRLDAMNRVIYEVFPEPNRQLLQRILKMMQIVGSHKAVNRMSSSALAACMAPLLLRPLLLGECEIDSEFSMAGDGSFQLLQAAAAANHAQAIVIIMLEEYDQIFDDIEDGSYSSDAYTESDIDKEYSTDNDIPEDYDGSSGSGEDVEEDLNDDTEHSYGMKVECDSNIRIDNANDKARKGLPTEEDGCSSDNDKAHITKLENKKTHLQSKLTEEEKENTVLQANLEKRKEALHKRRVALEKEVENLRDQLLKERSLRASLESGLMNMRRGQVSFPSTIDTKTKADLEEVAAVEADIMNLKQKVSDLRGQLNNQVQLSSTSLCESCNNKRSINADKLVEGEQNAALSPQIASVEAPPIVGSYSVPDMFWATNQMVQKMLYSKGEIAKDGQDGSLTSRWNFAQRPHSNSPVMSRVQGSDAYSSTKTEESGGAPSSALAKLTTRLNFLKERRALLASEMQNLDLGRSQAQRHTAPPKAETPTEK

SEQ ID NO: 66470 - protein, 296 aa, Zea Mays
MLTTFFICSMLHRMPNKPLSALTLQDRDIEIQIEVHRKWEFRGAIDNGPILHIDMILTDCIGNAIHCQIPSFPAAKRGDEFQVGKIYKMSRFPVARAKSSYKPVDGDLMFLTSYDKIDPNEPNARNFHGEVLLSGGAAYHWYFNPSIEEATAFYNKIESEKINIELPSLDGQEITPPQLPQREHHDLKYILPLNPHDVPDEGYECTVTITSIPEGKTWYYIACNTCPNKPSIDPIIRQCSTCGSTKYCFRYKLTFKASDGTAEAEMFAFDTVARTIIGKPCPMVVASFSRCISYPT

SEQ ID NO: 66471 - protein, 731 aa, Zea Mays
MCMSSLIAPTRPRRLSFENSKRLEEASTDYMDAERDIKPFVFPTVPTTIQRNFHGPGARQPTARPLERCGTRVLPQTHRPCSAPRLSRKFWGAGDYDAVAGRSAPQPPSLQNRMCVHPEFLHSNATSHKWPFGVCLTFFPIAIAVAELLDNAVDEIETGGATTILLDKLIDKRNGSPALLIQDDGGGMDPDSLRRCMSFGFSEKQSGSSIGQYGNGFKTSTMRLGADAIVFSRCCTRSSGPTQSIGLLSYTFLVETGHTNVVVPMRLERHGSKQFFSNLSALLKWSPFATEEELMQNFCDIGPHGTKIIVFNLWSNDDGNLELDFDTNPEDIMISGAPNPEQISNSVRRANENHLANRLRYSLRVYASVLYLQLPDYFRIMLRGREVERHHIASDLIYPERISYRPQSCGIIREAEVLTTIGFLKGAPTISVHGFNIYHKNRLILPFHRVLSTASSKGRSVSGVLEVDFIKPTHDKQDFEKSQLFQRLMNRLKEMTNEYWDLYSNKIGYVKVPRVRAAPTPAPPVMLAIENGPAEPSERSAPAPTQPLRWQHGNSSCVNAVPIAMAPPAFHPAPVKTETDAPGAPTGYAYSYSPSWPSVQAMQIEKIKEEPSMAAPGTDWVETRKRTNDDGATTVALFKRRKAPQELAGSGSRSATDQVSRYVGEGELNEFCFLKMENRMLRGECSEFEMAEKELRVKEQNLRLEIEMAQEQFKRLLGEYVSFSSMPTRKP

SEQ ID NO: 66472 - protein, 736 aa, Zea Mays
MASISEDSGEETPLQVRLNGVATFIGMVGLSVALAVLVVLLARYFTGHTYNPDGSVQYVKGNMGVGQTIRGIVKIFTVAVTIVVVAVPEGLPLAVTLTLAFSMRKMMKDKALVRRLSACETMGSATTICSDKTGTLTLNQMTVVEAYFGGKKMDSPDNAQMLSADVTSLIVEGIAQNTSGSIFEPEGGQEPEVTGSPTEKAILSWGLKLGMKFSETRSKSSILHVFPFNSEKKRGGVAVYLAGSEVHIHWKGAAEIILDSCTSWVDTGGSKHSMTPEKVAEFKKFIEDMAAASLRCVAFAYRTHEMDDVPDEDRREEWQLPEDNLIMLGIVGIKDPCRPGVRDSVRLCQAAGIKVRMVTGDNLQTARAIALECGILDDPNVSEPVIIEGKTFRALSDLEREDAAEKISVMGRSSPNDKLLLVKALRARGHVVAVTGDGTNDAPALHEADIGLSMGIQGTEVAKESSDIIILDDNFASVVRVVRWGRSVYANIQKFIQFQLTVNVAALIINVVAAVSSGNVPLNAVQLLWVNLIMDTLGALALATEPPTNHLMERPPVGRREPLVTNIMWRNLIIMATFQVSVLLSLNFKGISLLQLKNDDPAHADKVKNTFIFNTFVLCQVFNEFNSRKPDELNIFKGISGNHLFIGIIVITVILQALIVEFLGKFASTVRLSWQLWLVSIGLAFFSWPLAFVGKLIPIPKRPLGEFFACCCNCKGSKQGPDDATSNGKEDNKLEP

SEQ ID NO: 66473 - protein, 167 aa, Zea Mays
MLLQKKMTLTFGTWWVKNCPRLRRRSYRNMVLWLPARSYALWWNRRRGLRMHSRPREGKIIGTLSKNVGFPKLEANISGYRRQHIIGSLFYSNFKVKFLLLGFFYFCDETKFSDAGLFLWSMLLSKTLRMQQDLEDKKNETIIEGLENKIKDYEASLEKKDFLLQAT

SEQ ID NO: 66474 - protein, 1030 aa, Zea Mays
MGHKHVVSHVKISKSNIRSLVATYDDQSDTYSFDIFQQTDSKVSCEGMVLLASLLCSCIRSVKKPELRRASLILLKFSSTYIDDDSRLQLVVPYVIAMLSDPSAIVRCAALETLCDVLCLVQDFPISDAVIFPEYILPMLSLLPDDTEESVRVCYASNIHKLALTAYRFLLRSRSIADIRPLDESVVAHRSQSADSPAKRQDNFFRQLAELRKSIYEIVQDLVMGQKQTPNTRRALLQDIGYLCYFFGHKQSNDFLLPILPAFLNDHDEQLRAVFFGQIVYVCYFIGARSVEEYLLPYLEQALSDDMEAVLVNALDCLTMMCRSGYLRKRVIVGLLVKILPLLRYPINWVKQSAVRFVAACSESLGSVDTYVYLSPHLRQFLHMEPPSLASETALLSCLKPPLPKSIFYEGLEHAQDIGDILLKSSGKKEQIVHGGRYPGTAQSGSLANLEDILRPKGPNISSSMSLYVKNSVSFEKSLYSGFALHASAANSSFYDGLSKGIPSYSFCTDNKRGLGETHMVPDSSVYKASIRLPWLEPNRPAMQTRDDHFSSTRQDFSINDSMKSNSSLQGDIIPNSDTGGLPFSRSAVNLETGWKPRGILVAHLQEHRSSVNDIAVSNDNTFFVTASDDSSIKIWDTRKLEKDIAFRSRLTYSMGNSRALCTTMVHGTSQVIVGASDGTLHLFSVDCARSVGTVVERYAGIVDVKRNEIKEDAILSVVNCSTDSFSPTVLFSTEHCGIHKWDTRTNSESWSFKSSPEEGYISALVVGPCGNWFISGSSRGVLTLWDNRFLVPVKSWNYSTLSPIEKLCLLIPPPSSISSAGRPLVFVAAGCNEVSLWNAENGNCHQMFRTASTDNEAVMSKAPSRPVNKPVIKDIRRAGNYKYRIDELNDPPVRHPGIRSLLPLPGGDLLTGGTDLKIRYWDQARPEQSFCIAGPSAKEVRSAKGDILEKAVGNDESYDIRSSFGIQVVQEMYKQSSSVSGLTPKTQLAVAAADSAGCHRDAILALASFNLSSQRLVSGSRDGAVKVWK

SEQ ID NO: 66475 - protein, 801 aa, Zea Mays
MIFISFFAGLILCLPPLLLPKPAIFISAFNWHSKFKIACCRPSAAQMIDDEVNFGNIFDASEEVQVTAKFGPKQRPKTRKTALSSRSAAPNPTEETGDRKVGTFSQVNSSKELTSQERTSLMCPSTESVDIIAGSHSILDTPLEDALTVPQGSLSGASAADRTSQYGEHNDDPSKLATHQENLVVSDINVPPNSSCSKAIDDIVEFGDMCDVQIEEERVTKFQPKVQTKLLKEIAKSRKTNQKVETSTVDVVTQNGKGNNIQTRLHGDPVQDPKSHESVQIPDSEGLLATDNSKGCNLANLNNLLEESVQEETIAKFRSDLQPNLGKASSQVAAIKINVVAVAPIVGVCDSNNDMYKEPKDQETITGPVAWSPQAVHADVDLDNHNEPINPPIDGTQSMFGEVPGREKGKSKSVSFALSDVSGIASPIDTNSEMGNIGDSCSDKLTDENLSNSSRHIAEKHSITKDQYSNEQDHEREPLDHAVQQQPKSDVGERASSMKRRCRKKVQKVGTPNHTVDDYFGEDCVEPSLAEEDNDTGDHYTTGNKHKARKKSRGGVEESQQQKAQKNKSKVSSRGRKRTLKDESTEKPEKKLTHRIRQRIPKEVKALLETPREQIKPMKLCASHLRLLQEARERVDPKGIPSGPSSNTRNFQLDDMDDLGYRDEEARFFDNDITEEHVQNATKLNYHSYMNKPARGKWSKSDTDLFYEGLRQFGSDFAMIQQLFPDKTRHQVRQKFKSEERKNPLLVHDAIVHRSGDSLYFKKVIKQLNIEDVVLPDIKSTQNKMVHQVKEALEMRMYWMI

SEQ ID NO: 66476 - protein, 51 aa, Zea Mays
MMRAGEMSRSIGRGILAWTDGHIRRVAKYPYRLVFLILQGRDLSRRRLAMA

SEQ ID NO: 66477 - protein, 220 aa, Zea Mays
MAGSAAYSASATTVVAMAKGNGNSKGVRGGGSAGTNKVTRPPRITSNVKQNLRILKFWKEFERRQTSGPQPATRYRKKKVIKEVLPDDTDFYEDPSSTLHLTNEGLEIASPVILVDGYNVCGYWGKLKKDFMNGRQEIARQTLIDELVSFSAVREVKVVVVFDAANSGLSTHKETYKGVDVVYSADLSADSWIEKEVHIGIAHQKHWLKLWWQMAAQKCG

SEQ ID NO: 66478 - protein, 256 aa, Zea Mays
MGSRVLHLDVPANSEAYLMRNVPGSVSSPPMNGEKGLFRNQNAGFTALASPVRREIGNRSSTRSFCVDDNDLEDGKASKERESSAQSLRLPKIQNQALLSGLAYCISSCSMILVNKFVLSSYGFSAPVFLMLYQNIVSVTIVSTLSLSGAVPTEPLTWNLIKVWLPVNIIFVGMLITSMFSLKYINVAMLTILKNVANVLTASGETYFFKKQHDNLCSCGRNNGSVIPCCWIYLADLKLCSDGGIFAYIATCNGQC

SEQ ID NO: 66479 - protein, 232 aa, Zea Mays
MHRGLHTCLLEHKVNNAGFVGLEYIQDRIDGTSTTSEEFCGMDMDKRLELLLKWCLRETCDAGKECMRINYHGTKQVTRALLPLLLASDSGRIVNVSSVLGQLRFFGSEALKRELDDVASLTEERLDEVAGAFVADLEAGAVEARGWWPAGFSPAYMVSKAALNAYSRVLARRHPALRVNCVHPGFVRTDMTVNFGMLTPEEGGSRVVAVALLPDGGPTGAYFQERQQAPFV

SEQ ID NO: 66480 - protein, 344 aa, Zea Mays
MMQDLGFQWSSCGSFVDTSSSSPMPPPLVNGQQHDGHNKIKEWDRPLTANNSSRSSCASTAMACRDVVLDGGGGGGLPAMAAVAADLDDGTVLPASVNVPRTTTTRQRPFPAAPPPLPGDAFEILASSRLCKTLLLSQASSSVLLHNGTTMPLLRSEHVPYGPPAPAHPQGPSIGNYKQCMQMGASCGGRAQHEAACQSMAAAAARPALPVVPSSKKPRVEQRSSTIVPSFKVRKEKLGDRIAALQQLVSPFGKTDTASVLMEAIGYIKFLQDQVETLSRPYLKSSRSKKPRPTPRGSSNASAGELEETRPDLRSRGLCLVPLSCTSYVTNENGVWVPPNFRAN

SEQ ID NO: 66481 - protein, 518 aa, Zea Mays
MRFDLDGLPVHFPYAAIYPEQHAYMGELKRALDARGHALLEMPTGTGKTAALISLITSYSLANPARPLRLIYCTRTVHEMEKTLAELRLLFAHLPPAASRSLLALGLSSRKNLCIHPQASAAAARDSVDTACRRLTASWVREKASSDPDSTPLCEFYETFDRAAAAGDLASFMPPGVYTLADLRALGRERRVCPYFLARQMVKYANVVVYSYQYLLDPKVASIVSREMQKECVVVFDEAHNIDNVCIEALSVSIRKQTLEGAERNLRRISQEIDRFKATDANRLRAEYNRLVDGLAQRGNLPISDAWLANPSLPDDILKEAVPGNIRRAEHFLAVLRRLVRFLDGRLETENVENEMPVSFVASIHSQAGIDQKMLRFCYDRLHSLMMTLEITDTDEFMHIQTICDFATLIGTYTRGFSIIIEPYDDRMPDIRDPVIQLSCHDASLAIRPVFDRFETVVITSGTLSPIDLYPRLLNFNPVISRSFTMSLTRDCICPMVLTRGRYELVPRELHISKSTVL

SEQ ID NO: 66482 - protein, 615 aa, Zea Mays
MGFRGEALASMTYVGHVTVTTITEGQLHGYRVCYKDGVMENEPKPCAAVKGTQIMVENLFYNMVARRKTLQNSNDDYPKIVDFISRFAVHHINVNFSCRKHGANRADVHSSSTSSRLDTIRNVYGASVVRDLIEIEVSDEDAGDAVFKMDGYISNANYVAKKIMMILFINDRLVECTALKRAIEFVYSATLPQASKPFIYMSINLPSEHVDVNIHPTKKEVSLLNQERVIETIKNTIEEKLRNCNTTRIFQTQAVNSALTQVYTQKDKGTEVKMAPGVKSQKAPVSQMVRTDPRNPSGSLHAYWHGQSSKLENKYDLVSVRNVVRSRRNPKDAGDLSSRHELLMEIDSHCHPGLLEVIKNCTYVGLADEVSALIQYNTHLYLVNVVNVSKELMYQQALCRFGNFNAIQLSEPAPLQELLLMALKDDESIGDENDEEKLEIAEANSKILKENAEMINEYFSIHVDHDGNLTRLPVVLDQYTPDMDRLPEFVLTMGNDVTWDDEKECFRTAAAAIGNFYALHPPILPNPSGSGVQVYKKNKACMASGEHVDSTDEDDIDHELLAEAETAWSQREWTIQHVLFPSMRLFLKPPKSMATDGTFVQIASLEKLYRIFERC

SEQ ID NO: 66483 - protein, 202 aa, Zea Mays
MAPTWMMPRQTAHSVKPAPLPQCLTSRLYMNVGTAAATALSGSSSSGSAEPPEELVARTSAVGCCGRRCARCLHSATRAKEAATDAVTEQKKRRLSGDIANCMAPNSDGDGSLAVWLRMQAGTLPQVPLLVLGFYSSFLELKWSLLMIAVGVSEGYEALTNTFAVVSIATTVFLSLVWKTLPRVCIRPSTWQVCCRSGAFSG

SEQ ID NO: 66484 - protein, 57 aa, Zea Mays
MRILVDADSHGAQHTHMNVHLFLSYSYRTTRSKRNRRTNGNLVPCFLIQRMEAKSVA

SEQ ID NO: 66485 - protein, 396 aa, Zea Mays
MQGKAQLSDSNRRIMELDAPPRRVYQAWKGSNLFFLGGRLIFGPDVRSLVLTVCLIVVPVIFFAATVCPQLGHEFHSQIGGWVASVAVIFTAYILIVLLITSGRDPGIVPRNTHPPEPEDIDESSNLPDCPGGQQGSTGLPPTRDVLVNGVSVKVKYCHTCMLYRPPRCSHCSICNNCVERFDHHCPWVGQCIGKRNYRFFFMFVSSTTVLCIYVFAFCWVNLRRIMDTHQCKIGGLTSFHIYLISTNQTTYENFRYRYDRRTNPYNLGVGQNFIDVLFSRIPSSKHDFRAKVKADSSTFASSLSMGRVLSPPKTSVDLEMGMKRQAVAAEDFEDLHSQIGSAMGLERCGTEPPHFVGRKGCSEMSPDIEAFAEEFGMEGGLSERKKIERRTNDDS

SEQ ID NO: 66486 - protein, 667 aa, Zea Mays
MSARIKEMVRVATARLGGEQVGAGGVSSSGIARRESTARLGGGGTSLRRQPQPMAPSVRTVCCNDREANAPVGYKGNSVSTTKYSILTFLPKGLFEQFRRVANLYFLMISILSTTPISPVHPVTNVVPLSLVLLVSLIKEAFEDWKRFQNDMSINNAHVDVLQGQCWESTPWKRLQVGDIVRTANLDGETNLKIRKALEKTWDYVIPEKASEFKGEVQCEQPNNSLYTFTGNLIMDKQTIPLSPNQLLLRGCSLRNTEYIVGVVIFTGHETKVMMNSMNVPSKRSTLEKKLDKLILALFATLFTMCVIGAIGSGIFINEKYFYLGLRGHVEDQFNPKNRFVVTILTMFTLITLYSTIIPISLYVSIECTQFINNDLHMYHAESNTPALARTSNLNEELGQVEYIFSDKTGTLTRNLMEFFKCSIGGEMYGTGITEIEKGGAERAGIRIDDDEGKRSANAVHEKGFNFDDARIMRGAWRNEPNPEACKEFFRCLAICHTVLPEGEETPEKISYQAASPDEAALVSAAKNFGFFFYRRTPTTVMVRESHVERMGSIQDVPYEILNVLEFNSTRKRQSVVCRFTNGRLVLYCKGADNVVYERLADGNHDMKKISREHLEQFGSAGLRTLCLAYRDLSREQYESWNEKFVQAKSSLRDRDKKLDEVISIKL

SEQ ID NO: 66487 - protein, 83 aa, Zea Mays
MGTELICFKNFSRRVQINLSGIKIIRVSRASEFVFVRAMNFKYHRTHQFSERRCSEHHENFERAWIDRNKNDVALATNEADAI

SEQ ID NO: 66488 - protein, 137 aa, Zea Mays
MAELPEKKCKRCGLYEEDTITPDDVFDEWEMCSSDFKGGKYTRFKEGQFNATFLCPNCTASTGHGNREPSEDLETKKTSVVVIIIVSVLASVLLTIALFGGYKYWQKKKREQDQARFLKLFEEGDDLEDELGLTNEL

SEQ ID NO: 66489 - protein, 662 aa, Zea Mays
MQGQRNSMEHFADVFGFDVASSSGNPVMDQQSYWNNVLGSVESHNLQGYQMAHSDAAMPYGNEPQQDGTFLGFWESGEASSSASALNYGSSNNVKTEHLNIGGGGGLRIGESRLVADNGISLDVDINLNANVNDLCGQSSNVNCASQGPEQYCGSDRNAINSQPTDLGLHPFRTFLLDAQQAESFTLNPSENPLGDFSSMQESIEQRPGGSLDGRRLACKRKNIEGANGQSSAGASTSFPHRNDNAFHNIASSSYNPAPIRNSSSPKCLPVPSSIEDQLPRYGTNVGLSAGTYDLHGGVNNAVNSQRSFRARTTTSQQVAPCSVWPSSNAIRLSNSWNHQPPHFQSAFDDPQEVIPVVSSLNLQYQHPMNVPGVPQAANRFTDHGASSSRAGSLENRIIGSEEVPRRYAAPTNYSDLVPPPAVDLRRLVPEPFNWSSDVRGTAISGSIIPPVSRTNNSSTVNPPAGFNHQNLTRRHPRNLSEIGRLSGALRGHQPPRLRSGFLLERQGDGVWGVPLSTRGREGRRLMEIRNALEMIQRGENVRLESIFYGGLDIHDRHRDMRLDIDNMSYEELLALEERIGNVSTGLSEEAVIKLLKQRKFSSWRLKASLDPEPCCICQEEYVDGDDLGRLDCGHDFHAGCIKQWLVVKNVCPICKNTALKA

SEQ ID NO: 66490 - protein, 189 aa, Zea Mays
MEDAGREGGTAAENGTEGEGYVLVKAAPEGEGDPTAAAAGGDREDLAASAPAMAMAVAAADEAAAPAKKGGSGATKARLQNGRVPAGTSAAAAAAGPRVKKPGVLSQSASFPARGAVAVAAKKAAAAVATPKQAKGAVPIGSETAAGRAVEKKASLARTPVARRPMWMRLPQMTQLLLSKSQMKIRTNH

SEQ ID NO: 66491 - protein, 140 aa, Zea Mays
MDQWGSETRPDNLFRSSYGYDPPAVRCHTAAELVTTQSVELVVRLFRSWSVVLFRVLGKMDAEAARRKQVAPPQEKRKRGRLELRRIQDRTSRQVRFSKRRSGLFKKAHELSVLCDAEVAMVVFSPAGRLYHYASLGTSF

SEQ ID NO: 66492 - protein, 556 aa, Zea Mays
MYLTSCSRLAQPSKSSVALPESGESMYAAARVEVEADRKKEKVDETERMAREKKNTHEKEQIRKVVMGKRKRNEDELGMEEKQMIAEKEKEEKVKKGNGGGILTTKLFSELYISELTAKAIREMNYSHLTEIQARSIPHLMLGNDVLGSAKTGSGKTLAFLIPAIELLHKASFMPRNGTGVIVVCPTRELAMQTHNVAKELMKYHSQTLGYVIGGTNMRNDANQLLKGINLLVATPGRLLDHLRNTRSFNYKRLQCLIIDEADRILEQNFEEDMKQIFKRLPQDRQTVLFSATQNQKVVEFANFTFGQNEERQKKLVYVGVDDSKLKPTVEGLQQGYCVIPSEKRFLVLYAFLRRMQLRKEDLKVMVFFSSCSSVKFHAEFLNFLGIGCYDIHGQQKQQKRTSTFFQFLKEKNGILLCTNVAARGLDIPDVDYIVQFDPPDDPKDYIHRVGRTARGDKGKGSALLFLLPEELKLLIYLQAAKISLTEYVFSEKHVPKSQSQLEDVVGGNYFLNQSAKEAYRSYLLSYNSHSMKDIFDVHQLDLKLLHPSVSRTLLK

SEQ ID NO: 66493 - protein, 268 aa, Zea Mays
MLMSAGLSVPDTVFGHGFLTKDGMKMGKSLGNTLEPKDLVERFGADAVRYFFLREVEFGNDGDYSEERFINIVNAHLANTIGNLLNRTLGLLKKNCKSVLAFDSIAAADGGLFRNKIENLVDKAKHQYENLLLSSACETVLEIGDLGNLYIDEQAPWSCFKQGGESAEKAAKDLVLILETMRIIAITLSPITPSLSLRIYTQLGFTEDQFRVLRWEDTKWGGLKAGQVMSEPKPVFARIETEVEEEAQTSSKAAKGGKKARRKGLVEA

SEQ ID NO: 66494 - protein, 1203 aa, Zea Mays
MKSSPEEHILKSLASRNSGTGKMGLLSRYGKITGHMNKPAYSNDLSVEGGGHTNVEKLVNRTDETYYRKSVDVHETFTKNSALLQNSAVVNLGPAKNHPVHAFDLNPLTTPSGSPHFEASMGRHYNGNHLAHSHGIHLEKNFDASFCNPMPRFTGVMNHDSRACRPNFSNKTFQDTSTMIEFQKPQTHRPPINQNPSPKQATKISKSLSEHNEPSISTGNKKQPLEVVNGMKRSEGDELTDDTSKNSFISLFLSHLERNNTPEPIDDILNSNEHYLPKALDVACGSDHPESATRQIETRVPNDKHSKLASAIVHTKRRSEGISLSVASSGYNPQDASHANSQEHLIHGDSLSHLLPSQPNTGISKISARVSCHANCMSCIHVGNKSHQVAHGEIGVPCFYDKMARGHGTFERVDDCTHRSLRAFTKISCDNGKSCCSSRELLPSFCQNDQPTLGKSICGCCCKIQEDASKLGFIPGHMCRTHFSSDVGPVLANKPTIEGLDEFCACSCSTFTQRSSLCSREYVLQSSCDSCPINGLHCRSCMGHAADSLTKHSLFDPLNTKERGSCCNGRCCYSVVPKCLSSCDFTKHCDVIIDQIGHAAPKDNHQLQMPTRCCTLGENEKLICQCLSNKIAVRNLPQTSHCKDVSEKVMNQPSIAITERLENVSEPSVADDSSSKAVAEKKDAYRDSAVSKGQPNFGFSSGSSSIIVTKFQKSPEFNNVSSTAKHSKHKNLCDEGSRIEKSSASSYVPTSTGCEEPLNSSAKSELGPSRVKRKCNQISEGRRLEETDNEEHCSELLKKTRTLRCSVKGSESDDCTRASSQSSQKGVYQPQNEVNSFSCRVLRTKRKHPIMHLNKHVKQLHRQTKFFEGDEQPDAKGNFLGGLDSYDRKRQVEDMSTLDKTRHHQEGSRAFVRKLPKYVSLNCIVNEPNTNSEGACSGSGGIDSSLIATGITNDNRKSPKIVPLNLVLKKAKRCNAVKLRKTESTHLYEEKSSDCSVNSSDYSIEKYSVDDENCSPQAEYELQDSKRSRYSSNDLRSHVALHKRTSGGTKNRRTSVSLARIKKFGSKSVCYSGSDKDNAVLAHEVNARRYSGRLSSNSPCCVCGISDLEPCNRLIECSKCYIKVHQACYGVLKVPRGQWFCRPCKNNTMDTVCVLCGYGGGAMTRALKTKNILKSLLQGLMNLERSEYYVDSLGNASSECTSK

SEQ ID NO: 66495 - protein, 200 aa, Zea Mays
MPLPILGDIEIGCPRSEVTARRCLNLLKPKLNALEEDSWEELDTLDIGGGAESLRWLVWPMIDDKSKVTLAVECPRVTVNPQPSLFDLSGYSKVPIEALSSVPLDHSVVEDIDPKTWAVSAAPPRAVAPANPNVPSAPPEIPMAERFRLAYVEREARLAPKRAKRERQRRRRAERDYMMVDIDARSVALAAQASRNLRKS

SEQ ID NO: 66496 - protein, 89 aa, Zea Mays
MSFPENYPNSPPSVRFTSEMWHPNVYSDGLVCISILHPPGEDPSGYELASERWTPVHTVESIVLSIISMLSSPNDESAANIEAAISFDC

SEQ ID NO: 66497 - protein, 330 aa, Zea Mays
MTSQVKKKLLPNHVMTEVAEIKLNVQLRRQLHALGLAEAHKIELHDPLVDDLMDFYERMGDTLAIQYGGSAAHNKIFCEQRGQWKATTQSQEFLRTLQRYYNNAYTDHEKQDAINMFLGHFQPQQGKPALWKLDSDQHYNIGRQGTLKEEIGRSFIKRSLSDGNILLESSLPVTICNNETDNTELLPVQQLDDIREASDSAPEISICEPNLCSSMNYGTVPGRHSMSEERQSYLKRLGYPELHSSNFFDLDLLSSSGNSFDEEVFERSLLINSPMDVISPESSMSYSEQGHTDEGRDDTDLSRSSSQLSDIRDYSDHFAQWVVNGDTLCY

SEQ ID NO: 66498 - protein, 701 aa, Zea Mays
MEATLAFSQDSPPISIICAAKFVGLPLTIDPSLASGLAPTLRFASGESLHGVNPILLYIASGATIPCFSGKNDIEFGHVVEWLEYVPIFLSGSEFENACLFVDGFLASRTFLVGHGLTIADIVVWSNLAGIGQRWESLRKSKKYQNLVRWFNSIDSEYSDTLNEVLAAYVGKRGIGKSPAPSLKEKVHVSKDPSAPEVDLPGAKVGKVCVRFAPEPSGYLHIGHAKAGLLNKYFAERYQGRLIVRFDDTNPSKESNEFVENVLKDIETLGIKYDAVTYTSDYFPKLMEMAGSLIKQGKAYIDDTPKEQMRKERMDGIESRCRNSTVEENLSLWNEMVNGTERGMQCCVRGKLDMQDPNKSLRDPVYYRCNIDPHHRVGSKYKVYPTYDFACPFVDALEGVTHALRSSEYHDRNAQYYRILQDMGLRRVEIYEFSRLNMVYTLLSKRKLLWFVQNKKVEDWTDPRFPTVQGIVRRGLKIEALIQFILQQGASKNLNLMEWDKLWTINKKIIDPLCARHTAVLKDQRVIFTLTNGPEKPFVRILPRHKKFVGAGKKATTFANRIWLDYADAAAISKGEEVTLMDWGNAIVKEIKVESGVITELVGELHLEGSVKTTKLKITWLADIEELVPLSLVEFDYLISKKKLEEDDDFLENLNPCTRRENPALGDANMMNLKRGEIIQLERKGYYRSWPRDLWKRYYKE

SEQ ID NO: 66499 - protein, 1205 aa, Zea Mays
MATPLAGKGPIAAAIPRSPPPLAEGGAGGSAAEAPVLIFVYFHKAIRAELERMHAAAVRLAMGRAGGDVATLEARCRFLFTVYRHHCDAEDAVIFPALDIRVKNVAGTYSLEHKGENDLFAHLFTLLQLDVQNDNAIRRELASCTGAIRTFVSQHMSKEEEQVFPLLIKKFSHEEQADLVWQFLCSIPVNMMAKFLPWISASVSTDENQDILDCLSKIVPEEKLLQEVVFTWFGGKSESSSTCESSSGQTDKHAHSLEHTKIGKRKSIESSQLVTHPIDEILYWHNAVLRELSDIAEETKRIHQSGDFSDIAGFNMRLQFIADVCIFHSIAEDQVIFPAVDGELSFVQEHAEEERRLNKFRSLIEQIQLAGAKSTVVDFHSELCSQADQIMQKIESHFNDEEIKVLPKARIKFSPEKQRELLYQSLCVMPLKLLERVLPWFIVKLNDAEAVSFLQNMRLAAPSSETALVTLLSGWACKGRLEDTSNPGKFVCMASGAVTCASDGNGFKTCQSLCPCYVSSNGAFSKPVKRASQGESSTNTDRNHSSHNAATEASQCNNRACYIPRLRVESSYLGVHSSTPTKSFRPLSFNYVAPSLYSSLFSWDTDTLVSGPDNISKPIDTIFKFHKAIRKDLEFLDLESGKLIDGNESCLSQFIGRFRLLWGLYRAHSNAEDEIVFPALESKEALHNVSHSYTLDHKQEEKLFQDISTVLSELSQLHDGLSYPLDVEAGTNDISSNEIDWARKRNELLTKLQGLCKSIRVTLSNHVHREELELWPLFDKHFSVDEQDKIIGHIIGTTGAEVLQSMLPWVTSALSLEEQNMMLDTWKQATKNTMFDEWLNEWWKGPSTSSDPSDKASTPSEESHFQENLEQNDQMFRPGWKDIFRMNQSELEAEIRKVSRDSTLDPRRKAYLIQNLMTSRWIAAQQKSPQPSVEGHNGCTRRPGCVASYRDPGKQIFGCEHYKRNCKLVAACCDKLFTCRFCHDKVSDHTMDRKSVMEMMCMQCLNVQPVGPNCQSPSCNGLSMAKYYCSICKFFDDERSVYHCPFCNLCRLGSGLGTDFFHCMKCNCCLGIKMIEHKCREKMLEMNCPICCDFLFTSSAPVKGLPCGHFMHSACFQAYTCTHYTCPICCKSLGDMTVYFGMLDGLLAAEQLPEEYQDRCQDILCNDCERKGRSRFHWLYHKCGFCGSYNTRVIKTDTAECSRPL

SEQ ID NO: 66500 - protein, 416 aa, Zea Mays
MGILKQQRTTNQELPIQEPYPQEAWTDVKVTSPQLSRVATYKLSLNKTTLQLTSSRESTNPFVEQAIQFSVAAAKATIIDKERKDVVDKLLLQGLNITIIGHNDFYSYRKQIEARGLPLTPEVLLSLPPFSSITFNSEVANGTMTGEKCKPEVAKTGLGSSAAMTTSVVAALLHYLGAVNLSCSGQSSGDNASGRELDLVHAIAQSAHCLAQGKIGSGFDVSAAVYGSQRYVRFSPEILSSAQAIGGTVLPDVVSDVLTQRWDHENKQFSLPPLMTLLLGEPGTGGSSTPSMVGSVKRWLKSDPEKSRDTWSKLAIANSTLENQLRILKGLSENHHEAYESMVRSCSRLTYGKWAEVATNQHQELIIRSLLAARDACLEIRLHMREMGIAAGVPVRSPIHNCKYCSIACSKEVYSV

SEQ ID NO: 66501 - protein, 644 aa, Zea Mays
MSPMPTAPYTSATSLLLGSRRLPRFQFQSLRTPTKPPFRRPASSSSTPLPRCRASATPRPLAPVCASALALPVSVAAAPPPQVDGGWVGGTAAAVRRVAVAVACGALAAAWCRRAMAVGAAAAAGAGAGAPGTVEAAAGIGWMALRGGWPRVLQILQLLREHGLILAALLSLSAFFSMAETSITTLWPWKVRELAEKEPENGVFKMLRSDVTRFLTTILIGTTVVNIGATAIVTEAATAMFGEAGVSAATGVMTVAILLLTEITPKSVAVHNATEVARFVVRPVAWLSLILYPVGRIVTFLSMGMLKILGLKGRSEPYVTEDELKLMLRGAELSGAIAEDEQDMIENVLEIKDTHVREVMTPLVDVVAIDAIATLIDFKNLWETHQYSRVPVFEERIDNIVGIAYAMDMLEYVEEVEKLNAITVKEIAHMPTYFVPDLTLEDVVEEIVGEIFDENDSKEEIQKKTGYIVRRGDGTFDVDANTSIDHLSEELGIKIPEGHQYETVSGFVCASFGYIPEEGGKMLVILEKNFREENGEYQEEGPDRQDDREKTQAYELEIVEANARKVGKVLFKPISSECVDVDNKGVNRLISKKIIKRKKKGSDDSSNDDECPDVTENGCPAELLSYSDDNSALLEDASSSSAKR

SEQ ID NO: 66502 - protein, 341 aa, Zea Mays
MVPRAVTCHVLSSDTLAAVTLDACKDDNGEHVRDTKTSTKKITQIQESTQGTPPLILAGLHACGDLSVNMLRVFVSCEQVKALVSIGCCYNLLSEDTYEDTDTCPGFPMSKAAKHSELVLGKSIRDLACQSAERWRNLTMDIALQNFDVHAFRAAFQMVLEKYFPEVSRLSPSIGRQGKALRRQRLRKVVESQMTTKKNDDFSCSTLKEQNKNTNDVHPVIHEVDTGPDDIHQNAHQKFILFKDFTLSGLGRLGCGSVEDTSLLEIWKDVQPFSEYIGPFWCLRAALGPLVETYILLDRLLYLQERSNLVEALLFPLFDPTISPRNMAVIAWKLCANSSEA

SEQ ID NO: 66503 - protein, 91 aa, Zea Mays
MPPGRAVPASHLGQFNPPIAPFHAQKPPPPPIAQTANAHTRNAQSCPRLGSPHLRRSLPAMHEVVLTSPEHHLAIYARKRSPFLSSLVLRQ

SEQ ID NO: 66504 - protein, 236 aa, Zea Mays
MDAGLASAVTMLRTCTDVVHLAHVLEQFRLAWCGKLVRDTRAVAPSRASASTSSSLGVETELSMYAGGNKGAIAGCNSNPPNPFPQKSKQLRHLDQTRRTMSTPLGTSTNFSPPNSIYLCPLCTGEGDRDPRNAARCSSSGQVLSGHPENWAPVIGWRPPALRSGGHNLAAPSTSTGTAPVGADACHRPRAVDGGNKNRKGHRRQSLPRSSFINEQKPWFGTSGADGGRRPGNATN

SEQ ID NO: 66505 - protein, 673 aa, Zea Mays
MQYAYGATRLVLMDYDKSRRSNSKKRTHSNSDDGKRKRLNTRHDDTSMFSEPIETIYRILCPVKKIGSVLGRGGDIVKALREETKAKIRVADSIPGADERVIIIFNYQNEPEPTDEAAEEKNSDGLGNFKSHCFAQDALLKIHDKIVSDEIHDEVANDEKSESADDVTARILVQGNQVGCLLGKGGSIIQQLRSNTGAGIRVLPSENLPQCALKSDELVQISGAPSLVRKALYEISTRLHQHPRKENRPLEEIIDASTQRKRESPTLQHEYSMLPHLHSDHTPPIPLLDPYRSGPQYPVTETEEFSIRILCASELIGSVIGKSGANVRRVEQQTGARIKVQEIDKDASGERLIIISSNEIPAEPISPAIEALILLHDKVSAPSEKHHSSTRLVVPSSKVGCIIGEGGKVITDMRRRTGAEIRVYSKADKPKYLSFDDELVQVAGPPTIARGALTEIASRLRTRTLRDTSTANNPPPFAPFDDPPVDMPSRKLSLYGGPATDPPYGRPANDPLYGRPAIDPPFGRPTNDRPYGRTAVAPPFGRPANDPPYGRPTNDPPYGRPSGSIPYGRPNGSAPREPSDAYPVDYFSKREYPSGSPMFTSNAPSAAYERYAAPTRFPTREFPSAFSPGVDHMPHHSYRDHVPTDSYSSRGTQQLGITRGGNSDAYDYTEVHP

SEQ ID NO: 66506 - protein, 623 aa, Zea Mays
MASYRPYAPPPPQGSYPPQMNPYAPPQAPYNRMPAPPYHAGPPPPPPPGPPPPHQPQFNFGPGPPQQHPPPPMYYQPPPPPYGGNSNPPPPPPSAPPPPPSPPPAAPPPPPPAQAPSAQALLPSKEQQPKATLPREETEEERRARKKREFEKQRVEERKQQQMMRQTQATILQKTQQVRASQQQPQSRHHHHQPPSIFRAAAIGSRAVATGSRPASAPNAERFENRLKKPTTFLCKHKFRNELPDPSAQLKWLPLNKDKDRYTKYRITSLEKNYIPKMIVPEDLGIPLDLLDMSVYNPRDVQSRMAPEDEELLRDDEVLTPIKQEGTRKRERPTDKGVSWLVKTQYISPLSTDATKMSLTEKQAKERRETREGRNAFLDNLNDREKQIKAIEESFRAAKSRPVHQTKRGMQAEWVMPLLPDFDRYEEPFVMVNFDGDPTADSEQYNKLERPVRDECESRAVMKSFSVSGSDPSKQEKFLAYMAPAPHELARDLDDENDDIQYSWLREYHWEVRGDDKDDPTTYLVTFDKEEGAKYLPLPTKLVLQKKKAKEGRSGDEIEHFPVPSLITVNKTGHVGTMERGESSGMHVNSKPRRPHVDDDLDEHSKRSRVEDIDQYSGEEYSE

SEQ ID NO: 66507 - protein, 401 aa, Zea Mays
MFGPDKCGSTNKVHFILKHKNPKTGKYVEHHLKFPPSVPYDKLSHVYTAILKPDNEVRILIDGEEKKKANFLSADDFEPALIPSKTIPDPDDKKPEDWDERAKIPDPDAVKPDDWDEDAPMEIVDEEATKPEGWLDDEPEEIDDPEAAKPEDWDDEEDGEWEAPKIDNPKCEEAPGCGEWKRPMKQNPAYKGKWHAPMIDNPNYKGIWKPQEIPNPEYFELDRPDFDPIAAIGIEIWTMQDGILFDNILIADDEKVATSILEKTWKPKYDVEKEKEKAEEAAAGADGLSDFQKKIFDVLYKIADIPFLAPYKTKIIDVIEKGEKQPNITIGILVSVVIVFVTVLFKILFGGKKPVAPVKPAAEAKKPKAAETDGAGSSGDKDEKEDEKDETGPRRRTRRET

SEQ ID NO: 66508 - protein, 2133 aa, Zea Mays
MAKGVGGGDPIPLSRFGALVAQLESVVASARQKTPDALLCFDLLSELSSAIDEAPKETIQLWQRKCEDALQSLLVLGTRRPVRRLASSAMGRIIEKGDVISVYSRASNLQGWLVDVKRAEATACAGAAQCLGEIYRLFGRKITAGLIETSSIVAKLMKYHEDFVRQDALLLLENALEGSGGGGAAAAYQEAFRIIMRGVSDKSFIVRAAAARCLKAFANIGGPALGMADFDSSMSYCVKGLEDSVSSVRDSFAEALGAILALAVNPDAQVKKGGKKQTASAKKIEDGVQKHLIVPFVKANGANAKELRIGLTLSWVFFLHMIHMKYGTPDSELQNYAIQTMEILQGNDSLDPHALACVLYVLRVGVADQMTELTQRDFLLFLGRKLESLNYTAATRVATLRILCYLLRSVGEVPAEFKDVLDNTVVAALSHSSAHVRVEAALTLRALAEVDPTCVGGLVSYGLTTLQALRETVSFDKGKSLNLELDSLHGQATVLAALVAISPKLLLGYPARLPKSVLELSKKMLNGFSRNPVAAIAEREAGWLLLASLLASMPKEELEDQVFDVLLLWAGPFTGNPESYLRHIQDWASELRVLSVAVEALTAFIRSFVYPSITTTDCGILLNPVLAYLGGALSLISSLRSKQVPNVRSALDLLTTRTLMAYWSLSNPVVYKTEHQQILQLCSSPFSDPSGWEESSCLKFLLDKRDASLGPWIPGRDSFEDELRAFDGGADGFLPCVWDDEISNFPQPESIRKMLVNQMLLCYGSIFACQENTVKISLLNNLDQCLKSGKKYLWFKFLITNACVALLSGLKEFLALRGAQSLPIDILSMIQSIFKAILVEPEISTAQRRAACEGLGLLARAGNDIFTARMARSLLGELVTTTDLSYTTSVAFSLGCIHRSAGGMALSTLVTPTVSSLSHLSKSSNFNLQLWSLHALLLTIEAAGLSYVSQVQGTLFLAMEILLLEENGYVDLRQGIGHLINAIVAVIGPELAPDSTFFSRCKSVIAEISSSNEMATLLESVRFSQQLVLFAPQAVPVHLHVQGLIPMLYSRQPSLRYLAVSTLHHLIERDPAAMIDENIEENLFSMLDEETDSETAMLVRATIIRLLYTSCPVCPSRWLAVLRNIVLATSIRRNTGEVLSCFGHNPPDSTSENDVYYGEDEDNMISSSKQQQIRCAGSISSQFPPRNKHLRYRTRVFAAECVSHVPIAVGAEPAHFDLLLARSAISQGTYLSNDWLVLKLQELVSLSYQISTGQFEGMQPIGVKLLCLIMDKFGKAVDPEFPGHILLEQFQAQLVSAVRMAISTASGPLLLEAGLELATRVMTSSIIGGDRLALSRLFSLITRPLSDIEGLLYPSFADWVVCKIKVRLLTAHAAVKCNTYQFLRMRENAPNEYQQLAPSLVNSSTLLGKYWIRALKDYVSISFGLHSKINYKPFLDGIQSLLVLSKVQRTEFQFLWGLSILVLFHSCQSMKNNSLKINLDFKQDKNFGEFIVHGLDDKRPCDQVLRVLSSLTTEVFFSNNFISVDICQQLLQALTYADCSSAPIIHLFTQIIRFCPDNFFEVEAFVFSAIELLSQYLGLILQCRDGSSQNNSSNTLISELSIASETMAYRIKGEYLWKLVMLVVSTSHQSFQQVSTNLCFSNIICFLQNIFPFMRKIFRERVESDGECTSPKVVFGAMVGLVGYFYVECDKKISLLENKISDSYKLLNKILLFCLGEATALAKLVPEIIYRSENVSNNDVLLWGSFRLCVQVIQGSFRSTNIQVHMLGLQVLRSYAQKELTEGSETKLDSFMMLLTELLGDLFLVMETTLKECSNKKSVSVVDECLKLVFLFHTLAQSKKYRQDATTLLLEALLMVFSLSSDTVSQELAEVNTISRKLFSHFIQIPSVAIQIKDIMLSAPAERRLQLQDMVRASVSQGQITVPVATSAHSEQNIQDSCSKNPGSTSEASDCVATHGNNDNEVVDDDWDDDWDAFQSLPAIANDGVDSGEISLTTRYNEQIPQENSSYGSCNADITARAMEDITCVDKELEEPSDLQFSSTEQQPKHDLPGSSHEGCAKLERHPSVDCKEQLADDETADELQQQVHEDTDHVNKDSEVLSAEIHGVKLDILDEDVEDDSPMNSNNLSDIAEEES

SEQ ID NO: 66509 - protein, 122 aa, Zea Mays
MVVMEGNGGAGRITIGVCVMEKKRVRLDFQRAFSSPMEQILERLRAFGEFEIIIFGDKVILDDPIEIWPNCDCLIAFYSSGFPLQKVQAYAALRRYIFYSLFLYISLSNGNYSCKHVSIFLI

SEQ ID NO: 66510 - protein, 198 aa, Zea Mays
MQQTYELNWLLIPHWCPLSHWWRDYCATSPKFGFSIMCHYNRKLLSACYASALGGHSRFPVTYMRMKKLFAWTDMCVAVKQFVQTCLVCQQAKPDRTRLPGLLQPLPMPSSAWQIISVDFVEGLPTSSSYNCILVVIDFFTKYGHFIPLRHPFTATSIAKLFLLHVYRLHGMPSSIVSDWDRIFTSSLWKELFRLAEV

SEQ ID NO: 66511 - protein, 627 aa, Zea Mays
MLRCVVCVTELTLCVDSWCAAACVCYGVTVTLLPDDVDLLLSPCCPAPKCASAKGRRSKITQRTGEIEATEPPHVAIAVIDYTAVSSPRSPHPPHRNRRPDLSPAISKSPPHSLVHRQSHDPQVPPSSRAPKSLPLCLSTPLAAAAARISMASAAAPPTSLSLAARAASRAAAAPLRRGGLAAARQPARSLAFAAGDARLAVHVASRCRQASSARGTRAMATMAKKSVGDLTEADLKGKRVFVRADLNVPLDENQNITDDTRIRAAIPTIQYLLGKGAKVILSSHLGRPKGFTPKFSLAPLVARLSELLGIQVQKADDVIGPEVEKLVAALPNGGVLLLENVRFYKEEEKNDPEFAQKLASVADLYVNDAFGTAHRAHASTEGVTKFLKPSVAGFLLQKELDYLVGAVSSPTRPFAAIVGGSKVSSKIGVIESLLEKCDILLLGGGMIFTFYKAQGLSVGASLVEEDKLDLATSLLAKAKEKGVSLMLPTDVVIADKFAPDANSQIVPASAIPDGWMGLDIGPDSIAAFNAALETTQTVIWNGPMGVFEYDKFAIGTEAVAKKLAELSRKGVTTIIGGGDSVAAVEKVGVADVMSHISTGGGASLELLEGKELPGVTALDEAATVTV

SEQ ID NO: 66512 - protein, 326 aa, Zea Mays
MPPTMLAPVPTRPRSNPFRRRRGAAPLLLDQTSAKRPAESSTSASSCFYSEVISNSSTSLAPYQRLEKRHRRQDTDAGEARPAGSECSEVIGGARVRPAEVEVSESSCPVSVLESDLACPKQLADDAEAIEKSSACDELTPSSEPDEEEVLSDPSHSGYSPSPLISSPLTEDDSDDAPSATFSLFLDFAKQFVPCLHPKPCTVTSSTLDLLTGRRFEDLDDEESYERFRRRERREAVARDFTEVCSSTSIPDSYRPLVVEQRVIMVNWIIQHSRLMKLQPVTMFMGIGLMDRFLTQGYMKGLRNLQLLGIACITLATRIEENQSYN

SEQ ID NO: 66513 - protein, 602 aa, Zea Mays
MSDTTPAATALNHWNRSIQLAAASGSYGHCLRLYAGPLLAAGLRGDASTFPSLAKSCAALRLPGLGRAVHALAFLSGAAVSRDAFVRTSLVDMYAKCGRLPDAHRLFDETPCSSRTLVAWNCMISAYGRSSQVEEAVGVFNAMRRAEVRPSGSTVVGLLSGCADSVSARYPGVSVYGLTIKSGLDADLLVSNSVLTMLVRGGQLDSARLLFDRVENKSVVTWSAMASAYLQTGDWMEVFALFSSMRETEQPMDSVVLANLITAAMLFGNNLVAKGVHALAIKVGFDRQEDLAASLVNLYSKCGNLLAAREVFDSLQWKSVIMWTSMLNGYVECGYPDEALATFDAMLCAKVEPNKATVLAVLSAGANLGSANVAQKVEEHVKAMELQSDLQVCTRLIDMYCKCGSIQRARKIFDSVPNRDLAIWSAMINGHACNGEGSEAVVLFNEMQSKGVRPDAIVFTHILTACSHSGSVDEGLRCFHSMTAEHGIEPSVEHYMCMIDLLCKAGHLSSAIKFFGEMPVRLRNQVLAPLISAHRVNGADSSVEFMSEGLLNLGSQDSGHCVLISNMLSCLGQWKKARSYRTLISKQGLVKKPGWSYIELGG

SEQ ID NO: 66514 - protein, 439 aa, Zea Mays
MSGIWGRNNQEEMQVNNEAPLGCLKPNISQYNSPEQIGGVEGFPENNEKRNDIVAAEKIWEATPNQGLSRPIYRQEFYAWPYIYSDYQIVRQPLPYGFDNQFYQINRDHGFPIENRVQYLPFKMLPQGHPHDAQLQEFQYFVVIDFEATCDKVNNPFPQEIIEFPSVLVNSATGKLEECFQTYVRPTYHQFLTDFCKELTGIQQIQVDRGVPLGEALLMHDKWLEDKGIKNTNFAIVTWSNWDCRIMLESECRFKRIRKPPYFNRWINLRVPFQEVYGDVRCNLKEAVQLAGLTWEGRAHCGLDDARNTARLLALLMHRGFKFSITNSLVWQPAAAPQSTAATCHFSPDRSPDPVVVQLQHQQQQHKPKEALGSPASLVNPSYATPAGGKDRAMYCYCGVLSRWSVVRKPGPMQGRYFFGCGNWTATRRAICPYFAWAS

SEQ ID NO: 66515 - protein, 226 aa, Zea Mays
MGQLGHCSLQSGDNELIPRRVVALDGIVVGDVSCGGVHSCAVTEGGALYAWGGGHVGQLGVGPQGGFFSCSLNGSDMLLRNIPVLVIPSGVRLATCGHSHTLVSMKDGRIYGWGYNSYGQATNEKSTYAWFPSPVDWCVGEVRRLAAGGGHSAVLTDACSLKELCEFKLAETVNLSNAQLIEDVASRTGADALARLCEKVREHLDKEGECEFLEKQVAEEVNTIGS

SEQ ID NO: 66516 - protein, 454 aa, Zea Mays
MEIDEMESGVVNGSGGGGSFRRARCWELLCSAAGMLWGKVVGFARKLGRIARDDPRRVAHSIKVGLALTLVSVLYYVRPLFNNWGVSTMWAVLTVVVVMEYTVGGTLSKGLNRACGTLAAGFIAVGAHKVAYLCGDKAEPVLLAVFVFLLSSAATFSRFIPEVKARYDYGVTIFILTFSLVAVSSYRVDELIRLAHQRFSTIVVGVGTCLCTTVFVFPVWAGEDLHRLAIGNLNKLAEFFEGLESECFRENATFENLEAKPFLQVYKSVLNSKATEDSLCNFAKWEPCHGKFKFRHPWSQYQKLGALSRQCASSMEALASYVITLTRTEYPEARPELRSEVRTACRQMSLHSAKALRELSAAMRTMAVPPSPANAHMSAAAKAAKDLRDELEDADLAQAMHVAVVASLLSDLVTKAKQITESVGTLARLARFVKNNDHENNADDKDIAAIDAVS

SEQ ID NO: 66517 - protein, 63 aa, Zea Mays
MLTKFETKCNRVKDLAFHSRRPWILSSLYSSVTQMWVYRMGTILNRFAVASSSTPHNRSLYPE

SEQ ID NO: 66518 - protein, 108 aa, Zea Mays
MQACPSAAVPSLTTDSEKKGPVIMEIPLDQIRRPLMRTRANDPVKVQELMDSIRVIGLQVPIDVLEVDGVYYGFSGCHRYEAHQRLGLPTIRCKVRRGTKETLRHHMR

SEQ ID NO: 66519 - protein, 254 aa, Zea Mays
MASMAAVFGEAKPDKSNKDADALLRRPVLFHAHSQGGLRVVATDLHSFAWHRSLDLDGLRDLQDDVGIAGSCSDFLDYLYSSLSSDQVRLFFPAAALGPDTAELVATKAKGLPRITLSLDRVAASALKDVIADFSLALYESYKTRQEHASREQERVSQLMENLDSEREKNEVMQKQLEALSFLDKRKATKPKLVTDKFPSVSGAPPSSDQMIVAVQQQTPVALPSKVPPAKGQEYEELCCKILKKMLMIILRYC

SEQ ID NO: 66520 - protein, 522 aa, Zea Mays
MAGGGVAALGVKTERAAQYKGRMTLAVATTCLVAAVGGAIFGYDIGISGVTSMDPFLEKFFPVVFHRKNSGGKNNYCKYDNQGLAAFTSSLYLAGLVASLVASPVTRNYGRKASIVCGGVSFLIGAALNVAAVNLAMLILGRIMLGVGIGFGNQAVPLYLSEMAPAHLRGGLNMMFQLATTLGIFTANLINYGTQNIKPWGWRLSLGLAAVPALLMTLGGLFLPETPNSLIERGRVEEGRRVLERIRGTADVDAEFTDMVEASELANTVEHPFRNILQPRNRPQLVMAVCMPAFQILTGINSILFYAPVLFQSMGFGGNASLYSSVLTGAVLFSSTLISIGIVDRLGRRKLLISGGIQMIVCQVIVAVILGVKFGAEKQLARSYSVAVVVVICLFVLAFGWSWGPLGWTVPSEIFPLETRSAGQSITVAVNLLFTFAIAQAFLSLLCAFKFGIFLFFAGWITVMTVFVYVFLPETKGVPIEEMVLLWRKHWFWKKVMPDMPLEDGWGAAEGHAAPASNNHKG

SEQ ID NO: 66521 - protein, 372 aa, Zea Mays
MRDGSNTTKKSKLSWSKSLVRKWFNIRSKAHDFHADDVAAIGRTVAGGGDDEWRRGSSFTRREPSTVKKSKTERSSRRSNGHSRRGKIDLDAAEATVTLDYRIFVATWNVGGRSPPNNMSLEDWLHAAPPADIYVLGFQEIVPLNAGNVLGTEDNVPAKRWVSLVRRTLNNLPGTSGNGSFRTPSPAPNPVVEIDDDFEGLSSKQNSASFFHRRSFQAGLSRSLRMEGDILAPQPRLERRYSVCDRAIYGRRPSDYENNYRWGGSSDDENNTGESPSTVYSPVSYGYGNASSLEDGQRRPGQTRYCLVASKQMVGLFLMIWARKDIRDDIRNLKVSCVGRGLMGYLGNKVSHSVSFFLSFFQFIVYNLSTNR

SEQ ID NO: 66522 - protein, 351 aa, Zea Mays
MALMGSLETKIDETEQKFEEMKRAREEWLKKATDAESKINELTNTVLSFQEKVTNMEAENQLLRQQALLRTPVRTIPENTSPKSNLTNGSPRIDEQKTPHGTPAPKDYGSFGQPRASFFERQHESVDALINCVSENIGFSEGKPVAAITIYKCLVHWKIFETEKTSVFDRLIQIFGSAMQKHDSNEDLAYWLSNSSTLLIMLQKSLKAAGSTGISPQKRPQTQSSFLGRMVFRSSNITVDMDLVRQIEAKYPAFLFKQQLTAFVEGLYGMIRDNVKKDLSSLLAYAIQVPRTVKASMVRGRSFGSSSLPRGRSFSTQGSYWQAIVDNLSELLKILQDNCVPSIFIQKIFTQ

SEQ ID NO: 66523 - protein, 594 aa, Zea Mays
MSAPAGSGGGGERAMNIRGIFRFADRVDVLLMALGTLGAIGDGCSTNLLLIFASDVMNALGYGGAQAGGGAKSAQFMHEVEKSCLNFVYLGLVVLAVAFMEGYCWSRTSERQVLRIRYLYLQAILRQEAGFFDSQEATTSEIINSISKDASHIQEVLSEKVPLFLMHSTVFVSGLAFATYFCWRLALVSFPLVLLLIIPGLIYGKYLLYLSRRSRHEYAKANSLVDQALGSIKTVYSFTAEKRIIQRYTAILDKTIKLGIKQGIAKGLAVGFTGLSFAIWAFLAWYGGRLVVFHHVTGGRIYAAGISFVLGGLSLGMALPELKHFAEASVAATRILDRINRVPQIDAEDPKGLVLDQIRGELEFESVRFEYPSRPNMPVLKNFSLQIPAGQTIALVGSSGSGKSTAIALVQRFYDASEGTVKVDGFDIKELQLKWIRSKMGLVSQDHALFGTSIKENILFGKPDATMDEVYAAAMTANAHNFIRGLPEEYETKIGERGALLSGGQKQRIAIARAVIKNTAILLLDEATSALDSESEKLVQHALDQASMGRTTLVNCHCFRSSYFMTLISELVELIITASFFKKKTFGIESLIIH

SEQ ID NO: 66524 - protein, 231 aa, Zea Mays
MVFLATAVVVCGSFEFGTCVGYSAPAQAGIVSDIGLSNSEYGVFGSVLTIGAMIGAVTSGSLADILGRKMTMRFAAVVGIFGWLTVYFAKDAMMLYAGRVLLGYCTGVLSYVVPVYISEIAPKGIRGGLATSNQLFICSGCSAAYIIGALVSWRCLVVVGLIPCAVLLVGLFFIPESPRWLANIGKEREFHASLQEFRGEDSDISEEATEIKVIYSEHSFHLSNNVDRYSN

SEQ ID NO: 66525 - protein, 346 aa, Zea Mays
MDDYCSQDELRQKKEEEMDDYCSQVPVGHLVFMVHGIGQRLEKANLVDDVVDFRRVTANLAERYLTSYQRSTQRVLFIPCQWRKGLKLSGESTVEKLTLDGVKGLRVALGATVHDVLYYMSPIYCQHIIDSVSNQLNKLYMKFLKRNPGYSGKVSLYGHSLGSVLSYDILCHQESLWAPFPTEYLNMETSDRNQGAKSANEADLHDSGAKDHDTSSLGYSCADNENSVIDEDSTRTDVSCMDSILPSCVLEDSPNNHDTVVPRGAVVADQNGEEKKVENYQSVYAEEGTTSGVITKKAEGSSISRSAKEVHEEVLDKEKLMVLAKDKLILSLEEEAKDKTIGKIRT

SEQ ID NO: 66526 - protein, 76 aa, Zea Mays
MIDEKPKASIVMPSSILFGNRRAGMSGLSFAILVLATRNSWHSLAKKRGPCASLVKCSIEDFIQRLSVLTSLTYLG

SEQ ID NO: 66527 - protein, 618 aa, Zea Mays
MLQPREADVPALFLVFIVLPVVAYFLLGRWHDSASKKARASVLAQRAAEEAYREETMACPDIIPPGPSLRTMPYFKPAPSLRQEYHECATCHAPAKTRCSRCKSVRYCSGKCQIVHWRQGHKETCQKWLGSGSSSFGGSSTEATEQMPFLANLNSPLPDRSNMNRSNQGIHMSENGAVGVSFEKNNYNAADEIHSSEILSGNKVSNNYFGSDAMSGNGDATYPAKSNAQQPSSCAPDVRKQSKASITVYQPDMSVYLTSDMVSSCEGSYVSAGEPLQRSLSSGRTIGKVTVVNKRPSYPSSKVVSAQKSQDKVSTSYQNDAHEKNPCNKNDQRSTPTCESSQSTSSNLLKSGTSKVEVLKKPSKFLKTSLVALINDNKRNKVLFPYEDIVKFFQYEARGVSPRGLFNCGNSCYANAVLQCLMCTKPLMIYLLLRLHSKDCCSKNWCLMCELEQYASTLRESGGPLSPSRILSNLRNIGCRLGGGTQEDAHEFLRHLVMSMQAACLDGLGGEKHVEPSLQETTLIQQMFGGRLKSKVKCLRCYHESERYENIMDLTLEIHGWVESLQDALTQFTAPEDLDGDNMYKCGRCSAYVKARKQLSVHEVPNILTVVLKRFQRR

SEQ ID NO: 66528 - protein, 679 aa, Zea Mays
MALRHLVTGQNNCVPDGASSSNPLNALANAFLGQSSKAQSIKELPGSVNVPSTSDFSVSAPLSNIPGSENEFKQDQRPLARGADFIRGGPANDWIESFRPPRVPQLGVEAQFPDFEQIYNNAGTTFQFQPPLDGPPQRVLSGVLHSFLTSGPAGVPFQPLPVPAALGLSESDKQCIRDRSCIMARHIFSDQPEEYIQSQVNTLLHSLDIDNRMRGPMHGQYPELQEYWKQSQSSTRPAPMHNAADKWITEFGKQNNNPENWANSFEQQYGPNGWASEFEQHQSQMAMRQMGGANMANLAAMEQSRVLAQTLASNNDPKFQLSQGADKWVSEFSSQPNHGALNENWVDEFSKLNVTDEWAEEFSGGGFGESSADPWVDEFQEHLSSFKQSPGASRGVYVFSENNPYVGHPNPMQEGQELFRKGLLSEAVLALEAEVLKNPDNTEGWRLLGVTHAENDDDQQAIAAMMRALEANPTNLEVLLALGVSHTNELEQGEALRYLYRWLQNQPKYGGLVPLQSTDSPYGPDVVRLFNEAAQMSPEDADVHIVLGVLYNLSREYDKAIASFKTALQLKPQDYSLWNKLGATQANSIQSADAILAYQQALDLKPNYVRAWANMGISYANQGLYEDSIRYYVRAVAMNPKADNAWQYLRISLSNASRADMIAACDARNLDALQKEFPL

SEQ ID NO: 66529 - protein, 123 aa, Zea Mays
MHLGGGRHCRHWWRAICRRWQFGSTPSFWSRQVVWELRVCSRMVCIVVLIRDLHRVRVNCSLSTGFRRGLSGSVAGGGSSAPLPVSHPSSFSSSCLHHINASGLGDSVPRRRTRVHRCCRRRG

SEQ ID NO: 66530 - protein, 139 aa, Zea Mays
MKHEQRYSIFDDSASMNTKKLRFKRIHVTQQDALLCTKRRECVFRLRLKKYKFRPQQSNLYMDEKVKIYYKVWTVIHNIVQSLITVFSTKLIQMLLSSTQAGLREASTAFGTCFGLSIFGTAILQINKRCKVKKKNYKT

SEQ ID NO: 66531 - protein, 640 aa, Zea Mays
MKVSSRKKPPPQQQREETEEQGSSGAAEAMDAAAAAAVQEEAEAEAEAEAEGRTVLVGVRADAESRALLTWVLVNVAAPLDRVVAVHVAPPSAAEAVDFDAMLAVYEGFCNLKQINLNLKICKDSSVRKALVREASLFGAAKVVLGVAKKRRAISSSHSVAKYCAKKLPAKCAVLAVSNGKIEFRRESSVHPDDGEGDATRDFGTKGSELENLSTDQVEIDADPSSTNAEESTVKQGDEISELPGKGASVLYCVLPERSSGSVASTSSRQDQDSVDLPSEGAGELYCLLPPRNGHSVRSIGDSKRSNASQKDDKPANPSLEGDGDLYCRLPRTGRPGRNSGGSNRSAGIRGAVRRSSSFSSDIHLSSETSPIKKDGSVSMTATERSSSAVSTEAEDSPKYTARTAETPSSSPMSLRRMVEGRSDRCHLHRRIFRHQRSSSFEWAKISMVQWAMRLPSRYTSVHPDGKPLKPGASPRLNCDSETESTAAVEPESMFSFAFYDVAWPPSELESLREKYSSVCRMFSYEELKLATSNYSPDMLIGKGGTSQVFKAQLDGGTFAAIKILKPSVDAIHEFVTEVETVTSLQHENIVALRGFSFENYNLVLAYDYMPRGSLDKALHALRFRVSKASVGFDSPPNMY

SEQ ID NO: 66532 - protein, 486 aa, Zea Mays
MACRAKVVGQVERVDGESLSYAEFVRRFMAPNRPVVLTGLTSSWRAHKDWTLSGSGDLRRPNLGFFTQNFPSSLVQVDDCSSSDFTDQKRLEMSMQEFIDHWVGGPHCGSSDGDRDGSLLYLKDWHFVKEYPDYIAYTTPTFFVDDWLNMYLDSHPIHRDSDIANHKNEINCSDYRFVYMGAKGTWTPLHADVFRSYSWSANVCGQKQWLFLPPSQSHCIFDRNMRSSVYNLHDVSEKQFPEFKWLECIQEQNEIIFVPSGWYHQVHNLEDTISINHNWCNAYNLHWVWNLLYEDYKVAKEYIEDIRDICDDFEGLCQRNLAANTGMNFYDFFVFIVRFALANVVELYHLQQPEVATLSTETAHHLVYNLMSIRNVASKMTTTEAFTTENRLCSVSEDNRSAFSNIKQILEEESFRRLSMTLSKAYDHIDRGQRSLKSSISYRKGCSSVICLKSDCNVVDYITSLVDEICGPEDLTRLIDSALSHG

SEQ ID NO: 66533 - protein, 108 aa, Zea Mays
MSIALQSGRGVGGGAPRFGHVARCGYAASPPPAAGRGRGGSSSVGRDSDSPAAAAQWEWDGEEVEGGDGEVQSSYKGSAFDTMDALQEALPSSLQSWCISVRPPIKWL

SEQ ID NO: 66534 - protein, 539 aa, Zea Mays
MALDTGTAAGIDEAYEFSAPRFFDFVVEETEEAVRAAESWFEAARSHAPSPFNPRIKESRAEVKLAVLCDFAQAEEPAPEVNKQKEPADEMSGPPAAQEERDESPPSLEFLSATDLSVKSADGGSTSTLKMQTRYPAPPTNVAPASSTCDSSSVNTDARTPKMQVNMCRAGPTAASTNVKRSVMIKGGRDLVGTGKAATAGAEIAQENQAVKRQKLDDGRARQILNVKTKVLPHKARADLAGSEMRRSHEDMRSAKEADPYVSAAELVKKFESGTRELSITHSRCRSHEDAASQRSLRRPKLMLTRPKEPDFQTSQRVRTVKVKSSAEIEEEMLAKIPKFRARPFNKTIAEAPSFPPLPRRTPQIPEFNEFHLKTMERASRYADTCSEVSCADTIQSQNKTLKSRQAKPPQLHTAMRARPPSVKSFQELELEELEKAPKFKAKPLNKRILESKGDIGVFFHPKSQVTAPKKFHFSTDVRLGPPSVADLFDKQQTRCAQTHHTKPFQSTNRGKRSFKREAARSTSLTKEDGGGKGQGSQS

SEQ ID NO: 66535 - protein, 162 aa, Zea Mays
MTLQTLWITTASPYISIVHDKSLPSFFLLFSNHRSGNVQRSGVAASCAREHQSPVSMFLSTPFFSAYVATSERSVPTLFQELGIMLCGAGGTFSLIYCPFCYAGGKKLGVARGSVLLFGVVFGLKQSLLFAAMLPLVSPQKASKQEAQAAIRPEAQGWGEPL

SEQ ID NO: 66536 - protein, 204 aa, Zea Mays
MEFQSNVRRERAKRPDPPCTICKGTGRIDCRNCFGRGRTNHADVAMLPNGEWPQWCRICGGSGLDYCLRCHGTEESPGGWGSSFQPFSRSNLHAMTSQGPASNEVLANAFQWLSPRSVTACRAVCLRWSELLSSPRLEFLADVDDGNADSSACFAGLGGASAGRARRRRRRRRGDTVPAATWFPSLPKLQQRRSKKKQAYRRMF

SEQ ID NO: 66537 - protein, 82 aa, Zea Mays
MRSDTTITHPTGTIQSGGEALAFCGICRFFCLFSWIRGFIGARCTDEQGPFCLDWCCWRSAMCSCVDKRPGVLDMPLRRLRA

SEQ ID NO: 66538 - protein, 520 aa, Zea Mays
MEIERRISTQAEHIRNQNSLIRAREEKYKSRIRVLEALASGTGGQMQINSSAANGKINIAEDHVLQMMINKSKIGERRLVDKDMSSLMAQKEDVARLTKDKEDMVRLLKDKEDIIRLMKEKEEMVLLIKEKDDMVTSRKEKIDGRDQSANAYANKSTTYNDETIRMIKEKEDSNITIMKLKSKLEAVKSLFEESHNQLESAKEEVLKLQKDKENSANIISKLRQELSLAHESYKTHIQELESSALQASKFFEHRIKEVDLMLEDSIKKRTDLEEVLKSRMDTWKKKEIMVNQVLRLQIQSIQDLRLSSVSIRHEIQNCQRRWSEELNGLGQSLNILINDSENYHAALEENRKLYNEIQELKGNIRVYCRIRPFIPGEDQKSTTIKYVGDNGDLIIANPTRHGKEGSKSFKFNKVFGPTTSQDDVFKDIEPLIRSVLDGYNVCIFAYGQTGSGKTYTMTGPENATENEWGVNYRALNDLFHISHNRGDTIMYEINVQMIEIYNEQIRDLLCSNGSEKKYPF

SEQ ID NO: 66539 - protein, 1545 aa, Zea Mays
MDAGGDEDGAGKAALESTAEAATLPPASTVAVPSPVPASAPGAATGTSGSGEKPVKRMMKTPYQLEVLEKTYAVEQYPSEAMRLELSAKIGLSDRQLQMWFCHRRLKDRKPPSKRQRREEESALVPVMPPPPVLPAPVMPLASSDLVVGAPGPYDEPLHPLHSRRGAGRGRSSAVPRISMPDIGRRYYEPPPIMIAPPIPSMQLTQYELRVINSVESQLGEPLREDGPALGVNFDPLPPGAFGAPIVPEQQKQPVRSYDAEIFSWHDQKLLKASAFLPNMESPFVPNSFTGKRKSPVGNSAIVQPHVGSRAVHEYQFLPEQPSDTYERATRSHYYDTPVEVSNARIPSITSGSQLLHGSEEAAPSYAFQGHTSGSSLLPPSSRPQVFPAAPTDYEMTQSNSNLSSVPVEGQFDISQVAAFENPPVSSEIIAYHDEDTSRVERKRKHSEEAKIAKEVEAHERRIRKELEKQDMLNKKREEQRRKEMERLDRERRKEEERLLRERQREEERFQREQRREHERMEKFLQKQSRRAEKQRQKEELRKEKEAARQKAANERATARRIAREYMELVEDERLESMELAAQNKGLPSMLYLDSDTLQQLDSFRGMLSQFPPTTVRMKLPFSIKPWTGSEDNVGNLLMYSYNFISGDILLTGLQVWKFLITFTDVLGLCPVTLDEFVQSLHDYDSRLLGELHIALLRSIIKDIEDVARTPSIALGVNPGGGHPQIVEGAYAWGFNIRSWQRHLNLLTWPEILRQFALSAGFGPQLKKRTVEDSYYRNDNEGHDGENVILTIRNGTAAVNAAAKMKERGYTNRRRSRHRLTPGTVKFAAFHVLSLEGSNGLTILEVAEKIQKSGLRDLTTSKTPEASIAAALSRDTKLFERTAPSTYCVKSPYRKDPADSEAVLSAARERIRAFQNVLSDSEAEKEVDEAERDDDSDCDDGDDDPDGDDVNTEVEDDKDPLLAVKSQDEVPSTTTVIGIKANLDGVGNALNSSSSFTKSAKGAPLPSLGRSNAADTSNDLPLGVSSANHEVVPDDSENTQIDESNQAEPWVRALAEGDYCDLSVEERLNALVALVGVATEGNSIRAVLEERLELANALKKQMWAEAQLDKRRFKEEFTSRVQYNSDMGLKPDIYQENNVTEITSTPACDAYRENDEHVGTINNCEMLDQHNQGNAGSLPYERNGVCQEILATPDTSYVQQYAYADKRRSQLKSYIGHRAEQLYVYRSLPLGQDRRRNRYWQFTTSASPNDPGSGRIFFESKDGYWRVIDSEEKFPSRYTVAKSKQETTPETAGLDLYDGRWLPGSGRRGRGRGSRGGSRGGRGRSRGGRIPRGVSSSSRIEFKGGIVASDKAPRKNVRRGRGRGRGRRRGRRTVRPRQPSVGRARSIPKENLLGSFSMLSSSKAATIEESPRSSGADEWGLETRTTYTECDENSSGSQSEDNEENGQPMDDDYEDQVPDYSIGYSTGSRHHVMMSMMDHDSDEEDEDAEGDENVEEDADLAVDDADVEMDEDDEIGDDGEDGGVGGEMNADEDPDATSYSSDYSD

SEQ ID NO: 66540 - protein, 277 aa, Zea Mays
MAFGRRSPGSSRHPPALTIVTALLLASLYFAAAAAALSPTDAMHNNNWAVLVCTSRFWFNYRHMANTLSLYRTVKRLGIPDERIILMLADDMACNPRNSYPAQVFNNENHQLNLYGDNVEVDYRGYEVTVENFLRVLTGRHESAVPRSKRLLSDEGSHILLYMTGHGGDEFLKFQDSEELQSHDLADAVKQMKEKHRFKELLIMVDTCQAATLFSQLQSPGVLAIGSSMKGENSYSHHLDSDVGVSVVDRFTYYTLAFFEKLNMYSNASLNRFLGCA

SEQ ID NO: 66541 - protein, 129 aa, Zea Mays
MAVAKVKSVAVSVSHKCRNILATGWEAHLNTVKADNKGSKNEIYTSRVHYMIHKGTPYLIVPENDMHNINIIIDERGSLAVFSLIRDRVASLLKPSKDEIEAARMAAINKEIKRVLTEVLSKAGQKVRE

SEQ ID NO: 66542 - protein, 242 aa, Zea Mays
MMMTSFIALVESTGAFIGASRYASATMIPPSIISRGVGWQGIGLLLDSFFGTANGTSVSVENIGLLALTRIGSRRVVQISAGFMIFFSVLGKFGALFASIPLPVFAGMYCLFFAYVGGVGLSLLQFCNLNSFRTKFIMGFAFFMGLSVPQYFNEYTAVASYGPVHTGARWFNDMINVPFTSKPFVAGLVAYILDNTLQVKESAVRKDRGNHWWEKFRSFKKDARSQEFYSLPFNLNKFFPSV

SEQ ID NO: 66543 - protein, 449 aa, Zea Mays
MAATAAALRCCFPGSSGVGSGFVKPNSSRRGWCAAAVAAPSREAEPVSSLGHRTRVDFPILHQEFDDAKLVYFDNGATSQKPCSVMKTLDEYYRSYNSNVHRGIHALSAKATHAYEDARRKVANFVNAADSREIVFTRNATEAINLVAYSWGLSNLKEGDEIVLTVAEHHSAIVPWQFVSQKTGATLKYVGLTKENVPDIEQLKGFLSNKTKIVVVHHVSNVLGSMLPIEEIVTWSNRVGAKVLVDACQSVPHMPVDVQKLGADFLVASSHKMCGPTGVGFLHGKFEILSSMEPFLDKSTYAEPPSRFEAGTPAIGEAIGLGAAIDYLSCIGMEQIHEYEKELGTYLYESLLSVPNVQIYGPAPSQTVHRAPLCSFNIENVHPTDIAEILDLQHSVAIRSGHHCAQILHRTLGINASARASLHFYNTKDEVDTFVDALKATVDFLTDRY

SEQ ID NO: 66544 - protein, 394 aa, Zea Mays
MSVGTVIAYGEEMVRDVGWEERLDSDWDRAVVVEETARLPQLTRMQPERNQGPHKVSFFVDKQGAQEVMDYLPKKLERRGVDVKIVYSSGNALDVLPRGAGKGQALVYLLKKLDSNGKPPKNTLVCGDSGNDAELFGVPSVHGVMVCNAQEELVQWYQENARDNPRIIQATERCAAGIMQAIGHLGLGPNVSARDLVGFPAYYPNNNKKGAAATAKPADVVVRFYVLYEKWRRGELPSSNYFSSSSAMRYLKSITHPNGTIIHPCGSERSLHASVDALLSSCYGDKKNFRVWVDRLVTSPIGTSSWLARFDSWEMEGTYVCLAFITSHHITYIYMLLLSCMPAIYIFSSSGGVRYCCRTTILLNIKVCRSASSWFLLLLSQFRRAPVRNCLFLF

SEQ ID NO: 66545 - protein, 256 aa, Zea Mays
MGAGGRAPVAGEAQARRRRALLARVGLRVLCRRLASQRLQDQHAEAVRRPCGSCRAAASRRPCGRRSAPRGTRCPGCPCRPSPRTRATAPPAGTGSPAAPAGRAAMRQRGGEGRARRRQTRPAGADLGRARWGRRGGGDWEKEAAGWEIRARALGEAGEGGPGRAAVRRRGGAVSRGGCSNRGGPQQGGGAPWGHQQGCLAGGAPALDGEERWGWRLLGGRAAPGGMDEPPGAAARKQVVVGFWGSRRLLETLTLT

SEQ ID NO: 66546 - protein, 441 aa, Zea Mays
MAYIDHYDVADALSCKAVFQKLPYKKRLHHLNIYVIVQWRQLIHIGPSSCIPSYINYRIRLFHLLKLSHIFPVNSNIQCSNMPGSSLYAEAVILPYVLKFIGQGEFLEHAEGFIMSHSTLLGNSEASVAKSCNIPCSLSFGSTNLCGTLVSTYASGSEGTVLNEPIVLRKEYSRILLEFEAGIFKKYQLPRINGSYILQCPSRSFTCTMGNCGCLQGGKVSIDAQDRLWSFAITIGGNINIKGSIGDQSIGVTSMKMDEIFSRNMVDDELRLVQPWNDFYRNSYFHLDFSYEAISKKMEDYNTVCHVLNGLCVSSSEVLSVSSCVDIMMPKDASVSADFKTKEVVHGDLLISVQGKVENIHSLVCKWERCIPGNEKYSLCIHIADNNHAVYIRGYSNKHFTVGIGPGATVTFHRIRFKQFAPSLLVFFNCFFHYFVRIVAA

SEQ ID NO: 66547 - protein, 335 aa, Zea Mays
MYVKYHDLHGGEQESRKSNYADLANKYYDLVTGFYEYGWGDSFHFAGGPILPCLYFRYPGETSREAIKRHQHFMALQLGLKKGMKVLDVGCGIGGPLIEIARFSSTSITGLTNNDYHVSRGKEHIFSAGLSEQCCSLKGDFMNMPIADNTFDAAYAIQATCYAPEAQGVYSEVYRVLKPGQYFALDEWCLTDRFDPNNAKHLTAKAEIELGDGLPDIRTTRQCVQAMKDAGFEVIFAKDLAQDFPCPWYQTMDPNYFSWANFQCTRPGRIITRAIVNTLEFLRIAPAGSVGAYNVLTSASDGLLKGGREGIFTASFFVLGRKPLKESEIVNGGNL

SEQ ID NO: 66548 - protein, 855 aa, Zea Mays
MEMVVAAPALPAEVERALIRDITVAADAHAKEGDTFFLITTRWWQSWIDYLIQDLTGATISNMEIEIHDNLVEGRDYILLPQQVWEKLHGWYGGGPTLPRKAINTGFSQTDLAIEVYPLRLQLILMSRGERTFIRISKKVCIWDYYGRTKHSLMDSLDKTLDDANIQMDQNILVEVTTDASGSLDGLVKRNNFFESDAPKSGLPDENFAANNYASRSYSSSLTPSIYLRSPNGDLDNVHGSSGMITRGSPLGLTGLLNLGNTCYMNSAIQCLVHTPQFTKYFCEDYHREINRQNPLGNVGELALAFGELLRKLWAPGGRAPVSPRPFKMKLSRFASQFSGYNQHDSQELLAFLLDGLHEDLNRVKHRPYINSGDADGRSDEEVADEYWANHIARNNSIIVDVCQGQYKSTLVCPVCGKVSVTFDPFMYLSLPLQFASTRSVTAVVFSCDGSVPPTPFTVNVPKQGRCRDLLQALGAACSLKNGEKLLIAEIRNHKIYRFIDDPVLQLSTISDDDHLAVYKLPKLEKRVNYIQFVHRHEDLDHGNNNSLTSWKPYGVPLLAQISRNEIVTGFDIHELVHKMLVPVLRNPDSLHLAVQSSVSTRTHSYHTDSSKCQLLLVDDSNTVIEKSNDAIRIPQSSLATVFFINWPKADLKKIDTHHLEYLPEVFMYAPPAKRTRGEALSLYACLDAFLREEPLVPEDMWYCPRCKEQRQASKKLDLWRLPEVLVIHLKRFSFSRSTKQKLETFVNFPIHDLDLTNYIANKKTSERQIYELYAVSNHYGNMASGHYTAHIKLVDENRWYNFDDSHVASIDEDEVKTAAAYVLFYRRVREQDIARGTSNGSQLYAKRSHGYSHR

SEQ ID NO: 66549 - protein, 81 aa, Zea Mays
MTELIEVISEENKSGPLIVLLKDVEKSFIGVTESLSSSRSKFESLPSGVLIIGSHTQMDSRKEKICNVRILEFPSLAIPQI

SEQ ID NO: 66550 - protein, 124 aa, Zea Mays
MVAVERRLKEMGIPYVQRCVEEGGINVDQIFFHDPDAFMIEVCNCDNLPVVPLAAAADQRAPAVLGACKRAAAAVGVKQQQQQSSGGAVPSSAAPAAAAQRVPSAAQAPIVRVAEESTSHISCA

SEQ ID NO: 66551 - protein, 236 aa, Zea Mays
MHNLRSVSKPNAKLYLGLPFTPNRQCEALFGPTEGPTRSADVSLTLSTTRPHCSCSLDAVTSRMDGADIPSHSAADGDRPPENADDGGVEDERAAAPPPERCGALASAIAGVLAGALREHEERAAATARSQDEVAAAIDRLNGELDRLLENAPTMVIMHHSARISSIRKRISAMNMLLKSIQRRIDSMDRIISTDHSSPVQKAGNEVGTSYGFQYHEVSGGEVSFSWALVLWYEIQ

SEQ ID NO: 66552 - protein, 185 aa, Zea Mays
MESIFGEPPSSSPLGSSPSPQQPVEDSPLVLTHTDSSGQANMVDVSPKEDSKRVAIASCRVLLGQKVFNLVASNEISKGDVLTVAKIAGITGAKQTSNLIPLCHNINLSHVRVDLTLNEEDSSVVIEGEATTSGKTGVEMEALSAVAIAGLTVYDMCKAASKDICITDVCLQHKSGGKSGSWARN

SEQ ID NO: 66553 - protein, 961 aa, Zea Mays
MGILPRICFLLEMDPSPALEDYLVSVLVALARHSPQSADAILNCPRLIQSVTKLLINQGSMEIRSSQIRGVTLLKVLSKYNRQTCLNFVNHGVFQQALWHWYRKAGTIEDWVRSGKEKCKLSSAMMVEQLRFWRTCISYGFCIAHFADFFPVLCLWLSRPDFKKLSEHNVLVEFSSVARESYLVLAALAQRLPLLHSVEQLANQDLGVSASYIETCSWSHVVPMVDLALSWLHLNDIPYVCSLISEQNRNTEHMLEMSYLILVISSVLGMLNSILERISPDVTPEDKSYSLPWIPDFVPKIGLGIISNGFFSCSTTVAGRNAEHQPFCCASLVQGLCYMRCHGNVDVSLSSISCLQRLVQLSWSVDRVIQGATKCCSECFNESGTGEAGKLLAEGISSLWHNDLLHLLTSLLPMISSQWSISQNIEMFGRGGPAPGVGFGWGTCGGGFWSLKCLLAQLDSQLVVELIKCFSSVQGSPIILDEGVKLDNVTNTVVTASNWISSTLGLSLIAGPGQIYMLEKVFDMIFEPSILKYLKSSIHKFTSDMELLKPFEWDLNEDEYMLFSSVLKSHFRSRWLAIKKKHSDKYAGDNSSTKISKTPEILETIQEETELSEAVNQPCNTLMVEWAHQRLPLPIHWILSAVCCIDDPKGTLSTSANYILDVSRAGLIFLLGLEAISATPCLHAPLIWKIHALSVSIRSSMHLLQEDRSRDIFCALQELYGLHLNRLYQKFCKPNSIEEVKGVVVGTSEEAMEISSLEILRFQEKIHGSYTTFVESLVDQFAAVSYGDFVFGRQVAIYLHRKAEPAVRLAAWNALSSAYVLELLPPLDNCIGNAPGYLEPLEDDEKILESYAKSWTSGVLDKALQRDSMAFTLAKHHLSGFVFQSSDSGTMLRKKLVKSLIRCYAQKRHHEVMLKCFVQQGIAQDSKSSELDRRFEILKDACEMNSNLVGEVQRLKACLGQ

SEQ ID NO: 66554 - protein, 251 aa, Zea Mays
MASSGVRNGVGPRMSAKPDRQGAGATPKTAAGKHRVSSAGGAGAYRRTSSGPLPAAAGGRAASDGVSSRVRVAVRLRPRNAEELAADADFGDCVELQPELKRLRLRKNNWESETYEFDEVLTDFSSQKRVYEVVAKPVVESVMEGYNGTVMAYGQTGTGKTFTLERLGEEDTAARGIMVRAMEDILADITPGTDSVSVSYLQLYMEMIQDLLDPVNDNIAIVEDPRTGDVSLPGATVVEVRDQKSFVDLLR

SEQ ID NO: 66555 - protein, 331 aa, Zea Mays
MLSLQQQHGGAVAAGGDARHHAPQPSVLGGGADWLVFGGRADLEEPARNAPSPALFLLPPAGLDDRAAQPEPNPKPAQLAGAVDEERHLALAHQNYRSGKYREALEHGNVVYEKNPRRTDNLLLLGAIYYQIRNYDMCIAKNEEALAIDPHFAECYGNMANAWKEKGDIDLAIRYYLTAIQLRPNFCDAWSNLASAYTRKGRLNEAAQCCRQALAINPRLVDAHSNLGNLMKAQGFIQEAYSCYIEALRIDPHFAIAWSNLAGLFMEAGDLDKALMYYKEAVKLKPSFADAYLNQGNVYKALGMPQDAIMCYQRALQARPDYAMAYDTHLG

SEQ ID NO: 66556 - protein, 83 aa, Zea Mays
MTYVHVFYASASIICFLPSHQLKCVMICCCLVLTLNQLTLNLSRLRSSLVLPVTSERKSINSESVVLLQGYTQHFIEWKEDTR

SEQ ID NO: 66557 - protein, 991 aa, Zea Mays
MASNMQSSGLPQPPRPPMMGSSAQPQNLGPPMPMQFRPVMPSQHPPQFMPPAAQQFRPVGEPMAGANVGMPGQMPHFPQPGQHLPHSNQVPPVSQGVPMVYQPARPMSSAPMQQQQQTAYAGGHLPTMGAPMQPLTYTYQPTSIPPVAQPWSTGPGQSVHHVPPLVPSGHQPVSAPTTLPPVNLSEPSSSDWQEHTAAEGKKYYYNKKTRQSSWEKPVELMTPLERADASTEWKEFTTPEGRKYYFNKVTKQSKWTIPDELKVARELAENASNQQPDRESGIATSALVRSAAFEPSTAPANQSSSAVGIIASSAHDGSSNSVLSGPPLPHNVENTSSSIVGMQNGGSSTAVVPVAASTEVPLVATDAGSSRNNDENSSLTTGADAEDGTSAEDLVEAKKTMPVAGKINVTPVEEKTSEEEPVVYATKMEAKNAFKSLLESVNVESDWTWDQTMRVIINDKRYGALKTLGERKQAFNEYLNQRKKFEAEEKRIKQRKARDDFLAMLEESKELTSSTRWSKAILMFEDDERFKAVERPREREDLFENYLVELHKKEKAKAAEEHKRYVAEYRAFLESCDFIKASTQWRKVQERLEDDERYSRLEKFDRLDIFQEYIRHLEKEEEEQKRVQKDQVRRQERKNRDGFRKMLEEHVADGTLNARTRWRDYCAQIKDSQSYLAVASNTSGSTPKELFDDVIEELGKQYQEDKIQIKEVVKSGKIPMTTSWTLEEFQTATLEDDALKGISTINIKLVYDDQLERLKEKEQKDAKKRQRLGENFSDLLYSIKEISASSTWDDSKQLFEDSQEFRALDSETYARELFEECVVHLKERLKEKERLREEEKAKREKEREEKEKKKEKERKEKERKEKERDHREEREKEKGKDRSRRDEMEFDGADLNTHGAKDKKRDKDKEKKHKRRHHDTDDVSSERDDKDDAKKSRRHSSDRKKSRKHAHGSDSDSENRHKRHKKDRDSSRRNGAHELEDGELGEDGEIY

SEQ ID NO: 66558 - protein, 80 aa, Zea Mays
MAQGHISLSITSIAFVLWLSLCIIGNKAHDISVENSIVEAVGSIQEEPLLEHHMCMQKDQGYIRSYSTESLALVWGSNKN

SEQ ID NO: 66559 - protein, 121 aa, Zea Mays
MSLPIHRRWPLVSRERGRRRSGGRACRRALFGAVRGAGFCDRGDAGRRAEGARQAGGHHRSDPRRGRRCNRPPQRRWLDFQSGKKNWTHQIPLESKDFQHSREDFNNEHATQVHTSTHKQL

SEQ ID NO: 66560 - protein, 137 aa, Zea Mays
MSKIIDPTLIIDEDHLEEVWAMAIVAKSCLNPRSSKRPPMKYILKALENPLKVVREDNGNGSGRLRATSSRGSWNAALFGSWRHSSSDIGPSREDNILKRSETIKSSGGSNGDHSSSRRRQSKEIFPEPSGSRDTED

SEQ ID NO: 66561 - protein, 229 aa, Zea Mays
MKCLWKTMYYPLCSQSLLSEELIWIRMPLEPSSQNPSMQIAVIRHVVSGILLHNTIYDVVPLSSKLTVLDTQLPVKQAFKIMHDVGLALVPFWDDRQGTITGMLTASDFVLILRKLQRNIQVIGNEEPISAWKEAKLQFYGGPDGAVMQRTPLIHATLISGPRKKLNSACFLFEARATNLPHQISVAKAGLVNKLCFLPDCHCFYICAFILRETFCPKKACSARFKQVI

SEQ ID NO: 66562 - protein, 1178 aa, Zea Mays
MMLAKLGVGIEFKKVMPNVSGTCSKTTALSFMHLLASQELVFLPVTDKLEGLRPGSPGLTGVVLGNYSEILSLSSSVMRCILLCRGILGIINIVNMRLKKDSLELPAFAFDDLTYAGQNKGTGMNAHRVPAHMTDPIYLLPMFIRSLLCLDLSNCSGLTQLPASIGNLSNLVALNLSHCYSLHTLPASVGRLKNLQILVLSCCHELRILPVSLCELSKLRLLDLAGCSGLQNLPASLVNLCNLEILNLSYCKELKELPQPFGNLQELKYLNLSGSHRVDLDVECLYTLANLKSLTLSPLTNIQGFPGSFKDLANRLDSLRLWKNQIHPQCGPKAVSLHSYRCYEQSIIDMLLSDEADNSSNQIVTSACIVGESGMGKTELVHRIYNNRMILDTFDLRIWLHMCDKKRLLGKIVELTTFASCGDASISVLEEIVIEELASKRLLLVLDDSEIKDQYFWGYLWKLLNVCAKGSAVIVTTKSMVDANQTGAMQTFYLSPLSKEECFMIFKEHVLEDLVVNNYCQLESIGWKFAEKCGGNPMCIKALSGLLCHSEVGLSEIDMIVDGILPALRLCYDLLPAHLQQCFKFCSLFPKDYIFVKHHIIRLWIAEGLVFCEEGTKPEDTALHYFDQLFCRSFFQRSPFHSDHKDSFVMHELFHDLAHSVSKNECFRCEEPFCSLAENVSHLSLVLSDFKTTALSNEVRNLQSFLVVRRCFPVVRIFTLDDIFVKHRFLRALNLSYTDILELPISIGNMKHLRLLALNNTKIKSLPIEIGQVNSLQTLELKDCCHLIDLPGSISNLAKLRHLDVQKESGNIIVGMPHGIGYLTDLQTLTMFNIGNDMLHCSISELNNLNGLRGHVHVTRLENIMTANDAREANMMGKHLLEALTLEWSYQDEGMDDDMGKEIASEILQNLQPNSNIMELIIRNYAGDLFPVWMQDNYLCKLTSVTLDNCHGCSELPYLGDLPSLKSLFIQRINVVERFGIETSSLATEVKYPTRFPSLEVLNICEMYDLQFWVSTREEDFPRLFRLSISRCPKLTKLPRLISLVHVSFHYGVELPTFSELPSLESLKIEGFQKIRSISFPHQLTTLNKLEIIDCKELLSINAYSLSVSNFKVVRCLKLDLVGSSMEDHISHKVVNGRNILTRKHMVLKTLTHTNLLDDGSKWEKFGEKNIFGYIFPR

SEQ ID NO: 66563 - protein, 229 aa, Zea Mays
MKPQACHGRSMPKQTGVKANGNLADDETAIRRNWTVRNGDPLVHLHIRQPAPRPRPRGGEERRLVPHRIAKLSWASDPEVFYMLNAVARQKELCVAINVCWGDQREKVCDATEDGRSSISSRSSWLAVASARSKDLQAHEVLLLIAGFLLSYGECYMRLDRNRYQNTNSVFGLQDDRSEIIRFKHRSCWNCLVNVVEPTRPSQTRSATYQICRLGRFLQFRQTSMTSVC

SEQ ID NO: 66564 - protein, 588 aa, Zea Mays
MGTCGRRVLGVWFFFWFLLTLEQCTSLNREGAALLRFKAAIEADPYGALLDWNQESLSPCTWFGVECSDDGLVMSLSLANLGLKGVLSPELGKLMQMKSLEIGDLQDLKMLDLGYNNFSGSIPSELQHILSLEFLFLEGNRLSGRSPVGVHQLTRICEHENQVPTTTTRIVTIKIRRLLMSKQKDFKMVNITGHPIRFPLNSPAAPSPSDPIPPPPAPPSPSEPIPPPSAPPSQENKSKSSATLYASIGAVIVFFMVASSALCFFYYCRKKTSTVVPLSANSSSRQLQTTTMEGITLFRRSELETACEGFSNIIDTLPGFTLFKGTLPCGAEIAVASTSVAYAGGWSAIDEAHYMNKVGALSKVNHKNLLNLVGYCEDEKPFIRMMVFEYASNGSLFERLHVKEAEHLNWQSRLRIAMGVLYCLQYMHQQNTPVTLKNLNSSYIYLTEDDAAKVSDISFSVDKREDDEYDAPDEYSTVYKFALLLLETISGRRPYSEDDGLLVLWARRYLTCASPVMGMIDPTLNSVPEEHARALSELIRLCLSEDRRQRPTMAEVTKRMQEITGITQDQAIPRNSALWWAELEIMTS

SEQ ID NO: 66565 - protein, 585 aa, Zea Mays
MDQYEVLEQIGKGAFGSALLVRHKVEKKKYVLKKIRLARQTDRTRRSAHQEMQLIATVRNPFIVEYKDSWVEKGCYVCIVIGYCEGGDMAEVIKRANGNHFSEEKLCKWLVQLLMALDYLHANHILHRDVKCSNIFIARDQSIRLGDFGLAKILTSDDLASSVVGTPSYMCPELLADIPYGCCIYEMTALRPAFKAFDMQALISKITKSIVSPLPTRYSGSFRGLIKSMLRKSPEHRPSAAELLKHVHLQPYVLQVQLKSSPSRNMSPIYQALTDKVKKMTFPSDITDSARRVARRNSLGNERTVTFCKPSPERNSISSTRSIKEYTTTQSVKELSVDSSQIDDEVTSKAIRTKTTGILRTPKSTPAKTLTTRNRLDPPKTSYSRTNHSELTSRTPLNKSAVTARRASLPLPTYRAPNSRAASVLDQLDSPDVSVNAPRIDRIAEFPLASSEDPLAPMKKNLSSAPGHDGSCSTPPFINRSITKDKYTVQVLHRGDGDNASDSSGRNATAASSGGSNDSRQQRFDTSSYQQRAEALEGLLEFSAQLLQQERYEELGILLKPFGPEKASPRETAIWLTKSFKETAS

SEQ ID NO: 66566 - protein, 833 aa, Zea Mays
MGLQSSPMLLPAPTATAAGGGSQWRTAVAGPWSSRIKKKTDAVAVPAAAGRWRARARAQDTSESAAVAKGSSLTPIVRTDAESRRTRWPTDDDDAEPLVDEIRAMLTSMSDGDISVSAYDTAWVGLVPRLDGGEGPQFPAAVRWIRNNQLPDGSWGDAALFSAYDRLINTLACVVTLTRWSLEPEMRGRGLSFLGRNMWKLATEDEESMPIGFELAFPSLIELAKSLGVHDFPYDHQALQAIYSSREIKVKRIPKEVMHTVPTSILHSLEGMPGLDWARLLKLQSSDGSFLFSPAATAYALMNTGDDRCFSYIDRTVKKFNGGVPNVYPVDLFEHIWAVDRLERLGISRYFQKEIEQCMDYVNRHWTEDGICWARNSDVKEVDDTAMAFRLLRLHGYSVSPDVFKNFEKDGEFFAFVGQSNQAVTGMYNLNRASQISFPGEDVLHRAGPFSYEFLRRKQAEGALRDKWIISKDLPGEVVYTLDFPWYGNLPRVEARDYLEQYGGGDDVWIGKTLYRMPLVNNDVYLELARMDFNHCQALHQLEWQGLKKWYTENRLMDFGVAQEDALRAYFLAAASVYEPCRAAERLAWARAAILANAVSTHLRNSPSFRERLEHSLRCRPSEETDGSWFNSSSGSDAVLVKAVLRLTDSLAREAQPIHGGDPEDIHKLLRSAWAEWVREKADAADSVCNGSSAVEQEGSRMVHDKQTCLLLARMIEISAGRAAGEAASEDGDRRIIQLTGSICDSLKQKMLVSQDPEKNEEMMSHVDDELKLRIREFVQYLLRLGEKKTGSSETRQTFLSIVKSCYYAAHCPPHVVDRHISRVIFEPVSAAK

SEQ ID NO: 66567 - protein, 1081 aa, Zea Mays
MEKKTVHVLAEGNGEIENGTSSSQNPETLEHPVLLSASQTVPNNLGIRKNYKRAANRGKKGSQGLTGQAYTLRSSDIDVRVLRSTSGSKTTSTEHVQPPGQPAAKRRKRSRASNKNSTDEFSQIRKRVRYILNRMNYEQSLIEAYASEGWKNQSLDKIRPEKELERAKSEILRCKLRIREVFQNIDSLLSKGKIDESLFDSEGEISCEDIFCATCGSKNATLGNDIILCDGACDRGFHQNCLNPPLRTEDIPMGDEGWLCPACDCKLDCIDLINELQGSDISIEDPWEKVFPEAAAMTNGSKQDEAFDLPSDDSDDNDFDPNMPEEHVASKEEGSSEEEEDDDGGSDSDDSDFLTCSDDLEPLIDKKKVDDLGLPSEDSEDDDYDPAGPDSDKDVEKKSNSDESDFTSDSDDFCKEIKKSGGHDEVSSPPLPDVRVGDMEKNTAQSNTTSSADDPMEIEIDQSVVLPASTSPPPAPVSAPVTLAAPASTAPPPAPVFAPLIPPARFRERDETEVRPLAADPRLFDLQRATAARVRRFRYVPVESWLPAQRDPAAVDLFSTRIQESFFRAQMSAQIALRVHRLLDLPAFLLAAGADSEVHLSYLPGLLTLLTTSGRYVEEWVRVFYATVWIDPNHHWMRFRFEREDVTIYASQIRQLFGFHESSTRLHSLCYGTSDPPRRPHGGVAPGTAYVAALFRPPFSDGSRRSPADFTTTAKFLYQLMRRTLLPRIGSREATTHIQLWLQEAKISHSEFDVVDFLICEIEDTILDGLRARRQLPYAHYLCHIFAQLIRPPQFQGTLEVSRLVFGSYRPAPEDPVPAPAPVFDTQAEDTALHQFEAQDTAVDNNDFGIPPPMPPRSHDHEVESSRATPAAPPAIDPAFASILQTLTQQQAHLAAEQTRQAAAHQQLTERMLSMFQTIQDKHDSLMQQLLQDRAERRALMTLMLHHSGILIPPVQSVLPPPLQAPVVPTIQPGPSLPTVGPSSSPLRSVTLAFTSPVFSSVCPQPSVPPASAVPTTAMAVSVTTSDPAAPAAQPQSESVSALASTADPGSETDSDPQLAFALLPRPRPDVPPPPPPTSDA

SEQ ID NO: 66568 - protein, 568 aa, Zea Mays
MPMSWKTKDGSQFHARHFLKVGTTYQKWFSCRLWTVPSFFQVPILACLSASKQDVQVISPFRIAAVMSKNGTSMQNFTNKSSPVSANGHDNGAAGESGYQDVEPNGEASPSGHDILETQSLLQMEDHKQQIEHVLRRFRESNFFVRIAESVEPLWSKKSVTSTTMADERSDNQGNSKSSRSNVYNTISDKGVFDGNTSGGVARDVVKCYSLQNGDIVVVLQVNVSVNKLEDPVLEVLQFEKTSSVQTPNNIRPPPISESQEFMPEKPAKTPDIINDGQLSFRGVPLEPERYSNIAPTHAKDIVVFIDAITIVFEEASKGGAPLSLPIASIEVGHGHSLPNLALRRGEEHSFILKPATMSSRERKTNSHAPLALSLPTMTGATLNTHTPKAGEPYADLSDQYAVLILTLEATNMTSENLTLTVLAPEASGSSSVVSLNSSPTTPNGSFDGVNESSKRSGLGKDGIGFRRLNSVLATPKEGDNGGNRMSNASGCTHLWLQSAVPLGCVPARSSTTVKLELLPLSDGIITLDTLQITAREKGLAYIPEHSLEIHATSVLEAESQIMARIER

SEQ ID NO: 66569 - protein, 395 aa, Zea Mays
MSNCFNSGINKIFVMSQFNSTSLNRHIHRTYLEGGINFADGSVQVLAATQMPEEPAGWFQGTADSIRKFIWVLEDYYSHKSIDNIVILSGDQLYRMNYMELVQKHVEDDADITISCAPVDESRASKNGLVKIDHTGRVLQFFEKPKGADLNSMRVETNFLSYAIDDAQKYPYLASMGIYVFKKDALLDLLKSKYIQLHDFGSEILPRAVLDHSVQACIFTGYWEDVGTIKSFFDANLALTEQPSKFDFYDPKTPFFTAPRCLPPTQLDKCKMKDAFISDGCLLRECNIEHSVIGVCSRVSSGCELKDSVMMGADTYETEEEASKLLLAGKVPVGIGRNTKIRNCIIDMNARIGKNVVITNSKGIQEADHPEEGYYIRSGIVVILKNATINDGSVI

SEQ ID NO: 66570 - protein, 547 aa, Zea Mays
MPPRALPTTSTPASRRVVYVLLAALATAPFLLLLLYGGASPSALCPTSYRTPRRLPYPSVLWSKVPPLPALSTSPHPDLRGSRWIVFTASPHAPRHRPLRAVPGWQVLAVADEATPADWSHPGAVLLTLTDQGRLGFRSVAFLPARGPARKAAAYLFAVQRGARVIYDADARNAVLGGNLTRHFDVDLDQRHGGAVLLQYSHANPNRTIVNPFVHFGQPSIWPRGLPLEKAGELDAEEFYTEIFSGGQFMQQGMCNGLPDVDSVFYFTRKSLEMEAFDFQFDADAPKVALPQGMMTPVNSVNTLFHSPAFWGLALPVSVSPMASDVIRGYWAQRILWEIGGYLVVYPPTVHRIDNVRGHPFDEEKDLHVNVGKLIKFLMEWRSSKLTLFERILDLSYAMTEEGFWSEKDLHFMTAWLQDLVAIGYRQPRLMSLEIDRPRATIGHGDKKGFGPKKLPSVHLGVEEIGEVSTDIGNLIKWRKHFGDIVLIVHCTELVDRTALEWRLLYGRIFRAVVVLSEQSNSDLAVEFSNLTQAYNHFALQVLAEGV

SEQ ID NO: 66571 - protein, 449 aa, Zea Mays
MVQRLTSASTVLRRVLDNPALQDCQENNGFGDMMDEDVINNISVRLKLSLTVWDFTLPVTPSLPAVFGVSWQYSFLLCSISISVLCNCYGTGCNGLRLMGLLGPAELAATEGSVGIAAALAKPAAGTPDHPKANEYYSDPRLAAYAVPYAPILSCTDAAKNSLRREVEILKSKPHWSKAYFYLWDEPLNVEQYDMICNISNELRSYAPDVRILTTYYCGATCADLEHPVGVPGCPLSSRAAGPSGSELAPSTFEAFAKVPNVLRPHTQIFCTSEWVLGTREDLVKDIVAELRPDLGEEWWTYVCMGPSDPQPNWHLGMRGTQHRAVMWRVWKEGGTGFLYWGSNCYEKAMIPSAEICFRRGLPPGDGVLFYPGEVFSSSHEPVASTRLERILSGMQDIEYLKLYSSRYGREEGLALIEKTGMYLGPDRYTLDHGPVDVMRGEVYRTCRS

SEQ ID NO: 66572 - protein, 273 aa, Zea Mays
MEGDEMLRVKLGRQGLEVSKLGFGCMGLTGVYNAPVPDQAGIDIIKHAFEAGITFFDTADAYGPHTNEVLLGKMGELKKLVEEGKVRYVGLSEASADTIRRAHAVHPITAVQLEWSLWTRDIEEDIIPVCRELGIGIVPYSPLGRGFFAGRAAVERVPSESLLSKHPRYSGENLEKNKVLYTRLEMLSKKYGCTPAQLALSWVLHQGEDVVPIPGTTKAKNLDENIGAVKVRLSKEDLEEISGAFPAGEVAGSRLLGVLEPFSWRLANTPPPK

SEQ ID NO: 66573 - protein, 491 aa, Zea Mays
MAGAAASPAAGHVVERFRSRLREEAGGGEPGAAAVVHVYAEALRELTFNCKPVITELTIIAGQHATLAAGGIADAICARVAEVPPDQILPSLYLLDSIVKNIGGEYVEHFATRLRSVFVDAYYRVHPNQYTSMRRLFRTWWPVFPSSVLRSIEDDLQFSSSENNRPTTSTNLHQTESLSPRPSHGIHVNPKYLEAQHKFKQANVVHQPAARDTRQMTDVQEDLINGLASNSSCERPSIFQKSSLQYADDPDQQETFRPLAGTRAASPHLLSTHASDMNLDGPLVNSRRNLSISPPLDVFSRNVSPKRALERLPPSHSVLGPDPRKFTDRNGRLRWGLDDGAQRPTISMLDEEYRKQSARELIDAYGNCQGRDADERLPKVQRLDPNGMASRSSARNWLTSEEEEYSWEDMSPTLTDRVSSSMPSFPPGTMRTGFPGANAGLLESDVGRHNFPSQATRLSVDGSPFNLEDRFSTASDHMQTCQHDSAVSMNL

SEQ ID NO: 66574 - protein, 954 aa, Zea Mays
MPLLDLYDSSKGYVVNDKCIIEAEVAVRKTLDFWNYDSKRMTGYVGLKNQGATCYMNSLLQTLYHIPYFRKAVYHMPTTENDTPSGNIPLALQSLFYKLQHSDNSVATKELTKSFGWDSYDSFMQHDVQELNRVLCEKLENKMKGTTVEGAIQKLFEGHHMNYIECINVESKSTRKESFYDLALDVKGCSDVYASFDKYVAVERLEGDNKYQSEEHGLQDAKKGMLFIDFPPVLQLQLKRFEYDFVRDTMLKINDRYEFPLQLDLDRDDGKYLSPDADRSVRNLYTLHSVLVHSGGVHGGHYYAFIRPKLSDQWYKFEDERVTKEDMKRALEEQYGGEEELPHTNPGLDTAPLRFTKHSNAYMLVYIRESDKDNIICDLDDEDISEHLKVRLRKEHEEKEYKKKEKAEAHMFTALKVARDFDIKEQIGRHMHFDLVDFDRVNSFRAPKNMSINEVKEELSKEFGIPVECQRFWVWAKRQNCTYRPSRPLTSQEETSTIGVLKDATVAKLPNSEVRLFLEVHFRQENQPIAPWNTKEDILLFFKLYDPEKEDLRYVGNFFVKASGKPSDIVERLNQIAGFLSDEDIELYEEIKFEPVVMCVPIESNASFRSSQIDNGDIICYQKHCLPDSMDRYRYPTVPSFFEYIHNRQIVHFRLLEKPKEEGFSLELSKCSTYDDVVEKVAKQLRMDDPSKIRLTQHNPSSQQPKPHFIKYRSLNYLSDMLHNHNQMCDILYYDILDIPLPELESMRSLKVAFQNAANHEMSFHIMRLPKSNSLLDLIEDLKSKVEISCNDAEFRFFGVYLHKICKVYQPGDKIDSVNDHGPLYIEEVPEDEKNAGPHDRLVHVYHFEYNHHIQYFGEPFFFLIRDGEALSDMKVRIQKRLQVPDEQFLKWKFAHVTFSKPEYLQDSDIKQRPVYGGWEQHLGLEHTATTPKRSYLGNNQNRHSFEKPVRIYN

SEQ ID NO: 66575 - protein, 327 aa, Zea Mays
MPPPAAMLLLTAASGPPTLSLTLAARRAPLRAPSRRRLRALRPARIRAAAAIGGEFGGLGRRRVVVGEFIERLRNVLPGGSWWRLEDGDEAGDGAGRAEGSGTTAVSALRRMWALVAGDRLVIYVGFASLVGAALSEIAIPHLLAASIFSAQNGGAVFYRNAKLLVVLCLVSGVFSGIRSCCFGVANMILVKRMREELFDSILSQDISFFDEETVGDLTSRLGSDCQQVSRVIGNDLNLISRNLLQGAGALIYLLVLSWPLGLCTMFVCATLSAIMLVHGRFQKRAAKFAQEFTANANNVAQEVITLVRTVRVYGTEKQEFKRSLEW

SEQ ID NO: 66576 - protein, 169 aa, Zea Mays
MAAVRHRQLEANGITMHVAEAGPVNASAPAVLFVHGFPELWYSWRHQMGYLAARGYRCVAPDLRGYGGTTAPPEPNSYTVFHIVGDIVALLDALHLPQVFVVGHDWGAIVSWNLCLLRPDRVRALVNLSVAFMPRRPGVKPLEYFRAAYGDEYYVCRFQDHPSPASSSD

SEQ ID NO: 66577 - protein, 349 aa, Zea Mays
MDLSRPTSSDLSLGLHSHGHAHAHARRHAVAAPLRLFDDAEEPKPERVGAGEADAERDDEDGGDQHFSLLGHSLCVKRPRRAGNGGGGGETSSCSSTSAALRPAKRQATGEGSGADLETRRAAVRAWGNQSLAEADPDVHSLMEQELDRQVRGIELIASENFVCRAVLDALGSHLTNKYSEGAPGARYYGGNQHIDAIERLCHERALTAFGLDPACWGVNVQPYSCTSANLAVYTGLLQPKDRIMGLEPPSGGHVSHGYYTPSGKKVSGASIFFESMSYKVNPQTGYIDYDKLEERAMDFHPKILICGGSSYPREWDFARMRLIADKCGAVLLCDMAHISGLVAAKVCG

SEQ ID NO: 66578 - protein, 388 aa, Zea Mays
MKDDAVVLAARPRPDAAAAVVVVTLRRMNSSGDGRMSYADNSGFQRAIASVTKNARQELAAALYRARGRPSSMVIADLGCATGPNALLMVLDAVEAVLAVAEESHPSPPPQLHVFLNDLPANDFNAVFRLLPSSPLAATGCCFVSAWPGSFYERVFPEASLDYVVSSSSLHFLSMAPTMRTEHPNRGRVYVSESGPAAVLDAYRSQFHADFLAFLSCRADEMRPRGLLILTFVARRTARPTAHDCYLWDFLADALMDMAADGLVDEEQVHAFNVPFYGPCLDDLAKVIAREGSFTVRTMQLFDISRRCLLLQSASDDDDDLPQWLAMETTSTVRAVVEPMLRAHFGLEAMDGLFCRYSLRLEEYYRSNTSRNKDDLTNVFLVLEKKLH

SEQ ID NO: 66579 - protein, 91 aa, Zea Mays
MKKQGDIASLFRNHATKKHKFISSSLSPDVTQASTPQEQEEERINEEIVNPMPSAPPSPTLYDVSRLPHDPCERQPIASYHANDHDAIRRA

SEQ ID NO: 66580 - protein, 55 aa, Zea Mays
MEFATLELGCLADSCQLLLGVLLWSHAKHALNLLNKNKISLSLHTVKFGTLRNSS

SEQ ID NO: 66581 - protein, 587 aa, Zea Mays
MGGCFSVHGDVRGGMEGVGGGARTQGGAASSSAQQGGPNDAVDYFFQTRGLRGLYTPIELSFSASKLRNTDSFSKSDPMLVVYTNIKGKLEEIGRTEVILNSLEPSWITKVTMSYQFEIVQPLMIYDVDTKYHNTPVKTLNLTQQDFLGVACCNLSEIVTKFNRSLTLNLQSDCGHGLHGTMTVHAEESDSSRMAVEMTLRCVNLENKDVFSKSDPFLRISKLVETAGPIPICKTEVVPDNLNPVWRPITLTSQQYGSKDNPLLVECFDFNSSGDHELIGAFQTTITQLENLYTSKSAAIFYNHKGQRKMKEQLFVDKFQETVQHTFLDYISSGFELNFMVAIDFTASNGDPRVPQSLHYIDPSGRPNSYQQAMLGVGEVLQFYDNDRRFPTWGFGARVHGYVSHCFNLNTATNDSEVVGVEGIMSAYTSSLYSVSLAGPTMFGPVINKAADIASQSLQYSNNKYFVLLIITDGVLTDIQETKDCIVRASDLPLSILIVGVGNADFKQMEILDADNGKRLESSTGRIATRDIVQFVPMREVQGGEISVVQSLLEELPGQFLQYMRTRGIKPQRAPGLASAPVYPPQQ

SEQ ID NO: 66582 - protein, 64 aa, Zea Mays
MLAGCQFPFNLALVCILCACRISIPNLALVCFLCACRISIPNLALVCFLCDCRISIPVMNILVI

SEQ ID NO: 66583 - protein, 628 aa, Zea Mays
MSDNGHVSGTNISLPRLLKSSQILDVQSIACGEKHAAIVTKQGKVFSWGEENGGRLGHKTSDSVSDPKIIDSLASTPMKTIALGAKYTCAVSVSGELYEWGEGIHSLGFKNNQCQRSPWFPHKLIRTSDGISVAKIACGQWHTAIVSSTGKLFTYGHGTFGVLGHGDTRSVVQPKEVESLRGLRVKSVACGPWHTAAIVETSGTPKSNAPGGKLFTWGNASGEKLGHTDKKSKLVPTRVESLIDCDFTQVSCGMSLTAVLTITGVVFTIGSKDHGQLGNPRSDSACICMVEGPLKTEFVKDISSGNSHVAVLTMNGKVFTWGKGTEGQLGLGDYLDRTFPTLVEALEDKQVDSIVCSSNFTAVICVHGEISSKDTVCSSCRLAFRFTRKKHNCYNCGSMFCNSCSSNKVQRATLAPDKSKRCRVCDACFNELNKTAEHGKMSCESKIQKEPPLTETRTYTPKLSRMLKEANFIMEKMGSIRSPNQRNQESATLNQMQKQRWGQVECPDQFKCARDNISHCLTSKKQPVDIGRIGRMNDPVSQKTAAPLTRTTDKRRKEQDLIEKIMLEEVKQLQAQVTTLAEECRHRSLKVQLYKRKLEETWLIARDEATKCNAAKEIIKILTNQDRP

SEQ ID NO: 66584 - protein, 152 aa, Zea Mays
MNNFDHLCASTGRVKTRMTTYRWIAEKSIPFLKKDPNMGAKKLQEELEDKYNVKLGYSTVWAGRQKAVEQIFGTWEESFADLYRFKAEIDAKMPGSVVDLEVQEEEDDSTALNGRWNGQFSEKEESRQTRATIRISKYLHAQKAKSCAKRVN

SEQ ID NO: 66585 - protein, 700 aa, Zea Mays
MMASSQEKATSGVLRNAAALLDEMQLMGETQGAKKVINSELWHACAGPLVCLPQRGSLVYYFPQGHSEQVAATTKKIPNSRIPNYPSLPPQLLCQVHNITLHADKETDEIYCQMTLQPLHSETDVFPIPTLGAYTKSKHPTEYFCKNLTASDTSTHGGFSVPRRAAEKLFPQLDYSMQPPNQELIVRDLHDNMWTFRHIYRQPKRHLLTTGWSLFVGAKRLKAGDSVLFIRDEKSQLLVGVRRATRQQPALSSSVLSTDSMHIGVLAAAAHAASSGGSFTIYYNPRTSPSPFVIPLARYNKATYLQPSVGMRFAMMFETEESSKRRCTGAIVGISDYDPMRWPNSKWRNLQVEWDEHGYGERPERVSIWDIETPENMVFSSPLNSKRQCLPSYGVPGLQIGSVNMSSIPRAQGNPIGNLQHMPGMGSELALLLLNQSGQNIGSPIACQQSSFSSIIQNAKHSYFPPKTFGASTASMKQESMPSTEAQPQLNALGIQRSDRVSCEVQTASDSNPAQEMSVKPRAPRSTDSHSSQSISDQNSKGEPRTKTRRSKKSSYQKTISDKSELCSVPSQICDDKKHGSEPRLADCEAEQATCGNNEESSGALTHGDFAGELQVQQQVEQHELLAPPKIESSKSPDGGKSVSSFPNQGCIPQFFEGLDWMIPPSYYQDSNGIQSVTASDNIFNPSEATCRAHPTPMCR

SEQ ID NO: 66586 - protein, 82 aa, Zea Mays
MQRQKSSGASVLFSHKTLGGHPFSLHPPSLGRHPPPFFPWLVVPSPPMAAAHHFFLLHRSPPPPRSKDREEEEQDGLKRKRG

SEQ ID NO: 66587 - protein, 654 aa, Zea Mays
MAAPRAHAPGKQVLEYVVIGVYTAVVFSVAMLYIRCTSINPADPGIMSKFDNVLIDAPGSAANIQGTDLPVKAGIGAGTISPSATSTCRNSVDGHSNAGALAAGDTNLDLRSQPPTSPWSCLLGGLVCFLFVKEDCRKYDDSENQVDGEGALFCTLCDAEVRKFSKHCRSCDKCVDGFDHHCRWLNNCVGRKNYFTFLALMATSLLWLAIEIGVGIGVLVICFANKNSERIIQDRLGNGLPRPAFATIVAFFTLLSLVACIPLGELFFFHMILIRKGITTYEYVVAMRAMSETPQEEEEHEEEEGVNIVYSPTNSATTAFSGASSLSLHYKGSWCTPPRIFVDQDEVIPHLEPGMVPSTIDPDAVGRAERANKAKKQVKISAWKLAKLDSNEAMKAAAKVRASSSVLRPIDSRRVPGASPGSSGNASMRSSMSAGYSASGTKERGAGMLQSPSYPQSPASQDDYESGTQSGSSRTSPVHIHRPAAPHAQINVPLPPRVPQAPPRPAPALAPRPPVPATQMSKPTFQSATSYVRENRKVSVVWDQEAARYVSVAPAPTRPVTGNHGRTLASMNPSSSALPSGQPSERLAYTGQSIFFGGPLLGAAAADPRRNEAVAGVPPETRRNDGTGGERRRTAESFPVFAPGSLEKNPPSNR

SEQ ID NO: 66588 - protein, 236 aa, Zea Mays
MAQRGELGRQLPLRGPLKALEADIHHANAMADAIQRNYGGACVQMRLSFSSLAPLFLYFIQWLDCGCCYALPSYLGLFHILICKVYADGDSSVSTYERRASLREFYAIIYPILQQLESSLIERDLKGKGRCKDIVSRRRMEDWKKVSGRDVEREDECGICMEACTKMVLPNCSHAMCIKCYRDWYKRSESCPFCRGSLKRIRSTDLWVLTNSNDVIDPAHLEKENPRRSWLRIRIK

SEQ ID NO: 66589 - protein, 238 aa, Zea Mays
MTGYRSRSPSRSYSPRRRYSRSPPRRKRYDDPRDRYRWAGAGGGGDRRGYGRPLAQSGLLIRNISLTARPEDIRATFEQFGPIKDVYLPRNFHTRELRGFGFVKFRYPEDAAVAKREMHHQVIGGREISIVYAEENRKTPQEMRMRTRTSGRYMDERYTRLSRSPRSRSHSYSPPPSPVRRDFRERPDSYSPQYSHSPRPRDSRHHRSDGRSPTPSLDDHKPKATPVNGGHGPAVASR

SEQ ID NO: 66590 - protein, 855 aa, Zea Mays
MDLYQPMHWKYLSFMYSIYSTNLSTALWRFLEYFSKFDWDNYCISLNGPVALSSLPNLIVEATVTHTSDLLFDKEFLKSSMDKATVPPKNSDSCYPRFRPKHLNIVDPLKEYNNLGRSVNRASFNRIRTAFLYGARKLGHIVTLPSEVIPDEIYEFFKNTLGRNELGARPDIDSNYAFHSSFGTAETILEDISSMKISDGEDENITCHLSKSLGDKNLYVGMNGHTHLSNYFPGVRNTALSTGLSTRASHFVHNAPKLHSSFCHDNSHGDSEKCYLNHGMEQVSHYTAKAFCIDDKTTIQSQVFVSNPSLLSTSAAVTASELATKQKKWSTAYVEKQHFSPSPSSLPDLSGDLDSQFRCLRQVQYHLEYLFDGFLQSVQGASSADKFHKDPFHISACSILLDRDTGSPRLQLLSPARSNGRDPSPVSCSQSTECVSQHSQNGSPWDMASQRSVSVPSGIDIPPNGVSPCSSCADSEVSSVSWFHGSGDSAMMHGSGKDTYFTRKSCYTRWERLASSRKNGKILPNQSVKYKSNQKSAPGARFVSHKEQAAIDSRTKEITIDQALKIHEYIESDMKIVEKLSCHNQKEVRHDNEARQLPNNNQDVCLNKNFLQNRYHVESTRAPRATHQIPKYQPFKIQNTTECDRASLSKNMPRKHSCGTWKEYEILDRPTKQRPICGPLKLENRHVWDCTKKISAGNQKCNNHKDYLSFVRGAVPRSHAASTPNGLEKEAANSNKSADNGSPVRPILPELLLSCHDINSQERSPSSSAHQSYFPAANDRPLETIEFGSLGPFALPLSSLKSNGTTNTEATSKVFTDASPFVLQRSRAAATENRPPGLCKVGDEDEFPPLRAGIR

SEQ ID NO: 66591 - protein, 332 aa, Zea Mays
MPSITRGGRGGLFSTHRGALLWLRRCQSPLLSTLAGGGGRSDAPHLPVLIVGAGPVGLVLSFLLTKFGIKCAVIEKNVEFTRHPRAHFINNRTMEIFRKLDGLARDIERSQPPVDLWRKFVYCTSLSGSVLGSVDHMKQEDFDKVISPVSVAHFSQYKLVDLLLKKLEGIGFQTCFPSEIGNSTQDLVLESKILMGHKCTSLDQTDEGILVGASVNNGGMIIERKLHCGLLIGTDGARSTVRELAGISMEGERDLQKLVSVHFLSRDLGRYLSSQRPGMLFFIFNPGAIGVLVAHDLENGEFVLQVPFYPPQQMFEDFSAKLQRSTSAAIIE

SEQ ID NO: 66592 - protein, 241 aa, Zea Mays
MLDTYDFKGDVWLCHSSGGKCNDFTAFEPALDTFKEIEAFLAANPSEIVTLILEDYVHAPNGLTNVFNASGLLKYWFPVSRMPPSGQDWPLVSDMVATNQRLLVFTSVSSKQSAEGIAYQWNFMVENNYGDDGMDAGKCSNRAESAPLNDNTKSLVLMNYFPSLPVKFTACLQHSQSLVDMVSTCYGAAGNRWANFVAVDYYKRSDGGGAFQATDLLNGRLLCGCQDIRACSQGSGVVCSA

SEQ ID NO: 66593 - protein, 149 aa, Zea Mays
MAAAVTLLRLPLARLSYHLRSVPSSRLPSPRLRIFASHRLFSSLDHGSASASASAAVAEVVGVPDAEESVEEESAAEAEAEAPRSFVLPRLPRPKLSVKERKELASYAHGLGKKLKSQQVGKSGVTPNLVSAFSDNLESNELLKGFPSR

SEQ ID NO: 66594 - protein, 297 aa, Zea Mays
MSSTTTSPPPPAAGDHPRVLLRGFLSRETCKELEFVHRSCGAAGYRPSVISTSLPHLAATGCGHLLLPFVPVRERLRDAVESFFDCHFDLFIEFTGLISWCKGASIGWHSDDNKPYLRQRAFTAVCYLNNHGEDYKGGILQFQDGDPSCIVPVAGDVVIYTADTRNVHCVNEVTEGERLTLTLWFTRDRAYDEDPKLLNFLSQTSLSCEPTEQNSYIPVPASDNMYRFSCDQSGFDIRCARVHILGFSFHSSSGECNISASPAEDDPIELLGKQLRLGRGDDVFEKIFSNSLHALQV

SEQ ID NO: 66595 - protein, 1105 aa, Zea Mays
MEAAFDAYFRAADLDRDGRISGQEAVAFFKGSGLPQPVLAQIWTYADKNRSGFLGREDFFNALKLVTVAQSGRELTPDIVRSALFGPAAAKIPAPRINVSTAAPQASSVANLPNATQAPGPVQQTPVVRGTQGLPGISSNPQVRPPQPPNANTAPPAHGQGVASRPPVGSGPTGINHTSSTTPSLATDWFSGKRSASPLGATSQTPTRGISPQANLSSAGISVQNSAPVPGYNSHTPGVNAISTNLNVMSSQPSVNDSKALVPLGNGLSSNSTFGADPFSATPRPEQGSPFPPNVPNNLLSSTPPASAAGHHHPPKPMQAGPVQSISSLSPHTSQLPHNQPPPRQQQFNATPSAPGPVSSNIPTGQIPSSPSQPQAPWPKITQVDVRKYMIVFIKVDRDRDGKITGEEARNLFLSWRLPRDVLRKVWDLSDQDKDGMLSFKEFCIAVYLMERHREHRPLPDTVTDAIWAEGTALPSTGQFAENPSAPAPQASAGYTSRTMQGPHHGMLPSSMKPPSRRPLPLDADDTIKPEQQKPKVPVLEEHLVGQLSKEEQDTLDAKFNEASVADKKVQELEKEILDSREKTEFYRTKMQELILYKSRCDNRFNEVSESMSADKREVQSLSAKYDERCKKVGDVASKLTMDEATFREIQEKKLEIYNAIVKLQKGDDSDEKFQERANKIQSDLEELVKSLNEQCKRYGLRAKPTTLVELPFGWQPGIQETAYAWDEEWDNFGDEGFSIIKELTVEVEPPVVAKSQPTEDVKASSNGASTEKEDNKGDKSAAAVEQVVKPETAPSNIKPESAKSPPVSPVKNKEDGPDEHDKKQSGTNDVSPRESISNRGAMDSPTHGDKTHDGHSWGMDNDSLWNFDHKEGENGDSDLFFGPQGLPPIRTGGSSSGTPVQKSVFDYSVPSTPMQNSVFDYSVPSTPMQKSLFDSVPGTPVQRSVFDSVPSTPMQRSVFDSVPSTPTQKPFFDSFPSTPMQRSLFDSGPSRAESPTASSMYGKEQKGFFDSSVPSTPMYNSSFTPSTSDQGGGNSFMRYDSMNSSSDHDGIGTFARFDSMKSSNYNSRGYSFDDEDPFGTGPFKSTETTSHSPTKHGTDTWSAF

SEQ ID NO: 66596 - protein, 256 aa, Zea Mays
MLTVRIAPWRRLALLALLPHLFLSAAAVVARQCLWPGQASDDAGCLSWRVMVEANNARGWRTVPPQCVGYVSGYMTRGQYQRDVAGVAEQARAYADGVAADADGLDAWVFDIDDTCLSNLLYYEAKQFGAYDPLAFRAWASREACPGIHPVLGLFTTLLDKGFKVFLLSGRDEETLGSCTAANLEAQGFSGYERLIMRTPEYRGQSSSIFKSAVRKQLVDEGYRIRGNVGDQWSDLQGDCAGDRVFKIPNPMYFVP

SEQ ID NO: 66597 - protein, 971 aa, Zea Mays
MALSTLVTPTVSSLSHLSKSSNFNLQLWSLHALLLTIEAAGLSYVSQVQGTLFLAMEILLLEENGYVDLRQGIGHLINAIVAVIGPELAPDSTFFSRCKSVIAEISSSNEMATLLESVRFSQQLVLFAPQAVPVHLHVQGLIPMLYSRQPSLRYLAVSTLHHLIERDPAAMIDENIEENLFSMLDEETDSETAMLVRATIIRLLYTSCPVCPSRWLAVLRNIVLATSIRRNTGEVLSCFGHNPPDSTSENDVYYGEDEDNMISSSKQQQIRCAGSISSQFPPRNKHLRYRTRVFAAECVSHVPIAVGAEPAHFDLLLARSAISQGTYLSNDWLVLKLQELVSLSYQISTGQFEGMQPIGVKLLCLIMDKFGKAVDPEFPGHILLEQFQAQLVSAVRMAISTASGPLLLEAGLELATRVMTSSIIGGDRLALSRLFSLITRPLSDIEGLLYPSFADWVVCKIKVRLLTAHAAVKCNTYQFLRMRENAPNEYQQLAPSLVNSSTLLGKYWIRALKDYVSISFGLHSKINYKPFLDGIQSLLVLSKVQRYLDEVWLLILKATALDAAPLDFDENNPKNLLEQTFISGHCMVKLDRTEFQFLWGLSILVLFHSCQSMKNNSLKINLDFKQDKNFGEFIVHGLDDKRPCDQVLRVLSSLTTEVFFSNNFISVDICQQLLQALTYADCSSAPIIHLFTQIIRFCPDNFFEVEAFVFSAIELLSQYLGLILQWDGSSQNNSSNTLISELSIASETMAYRIKGEYLWKLVMLVVSTSHQSFQQVSTNLCFSNIICFLQNIFPFMRKIFRERVESDGECTSPKVVFGAMVGLVGYFYVECDKKISLLENKISDSYKLLNKILLFCLGEATALAKLVPEIIYRSENVSNNDVLLWGSFRLCVQVIQGSFRSTNIQVHMLGLQVLRSYAQKELTEGSETKLDSFMMLLTELLGDLFLVMETTLKHNQRNTDKMLQLFCWRPC

SEQ ID NO: 66598 - protein, 722 aa, Zea Mays
MVHETRSRVHAAAQEEGKLASKKQKPDNETKERGQNVPSKNKKSADNEGKDGEPEAPTKSKKLKAEESEPNGREAAAREFAEFCKAIGERLSLEDMRKILQANEQDASGSEDAVVPRCEDMMFYGPLEKCPVCEGQLEFKEWKYKCTGNYSEWARCTFSTNDPSRRSGSIEVPDDIKDDFIRKWLKQQEGKEFPKRDLDEEAHIFSGMMIALSGRMSRSHGYFKEQIMKHGGKVKNSVLGATCVVASPAERDKGGSGGFAEALERGTPVVSENWIIDSIEKKEAQPFAAYDIVTDVVPEGRGLPLGQLDPSEEAIETLAAEVKLAGKRSVHKDSKLDKDGGCVFEKDGIIYNCAFAVCDLGCQMNELCIMQLVMVPGNRLHLFYKKGPIGHDQMAEERVEDFGSRVNDAIKEFVRLFEEVTGNEFEPWERQKKFEKKSMKMYPLDMDVGVDVRHGGAALRQLGSAAAHCKLDPSVSFLLKQLCGQEIYRYALMEMAQDLPDLPIGMLTDLHLKRGEEMLLQMRRDAETVAESGPEADAFWTDASSKWFTLFPTTRPYTMRGFEQIADNVASGFETVRDINDASRLIGDAFRSTLLDDPLSECYKKLGCCISAVAEGSEDYKMVLKYLEKTYEPVEVEDVVYGVSVERIYAVESSAFPLYEEIRNLPNKILLWCGTRSSNLLRHLHKGFLPAVCHLPVPGYMVGNPPVTIMPCHPGRKEIYNY

SEQ ID NO: 66599 - protein, 73 aa, Zea Mays
MGVGLVAVDGVEELVRGGLERAERGRRRRQGICPGGVAHDDDLIGGWKVPVRVLRSRACGCCLSLSLPLSKKI

SEQ ID NO: 66600 - protein, 1507 aa, Zea Mays
MEMIGSGSRSCLCHSSFLPGFFTGGEHAEKLSHKRTERSHPLPFLVKEEELSGDELEEFIKNRYSNRVKYAADRSYSREDDDIFPMDCALKEPTIWRVKCMVGRERQMAFCFMQKFVDLRKIGTKVPIITAFALDHIRGFVFVEAEKAGYVTEACKGFCSVYTSRITSVPATEVPSLLSSRTKPFEISRGTWIRMKNGNYKGDLAQGGAVSLKEAAVPAPRLISSQELEFFRPHIEIKRDRQTGEVFEVLDGLMFKDGFLYKKVALSSLIYWGIQPTETELLKFSSSPSNRASADDLDWLSGMYGSKKRNLPAERDMKSSSSKIKSSKAPDLKGSTSTENYDDNDEFNLHDLVLYGRKDFGVIIAVEKDGFRILKGGPEGSAVTVRKQDIKKGCVDKMFTAVDHHKKTISINDTVNVVEGPFQGKQGLVKHLYLGILFIFNESESENCGFFCAQSGSCEKIRKGLGSSTTENSDFPTPMFSEPAYEQNEHRNTEGPYRSTREQLFSIGQMLRIRKGPLKGYLCRVVRIFRNDVTVKLDSLLKIVTVQADLLSVPANRGDNLSGAPASKFGSQDTPFFGSEAGKTSWDRGLPSFGSDSWQPFSSSTLPVQNAGAESEADPWCKKTSAEDDSDPWGKKTDGDSDPWGKEAVSAADGDCNPWGKETVPSAAGDSDPWGKKVFSADGDSDPWGKKAISSAVEVWNTSATQKEGSSGNAWDKQAGVGGSDAAGSSWDRAVVNKESEKSDNWGEACRVMDMGTGADTDPWGSKVKAVDMEGPNSWEKATMPPDNKLEDVSQGWNQHKGNSTEDQAKDNVSKDEDNNRAWSSSLPVTEDGTWGKSKDDNCDGAGGAGGWDASVANWNKSSVLADAQDEGWGKGNWSSAKSEETNNEIGNWNKAGASDQAGPKSFGGDGWNKGGDQNSSWNSPGNFGGGRGFGRGRGRVRGRESGDFNGRNDQGNWKNSWGGDNAEKSSWRSDNQVDNEAGDSGGYRGRGRGGRGQYGGRGRGRDNGWRNGDGPKWGGGDNWNATNPPSNQPWSSSGGTKSYGQNQPSTWNNPEDNKPSVGEQGDPWASKVSSTEGKGQQNDSWSSKMTSRGAEDTSGGWDSKEKGSSCNGGGEGLQNDPWANKIGSNEGKEQEADPWASKMSSAVGADDKNGTWDTTTKGTLSNEKADDPWNSKRGNDDDSKKTDAWGAGSSGGNQESSWSKPIFSLGDQEPTWNNPRFGDDDNVNNRGGFGRGNQGRGRGRSFGGGGGGSSWNESNKNGESGGGRSGEPWNRRGFDGGRGRGRFGRGDRNQGNNLGSGDGGSWGSGRGNGGGRGGYRNWNDNNERRPFGQGGGWSQSSDWNANKGSGEGNQAFSKSKPSWDAQNASGGDDQAGKKSDTDNSWSQNRSSPSILGQPSGDANNKSSAWDGAPNGGAGRGGSGSWGKSDEDGWNSSSGGSAREKPSWGGGAEAPPRKEDDGAWGKGGEGSRSLGGGGEGGSSSSWDKPADGAWSGNNKGGSGSGGW

SEQ ID NO: 66601 - protein, 68 aa, Zea Mays
MDGCRQVALKWSVLHLFLQLMSLACMQRAHIESTHVVMQSETMRVTNHTEHELSVASKLATTMNGLVL

SEQ ID NO: 66602 - protein, 559 aa, Zea Mays
MQIDALHCHHRSTSLSLSPFRSEEGSTTGPAEMSGKGKRRSARLLKLEEQKNDGGAVCFLDPWQIIRNSISGPSARGKRKRNEGIQPQGEASCSRQEPLYAGNSNSLPSQTSVGQIIEYILDELEMRDRHELFAMPDDIQVTDYAELVSRPGDFATLRQKNRDGMYTALEQFENDVYMVFQKAITMNSQDTVPFREGMALLDQAKLVFMSLRSNQMFSESELAAWRQRHADQMQQPITPEGREGGGRGPPRHTAAAPLLQPSAATPRKRSAAETKKQEDARTGGNATGNQRGRPRGARETKATAPTPPGKRARKDAAATAGFNGGRGLVARRRLTYNDEAAADQGWREIAATPVFQGRHVTLRDQPQEQTFRGSLQRFVRHAGLKARVAAEFRSLECVARARHCPVPQCWNGFAPSAGFLPPSPRPPGAAAAEPGTSSDQQAAAPECKLETDEVLKLFVLMGTPAAFLSRAKKMFGQDEPEKSAQPAKAADDARARAGAATTAETGHGKKSSASEPSAAACGPFAPPKLVPGRLGFGQFAASSARPFKLNSKPSASNDS

SEQ ID NO: 66603 - protein, 433 aa, Zea Mays
MELCPRVPSRERPLPWCTMPRPPCSPSRPSRDPPSPLPPSSRPRSIDGRCRPAILASLPATRGASLCRIFYLFTSKVPGTEPSRILEPSRILEISHWHLVTVSGGWASDAAGRYRCLELDHPCKAPWCDGPLGALESNGWVYSAHCSFKLFVADASWWCLDGKWLFFWGDSNHVDTIRNLLTFVLGITDTSAVTRQFDAVFTNPIGGAGTLRITSIFNGHWNMSMNYLGLHSLRNRGFRQLIRSYFMSGDRVPDVMVLNSRLHDGCYWTSVRIYAQAADFAAQFWSGVMDKVRARGHAVPRVFYRTQMPQGGIDAGKNHATPFTELRDEAGVTYSHPQGWVTLQTLPNEVLVVLRKILLVDNTRKEAQGSLTCIAQGSKQLSLHFIWKSLILIRSKFLILYFITDFVIPDLLTSRQIGNNLIVVLLTNSRKKS

SEQ ID NO: 66604 - protein, 636 aa, Zea Mays
MATMKLGSKPEIFVLQDLTWRCTTELESDVVVEVGEMSFYLHKRMISEYQAPADGGGMCTLQLDDIPGGAKAFELAAKFCYDVKIELNALNVVCLRCAAEYLRMTDDYAEGNLITQAECFLVDVLANWKDSIKALETCEGVLPTAEDLHLVSRCITALASKACGSDAAAPVVRNASVDKDALWNGIRSGDTTSSAAAAAAAAGMDWWYEDVSFLSLPMFKRLIQAMEAKGMRDESIAGAIMFYAGRFLPGLKRNTSFSNALASYGADGSGGAGGGMSSRNITPRAASVSAPSEGDQRYFLEEIVALLPTKKGVASTKFLLGMLRTAMLLHASPLCRENLERRIGAQLEDASLDDLLVPNLGYHVETLYDIDCVQRILDYFMSSTDGIGTGYTSPALAEEGGGSLGIPQGATPSSSLSPITMVAKLMDGFLAEVAPDTNLKLPKFQALAAVVPDYARPVDDGIYRAIDIYLKSHPWLSESEREQLCRLLNCQKLSLEACTHAAQNERLPLRVVVQVLFFEQLRLRTSIAGWFFVSDNAAGGDGARPHAGGAIVPKGTAAIAGCPQADADSDVEGDAPDGKETITDVKARVSDLEKECKSMKQEIRRLGKPRRSWSLLTRKCGFGAKVQQAQTAMSGK

SEQ ID NO: 66605 - protein, 1027 aa, Zea Mays
MAAALAWRFNGTNGGAHGSADLERHTDKVQDSEPQTPMSIVKMGKNRVNVEDEETLSSVAQCIEQLRQSSSSSQEKESSLKQLLDLVQTRDTAFGAVGSHSQAVPILVSLLRSGPSGVKMLAATVLGSLCKEEELRVKVLLGGCIPPLLALLRSKSAESQTAAAKTIYAVSQGGIRDHVGSKIFSTENVVPVLWEQLKISLKNESLVDGLLTGALKNLSKNTEGFWSATVQCGGVDILIKLVSSGQTNTLANTCYLLGSLMMEDSSVCSKVLSGETTKQLLKLLGPGNETSIRAEAAGALKFLSAQSKEARRQIANSNGIPSLINATIAPSKEFMQGESAQALQENAMCALANISGGLSYVISSLGESLESCSSPAQIADTLGALASALMIYDTNAESISASNPVDIEKTLLKQFKPKVPFLVQERIIEALASLYGNPVLCKTLADSDAKRLLVGLITMAATEVQDDLTKSLFALCKKDCDLWQALQGREGVQLLISLLGLSSEQQQECAVALLALLSKENDESKWAITAAGGIPPLVQILETGSSKAKEDSATILGNLCNHSEDIRACVQSADAVPALLWLLKNGSDNGKEIASKTLNHLIHKSDTGTISQLSALLTSDQPESKVYVLDALKSLLSVAPLNDILHEGSAANDAVETMIKILSSPKEETQATSATALAGLFHCRKDLRETHIAVKTLWSVMKLLDMQSNKILTGASCCLAAVFLSIKENKEVAAIGRDALNPLVSLANSSVIEVAEQATRALANLFLDQELSLQVPFEEILFRVTRVLREGTIDGRTHAAAAIARLLQCRTINQPLSDTVNRSGSVLALAGLLEAANGEAAATSEVLDALVLLSRSKASSGHTKAPWAILAENPHTILPLVSCIADAAASLQDKAIEVVSRLCSDLHDVVGGLVSETPGCMSSITRRIIGSNILKVKVGGCALLVCAAKEYCQKQIEVLNDASLYIQLIHSLIGNMIPLWLLAIFSRHDSKTRAELLEMGAVEMLIEKISQNAFQYVGEEDNTSWVR

SEQ ID NO: 66606 - protein, 256 aa, Zea Mays
MIIIGKLSIHKALQKEKGGGGKSTCQHQSGLGLYLIAWLYHSSVLPPVSCTEQPALHQFVSDHVVEVLQLMEGVIDLRAHGIASSSWTAAHRLEAAVSGRSHAGCAIVDDIARASTSSTLYRAVMVRATVIDMLPLLPSSSNDVGGSNSWRETPAARIRRWCIQRRLLRFRAVVTVLNFLQKLVEDMLLVLRVDTKAMETVLLLLLKRRRRWVVLELNLVRSQEGPGRFQLHAVVHCCRTFEDTRRLLLQRNRTGT

SEQ ID NO: 66607 - protein, 304 aa, Zea Mays
MWPLSYLPPAPAQQLRAHPGPGSGRGPRPQPCGLPFPDALRTAAAAAAVSLSLIYGNGVGAAFAASAAQPTEVCRNGGAEMVEEVRAEAVTNEQLVEEAWEVVNESFLPDAASRPWSPEMWMQRKQDVLQGTIKSRARAHDIIRKMLASLGDPYTRFLSPSEFSKMSKYDMTGIGLNLREIPDENGSFKLMVLGLLLDGPAYSAGVRQGDELLSVNGIDVKGKSAFDASSMLQGPKETFVTIKVKHGDCGPVESMKVQRQLVTRTPVFYRLEKRENNDSSVGYIHITEFNAVAKKDLVSGVLLR

SEQ ID NO: 66608 - protein, 262 aa, Zea Mays
MPLSKGSEWNLLCQLADAKDVMEAVRTMGGVRFPVLTPNLKGFEAAIAAGAKEIAIFASASEGFSKSNINCTIKESIARYNDVALAAKEKEIPVRGYVSCVVGCPVDGPVPPSNVAYVAKELYDMGCYEVSLGDTIGVGTPGTVVPMLEAAISVVPVEKLAVHFHDTYGQSLSNILISLQMGVSVVDSSVAGLGGCPYAKGASGNVATEDVVYMLNGLGVKTGVDLGKVMAAGEFICRHLGRQSGSKAATALSKVTANASKL

SEQ ID NO: 66609 - protein, 133 aa, Zea Mays
MNPRGTQIVSTARFTIGRKFTGADTTTPPCAPTPFAFNGLFGYRLTWLISQIISNLSVFFNNCVNILLHWHTRGIWPAFSCTAVRSNKSSNNHTSTSPTPIHMMNSDAHRDVSEQGSWTSTGTCRPAGTTTSR

SEQ ID NO: 66610 - protein, 151 aa, Zea Mays
MGDNKSPLSLSPMGGRDRDRELLIPVSGGGSAPGVDDEDADRASSASAALSSSGREAFHKVVRSWASKKFMTGCVILFPIAITFYITWWFIHFVDGFFSPIYAQLGINIFALASGLLSACPLFVISTMHRSKLVLQYHQIRTNRHSRKRSS

SEQ ID NO: 66611 - protein, 57 aa, Zea Mays
MIKDYFNWPHAVDMGQGKLEPNYSIREKITAHWAWEMVGVACTLLARGWTEEYCAPR

SEQ ID NO: 66612 - protein, 175 aa, Zea Mays
MISMAVHRNLLRLRGFCMTPTERLLVYPYMANGSVASRLRDRAPAEPPLDWQTRRRIALGSARGLSYLHDHCDPKIIHRDVKAANILLDEDFEAVVGDFGLAKLMDYKDTHVTTAVRGTIGHIAPEYLSTGKSSEKTDVFGYGITLLELITGQRAFDLACLANDDDVMLLDWADS

SEQ ID NO: 66613 - protein, 612 aa, Zea Mays
MGRKKNPIVFLDVSVGDEPDERMIFELFADVAPLTTENFRALCTGELGIGQKTKKPLCYKGTLFHRVIKGFMAQGGDIAKENGSGGENIYSGKFTDETCVLLHDDRGLLTTADTGFKPSGSQFCITFKPNSHLDRKHTVFGKLVVGSDVLKRIEQVDVQSPDSTPVIPVTIVNCGELIERKDIGSMSIEIDKKRAAKSKLTRDITSDEESNEGQHKRRRNKSSKRRRKKRRYSYSESDSSSESETESSDYESDSDTYSSDSSDVSSSSDDRRRRRKRHSKKNKRKHSRRKRDHRRERRRRKRGRKSKQKSKRIVKGDSEAESTGDSSSEDARSKRHRRGRKFKASSQVSEENLAGVAALKDATSPQQKSGIQRSPAQDVSSLQNGEVHTNGVNDSKIERNAAVMPVLTGNRSKSRSQSMSVNHSMSKSMSISPRRSPMKRSSTSPKRSLSRSPVDNNHSRSPIRTPKRSVSRSPARRQIMSRSPARSPPRNSSRSLHISRSPVKAHRRSISRSSARSMQQRSPSRSLERTHVRKSISPSPPLEKGRSITRTSVVSPLRSVSRSPARISRSPHRPSRRSPMRSPRWNIRRSLSRSPARIPRRSVSRIPVHIAG

SEQ ID NO: 66614 - protein, 492 aa, Zea Mays
MSQQSQSISLLEETDRQIREKSCSEQVRRLKEARNSYHEDLVDCVRHCVWYRATLFSQWKQRGMYATCMWVVELLLVLSNSNSMFHYVPEFYVESLVDCFHALRRSDPPFVSPALFLMQGLASFVTLVVKHFDDTRIVNPDLKDLLLQSISVLVQYKEFMLVFENNREAINKMPRSLLSAFDNRSWIPVTNILSRFCKGSGFASYKNGESASSATFQVLLRETCIHEQELFFSFLNRLFNTLSWTMTEFSMSIREMQDKNQVADLQQRKCSVIFDISCSLARILEFCTREIPCAFLMGPDMNLRRLTELVVFILNHIISVADAEFFDMTLRRPGQHQEKTNRTMILAPLVGIILSLMECSSTSERRELNDVIAVFASMDCPATIHFGLQYLLSYNWSNVLRGDSSLAKLAQLKEFSHYFRRITASVDGEEEDHSLNAGDEDDDHTCCICYNCDSDATFQPCHHRSCFGCISRHLLNNQRCFFCNAVVTSVTR

SEQ ID NO: 66615 - protein, 293 aa, Zea Mays
MEDDDDCPPLAVELPPRVPSPPEQSPSDASPVGITVITGYLGAGKSTLVNYILNEQHGKRIAVILNEFGEEIGVERAMINEGQGGALIEEWVELANGCVCCSVKHSLVQALEQLVQRKDRMDHILLETTGLADPAPLVSVLWLDDQLESSIVLDSIITDVVILNKIDLVEDSLEDLEKHIRDVNALVTVVRSVRCQVDLNEVFNRQAYGAKVESWLEDLLWEKKSIMDIYRCKGILYIHDSDQVHTLQAVREVYEVVPARKWSETESRMNKIVVIGRNLDINVLQDSFSGCKS

SEQ ID NO: 66616 - protein, 88 aa, Zea Mays
MLVRSWLPVLNVCRDIVQPMHSQKSTNCQELEGAFLQIISTLPFLEAQELLQQCLGFSTRNVDDCPHLVTAFKTWFRRAGRAPLGGEN

SEQ ID NO: 66617 - protein, 283 aa, Zea Mays
MHACGHDAHTAMLLGAARILHERRHDLQGTVVLLFQPGEEVGIGAKKMVEAGAVENVEAIFGFHVTVMLPTGVVGSRAGPLLAGCGFFEAVITGAGGHAATPHNIVDPVVAASSVVLSLQSLVSREADPLDSQVVTVTRFQGGGAFNVIPDSVAIGGTFRCFSSDGFMRLKRRIEEVIVSQSAVHRCAASVDFGAGGSPLLPPTVNAASLHAHFEAVPASHFYFVGIRNEGIGAVHAAHSPHFLVDDDALPYGAAMHANLAIGYLRNRAAANDGPVVAPHDEL

SEQ ID NO: 66618 - protein, 176 aa, Zea Mays
MGSPKAAKSMVKQRIWRHRLVAPFAAVLITAVVVFSGLFAQDPSATSEFTAVNAGNTLPVRDKSESTEPNQAFQGTVPAAGERGTATAVPVQRERSSGGSEPEEKQSPPQDQEGEETSAKSGASFCARTVVHKLEEEYVLCALLEPRLSTNSSLGCSPRAFYLKEMFSWVEVVFLF

SEQ ID NO: 66619 - protein, 55 aa, Zea Mays
MCFEIVCYLCLILLHRQGGLSQRFLKVVSYYGLTTLPYKLDALEPYMRKRTVELH

SEQ ID NO: 66620 - protein, 353 aa, Zea Mays
MACLAPQFKWAPSAAAHMPSSSSSSSYSRCSALRVHCAVTSAAVVEDRTNGSAAQLRLAYAAPAIQDLLKLEAIQAELIEYNGGQPTFSQWATAAGVDEKTLRKRLNYGIYCKNRMVTSNVRLVISIAREFEGPGMDFYDLIQEGMQGLIRGAEKFDSSKGFRFSTYSHWWIKQAMRKSVSEQSQIFRLPAHMVEASYRVKECTKRLRRKLRRRPTNEEIAVDTGIPIKRVEAAVNLPKYSVSLDSKIGSTDMTYQEVTADPSAETAEEMLNRMSMKKDVHMALDTLTTREKQVVVLRFGLEDGRIRTLQEIGNIMGVSRERIRQIESGAFRKLRSKKKVKALKDYLVPVGNW

SEQ ID NO: 66621 - protein, 76 aa, Zea Mays
MRSEPVGMYEKSSLYDIRGLTDFHTCIITSHRRSTNKNKYPTRERLRKPTHKRDYANDKTGSVGRTRGMNLREEKK

SEQ ID NO: 66622 - protein, 338 aa, Zea Mays
MCTPMSPWMGRLRSHHATPQSFPKRRPPSQTKNPEEKEELQTWKKHTARKKTARGRHAGAAAQQPRAFLRGSSRLAGRDYEHPIMIDDDVNEECKSRADQSAITPLRRSPRFHLEDKSLSKSLLPPNRCETSPNRKTKNAHRKDKNQESLKGNRGSAGFPPRKDISDVSNKKSDKQELKPIHCKVQTGKRKRGTERRLLSKKQSCQDPGPLPAYRQEIASCNESRKSTHRRIENDPSTEVKLKVGDVRLANIDENINKPSGTQREGIEIFCGPDDWTKEQDMALRKAYFSARPSPHFWKRVSKMGDLLKIASTEFILTSQHRLQLPHVPEQVKQHFLL

SEQ ID NO: 66623 - protein, 70 aa, Zea Mays
MHETNTRRRGHKRDDVSGRGEEATRPTRRRSGSSLQQGALKYGIAARCDREREKTLGFLVSEVHFILEVL

SEQ ID NO: 66624 - protein, 500 aa, Zea Mays
MRKVAGNSFVNMPASPPQALTPPPNPRGRPDDRRGPTSAPTVPETPIDPDDKKMQTGPLVGIAVGSIAAASCVLFALVLCLHNARKKPDDGSSEAKGIAGSHLVVTTSSREVMDSSHDNAAVATSDLQLIQPAGKMTPDDRAHGPNGCTAKRPKQQVTVTTVSSYTVAALQVATNSFCQDSLLGEGSLGRVYKAVFPNGKVLAVKKIDSASLSLYEEDNFLAVVSNVSRLRHPNIVPLAGYCVEHGQRLLAYEYVGNGTLHDMLHFSDDDGMTMPGKTTRLAWNTRARIALGTARALEYLHEVCLPPVVHRAFKSSNILLDDEYSPRLSDCGLAALSPNPETEREAFAGVVGSFGYSAPEFAMSGTYTAKSDVYSFGVVMLELLTGRKPLDSSRERSEQSLVRWATPQLHDIDLLAKMVDPALDGLYPAKSLSRFADIIAICVQSEPEFRPPMSEVVQQLVRLMQRASIVRRQSDDQLGYSYRVPERDGGGTVGGDVVVA

SEQ ID NO: 66625 - protein, 424 aa, Zea Mays
MQPPGPPLATPQPLPPAVAAELAQLESRLGQVAGEPARHELAELGEVAAVRVLRRIARSQEQVRTLTGYIVSAAVQETFALNAQAVPTAESRACNSSAPSLSDGSVQGPQCASELRMEEVTAGLSNYRMAICEGQGQEDHAVMMAIDNPPDCIPPWGWDQDCIEVDNLVPGIASQANQMPMQYGDRDRIQELVSIVPHGVRMLAESLENGRASELQNYVQNGIPEQWMVPADQRMESTSSRLQHVLKCLQGVGPFGHHLGPECAIMIPKPEPNVVVENLFREIASPHITDNKLRNTASPQMCALEDLEFSKRFLILSYLCRNNLEDEVVLTVDYIKSLKFLSMVHFESQIWRKFGQKNFQASNRAATDRAKNFDSDPTTTKLYHCNIEIRGESIFFVLKFTRIQEKRRKRKTVNRGISRNALRL

SEQ ID NO: 66626 - protein, 358 aa, Zea Mays
MGSNDPSTPSKASKASKQVLETDQPPATTSSGTVSVYPEWPSFQAYQAIPPHGFFPPTVAANPQAHSYMWGAQPMVPPYGTPPPPYVMYPPGAVYAHPSTPPTMHPFSHYPMPTNGHAETPGTAPSAPEMNGKSEPGRTSAPSANGITSHSESGSESESEGSDANYENDSHSKDNDGKEDGNSQNSISYSASQGVLNQTMAMLPIQPGAMVGGVSSSTANLNIGVHYWEAPGSAAVSATHGKAPAGSARGDQWDERELKKQKRKQSNRESARRSRLRKQAECEELGQRAETLRSENSSLRAELERIRKEYEQLLSQNASLKEKLGGSSDPIPDMNEQNDGNGSDKKQSDSDAQPGSES

SEQ ID NO: 66627 - protein, 275 aa, Zea Mays
MATAISSLVTPPTLHRRCLGPACVSVSVCTPIRISFRPAAAPQVSRRGSALRVSASSAVLEAPEAVAARKLYVGNIPRTVTNDELRDMFAAHGTVERAEVMYDKYTNRSRRFGFVTMSTAEEANAAVEALNGTEVGDRKIKVNVTESFLPNIDRSAPEPEALFVDSQYKVYVGNLAKTVTTEVLKNFFSEKGNILSATVSHIPGTSKSKGYGFVTFSSEEEVEAAVATFNNAGHRRRGNILANTCSRRDVLRLDFDNKVIKTFNVISICHTIFVP

SEQ ID NO: 66628 - protein, 349 aa, Zea Mays
MLRAARYLLGSPGASGFGSRSTAEEVTPDLGATTAIITGATSGIGAETARVLAKRGARVVIPARSAKAAEDVRARIVAECPAAAVLVLPLDLSSLASVRAFADRNNAGKFSHGQLALSEDGVEMTFATNYLGHFLLTKLLAGRMAETAAATGVQGRIVNVSSSVHGWFAGDWAEYLHLVTRRKIPYDATQAYAVSKLANVLHTRELAARLQEMGANVTANCVHPGIVRTRLNRDRDGVLTDLVFLLLSKLLKTIPQAAATTCYVAAHPRVAGVSGRYFADCNEALPSPAATDRHEAARLWRVSEAIIDGCTNSQPQRDCTTAPLPRLLPAQTQSQSPTGASSSPRRRAC

SEQ ID NO: 66629 - protein, 489 aa, Zea Mays
MDTVEKIVEDFASDIAVSPFSSGTSLREMIRAIRACKTAAEERAVVRRECAAIRTAISENEPELRHRNMAKLMFIHMLGYPTHFAQMECLKLIAAAGFPEKRVGYLGLMLLLDERQEVLMLVTNSLKQDLNHTNQFIVGLALCALGNICSAEMARDLSPEVERLMRSREVNTKKKAALCSIRIVRKVPDLAENFMGLAASLLKEKHHGVLISAIQLCTELCKASKDSLEYLRKNCIEGLARILRDVSNRSYAPEYDVSGIVDPFLHIRVLKLLRILGQGDADCSEYMNDILAQVATKTESNKNAGNAILYECVQTIMGIEATSGLRVLAINILGRFLSNRDNNIRYVALNMLMRAITVDALAVQRHRTTILECVKDADASIRKRALELVYLLVNDTNVKPLTKELIDYLNIADPDFIGDLTVNICSIVEKFSQEKLWYLDQMFNVLSLAGNHVKDDICHALIVVLSNTSELQGYSVRSLYKALQEYGKQ

SEQ ID NO: 66630 - protein, 237 aa, Zea Mays
MFCPMICREIVKNGTGSSKNHAIALPERVNPASLSLILDYCRFHQVTGRSNKERKSFDEKFVRIETERLCELTSAADSLQLKPLVDLTSRALARIIEGKTPEEIRDIFHLPDDLTEEEKLEPLKNVNDDPRIRLLNRLYAKKRKELQERQKLKVTMMDCTCCVWQHSFSDFIQSCSLYFRMYKYKRRKKMRDLWMSYFVLLMGMEVQEVGKVVPRVRKRIKEGRIMLRTPQKLTLSL

SEQ ID NO: 66631 - protein, 249 aa, Zea Mays
MEIKEVAAAEAMTMGMPTVPSRFRRICVFCGSSQGRKKSYQDAAVELGEELVSRNIDLVYGGGSVGLMGLVSRAVYNGGRHVIGVIPKTLMPREITGETVGEVKAVADMHQRKAEMARQSDAFIALPGGYGTLEELLEVIAWAQLGIHDKPVGLLNVDGYYNSLLSFIDKAVEEEFISPTARHIIVLAPTPNELLDKLEEYSPRHEEVVPKTKWETEQLSCCKSCEIPPGLKEGTPIVQAQRGTMHALN

SEQ ID NO: 66632 - protein, 306 aa, Zea Mays
MGSSCVNLSRAVLPGFGAAEGSRRRRGLLLPLLSSSSRRLHGGGAVACCSSSSSATAAGSSRPPPPLPSFVDPAHGDPPGAAGGGIGVAEFLGAKNFLITGGTGFLAKVLIEKILRTNPDVGKVYVLIKAKDSEAALARLRNEDIHGEGYDGFIARKLVPVVGDVREANVGIAPDLADEIADQVDVIINSAANTTFDERYDVAMDINTVGPFRIMSFAQRFRRLKLFLQVSTAYVNGQRQGLVLEKPFRMGDTIAKELPGWSSSPGHKIPVLDIEAEIKLAFYSTRHRPDDSPSFAQEMKDLGLER

SEQ ID NO: 66633 - protein, 153 aa, Zea Mays
MYDFTSRPLKPKPFALSSGARFHQPQYLTLLSRRASRLRSAPLPCPALPRHTNQGAKNKRRATAWRGSLSHCLPLRPAASSSRRPRRATIWSSPRRRRPCPTRTGWTNAAWRCTSRGCWPASSPAPSLASSLSVLAQLHLLAQAPFASLLPCC

SEQ ID NO: 66634 - protein, 129 aa, Zea Mays
MMRDVVRGGFGEQEGGGGWGRHAVRGAGERLQGEARAAMGGPGPQAASRTKLAGVEDLSSHQRSIFRPATACGRQAKNRQDLYRRDETFVPLRNRVHACKSLRTRGTCCSVCVFLCKGQADGEGKHVLA

SEQ ID NO: 66635 - protein, 476 aa, Zea Mays
MADGSGESESTALEFTPTWIVAAVCSLIVVISLAAERCLHYLGKTFKGKNQKALFEALLKVKEELMLLGFISLLLTVFQGVMQRTCIPPGWTIYMLPCRSAKEQAELSPTEAHGHAAGILGLTRRRLLAEGGPRTQRCQKKIRQWKHWEDEIQKGATDNGRPRKVTYVHQSEFIREHSKGIGRDTTMLSWLHSFLKQFYGSVTKSDYTTMRLGFITTHCRSNPKFDFHRYMMRALEADFKKVVGISWYLWIFVVVFMLLNINGWHTYFWISFIPLLLLLAVGTKLEHVITQLAQEVAEKHSAVEGDLVVNPSDDHFWFGRPKIVLYLIHFILFQNAFEIAFFFWILTTYGFNSCIMDHVPFIVPRLVVGAIIQLLCSYSTLPLYAIVTQMGTFFKKEIFDEHVQQSLLGWAQKAKKRKALRNNGNGSNGAAAGSSHPSATARLELMRRAVALEEGSAGGNGSEASAAELHDTGPKL

SEQ ID NO: 66636 - protein, 227 aa, Zea Mays
MEGAGNKRCLDQITHHPFQPYSNSCRGFWYHHAEETYLMLAYWLPNTTHTLPVNATHRVGVGAFIMNDKREVLVVQEKSGVLRGLGVWKFPTGVVEPGEDINVGAIREVKEETGIDAEFVEVLAFRQSHKAFFDKSDLFFVCLLRPLSYDITKQDSEIEACQWMPVEEFAAQPFVQKHELVKYILEVGLAKVDKKYAGFSPISIKSAFTDKLSLFYMNRRDLDKASG

SEQ ID NO: 66637 - protein, 310 aa, Zea Mays
MTTRVLKKSRAVSTLDIWPWKYLVPWMREDLFSRRDARGIDKVHSSKKVNAYDVEDMVMPLHQYINDPVAHEIIHNGATFQITGLTNNSYFDGAHEVRHCARKHPDLGRIVLEVAKNRLDQMLYVGLTEDHEESARLFAHMVGAQVLLQSGTLSLDLKEDLHSETDSHPSMVEPGDEEASEHLNNTHGWQNNEALNSTSDEQGKGNMTVGKLMEAYETCIAKLRKSQSSRRKISLKKVEEANFSKEARKLVPEAILKQIISLNSLDMELYDHAKKIFTQEHLMLKAQQSMAGQHRQLAEQEGGGRKHDRI

SEQ ID NO: 66638 - protein, 148 aa, Zea Mays
MGASRKLQGEIDRVLKKVYDTENANQKEKFEADLKKEIKKLQRYRDQIKTWIQSSEIKDKKIMIVGFSFTYLFVIVKDYGQIEVSASYEQALMDARKQIEREMERFKVCEKETKTKAFSKEGLGQQPKTDPKEKAKAETRDWLNNVRR

SEQ ID NO: 66639 - protein, 946 aa, Zea Mays
MAAAGTSFSIREYAVRARARAEGGGGGSWPFGGDAGALPPMEVRRFRWWRDEAAAVEEEEAEVERRLAAKRRKRSVAELFAAVPRVPRGGQGRGKGKAAKRKAEKDKGKLVLAASVKTNKKKKVPTGIDARPKEKNSGVKVNSVSISKSFQHPIKNREPKSSCKKKGKQEVSVLLDKKSKKGNRKSVLEIHKKDMANSVQTQSICKDQSKAGSSTAPNTTDMRTAHLPADNTKQPQSVQTFQQATQEGRDHRDRDDQQLVYQQAEAISRTVEITNSLSENVVLAGVCRTIPLTKPKDITILGNSVDLNHCIETCHGSNCLNSTSLASLSSKMPCQKFQGVNSHLNGNNVSSLDVQYLGEQNHMISQASFNPVSLAPKGVSGDMSPLSEPSSCCLYDRSSITFHEKADANYHLGKVSSEILRSGNVVRSISSSTGSNKPAQAIDCVSAAFRNMHSRRDDYVGLPINSRGEFVKVHPGGTPNSVDIFTRQCLGENSSCPSDYPTIFSSITRMDHVPNYHARQFYTIDQSAFHADPRFPPAGPMAYGMDVRQWPSSERAKVHYYTIPNKKYPCAKQQELSMDHNSQQKLLGLRSRCPSQNSGQGMQHNAETTLRLMGKTVTLGTSSSMHCRGLNNGTPACSSKQSQAEDRGTRTKVFPQLFHGGLALADPAAACRISDGERQPSGHPSRFSLAPAAVRAFLPGTSSFRTGGHNQQPELATASKNPYLSIHCRHAPESSFNARNSFRNFTEKGPAAPYQSSSYLTQQLSSNMAQRTAAAASSSASGYGVQRPPGLSLTTAQTKFTSLRPLPPSVVPSHAYGAPPHGPVTVFHPSAPPVPYPASNSGGPGSSDAVLEIESVRWSVVGSKPEGSERLRSCKRAAEMDADVSVALLKKPLTVAAAAAARQGLDMLLPVAETGSEFRGSTRPEPEAQPRPSGTSTTPICVDDEP

SEQ ID NO: 66640 - protein, 119 aa, Zea Mays
MAAVPVYSITRAEIDEFWSRKEVEAEERRLAAEKEAARITAKTLKMEDYVLYEQMVREILMEGNGGDGSAIAAAATGGTTEAQIVGIKHWRDVPPYSAHQLHASQTSMLLPSFRCPRQG

SEQ ID NO: 66641 - protein, 112 aa, Zea Mays
MAATFTVAARLPLRGPARAPSRPAVAAVTRLRSRQERRGLAATGGRGPARVRAETFSGGGGVGRRDPMAPPYNVLITGSTKAQKVESVVGDLKEEYGEQHVELSVMLEMERM

SEQ ID NO: 66642 - protein, 487 aa, Zea Mays
MVLLFVEKLLVGLLASVMVAIAVSKIRGRKLRLPPGPVPVPVFGNWLQVGDDLNHRNLAALSRKFGDVFLLRMGQRNLVVVSSPPLAREVLHTQGVEFGSRTRNVVFDIFTDKGQDMVFTVYGDHWRKMRRIMTVPFFTNKVVQQYRHGWEAEAAAVVDDVRLDPKAATDGIVLRRRLQLMMYNNIYRIMFDRRFESMDDPLFLRLRALNGERSRLAQSFEYNYGDFIPILRPFLRGYLRVCKEVKETRLKLFKDFFLEERKKLASTKATDSNGLKCAIDHILEAQQKAIETTLWSIEWAVAELVNHPEIQQKLRQELDTVLGPGHQITEPDTHNLPYLQAVIKETLRLRMAIPLLVPHMNLHDAKLGGYDIPAESKILVNAWYLANNPDSWRRPEEFRPERFLEEEKHVEANGNDFRYLPFGVGRRSCPGIILALPILGITIGRLVQNFELLPPPGQDKVDTTEKGGQFSLHILKHSTIVCKPRTL

SEQ ID NO: 66643 - protein, 319 aa, Zea Mays
MAEVDDKLKDYEIRKEGEAEILLHKRNAVFYNPVQVHNRDMSIAVLRTFIAKRKEEHEALVDKRNTSHGKDKLSEISCQNGEDASTGQQDEMELNKAEVQIDDLSKEATKPPWKVTRELKPPLVLEALAATGLRSLRYAREVEGLGKIVALDNDKASVEDCKRNIKFNGASTTSKVETYLVDARIHMLMHPKEFDVVDLDPYGSPSIFLDSAVQAVADGGLLMCTATDMAVLCGANGEVCYSKYGSFPTKGKYCHEMALRILLASIESHANRYKRYIVPVLSVFMDFYIRVFVRVFTVLAATLFIFNVLRGLFRRRIMV

SEQ ID NO: 66644 - protein, 502 aa, Zea Mays
MAAPAARRIVGAEVPIPGSDKLRWIDLTIPSSSAAAPASPSDPFVCVPPRAASGCHIIPSGDSQYYLSWRIHEEHPNVLEVIELSPSKEFPSFGLRLAFQEALSPFAFLCEREGRRQGELVYMLYVLTVSGVALLCHLRSPFSYVSGSVLHQDDIAEFNLQTQAQSAKVTAVTAKPGCIVIGRQDGSICSYSLGKLAPNSPGFSNELRDDAGIGRLWTLMSRTKTVGPVQDIVATVVNERDLLFVLHLDGHLRIWDNHMKLLNYNVHSNDIEGHPSRLWVGKADDDQELISLAILHQNTVVQGCDYVAVYGFGFSAAERFMFSSEPSISTIPLLEGKLADLKIATYKLWILKEFGSMLYEILQYDIDTETAKCCSEKVCCYVLQEDAISEQLFQSSDNALDDLVWTADSMFSSLKEQAFTLISSMFLRRLLQPGVNHCSALRETLLEHKRFLSDSEFQSLTANGLRKEILSIIEQEFTDSKCYSLSLETILCTVPPQLVLAQ

SEQ ID NO: 66645 - protein, 304 aa, Zea Mays
MPLNIDIDLFKLDIDELIADYSKENCTSLFEFKRVWMGKKFSYIYEGRPKTNSGHLTSQSSLHQRLAGLYCLYCLYECQPYKPQFKIYLSLEECRQLKDIVVMAKQNGLQLVPALVKRMLDKDMFLFGYMNLINDNGDKQVEELTALQNKQVKFACDKLFANSQAERYMHMDLGAEFELDTIKKLSKEYAEAKELALAEASQTVEVEDAKHLLQSERLLGDKIDEVVKEWDVQKEGFYERTGLSSSPGDQLMAVDNDESGAQCHKDGSCGDQLMAVDNDESGVQDHEDLDDDDDGFAELELLLE

SEQ ID NO: 66646 - protein, 921 aa, Zea Mays
MAPRPCPLSLLLLAVAVAVALSPLAAAQPQRNILTTFPSTRTPAFATPPPPTVSPPPSPVTVPPSSPPPPPSSVKRSDIAVAVVSTALSSFAVSGLAFFLFLRHGRRKELTAGDGNGYPGRPLDGAFAGKRSEREPTRPSRGGGGFGMVDENGLDAIYWREFEKDGEAGGRGREKKPPTTGTGSRRPPQPPPLRQQQQRAEMWPEPQPSSSPPPSPPRRSRRNRIDQEPLIPAGSLDSASAVFDDSLHPPSAGSSSSFSVSARPPPPTPAVAVSSVPRPTPRPAPAASPGLPLPPGRASPPPAPPMVAASVASPPPPPPKPAAASPPPPPPLAKGPPPPPPPKGGPPPPPPPRGGPPPPPPPKGPSPPPPPPPGGKKGGPPPPPPKGGASTSSSRPPTAPGMPSGAGEQQAKLKPLHWDKVNVQATDHSMVWDKITGGSFNLDEGIIEALFGTAAANRKPKPSDKESGESSASLGRSNTPEQIFLLEPRKSHNISIILKSLTVGRDEIIDALRDGQTELGTDVLEKLSRLHISKEEESTILRFSGDPDRLAPTEAFLLRLLLDVPNPIARVNALLFKVNYGAEVAQLKHSLRTLELASQELRTKGLFFKLLEAVLKAGNRMNAGTARGNAQAFNLTALRKLSDVKSTDGSTTLLHFVVEEVVRSEGKRLAINRNYSIRRSGSLARSGHEGGSSAAGFASQGPSREERQSEYMNLGLPIVGGLSTEFANVKRAALVDYDAVVSECAILDGRLNEIKRLLETCSDDGFARGLRGFVRAAEQELKALRGEQERVLELVQKTTEYYHAGATKERNAHPLQLFIVVRDFLGMVDQACVDIKRKVQQKKPAPSSSQPNTAAAPTVAAVAAAAATTAATASATDGQTAPAQKPPEADSKRKRVMPRFPNLPAHFMKDSADSDSSSDEE

SEQ ID NO: 66647 - protein, 115 aa, Zea Mays
MDRRILRTSSCNGSGKNPSPSSPAAVSRPASSGGIGSKDDAAAGERKALLPRQPPGGMARKGRKGSNRRVQWKDKHGSKLTDVREFQPSDSSDSDDEYLDTCICSIISFQQTPNW

SEQ ID NO: 66648 - protein, 141 aa, Zea Mays
MRALVRIHLPTAISTGSFLHTSSTAASKTLVPNPNLVPLRLVRHFPAMAATAADEFVKGRVFPNGVAVITLDRPKALNAMNLEMDVRYKALLDEWETNPSVKCILVESSSSRAFSAGMDIKGVAVEIQKDKKTPLVQKVGM

SEQ ID NO: 66649 - protein, 384 aa, Zea Mays
MLTFEALSETSEFAKKWVPFSKKFNIEPRAPEWYFQQKIDYLKDKVAASFVRERRAMKREYEEFKVRINALVAKAQKVPEEGWTMQDGSLWPGNNVRDHPGMIQVFLGQSGGRDVEGNELPRLVYVSREKRPGYNHHKKAGAMNALVRVSAVLSNAPYLLNLDCDHYINNSKAIKEAMCFMMDPLVGKKVCYVQFPQRFDGIDRHDRYANRNVVFFDINMKGLDGIQGPIYVGTGCVFRRQALYGYDAPKTKKPPSRTCNCWPKWCLSCCCSRNKNKKKTTKPKTEKKKRLFFKKAENPSPAYALGEIEEGAPDIEKAGIVNQQKLEKKFGQSSVFVASTLLENGGTLKSASPASLLKEAIHVISCGYEDKTDWGKEVYIPYIT

SEQ ID NO: 66650 - protein, 307 aa, Zea Mays
MRCALARTASSSTLSSSSVARRMPLTISPVATTQGFLVFNAVGGGTGSGLGSLLLERLSVEYGKKSKLGFTVYPSPQVSTSVVEPYNSVLSTHSLLEHTDVSILLDNEAIYDICRRSLDIERPNYSNLNRLVSQVISSLTASLRFDGALNVDVNEFQTNLVPYPRIHFMLSSYAPVISSAKAFHEQLSVAEITSSAFEPASMMVKCDPRHGKYMACCLMYRGDVVPKDVNAAVATIKTKRTIQFVDWCPTGFKCGINYQAPTVVPGADLAKRAFVHWYVGEGMEEGEFSEAREDLAALEKDYEEEEY

SEQ ID NO: 66651 - protein, 665 aa, Zea Mays
MQSLTVARALPPAVATARRRPRASSSSREAVLQCWKYELSQDQYLGGSLRIGSSQGSLDIHRSTNLLRPAAASVSVEQDEVNTYLPKGDMWSVHKFGGTCMGTSQRIQSVANIVLGDSSERKLIIVSAMSKVTDMMYNLVQKAQSRDDSYTIALEEVFEKHMVAAKDLIDGEDLARFLSQLHSDVSNLRAMLRAIYIAGHATESFSDFVVGHGELWSAQMLSYAIKKSYFGANVLHPRTIIPVMKDNIPIVIRNMFNLSASGTMICKQPANENGDLDACVKSFATIDNLALVNVEGTGMAGVPGTASAIFSTVKDVGANVIMISQASSEHSVCFAVPEKEVAAVSARLHDRFHEALAAGRLSKVEVINGCSILAAVGLRMASTPGVSAILFDALAKANINVRAIAQGCSEYNITVVLKQEDCVRALRAAHSRFFLSKTTLAVGIIGPGLIGRTLLNQLKDQVAALKENMNIDLRVIGITGSSTMLLSDTGIDLTQWKQLLKKEAEPADIDSFVHHLSDNHVFPNKVLVDCTADTSVASHYYNWLKKGIHVITPNKKANSGPLDQYLKLRTLQRASYTHYFYEATVGAGLPIISTLRGLLETGDKILRIEGIFSGTLSYIFNNFEGTRAFSDVVAEAKEAGYTEPDPRDDLSGTDVARKQESLQNI

SEQ ID NO: 66652 - protein, 1001 aa, Zea Mays
MSMGVVSREVLSACERLCFICPSLRTRSRHPVKRYKKLLAEIFPRTQDEEPNDRKIGKLCEYISRNPMRVPKITFYLEQKCYKELRAERYGSVKVVIAIYRKVICSCQEQLPLFANSLLTIVETLLEQNRQDDLRKLACQTLFDFINNQVDSTYMFNLENQIPKLCHLAQEMGEKEKICILHAAGLQALSSMIWFMGEHSHMSAELDNVVSAVLENYESPYANADNDAAIEDRRIQWVDEVLKAEGHEPPAVTILTRVPSWKVIRTVHGELSLTIEESTSPNFWSGICLHNLARISREATTVRRVLEVIFRYFDNNNLWSPSKGFALCVLLDMQIVMEKSGQNAHILLSMLVKHLEHKNVLKQPDMNLDIIEVTSRLAGHSKAQSSTALMASISDMVRHMGKSMQSLASDAGPGDNMVKWNSRYGKAVDECLVQLSRKVGDAGPILDTLAVVLENISSSMIVARSTIFAAYRTAQIVASLPNLSHQSKAFPEALFHQLLLAMVYPDCGTHLGAHRIFSVVLVPSAVAPCSFSDTSRTRKIDLRRTLSRTTSVFSSSAALFGKLKRDMLSFRESPLHDNTKLLPISEDADEISANDAKLFKSQTIQRMASTKDISLPSSTDASTLSEQTPNQEKDAVTLMLSVRQANLLLSSLWTQALSPENVPRNYEAISHTYSLMLLFSRAKGSGADVLVGSFQLAFSLRSVSLQAGFLPPSRRRSLFTLATSMLVFFSKAFNVPALIPVVKHVLTESTVDPFLCLIEDCRLQALDSAAQSCKLYGSKEDDDQALKSLSNIDMNEHQSKETSVSLILDSLEDLSESELSTIRKQLIEEFSADDICLGSHFTETPSKSAAQNGKLHHKSMEVIPFGFVFEDDTLVEASDSLVEPHLRHLPCNSVLDVDRLLNSVLETSQHVGRMSVSTDQDLPFKEVANQCEALLIGKQQKLSICMSVREKKDGESSIEKSSQQDPQAYTFLCTADEQWHLNSCKLPVLCPYDRFLATSGC

SEQ ID NO: 66653 - protein, 660 aa, Zea Mays
MLSAMMGIEGIAATVTEDPEPSIPPGFGPFAASASWGIQNDVKPADDHSSSVLALQSIDDDVEILEYLSSSVDHQSDTGCCISGSNTCRKSLRNRPPIDYSRFDQIADEDSDAEVADKGVNAVKHRQQFPKGVLRGCPECANCQKVIARWNPSGARRPVLDEAPVYYPTEEEFQDTLKYIEIIRPTAEPYGICRIVPPASWKPPCLLKEKNIWECSKFSTRVQKVDKLQNRKSPKKSRRGGMMKKRRKISETEENNHHQIGMQQNQERFGFEPGPEFTLQMFQKYADDFSDQYFMKDKCRDSPPSVEDIEGEYWRIVERPTEEIEVIYGADLETGTFGSGFPKLCPEMKSDVEDKYAQSGWNLNNLPRLQGSVLSFEGGDISGVLVPWLYVGMCFSSFCWHVEDHHLYSLNYMHWGAPKMWYGVPGKDAVNLEAAMRKHLPELFEEQPDLLHNLVTQFSPSLLKSEGVPVYRCVQHEGEFVLTFPRAYHAGFNCGFNCAEAVNVAPIDWLPVGQNAVDLYREQARKITISHDKLLLGAAREAIRAQWDILFLKRNSSVNLRWKSICGPDSTICKSLKARIEMELVQRQNISSPCQSRKMDSEFDSTDRECALCYYDLHLSASGCPCSPEKYACLVHAKQLCSCDWDKRGKAKCHSQMGCL

SEQ ID NO: 66654 - protein, 612 aa, Zea Mays
MPAFGVAQFGSMQKVSESLQFLDQVKGATFLMESLSWSPSTKDAQKDAFMYNPQFQLDSSTTREGLPRTKAEPENSRLENAISIDSLKNFAITSNGLNPHVVAMPVNSKSISTVKLIQSDSNLRYNNISENAQQFKSAKQPDSSWASAATCFSNLTNLQRIERGLSCTPNKLRHCLQSEKSSGFLDSYSSIVSTDAELKCTLFDNATPFVQSDVIQEVGTSGSTRACGLHELPNEIWAEIASGEMKPVIKEVNENNGFLESTAFDPVMNDWWGDTALLAGNTSHLSATTMNSVSGQASSEQLSIEDRGLFSESVFEELLGFDGNVGPVMDSTEPLAGFVSGCHLPRYNLQGSLSVCKAQVPPLILPSGSCTSENVVMGSSKEAPVSLQNLSMDDCGSLNTASSKISQVKKPEGEKVVKKRARPGESTRPRPKDRQQIQERVKELREIVPNSAKCSIDALLDRTIKHMLFLQSVTKYAEKIKQADEPNMISKDNGSVLNDNSHGVVLKDNPSGGSNGGATWAYEVAGQTMVCPIIVEDLAPPGQMLVEMLCEERGFFLEIADTIRGFGLTILKGLMELRDGKIMARFLVEVKKLLFWDAFSFMVRFSNESRVL

SEQ ID NO: 66655 - protein, 161 aa, Zea Mays
MAKGRFKHKPTGERSFSSPEDIAAGTSAGRPKTFAKHDEKDVYSRRGEPEEESEDFMKPKHKGIEGLIEIENPNLVKTKNVKAKDIDIGKPTDMSRREREDLDKQKSHERHMKLQEQGKTEQARKDLERLTIIRQQRAEATKKREEEKAAKEERKANKALK

SEQ ID NO: 66656 - protein, 252 aa, Zea Mays
MSLEWSASSEWILMSGGCDGAIRFWDIRRAGCFRVLDQSRSQLGKRPLVKSALYKDHTDSLGPSPSARRRTGISKKSSSALRKIQNPTHGHMQQRLHPGLSSSQNRATAHYGAVTGLRTTADGMYLLSSGSDSRLRLWDIDSGCNTLVNFEAMRLQTGKPLQLAVTEDPSLVFVPCMASIKAYNLWSGKTFQTFRGHYELVSCCYYSEQDQELYTGSNDRQILVWSPSTPAFTKMEDDDKILSAADEDNWSD

SEQ ID NO: 66657 - protein, 78 aa, Zea Mays
MSRASIKIIPECYRLVMDLDSNFFKRKDARGSMLLAYSMSTASRSKLFLWMLQATLLDACYFALHFVAEDKVASELGS

SEQ ID NO: 66658 - protein, 153 aa, Zea Mays
MYDTAKTIVLNLVYLLEKYGFVPNGARSYYTNRSQPPLLSSMVLEIYRATGDVEFVRTVFHSLLKEHSFWMSEIHNVAIADNHGRVHNLSRYQARWNKPRPESATIDEELASKLNSMAAKEKLYCEIASTAESGWDFSSRWMRFGCLLSLKRN

SEQ ID NO: 66659 - protein, 1031 aa, Zea Mays
MASCGGGVCLKRDRREEEENDDDKGETSGRNKRPSSGAYYTGAGVDAQRTDDDDSAAADYMYEYDDGYEEEESAAEQPKGDDASARDTEQRYAVLTEDDVRARQEADTARVAEVLSIPAGFARALLRHFKWRVGRAQEEWFSDAQHQQRVRGAVGLVPAACPDGDALVPAARSPRPRVCGICFDAFPAGGTRSAGCAAHYYCDGCWCGYVAAAVGDGARCLALRCPDPSCAAAVVRELVDEVARDDDRARYARFWLRSYVEESGGRIRWCGGAGCTRSVELLGGCDAEAVASAVDVVCGCRHAFCWRCGEEAHRPVSCGTVRAWLAKNASDSETANWVVANTKRCPMCRRPIEKNHGCNHMTCGAPCHHQFCWLCLDPWDHHRGCTRYDSRRRRRHGPVDEVEDEEEQAQRTLAKASLDRYLYHYERWEGNGKSLRKALADADELERSELQRMARLLDLPAMDLGFVTEAYRQIADGRRVLRWAHAYDYFLSLDPERDAAKRGLFDDLQSQANRWLECLHGCAELERKHLFGAADADAEDEPTVAAAAFMAYKERLANLTGVTRRFIGNLVRAFKTNLPEVVVTLTPPASDLQHIVKSGPTTERQTTVGIGGILSTEATVTLPVSNVSSLQGTSALRPSSSSLVVSQETDIANDSVQERHSPTRNLAQAQHPVRPGGHGGFLSNPYPSFFGEATSTAGPLQLYMPNMVVSGGTTSTPSLAFSLSALGQPITSTALGGSFGSNTRTAWGNSDMAAASSSQPDRMGMDQQAGTGSAMNLTIGLHPNAQQPPPKYVKIWEGDLYGQRQGQPVFISKLESWGGTVSRKVAEDWPETMQIVRLIAQEHMNKKYSESQYVGNTDFLIFRALNQHGFLGQLQERKLCGVIQLPSQTLLLSMYDKTSRMVGMLFPKNMLMFRPEALTQPSPVQQEELIHHQQQQLQQQQRNIQRLQYQEQLHLQQQMTQQIQQQQQSLYQQHQQMQHQQQLWQQIQQQKHQLQHMDPQQQQLLSQMVGTELGSDDDTREDWVTGAGPHA

SEQ ID NO: 66660 - protein, 495 aa, Zea Mays
MESESSAQIKDENKDVDSDDRPGMPAAVSVYEQKVNSKSTARKVKRQPEISNSEMVTRKKAKVTKDPHHDGSTTSDVKQQACTCGVKTEKKKRKSSTTKVSAEEGKVSSNIGTTTQGDTTQADLSSKGKSCRKIGIQQALIEECKSTKVANDTGSDKFSHSVNNVIDLKDKLSHCLSSRLLRRWCMFEWFYSAIDYPWFAKSEFVEYLNHVKLGHVPRLTRVEWGVIRSSLGKPRRLSKQFLHEEREKLSQYRDSVRQHYAELRSGVREGLPTDLARPLAVGQRVIACHPRTRELHDGNILTVDNNRCRVQFDRPELGVEFVMDIDCMPLHPMENESLRQKNIVNKYLSEVKLEDQMNDLGSGGAARFASNVNVNCGDAAFQIPSSHPVNSLTKQAKVGTVDSIVQAKATVNEVAIAAQQAMYNQPCSLSQIQEREADIRALAELSRALDKKEALLVELRHMNEEVSRKQKDGETVRVEAFQDAICYGACAAKRF

SEQ ID NO: 66661 - protein, 410 aa, Zea Mays
MAIMIEKNVDVDSDGERVDFNDRATYEFLFKEYWEEIVKGKESMTLDKLEKAYAFLKEKLNCKQDLDLEKVHDEEHSSDDDFVGNSDDDDDNKPSSTTKFNGTSNTMKFFLREDRPMKNGYVGWGSKELMEFLSSIGKDTLNSLDQHGATEVVKVYIQQKGLLARDKKKLVICDDKLKILFRRSKVRYNRIYSLLGKHIAVNMTSEDETFANSDDNNETFVRKKARIGNYSSSTPKCTPEINKRCFAALVRHNIDLIYLKKSLVVDLLREPDTFGSKVIGCFVRIKIDLNDYSFYMHKKVHQHRKLYQLGLVTGTSKSPEEYKINDVSTDILLCISSIPDIKISSLSDEEYEEEECQDLRLLAKNESFKRPTVGDLEEKARSLRREIVNHWISKELQRLERLIDRASEKV

SEQ ID NO: 66662 - protein, 341 aa, Zea Mays
MQLEEIKAAVAALRNIRGLNWPSTFEPQRQKGGDLDLLDWLRAMFGFQRDSVRNQREHLILLLANVHIRLEPKPDPLSKLDDRAVDVVMTKLFSNYRKWCKFLSRKHSLRFPQGAQPQEIQQRKILYLGLYLLIWGEAANIRFMPECLCYIFHNMAYELHGLLAGNVSIVTGENIRPSYGGDEEAFLKKVVTPFYRVIRKEAGKSQHGKTPHSAWSNYDDLNEYFWTSDCFSLGWPMRDDGDFFKSVHDSRPVTTAGSSPQKDSTKSTGKTNFVETRTFWHIFRSFDRMWTFYILALQAMLIFAWNDYSVTEILRKDLLYYLSSVFVTAAFLQFLQNELLS

SEQ ID NO: 66663 - protein, 79 aa, Zea Mays
MRVEYFTAKPRRLCMNTTRTQELRIYINTTTTGKSLTFETEPNHNTARYSSDSSIRSTSTTTGNCHPKSAVFLRNQTNL

SEQ ID NO: 66664 - protein, 57 aa, Zea Mays
MSIKEEDCILGGESKSSKAKGPDFAFGIILTHVLMTKGEEITSRALMIPFLAIHAKK

SEQ ID NO: 66665 - protein, 79 aa, Zea Mays
MPLEPIWKYCERPARMESWNIGRRSAAAATDVSLEQSGFDKMQINLVYIVFHTCKDCLANYKIISVFWFGLRVHLCMKY

SEQ ID NO: 66666 - protein, 353 aa, Zea Mays
MVLSHGVGGSDESVHSTFASRYVRTSLPRYRMPEQSIPKEAAYQIINDELMLDGNPRLNLASFVTTWMEPECDKLIQASVNKNYVDMDEYPVTTELQNRCVNMIAHLFNAPLGDAETAVGVGTVGSSEAIMLAGLAFKRRWQNKMKAAGKPCDKPNIVTGANVQVCWEKFARYFEVELKEVKLSDGYYVMDPQKAVDMVDENTICVAAILGSTLNGEFEDVKLLNDLLTKKNAETGWDTPIHVDAASGGFIAPFLYPELEWDFRLPLVKSINVSGHKYGLVYAGIGWCIWRTKVDLPEELIFHINYLGADQPTFTLNFSKGSSQVIAQYYQLIRLGFEVTRTSWRTARRTRRF

SEQ ID NO: 66667 - protein, 97 aa, Zea Mays
MAVVSALAKYKLVFLGNQAVGKTAIITRFMYDKFDDTYQATIGIDFLSKTMYLEDRTVRLQLWDTAGQERFRSLIPSYIRDSSVAVIVYDVTENSAC

SEQ ID NO: 66668 - protein, 242 aa, Zea Mays
MAGGGGAGAGSSSGGGGGGGREGDWDCGSCGNRNYAFRSLCNRCKHPRLLVDPNTPRDSKWLPRAGDWICTGCSNNNYASRKNCKKCGLPKEEAAMPALQMAGMAMPAYATYIARLQSLAASASAYNMNFGMAANSPLQQQLLANANWPYGMAGRYGMQSSGWPFGNGNPNQFLGVPKDWRNGDWFCSCGSHNYSSRTQCKECGAPVPSSIPSTTMKATSDASSINWRLILILCSDGTWRTF

SEQ ID NO: 66669 - protein, 50 aa, Zea Mays
MTLVFYIITYSLLYSKHCAMMSHLCNRCVREFLILARTWFTEFGGIKFLF

SEQ ID NO: 66670 - protein, 891 aa, Zea Mays
MSIEKAVEFDDYCHSHQPPIAFIKSEVCGLFGSVFCDFGPEFTVLDVDGEEPHTGIVASISNDNPALVSCVDDERLEFQDGDLVVFSEVHGMTELNDGKPRKIKNARPYSFTLEEDTTSYGTYIRGGIVTQVKPPKVLNFKTLKEAIKEPGEFLMSDFSKFDRPPLVHLAFQALDKFRTELTRFPIAGSADDVQKLIDLAISINETLGDSKLEEIDKKVLQHFASGSRAVLNPMAAMFGGIVGQEVVKACSGKFHPLYQFFYFDSVESLPVEPLEPSDLKPENSRYDAQISVFGAKLQKKLEQSKIFMVGSGALGCEFLKNLALMGISCSQNGKLTVTDDDVIEKSNLSRQFLFRDWNIGQPKSTVAATAAMAINPKLHVEALQNRASPETENVFNDAFWESLDAVVNALDNVTARMYIDSRCVYFQKPLLESGTLGAKCNTQMVIPHLTENYGASRDPPEKQAPMCTVHSFPHNIDHCLTWARSEFEGLLEKTPTEVNAFLSNPGGYATAARTAGDAQARDQLERVIECLETDKCETFQDCITWARLKFEDYFSNRVKQLTFTFPEDAMTSSGAPFWSAPKRFPRPLEFSSSDSSHLNFLLAASVLRAETFGIHIPDWAKNPKKLAEAVDKVIVPDFQPKQGVKIETDEKATSLSSASVDDAAVIEELIAKLEEIFKTLPPRFHMNPIQFEKDDDTNFHMDLIAGFANMRARNYSIPEVDKLKAKFIAGRIIPAIATSTAMATGLVCLELYKVLAGGHKVEDYRNTFANLAIPLFSMAEPVPPKTIKHQDMSWTVWDRWTITGNITLRGLLGWLKEKGLNAYSISCGTSLLYNSMFPRHKDRLDKKVVDVAREVAKVEVPSYRRHLDVVVACEDDDDNDVDVPLVSIYFR

SEQ ID NO: 66671 - protein, 1499 aa, Zea Mays
MSPPPAVATGGSGEPTVPAWLRGLPRAPEYRPTESEFADPIAFLSRVEREAAAYGICKVIPPYPRPSRRFVFAHLNRSLVSSSEAANPTTASGSSATAPSLPESAAVFTTRHQELGTPRRGRPPPQVLKQVWQSGERYTLDQFEAKSRAFSKIHLAGLREPTPLEVESLFWKASADRPIYIEYANDVPGSGFAAPKQSQRHKKRRRESDQVEEGEKGSGWRLSGSPWNLQAIARAPGSLTRFMPDDVPGVTSPMVYIGMLFSWFAWHVEDHELHSLNFLHTGAPKTWYAVPGDRASELEEVIRVHGYGGNPDRLGICPFSCSPSECFGCGLAGTSSEMASVSIGSNVHDIIQTSDSYEFFADMYCFSFIELIVMCYLLTMFIPALLDFHLHGFNCGEAANFATPQWLKFAKEAAVRRAVMNYLPMLSHQQLLYLLAVSFITRTPNVLSGIRSRLRDRKKEERELLVKQEFLQDMISENKLLCSFLEKKSIRHVVLWEPDLLPSSTALHSCSSGSKAPEKKSEDGCRIESSERGTKDNSSDGSAHMIGAQTKFMSGNSKSSGTASASMDEVNADTDDEDDLPFDLSIDSGSLTCVACGILGYPFMAILQPSREVLEGISLAHTSRYKMSSEKDNCSNTIPCCPTDRCSFVPSRPSWPAEQQCLATPLGQANISHQNVNSHKDVCLRENEPNGPVPQCNNISHSCRSENTLHSCSDRGKSENKISEDSLGPEVGEQTGKYVINAQAAESSDGTINWNTYCTFARPRIFCLQHALEIEKLLEGKGGVHGLIICHSDISLAKASKSDLHLINISIDDEGHEEDGRDWTSQMGLNLKYSAKLRKEKSENQEQSPLPFGGLLSCPSPVSVVPNLKWLCKRARTPYTVIGTMRGSSATATAAELKPGVKTEIFTNGNVCEDDNRHHSFRQTGLEQPGGLQDCDKPSCSEENGHGRHCLVNIPIAVAEYPMMHQVREGPVSVSTCNDSICLSGSLDLPPHASPVEVTRYLGCIQSTELSSLPAFSVQHFFNDESTSVEGSIDCVSNGCLESQDDILGSRDERLQVQQYQEKMGLRNNPNMKSVDSHLIEGLAVSEGKHGETVAAFLENKERCAKTSYCSNTETKTTKSAIDNRLETHHLGTGPVKLNSSFNEMHSADRQCSLVFGCLDSADVPASTQALSVSPVLMSDEQQVDDAHSAVKAIEHLGNNLANIKHKSLHMDVLMLEDAQVASMAAVPGHEGESVEAGSNSFDILLGALAEESKAADAPGKDEVGKASLTLITLASNEPSVTEGRVVDVVETDTILGAGKDDKQLDQPHGFHLSDLVSRCIGSSNRSDIICYVRRKHKRKRDYSCFVRSPCESLRPRSKPAVVEESEWSRTAEASFAKRGKRTQAVGSFQCDIDLCDMAFETRAELNAHKRNICTDESCGKRFSSHKYLKRHQCVHSEMRPFKCPWEGCKMTFKWLWAQTEHVRVHTGERPYKCSAPDCGQTFRYVSDYSRHRKKFNHY

SEQ ID NO: 66672 - protein, 98 aa, Zea Mays
MPLDLQKLFKGVTGGLSGLSKVYKYTIVIKYKLVAVNCCPSTFDIFLLCRMSRAMKHCQEILGAGLKKAQRNSNWEQQPLTQNQCRLPSIVASPKPEI

SEQ ID NO: 66673 - protein, 214 aa, Zea Mays
MAAADSATASSSSPPECPAAPSIPTDPDFLSCVLQPPTSSSSRLLLRRKPPSALQHRMEWRCNDNGYVAYRNFLLRRIDGGSAQSTPSNSGRWAPSPVHAILSEADSWNYMRDLRSNSGVLNQAISIGSKQSDTERHVRFAEPAYSFVGVHCIFDNCKASVTILKFGRANSDLLAYGAADGSLMVCQVSEPPSVLQKMIGHSKNITVHSFMLSG

SEQ ID NO: 66674 - protein, 231 aa, Zea Mays
MMMRGMTAKNFDPVRYSGRWFEVASLKRGFAGQGQEDCHCTQGVYSFDEKARSIQVDTFCVHGGPDGYITGIRGRVQCLSEEDIASAETDLERQEMVRGKCFLRFPTLPFIPKEPYDVLATDYDNYAIVSGAKDTSFIQIYSRTPNPGPEFIDKYKSYVANFGYDPSKIKDTPQDCEYMSSDQIALMMSMPGMNEALTNQFPDLKLKAPVALNPFTSVFDTLKKLLELYFK

SEQ ID NO: 66675 - protein, 993 aa, Zea Mays
MASSTSRRRRGGGLERVADNWERLVRAALKRDRDHLRVGGAPAAVGGQRLADAVPASLGRTTNIEQILQAADDIEVEDPNVARILCEQAYTMAQNLDPSSEGRGVLQFKTGLASVIKQKLAKKDGAPIDRQNDVQVLWNFYLEYKSRCRVDDMQREQERLRESGTFSTEMGNRAMKMKKVFATLRALLDVLENLVGQSPTDRLHRQILEEIKRIKRSDAALRGELMPYNIVPLDTSSSVANIFGFFPEVIAATAAIQNCEDLPRFPFDTPQLRQKDIFDLLQYVFGFQEDNIRNQRENVVLMLANAQSRLSLQIGSEPKIDEMAVTDVFCKVLDNYIKWCRYLGRRVAWTSLEAVNKNRKIILVALYFLIWGEAANIRFLPECICYIFHNMAKELDGILDSSVAETAKSCTTEGSTSFLEKIITPIYDTMAAEAENNKDGKAAHSAWRNYDDFNEYFWSRSCFELGWPPAEGSKFLRKPAKRKRTGKTNFVEHRTFLHLYRSFHRLWIFLLLMFQLLAIIAFHHGKMDIDTIRILLSAGPAFFVLNFIECCLDVILMFGAYKTARGFAISRLVIRFLWLTAVSTFVTYLYVKVLEERDTRNSDSTYFRIYGLVLGGYAAVRIMFALMAKIPACHRLSSFSDRSQFFQFFKWIYQERYYVGRGLYESISDYARYVIFWVVILACKFTFAYFLQIRPLVEPTNIIVQLHDLKYSWHDLVSRGNKNALTILSLWAPVLAIYLMDIHIWYTLLSALVGGVMGARDRLGEIRSIEMLHKRFESFPEAFAKNLSASRFLTLFSIFESEITTKTYASIFSPFWNEIIKSLREEDYISNREMDLLMMPSNCGNLMLVQWPLFLLTSKIMLANDYASDCKDSQYELWDRISKDEYMAYAVKECYYSTEKILHSLVDAEGQHWVVRLFRDLNDSIAQGSLLVTINLKKLQLVQSRLTGLTGLLIRDETAGRAAGVTKALLELYEVVTHEFLSQNLSLTRGNCC

SEQ ID NO: 66676 - protein, 132 aa, Zea Mays
MTLCLLAVSVVFFLKDNISQDSNSYYILTMISLVGIVSFVITFSFGMGAIPWLMMSEILPVSIKSLGGSIATLANWLTSFAITMTTNLMLTWSVGGTFLSYMVVSAFTIVFVVLWVPETKGRTLEEIQFSFR

SEQ ID NO: 66677 - protein, 718 aa, Zea Mays
MTEVEAPLITEVEGVEGRGFCGSASTGGGSSGLGSGVRGTRQYHRRSDALAYGDRYQKAAALVDLAEDGVGIPEDVLNDTRFERAMRFYFVYLRLDWLWSLNLFALILLNFLEKPLWCQKYAPHTCDQRDLYFLGQLPYLSKTESLIYEALTLVILVLDIFYPLSYEGLNLFWKNSMNKLKVLLLFILACDILVFMLSSGPFRVAPYIRVVFLIMTISWLAYVTFEDTPQGKTIFTSYGTTLYQMFVLFTTSNNPDVWVPAYKSSRWNALFIVIYVLLGVYFLTNLILAVIYDSFKEQLAKQLAQMDSIRKSILQKAFDLIDTNGQGYLNKEQCISLLDELNKYRSLPKTWREDFELIFSELDRSGDFKVTSEEFADLCNTIAIKFQKEPPPSYLEKYPSFYHSPQCERLKSFVRSRLFEYIVVFVLLVNLIAVVIETTLDIENSSSQKVWQEVEFVFGWIYVVEMALKIFSLGFGAYWMEGQNKFDFVITWTIFIGETLTFAFPSTLPFLSNGEWIRYLLLGRMLRLTRILLQIRRFRAFVATFFTLMSSLLPYLGTVFCILCVYCSIGLQFFGGIVYAGNLKLEETDLFGNDYLLFNFNDYPSGMVTLFNLLVMGNWQVWMESYAHLTGSSWSLVYFISFYLISVLLLLNLIVAFVLEAFFAEMELEKAGEADTQDSTPQGRNKRRSMRVRTKGTMVDILLHHMLSNELDGSQNSD

SEQ ID NO: 66678 - protein, 425 aa, Zea Mays
MVTATTTPPQCWRGLPALARAPPPLSSPLRPRAVAAAAPIYPLRRRIAITTTRGRRGTLDCSPRCTLETAGPGFYPLGLYEEGSNSLSRSPLSTFFGIMAPVFGSSSGGGASREKASGRGAAAAIEDSSIDIGDFFKGPLPGKFLKLLGFLALSRLGVYIPLGGVNREAFAGNLDQNSLLGTLDSFSGGGIGRLGICSLGIVPFINAQIVFQLLAQLYPKLQDLQRKEGEAGRKKVLQYTRYASVGFAIVQAIGQVLYLRPYVNDFSTEWVLTSVTLLTLGSVFTTFIGERISDLKLGNGTSLLIFTSIISYLPASFGRTVAQAFQDGNYVGLLTIILSFLLLVLGIVYVQEAERKIPLNYASRYSSRTGELQRSAYLPFKVNSSGVMPIIFSTSSLALPGTLARFSGLDFLKKAAIALNPGVRS

SEQ ID NO: 66679 - protein, 257 aa, Zea Mays
MIHPAPRPRSRAPRRRRRRRAARGPAGEAAAAAGSAARTVATRPRRTACTSAAAPAAKAAASPAAPTSSPPGSLLPRDASASSSSPRSRPPPATQPRPPARPATRPSARAHASPSPPRRPRPRMVTVAERFPREVSSEALFRCVRLGPVDRAEAEVAYQTTVSIGGHVFKGILHDVGPRSLPAAGGGAAAAAIEYYFRHAADGSPPSTTGAAGEACGAGGVGNVVVSSAVVMDPYPTPGPYTAFLPGAPFFPGHPRQ

SEQ ID NO: 66680 - protein, 760 aa, Zea Mays
MAARAITRRRKYLFDHVKTPNLSSSSSTFQHGRIGSEDEPKITLLFLEQSSRDSRSEKEQYCVNLTNRNLAGIANRFLRRPAHGISLSYYGIGKNDFGLPLGARSMLQSVRASSTATAGQPKLDIDDEQSGDQKQNRKKKETSPEECDQAVEGLSTAKAKAKAKQVQESLKASQSAMQKFWARLLGIGPALRAVASMSRADWAAKLKHWKAEFVTTLQHYWLGTKLLWADVRISSRLLVKLAGGKSLSRRERQQLTRTTADIFRLVPFAVFIVVPFMEFLLPVFLKLFPNMLPSTFQDKMKEEEALKRKLKARMEYAKFLQDTAKEMAKEVQTSRSGDIKQTAEDLDEFLNKVRRGERVSNDEILSFAKLFNDELTLDNMSISRLVNMCKYMGIRPFGTDHYLRFMLRKKLQDIKNDDKMIQAEGVESLSEEELRQACRERGHLGLLSTEEMRQQLRDWLDLSLNHAVPSSLLILSRAFTVSGKVKPEEAVVATLSSLPDEVVDTVGTVLPSEDSVSERRRKLEFLEMQEELIKEEEKRKEKEEKAKQEEEEKAKLKETKGSAEDLALKEMIEATAREEELRKAKQHDREKLCNIGRALAVLASASSVSKERQEFLGLVNKEIELYNSMLEKEGAEEAKRAYIAAREESDHHAEAAAEEKISSALIEKVDAMLQELEKEIDDVDAQIGNRWQLLDKDHDGKVTPEEVAAAAAYLKDTIGKEGVQELISNLSKDTEGKILVEDIVKLASQTENNEEEEEAR

SEQ ID NO: 66681 - protein, 122 aa, Zea Mays
MAASRSEERDQNQPVVLVTGCSEGGIGHAMARAFAAAGCAVVATARSRGSMRGLDGDPRFLLLELDVRSDESARAAVADALREHGRIDVLVNNAGVHLVAPLAEVPMESFHQVFDTNVYGLN

SEQ ID NO: 66682 - protein, 528 aa, Zea Mays
MAWLGLGRAGGAIKGRGWKYGSGFVDGVFPVLSPMAQDVLELVQTRGTDAASVWESLDKIPQAHDLWDDIVNVAVQLRLNRQWEPIITVCEWVLRRSSFRPDIICYNLLIDAYGQKRQLSEAEAAYMALLEARCVPTEDTYALLLRAYCGSGQLHRAEGVISEMQRNGIPPTATVYNAYLDGLLKARCSEKAVEVYQRMKKERCRTNTETYTLMINVYGKANQPMSSLRVFREMKSVGCKPNICTYTALVNAFAREGLCEKAEEVFEEMQQAGHEPDVYAYNALMEAYSRAGLPQGASEIFSLMEHMGCEPDRASYNILVDAFGRAGLHQEAEAAFQELKQQGMRPTMKSHMLLLSAHARSGNVARCEEVMAQLHKSGLRPDTFALNAMLNAYGRAGRLDDMERLFAAMERGDGAIAGAPDTSTYNVMVNAYGRAGYLDRMEAAFRSLAARGLAADVVTWTSRIGAYARKKEYGQCLRVFEEMVDAGCYPDAGTAKVLLAACSDERQVEQVKAIVRSMHKDAKTLFAL

SEQ ID NO: 66683 - protein, 302 aa, Zea Mays
MIKWGLSSGTPADSYYEVRSDCTDGVPKSKFKIKAGKTLSARKWQAAFSPDGCLDIASVLSRIQRGGVHPTVRGEVWEFLLGCFDPRSTFDEREEIRQIRRIQYARWKEDCRQMDSHVGSGKVITAPLITEDGRPIKDPLVLLEATSDTNTSGDAPTTSINGNEVDESAERITDKQIIEWKLTLHQIGLDVLRTDRTMVFYENKENLSKLWDILAVYAWIDKDVGYCQGMSDLCSPMIVLLNDEADAFWCFEKLMRRLRGNFRCTDQSVGVANQLQHLASIIQVLDPKLHDHLDDVGSGIRP

SEQ ID NO: 66684 - protein, 159 aa, Zea Mays
MATTPPGFTGNLKKALAGLRRISLDGLRWRVFDAKGQVLGRLASQIAVVLQGKDKPTYAPHVENGDMCIVLNAKDISVTGRKMTDKIYYWHTGYVGHLKERRLKDQMEKDPTEVIRKAVLRMLPRNKLRDRRGGGSAAGGDRLLLQRRGGGSAAGTTDS

SEQ ID NO: 66685 - protein, 788 aa, Zea Mays
MMERLSALVLDGDPASLSTISETLAKFNFRVVSFQTAEAALDFIKCGAAKAADLDLVLVEVNLNNMAPGTSANPDLFHHILNELQVPLTAMCSRDDEEALSKCMNLGACFHLLKPLNRRSFSILWHQALEHKSKKAAPQRPSLNDSTKNRMVSPSTEKPKEVLILERNNLSVPQSNGYEEPKKQNRVTWTIELHEKFLEAVEALGGNKSARPEKILHLMNVKGLTVKHIGSHLQKHRLRNQNTKQGQRQENASRKPISRQGEATSESITPRVETDGEVYPSRLWTKVKKRSVDTSALKTGMHTCTSGNDNEGTESVWDRYENNLQVFAENKKRWMFTSEHQWPRRNNIDTTDEGDPNEAPETAAGASIEIFGSSSLISDQVGEKNRVESDRDNNTVWSTDLLEGYGASIESSGSSSLLANDQVGENNHSEAARANDSMGNITLLEAYGGAYIGTSGSGSLLTGDLVRQNGCAEATRHNDNLWGVNLPQGYGAFTEISGSSNMLTSYQVGENNGTEFARDNGHMENISLLEVYGASIENAGSSSMLTSDQVGQSNLTEADRIYDTMGSINYLEGTVDPEYIAPMDYSVAWAHLEGNGPDLRSPSDGREEAYSFWMSQLAGPQDYQSLGPEGFLQVGDDAYNDALRSVGLVNVDEQATQGWQEQQSLSMEDLLQVDDVAWDDTLISMGLINLLDEPMAEEAAIGGSQGQQSLAPEVLQAGDNAYGDDLGSIEMVNLLNEPMTQEAAIADALVDDPMTLIAQDDVPWAWSPAVPGDYGIDWIQDPNAELYG

SEQ ID NO: 66686 - protein, 1548 aa, Zea Mays
MAMRQSKLRAVSARPWLLLLCLALAATAGVMQARAQPNSIGNLMGRAGDRARFISIDCGFPGTTSYVDDATTLPYAPDAAFTDAGENHNVSSEHVTPELPRIYRDVRSFVDGARNCYTLPSTLAVGLNKYLFRAAFMYGNYDGLNRPPVFDLYIGVNLWKTVNLSSSDPAAPVIAEAIVVVPDDFVQVCLVNTGTGTPFISGLELRPLKNSIYPQVNATQGLVLQSRRNFGPTDMTDIIRYPDDQYDRLWTPMIIDAIDWLVLSTTEKVRNIYDDLFEVPSKVMQTAITPRDATSSINFYWNSKGSSLGYIPVFHFSEVLQAGAGVVRQFNININGKRFTSHDYYTPRHLESGYVYGTRPYTNQIRYNVSIVKTDTSTLPPIINADEIFIVISTTNVGTDSEDVSAMKAIKAKYQVKKNWMGDPCVAGTFRWDGLTCSYAISDPPKITALNMSFSGLTGDISSAFANLKAVQSLDLSHNNLTGSIPSSLSQLPSLTTLDLTGNQLSGPIPSSLLKRIQDGSLNLIYADNPDLCTNAGDSCQTAPQGKSKLVIYYVAVPMALIVVALAVLLCCLLRRRKTRGLADVSVKPRDKTPTSLASMAADEHRLSSLRLENRRFTYEDLEMITDSFKRVIGRGGFGYVYEGFLEDGTQVAVKMRSQSSNQGAKEFLTEAQILTRIHHKNLVSMVGYCKDGVYMALVYEYMSEGSLQEHIAGKRLTWGQRLRIALESAQGLEYLHRGCNPPLIHRDVKTSNILLNAKLEAKVADFGMSKALDRDTYASTNTLVGTPGYVDPEYLETMQPSTKSDVYSFGVVLLELVTGRPPILHSPQPTSVIQWARQHLARGDIEVVVDASMGGNHDVNSVWKAAEVALQCTEQASAQRPTMGDVVAQLLECLDLEKGRSANESFCDGDDSGSATASLSHSSAFVTGRIFGTVPMVETGPATRRALVCVSLSPLSPLPRARLPSAPPWDESAFLAMAASHLPPAATLVKKYPTLLHPFGAKPHAQRLIFRCRATSSEGADDGWASFVDELKRSLQVDPSDAVISNAGAGLTSNNDLVTALPLEPSAGPAAGDATTAAAGAVSELLGVDASGAVATPDRLLSSLLHLDASNPVASVAGGALSRLDALTSGLSDAQRWALFGFLAATWLYLTARPGVLSGAVDMYVLAPLQLALDSVLGRRSLKMSDFVVGERIGEGSFGVVYAGAVVPKNGAVVEERSGKAKTSLQNDDRYKEKVILKKIKVMTVGAKECGDYEEWFNYRVSRAAPESCADFLGSFVADKNKAEFVKGGKWLVWKFEGDRTLANYLSERGFPSNLERLMFGRVLQGLGPLEREALVVKQVMRQLITSLKRIHATGIVHRDIKPSNLVVTRRGQVKLIDFGAATDLRIGKNYVPDRALLDPDYCPPELYVLPEETPEPPPEPIAAILSPILWQLNSPDLFDMYSAGIVLMQMAIPTLRTQSGLKNFNAELRSAGYDLNRWRQSARRRPDLQILDLDSGRGWDLATKLISERGANGGGRLSAAAALRHPYFLLGGDQAAAVLSKFSLSK

SEQ ID NO: 66687 - protein, 268 aa, Zea Mays
MFHGLDVNKPQAIFKYLPVLSFTESYIYQLDASNEDCLHVVPDDNTSKVLGKKEESLNETSLSQMIEPLEGLLQCQGLMTDRLRTELKSGIQYWSLERKLCQALLRNEKISIEDVMMAIHLKSFDYRVLNLLMFQLTGQHVNELHMDFLSVSEFLVEISDDLYDYEDDVMNNTFNILRMFAAIYGPLEAPNMLAKCIGEAEEKYESFSKKLDPSLSGSYWRRCEEATKEGGKTSGHAYGTWNIPRVISNEDAFRRERRSKHDACAVIT

SEQ ID NO: 66688 - protein, 362 aa, Zea Mays
MEDEENIEGELLLVESQLHDIQGQIKTLLDRQEELYERQAQLKALLEASKLTRNTTINTSSVAPEDWSGSFPWDLEADDTRFNIFGISSYRSNQREIINAVMSGRDVLVIMAAGGGKSLCYQLPAVLRDGIALVVSPLLSLIQDQVMGLSALGIPAYMLTSTTNKEVEKFIYKTLDKGEGELKILYVTPEKISKSKRFMSKLEKCHHAGRLSLIAIDEAHCCSQWGHDFRPDYKNLGILKIQFPSVPMIALTATATSKVQMDLMEMLHIPRCIKFVSTVNRPNLFYKVSEKSPVGKVVIDEITKFISESYPNNESGIIYCFSRKECEQVAKELRERGISADYYHADMDIVNREKIHMRFVMG

SEQ ID NO: 66689 - protein, 579 aa, Zea Mays
MEFVDNTNCLSLFEKKHLGLLSLLDEESTFPKASDFSFANKLKRQLSGNSCFKSEKEGTFKICHYAGEVTYDTAGFLEKNRDPLHSESIQLLSSCTCELSKHFASVMVADSQNKSSLSWHSVKDTHKQSVVMEFKAQLFKLMQQLESTTPHFIQCIQPNSKHHPRLFEHDLVLHQLKCCGVFEVVRISRTCYPTRITHQQFAERYRFLLLRSIASQDPLSVSIAVLQKFNIPPEMYQVGYTKLFFRTGQVAALENAKRQMLLGTLHIQTQFRGLHSRRGYQRLKKGAMNLQSFIRGERTRIHFDNLVKRWRAAVLIQKHTRRRLAANMFNDQLNHVILLQSVTRGFLARRKYKCLQNEKESKASHSIVQGNTRKNNSESRICHEMNGHYPHEPVITELQGRITKAEAALRGKEEENVMLKQQLEQYERKWSEYEAKMKCMEEAWKRQLSSLQYDSEDTLSTGTRTPEVIESKHDNHNPEAKVSAGNSDRRVNAVNHLAKEFEDRRQVFEDDAGFLVAVRSGQIGSNMNPDEELRKLKDRFATWKKDYKSRLKETKVNLSKVGTHDEKSRKRWWGKKSSK

SEQ ID NO: 66690 - protein, 212 aa, Zea Mays
MSAAGGRTLGRSSFSRATSKLVASSSGSAGVKIGPNGASFVSSGIPDLDRILGGGFLLGSVVMIMEDTDAPHHLLLLRCFMSQGVVHKQPLLFSGAMKEPVLFLGTLPAPVSSSKEDGRHRAMGPAASSDGRANDEGLRIAWQYKKYFGDDKTSRAEHKDNKQEFSNDFDLRKPLERHLLNGQNIECVSTQDADTLSSLQDCCSAFVSKLPR

SEQ ID NO: 66691 - protein, 138 aa, Zea Mays
MVKRIRGVSFSTRVSPQLENRIIYAARGIFNRFIPDVHIHTDHRSGSAGGRSPGYGVSLVAETTTGCLLSVDVTVSYPSVDEINEESEKPELTSPEDLGVQAASMLLEEVAQGGVVDSTHQVWAFMQAFYVFLNFAWC

SEQ ID NO: 66692 - protein, 393 aa, Zea Mays
MGINGEEWEETVLGDGVGRRKGGAEASGLVASSSFAEGMGEFVLRSMDARFSGSVDDDEYVSSRQPVFGHSKSTATTSGTIKGQDNVFVRSYSDRLLKCDLTLDMLSENEKIKITERLVKIQNDGTVEVDVTRSALVASELSEIDAFGCVPHDIEEVTPGITKSVPKLKIAILVVGTRGDVQPFIALAKRLQEFGHYVRLATHVNFRTFVKSAGIDFYPLGGDPRVMAQYMTKNKGFFLAAPTEIAIQRKQLKEIIFSLLPACTEPDLDTGTPFRAQAIIANPPAYGHLHIAEALGAPLHIFFTFPWTPTNEFPHPLARMPQSATYRHIPWIYITLTYWIHVEPATYAKAKRLGSSSGCCGILLLKSWNKVSTATTTVTVASTGAQANIHWFW

SEQ ID NO: 66693 - protein, 229 aa, Zea Mays
MRRELASPLATAAAATAGASSSAAASLRGWWDDVNESPQWQDGAFFSLAAAYALVSAVALIQLVRIQRRVPEFGWTTQKVFHLMNFLVNGVRALVFGFHVHVFLLRTKVYKLVLLDLPGLLFFSTYTLLVLFWAEIYHQARSLPTDKLRPAYIAVNAIIYVVQLCIWIYLGINDNAAVELASKIFIVAVSFVALLGFSVYGGRLFVLLRRFPIESKGRQKKLYEDCLLK

SEQ ID NO: 66694 - protein, 172 aa, Zea Mays
MYSWEKLFTERLVERRESEVKHLATRKYLDAWCVYFWATTPTLFSLSTFSIFAITGHALDAATVFTCVALFNTLISPLNSFPWVINGMIDAVISSRRLSNYLSTPEHHSSELNASADLLNHHFKRYSKVTHNPMAIIFQNVSCSWSSSSVAELNIVLRDISLQLQKGSLLQL

SEQ ID NO: 66695 - protein, 811 aa, Zea Mays
MLMLIPQQLLGIQQKHTSLFLWELRNRARPDVYLGTNERTLGGDRREYGFGKLRHGTAFGQKAHPTYGIRGAIAEFDVVKASGLVPGRGWGHFNDYQNKGKLFMADSCWDAKDLAGMVVTAAHSGKRFYVDSICYNMNAENSFPRKEGYLGPLEYSSFADYYKQKYGVELVYKKQPLIRARGVSYCKNLLSPRFEHSEASNGEFSENLDKTYYVYLPPELCLVHPLPGSLVRGAQRLPSIMRRVESMLLAIQLKDIIGYPVPANKILEALTAASCQETFCYERAELLGDAYLKWVVSRFLFLKYPQKHEGQLTRMRQQMVSNMILYQYALNKNLQSYIQADRFAPSRWAAPGVLPVFDEETRDSEPSIFDEEFTPSSELQKNLYDDYDGDSMQEDGEIEGDSSCYRVLSSKTLADVVEALIGVYYVAGGKIATNHLMKWIGINAELDPQEIPSSKPYNIPESIIKSINFDTLEGALGIKFQNKGLLVEAITHASRPSSGVSCYQRLEFVGDAVLDHLITKHLFFTYTDLPPGRLTDLRAAAVNNENFARVAVKHKLHVHLRHGSSALETQIREFVKDVQEELSKPGFNSFGLGDCKAPKVLGDIFESIAGAIFLDSGCATSVVWKVFQPLLDPMVTPDTLPMHPVRELQERCQQQAEGLEYKASRTGNVATVEVLVDGIQIGVAQNPQKKMAQKLAARNALVVLKEKETAAKKDTEKDGEKKNGSQFTRQTLNDICLRRQWPMPQYRCINEGGPAHAKRFVYAVRVNTSDSGWTDECIGEPMPSVKKAKDSAAVLLLELLNRNYRGKPDGK

SEQ ID NO: 66696 - protein, 70 aa, Zea Mays
MKWSPSSVPRVPIEESDSSTLLTGCAWPSAVVLQGLWPLCSSSRAISSTLAICWRTRPLVPWRTSKITLA

SEQ ID NO: 66697 - protein, 873 aa, Zea Mays
MSPPASHRRRSRFLSWPLLFIAILAIHSLAVYLFTRGFLLTRTELDLHSSRDDFSPQGNVSPGCDSWPPAAVDRLVIVVLDALRFDFVAPSTFFAEKQPWMDKLHVLQKLAADEKTSSRIFKALADPPTTSLQRLKALTTGGLPTFIDVGNSFGAPAIVEDNIMHQLAKNGKRVVMMGDDTWIQLYPEHFNKSFPYPSFNVKDLDTVDNGVIEHLLPSLHKNDWDVLIAHFLGVDHAGHIFGVDSTPMIQKLEQYNQILEGVIDTLRSLSKPGGTHENTLLLVMGDHGQTLNGDHGGGTAEEVETSLFAWSPRTPPDAVLSVLDDSSCTVNLHGEEVCVSTMQQLDFAVTISALLGIPFPFGSIGRVNPELYALSIGTWVNQRRGTNACTSQDDLEAWMGRYAEVLCVNCWQVKRYIDQYSATSVIGFPSEDLQHIMDLYSRAQENWSASLITSSSETCSQEKVEKGSVLLQQIDAYNDFLKSFAKLARSAWTEFDLWSMGIGLLLMMLSVIIQASMLNFVFLLLNIFTRFGIEVGMSKQLPAPTITKDHPVSVIYKILGANSCNILLELFPIISLAFVAYIMLKCLSRAICQRFLKFFLLCGTMVSYLSIAFHWASETTLFAHAGTVQEFGRSLAPRIVYTIGGLSLAISAFSRIFGSTVHLKLNKRIIILSAVMLCSWSPTILILLGRQGPFVALICMTGAWCMIKLQQKHQRETELSVADPVSVIQWSLLAVCLFYMTGHWCTFDGLRYGAAFIGFDHFHIIRQGLLLSIDTFGISHVLPILSLPLIAIVWYNTISKDNELKDVILNNINKVLLMYGLITTITATLTIICVAIQRRHLMVWGLFAPKYVFDAIGLLLTDLLICLASIYYS

SEQ ID NO: 66698 - protein, 103 aa, Zea Mays
MASETDEKAKMESLTSAAAFVEGGIQDACNICLEAFCESDPSADQPKWMDQHMSHQNPPPNPIGIQSNTVDLDAEDSVPSSFTSKRPLGHDSSKEKAKKQSFN

SEQ ID NO: 66699 - protein, 746 aa, Zea Mays
MSLREKDFIISNLLHSEHLIIERAKDMRNTLENATEDISVLLNKQERQSKTEAENKRLLSGFRAELDRSLGVLHATVVGSVCEQSKILESINEQTKLYFLARNESENQLERRIARAKDMYVSGVQCMKELANTMRQQSIIDSEQMRQNISTNANAIGNFLEVMFSEAEQVLNDVLKSTSDLKELLAFSAELQNTGLRRNLASVQAMSKQSIDFFEDIRIHVSQLMTLMEQNQMERSSKLVKFENEFKETCVKDEQAALNKIAAILSELTAKKTTMVSSYMGQLNERYSEDQKNLKLEISNLQQVSDNGKNESVACVGVIESQFQEDMSSHTKSNDQMEGILKQYSEKGSHFVSYWSHIQSSLHDLVKSSIMETDDFIEESRNKNENIFQEGLLFSSQNDAEFHGITSDVLTVSKNSLLLDHETCKMVETNTTIFSDHLELLNEKHSEGVESTRNMMSDCLEKDYMANSPVRNHPRELLTSANSLESIDKLRASLPDLVAKFRLENKLNEMDKGKQYSDQRTRVHGKFKTIISAIERRVLEEQLGWARLERQKILALSAEADDAIWHLATLARRRMQERDEARNQARMLLADLQARNARMKAAVPGASCSRVARPDAFAATGYEHIQAQAQAQAQALAPAAFGPRGQRARAGTGYYCVASSSGFGHRSIDSSLDTCAVQPSLLGFASSSSSQEHFDPDMFLVDVAESPQDVVPVPATADSSQGRSSGSGSGTYGHSLASKRPCSERK

SEQ ID NO: 66700 - protein, 301 aa, Zea Mays
MSVHFAGPPPKPWERSGTEGTSGPAPFKPPSGGSTSDVVEASGTAKPSENVTAMEGNAAPNVNSTVSRPMPQRPWQQTGYGNTYGGYGGSNMYSSYGGFGNTYGTGGLGNSMYSSYGGGYGGGMYGGGMYGGGMYGGMGGYGGYGMGGMGGMGMGPYGNQDPNSMGPPASPPGFWVSFLRVVLVTTTCSAITFTKCRITSLFISRRTQMHGVVNFFGRISFLVEQNTQASYFFMTAMLQLFDRSGMLYGELARFVLRLLGVRRKPKKGGSIQGPEALAFEGPSRQSTEAPKTNNWDNVWGN

SEQ ID NO: 66701 - protein, 418 aa, Zea Mays
MDRIVGSKYKLGRKIGSGSFGEIYLATHVDTYEIVAVKIESSKTNHPQLLYEAKLYNALQGGTGIANIKWCGIDGDENILVIDLLGPSLEDLFVYCGRRFSLKTVLMLADQMITRIEFMHSKGYLHRDIKPDNFLMGLGRKANQVYVIDFGLAKRYRDSATNRHIPYRENKNLTGTARYASRNTHLGIVLLPEQSRRDDLESIGYVLLYFLRGSLPWQGLKAATKKQKYDKISEKKLSTPIEALCKSHPVEFASYFHYCHSLTFDQRPDYSFLRHVFRELFEREGYQFDYVYDWTLLKCKQSQKAKVQQGCSHDAGVSSRPVATNVDKHQVGVARPINASGLLEAEQRPAIRMQLNSRSNNLHPERLGVSASHNNVLLQSTSLDNADAPMDHATHSKAQGSIDPHTRGSYSPGPSNRT

SEQ ID NO: 66702 - protein, 53 aa, Zea Mays
MPQRDVLHQGDPLAGARAIAAGGEGRNAVAQFVHYPRVKSRWSKRSPIMRSTS

SEQ ID NO: 66703 - protein, 236 aa, Zea Mays
MAGYLPFDDANLMRLYKLICQAYFSCPPWFSSGAKKFIKRILDPNPDTRITIAEILEDEWFKKDYKPPRFEQGEDVSLDDIDAAFNDSEDRLVAEKREKPESMNAFALISRSQGFNLGNLFEKEMMGMVKRETSFTSQCTAQEIMTKIEDACGPLGFNVRKQNYKMKLKGDKSGRKGHLSVATEVFEVAPSLHMVELRKTGGDTLEFHSFYKNFSSELKDIVWKAESDANNKQTNK

SEQ ID NO: 66704 - protein, 272 aa, Zea Mays
MISFNRYAIDNMQSASMEEAKKNGIQQLAEETTLVQFIFGGYLRSKIKCTKCQVISKHSERILDLTVEIDGDISTLDGALRRFTSSEILDGDNRYHCSRCNSYERAQKKLTILEAPNILTIALKRYQSGVLGKISKAVKFPEHLNLSQYMCRTDDSSPVYSLYAVVVHRNVRNATVSGHYVCYVKDSQGKWHEMDDNKVKPVSVQKVLSRCAYMLLYARCSPRAPTSARAKKPKQMARSGSFPSGGGRYRSRHQGGLYPIWEEQMESYEAMY

SEQ ID NO: 66705 - protein, 829 aa, Zea Mays
MPTIIIATHKQQMILLSSKEQTNIQTVPGYGSSSYYYQNNTWNGGSTGNTFAQSYQNYSSSDTNAQQSSTSVPANSLPYQQQYNQWPYYYNQSVPSASSNPVAGNSTTDNLTGNMPSGYSYPSSQPPPPGTTSWKSNSVASVAPPMQVPGVPGQQSQYGNQAEGHYNQGPGVQWSQNHYAYQTQPYPQKTNSNHPQLSNHEDQQETDSVTMDTSSEGKIQVPINPQIAPGFSMVIPKNEKKHSGLDLSKKPAYVSVSMPTNDAKATQVGLDARLPFSLRNYATRNLNRCKNDAQREACRSIMNEITKKAFAEGTLLTKNWDTEPLFPLPESTVGMTGTSSVNNLSPFSSVSTPRKRVKSRWEPVVDENVTNKVEQIAKGLIGSNVHSTSDPKNRMGSSWDHRKFLQSSQAPSNKVNQRSAKKQKMGSNLSQIQNGNASSDSEKEHDLTKYYASATALANSPEEKKRREHRSKRFEKSKDSSFKSRNVSANKDAMTNLRARRAILSFRTRTYEGGTLAVEDMDWDALTVKGTCQEIEKRYLRLTEAPDPAKIRPEDVLEKALAMVETSQKNYLYKCDQLKSIRQDLTVQRIQNELTIKVYETHARLAMQAGDLHEFNQCQSQLKRLYAQGIKGCYFEFSAYNLLCVMLHSNNKRDLLSSMASLSKEAKQDAAVKHALAVHASVLSGNYVLFFKLYKKAPNLNSCLMDLYVERMRFEAMKCMSRSYRPTVPVGYVAQILGFMRTDTGCATNGDDGLEECEKWLKAHGIVLSEGNSGELQIDMKASSSTLYMPEPENAVAHGDASLAVDDFLARTDGHLKRCSSDEPTVDTP

SEQ ID NO: 66706 - protein, 905 aa, Zea Mays
MCMLLAIIPLSIATIVKEEAGNLKGETTSVIRGQLVSSLQILRQFFGLLSPPPATVHLANAAARKAAVVLSNLKTGSENMYSSFKDSSSIKAVGNMLHLIVEACIARNLIDASAYFWPGYVVPLKESSPVQASPWSSLVEGSPLIELKDALMVTPASSVEELEKLYSFAVSGSPEEKLAASKILCGASLLRGWNIQEHVVQMVLKLLSTFLPLDSGSEGRYVQHMPMLHALVSGISSIDTVHILSLYGLVPEVASMLMPLCENFGSLPPSDHRSCKLEEASVYSVFSCAFLSLLRLWKFHRPPIESALSRRGVSVWSELRLDFLLLLRNSHSSLKNLSNVTQSSIFELDPPFQKPLYIDSFPKLRAWYFQNQACIASTLSSACSRTTVLHVANMILKIICHNKVPKGGVLSVNPQSTANSTTSSSPAGVQEDMCQWPTLPAWEILEAVPFVLEAMLTSCAHGRLSSRDLVTGLRDLADFLPASLAAIVSYFSAEVTSGIWKPVMLNGMDWPSPAATLPVVESEIKEALAFAGVHINICPRPRSAMPMLPLPIAALMSLSITVKMEEFSHLHGIISQGIEICATSSSWPTMQIIGALWSQKARRWHDFIILTCSQSPFTRDNTAVAQLIRSCFSSFLGPLVDGRSCSVANRGVANLLGQSSDEKAHRLAVAPGFLYMRSCRLFPNNTFVCEEILEVVIERAHALANDRSSDRPARLRSECLPLSAASSLVEQIASLAATMLCHAGGVNLIRLLYEQIMPTLLLSGGEAKLGSGGMVCSIIEGYTLAYVLLFSGATVWGVGETSPAYTLIYTSKRQRVLDRHLEFMARVMEGNIVLGCGDATWRSYVLCFVNLLVSFVPAWVPEVKLNTLQKLASGLRRWHEGDLALSLLELGGAKTVTSVVESLLR

SEQ ID NO: 66707 - protein, 374 aa, Zea Mays
MDEVTSLTSLGALILNDNNISSICKLDQLQQLNTLVLSKNPVFTIGNALVKAKSMKKLSLSHCQIENIGSSLVKCVELKELRLSHNKISTIPSDLAKNVKILSLDLGNNFIERSSDLKVLSELRYLRNLNLQGNPVSKKDSLVKKVKKSVPTLRILNAKPLEATSKSDKRSTKENPPSKDEDLIGIDAKKKDKRKGSKQEVKGLEELEVQSVSTGITTSNPGKLEVPDSKEKKKVKEAKTKKSEEPYHANNSSLKNKEVQSFVYDTSTKDKKEAKRKKFVDEEDVDAEGIDNTEISFADLMFSNVGNPETKLKNISTLEAAPDGKSVGGLVIDHTKKRKKPKGVVTITDSSALKMFSSMPEVGAGGLGLSGWDE

SEQ ID NO: 66708 - protein, 430 aa, Zea Mays
MGRRKMSAAAPPSRSWSNVGGSVIPELLAKHKMDLENLTLTKHPIRTLHFFLLAMLQYLKRLATYILRKSGLFFLLIVLVVASGILLSISDGLHKKEFLNYAKFVLWWISLGVASSIGLGSGLHTFVLYLGPHIALFTIKAVQCGRIDLKTAPYDTIQLKVGPSWLDKKCSEFGPPVYPASAHSVRIPVFDLLPQIQLEAVLWGIGTALGELPPYFISRAARLSGSKSKAVKELDAATSKEDGTVASTLDRSKRWLLSHSQHLNFFSILILASVPNPLFDLAGIMCGQFGVPFWEFFFATLIGKAIIKTHIQTLFIVSLCNNQLLYLMEKELIWIFGHIPGFSATLPSVIAKLHAAKDKYLSPPTPVSASSQMEEKSWNLSFTLVWNSIVWLVLLNFSVKIITSTAQDYLKKQQDMEMERVSDSPPPEQN

SEQ ID NO: 66709 - protein, 168 aa, Zea Mays
MSISGPHLGYWYSSNSLFNSGLWLLKKLKNAQCIHQLTFSDDQDPHNTYFYKLCKLKTLENFKNIILLSSPQDGYVPYHSARMELCPAASSDTSKKGQVFTEMLNNCLDQIRAPSSDTRTFMRCDVNFDQSNHGRSLNTMIGRAAHIEFLETDIYAKFIMWSFPDLFR

SEQ ID NO: 66710 - protein, 469 aa, Zea Mays
MVAAGAAAAAPRLNPSPSPHRRRASSALSPAKSNANANTNAGDARPKPKAKVVSSRYLAPFSRSTSSSTSTSTSTTTTTSSSNSTSTSSSTPSRRFASPLPRRSVSVDRPRPAPAGNAAVGETGGPKAGTTTTTRSLSVAFQGRSFSFETSKAKPATSPSPSRRPVASAAGAITPERTRPTMGTVPERGKGFEGVHAHHRWPMSARLSQGFEGNPLTKSLDCSLHKRDAAVLAAVRSLRQSMVFEEGARRSSFDSGDYLMSSDTESVSSGSNSGSQDAGIGISHRARPSPKGMSVPARFLQDAAVSRSQRFTDPGTPYLAYTSGLAASPRTAPVKKSLQNGFVSSPLNRSVRQSSPSKLTGNPSRRVSSPSRSRNCVGSGTSSWDHQGRNSSGSGYALNGEVRRRWHGGSKVDCEHLLRILSNRHLQWRCVNAQAEAALSAQKMTAEGCVNLLLLRGSSYSYTGTIGSS

SEQ ID NO: 66711 - protein, 175 aa, Zea Mays
MADSGALVVTEARQQHPLSQIAASGTHRLLLKQWVKEEDLLARRVALREARLDGARKEIAFLYCAFFAFHAASVLLLFLSSSSSVAASAAATTACRRSWIPCLVSLLSSLAMLWALRYKSDTEDALLLARAKNLRAEAKGAADRPRRWQARDLAVFALFAAACGVLVLTRFLLCN

SEQ ID NO: 66712 - protein, 898 aa, Zea Mays
MGKATRQDLAVVSLLNIVVELKKCCNHPFLFESADHGYGGDSIGDRNKVERIVMSSGKLVLLDKLLVRLRETNHRVLIFSQGLFSVVWFGSNPHYGCPKRESKKMVKMLDILAEYLSLRGFQFQRLDGSTRADLRHQAMEHFNAPGSDDFCFLLSTRAGGLGINLATADTVIIFDSDWNPQNDLQAMSRAHRIGQQETVNIYRFVTCKSVEEDILERAKKKMVLDHLVIQKLNAEGRLEKKESKKGGPIFDKNELSAILRFGAEELFKEDKTDEETKRNLESLDIDEILERAEKVETKGGEGEEGNELLSAFKVANFSSVEDDATFWSRLIQPDPADIVQETLAPRAARNKKSYIEDPQLDKNNNRKRRAVETQEKPRRLSGRTVETVNSLPLVDGAVAQVREWSFGNVPKKDASRFVRAVKKFGNATQIGLIVDDVGGVLAKVPHEAQIELFDLLVDGCQEAVKENTDIKGTVLDFFGVAVKAYELLARVEELQFLAKRIARYKDPIKQYRIQLPYKKPQWSASCGWTETDDARLMVGIHWYGYGNWEKIRLDPKLGLTTKIAPATLGERETFLPRAPNLDNRASALLQKEYAKFSGKSLKVKGNTRQTVNNDSNSGVRSMRGRQKDVPEKDDNKPNKDDIQKRRVIVEAEAREEGEISESEAETRYRQDKEEKWLEWCSEVLDEEQETLKRLDRLQNTSVNLPKEKVLSRIRKYLLIIGDKIGEVVRQHSESYRQSRMVMRLWNYVATFSNMSGEQLHDLYMKLSQDQLEGGVGPSHGGNFTSIPPNKGGNSNQLHPSRNQRPTRSLQYNSESFHNESSGSSEAWKRRRRADTDNQFDTQPLCQPPIMTNGNRLQESSSSAGILGWGPVEIRRYGNERPKRAVHPSHFPTGHGPLL

SEQ ID NO: 66713 - protein, 619 aa, Zea Mays
MESSSSGGGLARRRSSGGWGSFSGDTDPFDIPAKGAPLERLRKWRQAALVLNASRRFRYTLDLKKEEQNEEIRRKIRAKAYVITAAFRFKEAGRVHVRSEETKVPIADGALGFGIKEDEITALTRDHNYSGLQQYGGVSGVAHMLKTDSEKGISGDDSDLIARKNTFGSNTYPRKKGRSFLAFVWDACKDLTLIILMVAAAVSLALGITTEGIKEGWYDGASIAFAVLLVVFVTAISDYKQSLQFQNLNEEKQNIRLEVVRGGRRITVSIYDLVVGDVVPLKIGDQVPADGILINGHSLSIDESSMTGESKIVHKDQKSPFLMSGCKVADGYGTMLVTAVGVNTEWGLLMASISEDSGEETPLQVRLNGVATFIGMVGLSVALAVLVVLLARYFTGHTYNPDGSVQYVKGKMGVGQTIRGVVRIFTVAVTIVVVAVPEGLPLAVTLTLAFSMRKMMKDKALVRRLSACETMGSATTICSDKTGTLTLNQMTVVEAYFGGKKMDSPDNAQMLSADVTSLIVEGIAQNTSGSIFEPEGGQEPEVTGSPTEKAILSWGLKLGMKFNETRLKSSILHVFPFNSEKKRGGVAVHLDGPEVHIHWKGAAEIILDSCTSWLDTDDC

SEQ ID NO: 66714 - protein, 504 aa, Zea Mays
MQIPASDKVYEYILFRGTDIKDLQVKSSPPPPPPQAASLHNDPAIIQSHYSQPASTSSNLPSAGGAVLPDLSSQAVQYGLQRPTFQSNLPLYQPGNAPRGSSAAPPAGNAPWGSSAEPPAGTTLSVPSMYWHGYYAPSSGLPPHLQQPLLLQPTPGLSVPQNLQYPGLNPSLPSGMQKLSELQPSLMPPINSQGSSGILPTTTAPASATLLAPESSKPQVPNMGSLFTPATSLGATFPYPSQPTPVAETSATVSQNITSFSSNKATALPGSTLSYQTASQSVSSTIAPSSSAQVEMAVPLLASSGQLLQNTSSMLSSSHSMQAPLQVASKEVKPVEPKAKVAEPLLPDPLLPDPPSQSLPENKEPILPLPKQTPQKFSQSVTTFTEEFDFTAMNEKFNKDEVWGHLGKKSQSRDKDGEVGDDVFDEDLEVEETDNPELSVKTFGEFPRHRQPYRGGARGYRGGGRSRGSYYGGRGYGNTGTGGYGNTGTGGPGNSYSHRGYGRD

SEQ ID NO: 66715 - protein, 772 aa, Zea Mays
MKEHAALLLEKKLLDLPKLLDICAIYEHDNGKLTSSLVTNVINVQPSVLDDINIVIPQFLNIFHTMHDRCMTSLQVLTSTGSIDNGYVQLQKDFMEVLDFINDAIVTLDSFVGAYQPAALLFCTNFEMSYGVEELLNALARLYSSLLPSLLHGFKVMPKSQSNAEASLDSTLSDIPLAIRMLSKRTARFGWRLLHYCYLNDQVREHDAQTSTKMFPAKVEDPMIRGDILVQTLKDINRESTYSSQVNHGNTFLQELESEFQLMSQIGDIRNKGWIYMDDEQFQFLSRLCGSTHTSWNGISDLPVSSHGGELQQKDEETAMVESKISQIRDLFPDYGKGFLSACLEAYNLNPEEVIQRILEGTLHQDLLALDTSLEEMPHEKPAPTAVKDKGKGILVETVPQITKKPHKVAETHYFVQDGLSSATSSASQGPSSAISPASLGPSSAISSAFQGPSSAISSASLGPSSSISSVPKGRFTRKANDDLPDTAILDSKNAKNAARSVILDSQYEYEDEYDDSFDDLGFSVVESSYEETDGVNDAEASSHGPRWSSQKKPQFYVKDGKNYSYKVAGSVAVSSAREAAVMRQTQKETIYGLGRGGNVPFGVPNRQHIDVEAEEVGDADNSGRGSNSRGRGRKGGREGNRPEENESSNGRGSGFGGKRGGWSQGNPAEENWNPNGQQGFGRGGRRGGWNQGGPAKEDGNSSGRQESFGRGARRGSMNHDQSAEDNEGHNNPAQDFTRGPAPRGGHGRGGGRNHHRRDRAMKKHMQGLTGL

SEQ ID NO: 66716 - protein, 414 aa, Zea Mays
MLSGKFTETSASACADLYDHKEVNGNSSDTELFVEDHTFESNVDLNDAPLSRLTENGKGPSNLMSAHETPLSVGEILLSLDAGIPLPCRAAEYSSKPNGTQQHVKRTNLWGWSNVRKGQRSELVDPSGEEELAIQRLEVMKNDLQIRIAKEARGNAILQASLERRKQALHERRVALEQDVSRLQEQLQAERDLRAALEVGLSMSSSQFSSSLSMDSKTKSELEEIALAEADVARLKQKVAELHFQLNQQRQHQYGSSVDANDHPQHLLNHLSQNIVQTGFDRSVAFCNQEKQRNEESLPSTSHWRSIKQHVLSHGSSRPFSRKHSSDTSLSDSTSVPAEGGPMLVNIPRTTKGVEYGRPPSVSSSTLVELTTRLDFFKERRSQLMEQLHSLDLGHGSTSHGFPYKPSSPWNSPK

SEQ ID NO: 66717 - protein, 51 aa, Zea Mays
MDRARLDGIDRVVSSCESVAGGPSTPPRRVQWSRRRGTAMKRGNRTPLCCA

SEQ ID NO: 66718 - protein, 114 aa, Zea Mays
MHGAGVTVCVLCMCVHGAPLLLLRVVEREREKKTHIKKSALIPHVYFALRSVVLSLFMHVMAGREGQTWRHVCQRCANGGAFFSLLDPDLTTKFDVSHSSVPTGTSGLFGNKVT

SEQ ID NO: 66719 - protein, 58 aa, Zea Mays
MTETTGDMKTSIVWTHSFSFKAHASFDKNIAWISSNCYARNYNVSIHTDNIDTLAVQS

SEQ ID NO: 66720 - protein, 3640 aa, Zea Mays
MQTPRPSYAHHQLQQHLSSLLSAAAADPPHPSDDASRTAALSNLRLSFLHPPNRPLLPALAPFLAPPLSVLLADDASYAVRRAAVSAYAALCAVLCSHEAPGGLPDGFVAWALPLLGDPSSAALVAEGLRELLSTGDVSPVERFVPPLLAACRDVLEDERMSPAVLRCLLSLLMLVAAKFPHCFRPQFVDIMDLLLGWAFVQDLADADRSMIIDSFPQFQWHWLGNLQFSLGLLPKFLADMEGLVHDLNLGGSHNPGRLRSLFACFSTVLQIMSSGVAERNNLRELVAGPLEGLAPQLLRCASVIASNLGWSERMEDASKCLVLLAEILQERFADFYVHFVDVLVQSLEVASSAQLAAALKTNLQVLSLQNLGLHAASVGALLDFSSILSKSRLHPNHSVVANSAATYIFCLQHGLEDVVDQAIASVMNELELIKSLLAEGQASCPDIHSPPLELNSERKNESNSGVHCWPQYSEDQLLCLMKFDLKILLATIALDTKKRNERTTNLIQFILKKLDPFGAPFHNFLEMQFQIFSTLHKLSNMELSSNMPASEPFERDSGGYKTQPVVLEKKISCECKKKFVHKYGKYIVQGLNASSSLTLKLEALDWIGSFEKLIHGLERGVDNFSFSYEVIWDATLSSDILFAVLDCAYDRESKVRYHVAITLELLFLGRLINPMNFYVVAQVLLDKLSDPDSNVKDAFLRLFSITLPITTYAFGLFADEHNYRNSSDIVNMSNHCMNWRHVLAVKQQPRKLHWQQLVSVLSYLSLRLKLPLSSWVQRLVFSYRGKKDTRYGQIDMFGDADGNELPKGPGVDRNTIDIIYSVNNHAAVWWGIHEAARHCINLRLRTHLGGPTQTFAALERMLLDVTNVLMVEAKEAEGRYIGPADICLLPMRLLLDFVEALKKYAYNAYEGSFVLSPPPKASSVFFHANKRVCEEWFSRICDPMLNAGLAMHCSDAVIHYCSLRLVDLRNLAASSLRGNSHMGGATESHAFRERLEADVMKVLRHASLALCRCHETDALVGLQKWAASTFYSYFEQDNQLVRGVSDRDNRFSWISGLIYQSQGQYEKAAAHYSHLLQSEEALISMKSDGIQYIIERVIECYTSLSDWKCLESWLAELQVLRAVHAGKPFSGALTSAGNELNAIHAMACFDEGDFHSAWGYLDLTPKSSNELTLDPKVALERSELMLLRGMLRCNSKLEGITEELHKAKLMLDEALTVVPLNGLPQAAACAGQLHCIFALEEALGLTSQNGLNQSQSIMDSLLKALHDPVDKMHQDCNMWLKVFKVYRNTRPSSLSTLLLCQKLASLSRKQSNFMLATRLNQYLIDHPLKSSDEMDKEILELNIKYEGALLKHANGNNEEALSDLWSLVRASVLSRVSCSSGIGTSHSLVARACLKLSTWMEQANSSPLNSIIPMVVKDFSDSDGFQDGAEKLLSGDSVSVSTLDYHALAQEIIGTARKISWQLCPTMGKAWLAYASWCFAHGSYSLSGTDSNLQNSLSPVLQSELSPSRCHLTDDEKSEVGEIIRSICADEHANHVGCEYPMTPGCYNSAPEHPISLLVEQAISLIETAAGAPGFESREGDDPSAVLASELVVLCKCDSGKDTAPLIGKLTEIWWSLRKRRVSLFGHAAHAYFQYLSHSSTELQSSYHHDALKGKTRSYTMRAMLYLLHIMLNYGVELKETLESGLSTVPLLPWQEIIPQLFARLSSHPEKIVRELLESILLKLGKLSPCSIVYPTLVDISACEGEPSEELQRISDFMVKLYPNLIKDVKLAIEELGMITVLWEEQWLSTLQDLHSDVLRRINILKDEAVRVAANSTLSSAEKNKINAAKYSAVMTPIVVALERRLVSTSREPKTPHEMWFHKEYNAKLKSAVTTLKMPPGSPAALGEIWQPFDSIAASLATHQRRSHIMLSEIAPQLAVLSTSDIPMPGFEKILGSSESFSGNHGIVTISSFCKEVTILSTKTRPKKLILQGSDGQRYTYLLKGREDLRLDSRIMQLLEAINSLLYSSSDTRSRNITLRFYSVTPVSGRAGLIQWVENVSSIYNVYKSWQKRSQLAHAHAEAQVSSVSTGNIHNPVAPVPRPSDMFYGKIIPALKEKGIKRVVSRRDWPLDVKRKVLLELMNETPKQILWQEMWCASEGFRNFNSKVNRFSRSVAAMSIVGHILGLGDRHLDNILMDFSNGDVVHIDYNICFDKGKRLKIPEIVPFRLTQTIESALGLTGVEGVFRVTCEEVMGVLLKNKDIILMLLEVFIWDPLIEWTRGNIQDEAGIAGEEKKGMELAVSLSLFSSRIQEIRVPLQEHKDLFLTNLPATVSSLKKFLDILDQYEVASAIFYHAEKERSSVLQHEMSAKLVLADATSGAEKSRTSFEIHAHELAEAKAAAVDEANKLAIWVEKHALVLEAIRENSVACIESCMQLNCKDKTLSLISAVLESGVPLTVVPEPTRAQCSELDREISQLLSELQGGLSSALDSLGEYSLVLKQVLPVNYITTSPVTSWAQVLQRSVRSTSQDMLSLAKIQAAEVIAKVQGEGINLVQQRYQDLVNQMESYVSCVEKLARECSELMNSIGLNNEVQSKERILSVFMNSVQLPSQKKDGDSTHLSHSGSPQQGEIKTPAKGDVQETTGKVLSILGIAVSQLYGDIRAKVSELSIKAIGKAKFRTDDSGLQADAGMSLQVFEQHIEKCALISGVVDEVHEVIGRTLAETSAAYAKPSPRHWASTFQAALHSSINLIEQMTEAFLPEFIRSVVPHNSEVKETVRSISEVRGSVDNALEKLIEVELERTSLAELEQNYSVKVGRITEQQIALEEAAARGREHLSWEEAEELASQEEICRAQLEQLHETWRQKDMRILSLMKVEDNIMNSLLSSKQYVSSLVDHDQESEFHYGQIKALLSIFAKPFADLESLDHMLSSSGMFPHIDNPISNIKDALSLGSSLSDVVWPLAGILKDHAFFVWELNLLDSVLVLCMREISSSLEHGINANQLYMTLKKKLAIYVEKQVFRYVTERIAPALTLKLDEEISALLQLSQGIRASDQPKRDSAAVGRVALMLEEYCNAYETARAAGTAVSLMKRQLNELTEALRKIILEIVQVEWLHDISSSHAQKVKVLSQNILSDDKFISLMLNLSRSNLLDKIQSSVSLITRSIEVLQACESISVSAEGQLERAMGWACAGPNTSSAGGSTAKGSGIPPEFHGHLLKRRKLLRVVQKEASDLVKVCTSVLEFEASRDGLYFVPEDKASEQSSDKGRAWHQTFLNLLARLDAAFHSFTCAEQEWKLGQLSLEAAGKGLFSANNQVSVVSVKANSALVNLQDVLGAMYGHACEASALLSGFKHVSQDCTALTSECGSLLEEVLAIADGLHDVYTLGKEAAAAHSSLMTNLSKANTILFPLEVCLCADVTVMSEAISNEREKNNASMPLIHGKALYQSYNIKVREACKTLEPLVGPLSDNAKELHSMVMKLGHLSSLHAGNLHKALEVPGERESMRSQDLLSTHPDLLQSDSSTEKDRASLGMDSGSPDLELNTDICLQDRCWISPPEHSYTSSSGCTTGLTQINPYDNLEKIDALMDDGAEIDGSGSTDLETKDSNQEVETDLVVGRIESVDNNSAAAFRQVRGQECDNSDPKSYGDSTTRVTRATKIAYP

SEQ ID NO: 66721 - protein, 314 aa, Zea Mays
MLYFLRVVESVGEQVDEFAAGDAVVPTFLGQCSECVDCRSARSNMCSKYRFAVRPGMPRDGTTRFTDGQGRPLHHFFGVSSFAEYTVVDVNQVVKLNPAVPPALACLLSCGASTGVGAAWKQAKVEPGSSVAIFGLGAVGLAVAEGARICGASKIIGVDINPEKCELGKKFGVTHFINPKELGEEKPVHQAIAEMTDGGADYCFECIGLAALMNDAFRSSRDGWGKTIILGVEMHGAPLCISPHEILHGKSVIGSMFGGVKPKQDIPILADKYMNKELELDKFITHEVGLKDINQAFDLLLQGKSLRCTIWMDK

SEQ ID NO: 66722 - protein, 362 aa, Zea Mays
MASEAKDVGILAMDIYFPPNCVLQEELETHDGVSKGKYTIGLGQESMAFCTEVEDVISMSLTVVKSLLKNYNIDPMCIGRLEVGSETVIDKSKSIKTWLMQIFEESGNTDIEGVDSSNACYGGTAALFNCVNWVESKSWDGRYGLVVCTDSAVYAEGPARPTGGAAAIAMLIGPNAPICFESKYRGSHMAHVYDFYKPDLASEYPVVDGKLSQTCYLMALDSCYNVFCKKYEKHEGKQFSISDADYVVFHSPYNKLVQKSFARLYYNDFLRNCSTVDGESREKLAPYAGLSSEESYQSRDLEKASQQVAKNLYETKVQPTTLIPKQVGNMYTASLYAALASVVHSRHETLARGLLCFRMAVG

SEQ ID NO: 66723 - protein, 233 aa, Zea Mays
MASPRGGFDEQDRRTEKGTEVFVGGLPWSATESMLRQGYGFVRFAKRDYANTAKRQKNGIELQGKRLVFELSMDQDTVFFGNLCKEWTLEEFEELIHKAFKDVVSVDLAMASNLDSSNKKNINRGFGFVRFSSHAVFAKYYCLFLCPRPPRPRLPLPPPPPPTALLAWPPLSPPAATNPAPAIKTYPLHPLLFSSSSPLLPPPVAASPDFPRYCLLLVLDDEMCLIMTMDETF

SEQ ID NO: 66724 - protein, 96 aa, Zea Mays
MPEDLSAGRRVGADRISSNIEVERADNVLRTTLPRITRSASFPPVRSRGARRCRGSVSLPISTTEETHKTPDIGLGPWPLSHLCIMRRVHVPFIEM

SEQ ID NO: 66725 - protein, 199 aa, Zea Mays
MKNNCPICYEAVPVRFAEGDVGAPLRPHHAPAVLPRDVEARQVLVPHMRHAHLRHGQVLQGPRRRDGGKLLVHGKGMGRVQRLQGHDAGLLRHGGPQVLPLPVPQHLPGGTPRPPVATTTTTSLLLELDAASQDTPGPSSYAIITSSACAFTHRSVPVHDELHNFVPCRYVRTLLLEIGRFIRLGTHYLYHNKTRVTLL

SEQ ID NO: 66726 - protein, 443 aa, Zea Mays
MSITASDQLAIAKETGRRLGMGTNMYPSSALLGQSKDESIASIPVDDLIEKADGFAGVFPEHKYEIVKKLQERKHICGMTGDGVNDAPALKKADIGIAVADATDAARSASDIVLTEPGLSVIISAVLTSRSIFQRMKNYTIYAVSITVRIVLGFMLIALIWKFDFSPFMILVIAILNDGTIMTISKDRVRPSPHPDSWKLNEIFVTGVVYGTYLAVMTVIFFWAMRSTDFFTNTFGVRSLHGSRDEMMSALYLQVSVISQALIFVTRSRGLCFTERPGFLLCVAFVVAQIIATLVAVIPTIGFAHIRGVGWGWAGVIWLYSVVTFLPLDAFKLAIRYALSGRAWDTLFEHKIAFTTKKDYGREEREAQWATAQRTLHGLQTPELAGVLNDRTSYRELSEIAEQAKRRAEVARLRELGTLKGQMESVVKLKGLDMEGVQQHYTL

SEQ ID NO: 66727 - protein, 214 aa, Zea Mays
MGLFSSPAKVYKPAADVDLGPGSDELYISPNVKAPRVAGLLVKIFVWILEMPIVGQIVLYILKKDNLINKLVSDADIPEPPLFTASHSWEDTPEQSVRLTKPDLSAAERVQEAVGCLPARLEAALAADARGIRRWTVRDFSDAYRSGEVTPVQVAARFLAAVRESSGPGVSNMAFFISCDPDDVMRQAEESTLRYQRATRRSSTSPSRPTCGRN

SEQ ID NO: 66728 - protein, 276 aa, Zea Mays
MPISCRLAFGYAYPAYECYKTVELNKPQIEQLIFWCQYWILVALLTVLERFGDFTISWLPFYSEAKVLFFVYLWYPKTKGTTYVYGTFFKPYISQHENEIDRNLLELRARATDMVVLYFHKAASVGQNTFFDVLKYVAAQSPSRKSRLHPHQEPQQQQPQVQVELQQPQPQKQAAPVMRRGASIAARQAAMAQQSLETIPVPSSPKIKRQTSGRPGSVASTKPAAAASTPKPGGSPKKEGAEELDPALEETPMEETIRVTRAKLRRRTATEDSAGN

SEQ ID NO: 66729 - protein, 55 aa, Zea Mays
MKTLSHVSLTGPRGERGWGRNVPRKRPRLPVGGELFPIYIPVGEETSPSPSPNRG

SEQ ID NO: 66730 - protein, 160 aa, Zea Mays
MAGESCVPKPLFGGAIFTTFPDRFQDVSNIREVPDHQEVLVDPSRDESLIFELLDLKGEVDDAGSALWFLQDIANEQDAGDNLVVEHSGTLELAALHLGEAPAVAATAVGQLAVSKGRQGREAQNIVRIYLANIRLKNAATDVLITAYEPLLINWSGNTC

SEQ ID NO: 66731 - protein, 213 aa, Zea Mays
MTTMENVIVLVNRIQRACTVLGDHGGGDAAASLPTLWEALPTVAVVGGQSSGKSSVLESIVGRDFLPRGSGIVTRRPLVLQLHKTEAGVQEYAEFLHMPKRRFTDFSIVRKEIQDETDRLTGKTKQISPVPIHLSIYSPHVVNLTLIDLPGLTKVAVEGQPESIVQDIESMVRSYVDKPNCIILAISPANQDIATSDAIKLAREVDPTDIVEL

SEQ ID NO: 66732 - protein, 458 aa, Zea Mays
MSSSMESSYLPATTESLAQAQEAKDASESISILYRVIQDPSSSADALRTKEVAITNLTNYLTKENRAEELRNLLTQLRPFFAVIPKAKTAKIVRGIIDAVAKIPGTSDLQISLCKEMVEWTRAEKRTFLRQRVEARLAALLLENQEYTEALTLLTSLIKEVRRLDDKLLLVDIDLLESKLHFSLRNLPKAKASLTAARTAANAIYVPPAQQGTIDLQSGILHAEEKDYKTAYSYFFEAFEAFSALEDPKAIFSLKYMLLCKIMVNQADDVAGIISSKAGLKYLGPDVDAMKAVADAYSKRSLKYFETALRDYKSQLEEDPIVHRHLSSLYDTLLEQNLCRLIEPYSRVEIAHIAERHLSSLYDTLLEQNLCRLIEPYSRVEIAHIAEMIELPIDHVEKKLSQMILDKKFAGTLDQGAGCLIIFEDSKTEEIFPATLETISNVGKVVDSLYVRSAKIMA

SEQ ID NO: 66733 - protein, 193 aa, Zea Mays
MPLIDAAASAVAPPPPRRVAQLRFFSTRRPGILSLTATSCSPSPPPPVAAEVPAPPQEAKSKPRPRRYPKQYPGESVGVAEEMRFVAMRLRNPKRTTIKDKSGTEDADAGAGVSEGEAEEDDGGGVKEEHEEEDEGELEEGEWMPSMEGFVRYLVDSRLVFGTIERVVAESTDVAYLRKDSGRKGSGVLQVGY

SEQ ID NO: 66734 - protein, 408 aa, Zea Mays
MAAALLLRSLRPSVSRAHIHLLSHASSPTALGSPLLPRLYSSAAASTAASPVFTPGGVMDPSRIRNVAVIAHVDHGKTTLMDRLLRQCGADIPHERAMDSISLERERGITIASKVTSVSWKENELNMVDTPGHADFGGEVERVVGMVEGAVLVVDAGEGPLAQTKFVLSKALKYGLRPILLLNKVDRPSVSEETCDEVESLVFDLFANLGATEEQLDFPVLYASAKEGWASLTFTKSPPDNAKNMSSLLDSIVRHVPSPKADLEAPFQMLVSMMERDFYLGRILTGRVRSGVVRVGDKVHGLRSTDDGVHKIEDGKVVKLMKKKGTNMVTVEAAGAGDIISMAGLAAPAIGHTVANSEILSALPTIELDPPTISMTFGVNDSPLAGRDGTHDGFIHHFLGMDSFRRIA

SEQ ID NO: 66735 - protein, 105 aa, Zea Mays
MWSSDSANLAYIAQHQLFDQIKELHEDIAVPEYCSAGGGKLQSLNAWFGPHGTITPLHHDPHHNLFAQVLGRKYVRLYPASTSVGLYPNTESMLSNTSEIFSWTP

SEQ ID NO: 66736 - protein, 72 aa, Zea Mays
MTATMTIDEKPVERYVTSSLSFLLPHSSPSLPRYHWIWAEPSLSEKDQKERVQRSKFVRGLVLSTIFDDDNL

SEQ ID NO: 66737 - protein, 74 aa, Zea Mays
MATKDCARGRCRGYRALELLYLTITFRVCRSFTEKPLGSNSTEQLLSIVNCRTKIRFLIICGDTSIILRNKEWG

SEQ ID NO: 66738 - protein, 1552 aa, Zea Mays
MQNNRAGASAGDMVKTPRSPVTTGTRRCRAKPQKKEEESTENNKLENGSLDATEEVHHGVEKGDGHVTRKRPRRSAACSDFKEKSIRLSEKKSVVMVKKNRMEEEEVDAVNLTKLGPEDPPPCRKLIDFILHDAEGNPQPFEMSEIDDFFITALIMPMDDDLEKERERGVRCEGFGRIEDWNISGYDEGTPVIWVSTDVADYECVKPSTNYKSYFDHFYEKAQVCVEVFKKLAKSVGGNPNQGLDELLASVVRSTNAMKGYSGTMSKDLVISIGEFVYNQLVGLDETSNNDDEKFATLPVLLSLRDQCRSRVELTKLPSNFSNTSLKIKDSECDETAEDDDDAKLARLLQQEEEWKMMKKQRGRRGTPSQKNVYIKISEAEIANDYPLPAYYKPFSQEMDEYIFDSDDSIFSDDVPVRILNNWTLYNADSRLISLELIPMKSGAENDVVIFGSGFMRDDDGSCCSTAESVKSSSSSSKADQLDAGIPIYLSPIKEWIIEFGGSMICITIRTDVAWYKLRQPTKQYAPWCEPVLKTARLAVSIITLLKEQSRASKLSFADVIRKVAEFDKGNPAFISSNITLVERYIVVHGQIILQQFADFPDETIRRSAFVSGLLLKMEQRRHTKLVMKKKTQVMRGENLNPSAAMGPASRKKAMRATTTRLINRIWSDYYAHHFPEDSKEGDGNETKEIDDEQEENEDEDAEDEGQIEENISKTPPSTRSRKLLSQTCKEIRWEGETSGKTLSGETLYKCAYVRELRIPVGGTVALEDDSGDTVICFVEYMFQKVDGSKMVHGRILQKGSQTILGNAANEREVFLTNDCLEFKLDDIKELVMVDIQSRPWGHKYRKENSEADKVEQVKAEERKKKGQPMVYFCKSLYWPEKGAFFALSRDKMGLGSGLCSSCDNIEPDSDELKIFSKTSFVYRKVTYNVNEFLYIRPDFFAEDEDRATFKAGRNVGLKPYAVCQILSIPEGAGSKKLNPASANISARRFYRPDDISSAKAYASDIREVYYSEDVIDVPVDMIEGKCEVRKKNDLASSDLPVMFEHVFFCELIYDRASGALKQLPPNVRFMSMVQRTSALKKNKGKQICEPDQIDSGKWLDVPKENRLATLDIFAGCGGLSEGLQQAGVSFTKWAIEYEEPAGEAFNKNHPEAVVFVDNCNVILKAIMDKCGDTDDCVSTSEAAEQAAKLPEVNINNLPVPGEVEFINGGPPCQGFSGMNRFNQSPWSKVQCEMILAFLSFAEYFRPRFFLLENVRNFVSFNKGQTFRLAVASLLEMGYQVRFGILEAGAFGVAQSRKRAFIWAAAPGEMLPDWPEPMHVFASPELKITLPDGQYYAAARSTAGGAPFRAITVRDTIGDLPKVGNGASKLTLEYGGEPVSWFQKKIRGNMMVLNDHISKEMNELNLIRCQHIPKRPGCDWHDLPDEKVKLSNGQMADLIPWCLPNTAKRHNQWKGLYGRLDWEGNFPTSVTDPQPMGKVGMCFHPDQDRIITVRECARSQGFPDSYEFAGNIQNKHRQIGNAVPPPLAYALGRKLKEAVDKRQEASAGVPAP

SEQ ID NO: 66739 - protein, 648 aa, Zea Mays
MNEDFLIIILRDLLPRRPDLRLVLMSATINAELFSMYFGDAPVMHIPGFTFPVAELFLEDVLEKTRYRINSERDNFAGSSRRKRFSSVKSDPLSDVFEDIDITKEYGNYSSSTRQSLEAWSAAELDLSLVENTIEYICRYEAEGAILVFLTGWDEISKLLDKIKGNNFLGSPNRFLVLPLHGSMPTVNQREIFDRPPANMRKIVLATNIAESSITIDDVVYVIDCGKAKETSYDALNKLACLLPSWISKASAHQRRGRAGRVQPGFCYRLYPKIIHDAMPQFQLPEILRTPLQELCLTIKSLQLGAVSSFLAKSLQPPDPLSVKNAIELLKTIGALDDMEELTSLGRHLCTLPLDPNIGKMLLMGSVFQCLDPVLTIAAALAYRNPFVLPIDRKEEADAVKRSFAGDSCSDHIALVKAFVAWKDAKRSGRERTFCWESFLSPMTLKMMDDMRNQFFDLLSDIGFVSKTAGVKAYNRYGNDLEMVCAVLCAGLYPNVVQCKRRGKRTAFYTKDVGKVDIHPSSVNAFVNQFPLPFLVYSEKVKTASIYVRDSTNISDYALLLFGGSLSPSKTGEGIEMLGGYLHFSAPKRTIELIQVIFRATYWARSWSLLLRDEDARTDLNKACHLSESVVMEVFAKFGWKFSNRITA

SEQ ID NO: 66740 - protein, 398 aa, Zea Mays
MAAAMANTTCLRSRLLVLPPPPAPRTVVSFRLRPCATTISSSSRKRRPRLAARAAPPGGAVAPASAASKEDDQGEMGSGGGLSADDAERLCQFLRADLPHLFDDVGIDRSAYDDRVRFRDPITRHDTIDGYLFNIRLLKLLFRPDFYLHAVKQTGPYELTTRWTMVMKFMLLPWKPELVFTGLSIMGVNPKNLKFNSHVDLWDSIQNNEYFSSEGLWDVFKQLRIYKTPDIETPNYLILKRTAHYEVRSYAPFLVVEAKGDKLTGSSGFNNVTGYIFGNNASSEKIPMTTPVFTQASDNTLSDVSIQIVLPMNKDLDSLPAPNTAVTLRKVEGGIAAVKKFSGRPKEEIVLQKEKDLRSQLLNDGLKPHPGCLLARYNDPRTKSFLMGWLKPLGCFDN

SEQ ID NO: 66741 - protein, 347 aa, Zea Mays
MEISLLHNESDAGSTSLLPLPLLSYGPRSMVPIQVPPSSDFESILSPEPIYSDLQLKEMNYNAAAMDESTEFLHLILSGNDEGYNSTTELQVWDVVDFYVSENFSALQFDSLMGFTNEVSTSYNDCMNLVDMVERPVARLSLDDTPKPSNSDDAVPADNVTMDPDETSLYLQTKPTDSETESSSAAGDVETEYLDLKLLSRCMPDLMDVDSPNCLSKTPVKKKHVTLVLDLDETLVHSTLDHDNADFTLEVFFNMKNHTVYVRKRPYLKMFLEKVAQMFEVVIFTASQRVYAEQLIDKLDPDGKYISRRIYRESCVFSDGCYTKDLTILGIDLAKVAIVDNTPQIRN

SEQ ID NO: 66742 - protein, 103 aa, Zea Mays
MATVNATTTTAGSGKQTDAAPSPPAAAAAACRSLSGADLALRVLLFAVTLSGLVVLATAKQTVRVPVPQIPGLVLSLPAKFKDSPALISMQLSWLRRPAQRVV

SEQ ID NO: 66743 - protein, 851 aa, Zea Mays
MAASPDQFRGHARLPHFAAPLRYDLRLRPDLAACTFTGAAAIAVVVSAPTRFLVLNAAELDVDRASIRFQDLAPTDVAQFDEDEIMVISFDRELPFGEGVLTMDFTGTLNDQMRGFYRSKYVYNGESRNMAVTQFEAADARRCFPCWDDPAFKAKFKLTLEVPSDLVALSNMPVAKETVSGLTKTIYYEESPLMSTYLVAIVVGIFDYIESSTSEGTKVRVYTQVGKTNQGKFALDVAVKSLDLYKDYFATPYPLPKLDMIAIPDFSAGAMENYGLVTYRDTALLYDELLSSASNKQQVAITVAHELAHQWFGNLVTMEWWTHLWLNEGFASWVSYLAVESLFPEWNNWTQFLDETTSGLRLDALAESHPIEVEVNHASEIDAIFDSISYDKGASVIRMLQSYLGAECFQEESGEPVKDLMTTWTKQQGYPVIYAKINGHDLELEQAQFLSDGSSGPGMWIVPVTACCGSYDAQKKFLLKDKMDKINIKEFSDSQSADGEKNQIIWIKLNIDQTGFYRVKYDDELAAGLVNAIKAKKLSLMDKIGIVEDSYALSVACKQTLTSLLRLLNAYNDESDYTVLSHVTSVCLSISKITVDATPDLNKDIKQLLINLLLPAVIKLGWDPKDGESHLDVMLRSLLLTALVRLGHNETINEGVRRFHIFFEDGKTSLLPPDTRKAAYLAVMRTVSTSSRSGFDALLKIYREASEPQEKSRVLGSLSSSPDQDIVLEALNFMFTDEVRNQDSFYILGGISLEGREIAWTWLKENWDHVLKTWKSSSLISDFIESIVPRFTSEEKAVEVTEFFAGQVKPSFERALKQSLERVRISARWIESIRSEPKLGQTVQELLQADA

SEQ ID NO: 66744 - protein, 353 aa, Zea Mays
MGHRARRAIRVPQGAPPATHGRHRRRPRRAHPCQGAHAAGAEARQVHRLLHGWTPPRRPLMQYTFLTTEDHCQLIAKCPNLLVLAVRNVIGDRGLGVVADTCKKLQRLRIERGDDEGGVQEEQGGVSQVGLTAIAVGCRELEYIAAYVSDITNGALESIGTFCKKLYDFRLVLLDREERITDLPLDNGVRALLRGCTMLRRFALYLRPGGLSDAGLGYIGQCSGNIQYMLLGNVGETDDGLISFALGCVNLRKLELRSCCFSERALALAILSMPSLRYVWVQGYKASQTGRDLMLMARPFWNIEFTPPSSQNAGRLIEDGEPCVDSHAQILAYGSLAGKRLDCPQSVVTLYPA

SEQ ID NO: 66745 - protein, 286 aa, Zea Mays
MRLMGIPGLTLYHLKSHLQKYRLSKNLQAQAHTASAKNALVGCRTGADNALCQGSASPPPPPPPPHLNLEPPQINRSMHISEALQMQIEVQRRLHEQLEVQRHLQLRIEAQGKYLQSVLEKAQEALAKQSGGADETTTTTQQQQQLLLPDLISRATATRRGNVQQEHLHQQHHLGGDGSVDSCLTACEGSRCQRERDQDLLSIGLSSAPPPTPTPSRGYNDRGGGGSASCEEFLQFLDEPSRRGAGGGGSSDEQQELDLSISGGRSNPRPRGSQSQRIDLNGSSWN

SEQ ID NO: 66746 - protein, 194 aa, Zea Mays
MCSDIVLLLCSNFRKYEEICPPLVEELCYITDYSYTKEEVLQMEASVLNNLKFEMTVPTAKCFLRRFVRVAQVPDKGSSLHLEFLVNYICELSLLEYSLLCYLPSMVAASSVFLAKFILMPIKNPWNSSLSYYTRYTPSELRGCVRVLHRLFRLGPGSNLPAIREKYSQHKYKFVAKKYCPQSIPTKFFQDLTS

SEQ ID NO: 66747 - protein, 429 aa, Zea Mays
MEMEQLCSLLRDLDALKQHPDDLTSTIDRMRERLVAMMNPAAGAASRSKIKDMSAEVVDNNPYSRLMALQRMGVVENYERIRDYSVAIVGIGGVGSVAAEMLTRCGIGRLLLYDYDTVELANMNRLFFRPEQVGMTKTDAAVQTLSGINPDVVLESYSLNITTVKGFETFLASLKAQSSHERSTGVNLVLSCVDNYEARMVVNQACNELGQTWMESGTQGKLISVRILFYCVTVYFFFGVSEDAVSGHIQLLVPGETACFACAPPLVVASGVDERTLKREGVCAASLPTTMGVVAGLLVQNALKYLLNFGQVSRYLGYNSLKDYFPAMEMRPNPQCSNPACVLRQKEYMESKPARDAAAKTKMEAEASTENECPVHLDNEWNISVVDDETETSSIRNTPGPAAPVSSSAIDDDDDLEELQRQLDALNAS

SEQ ID NO: 66748 - protein, 431 aa, Zea Mays
MLVTTVGMRTQWGKLMATLSEGGDDETPLQVKLNGVATIIGQIGLFFAVITFIVLSQGLFSKKYHEQMLLSWSGDDALELLEHFAIAVTIVVVAVPEGLPLAVTLSLAFAMKKMMNDKALVRHLAACETMGSATTICSDKTGTLTTNHMAVVKACICGNIKEVNGSQNASKLRSELPEIVIKTLLESIFNNTGGEVVINQDGKYQILGTPTETALLEFALSLGGDFKAKRDETKIVKVEPFNSTKKRMSVILELPGGGCRAHCKGASEIVLAACDKFVDETGGVHPLDKITADKLNGIIDSFAGEALRTLCLAYKDMEEGFSNADHIPLQGYTCIGIIGIKDPVRPGVKESVATCRAAGIMVRMVTGDNINTAKAIARECGILTEDGIAIEGPEFREKSLAELLELVPKIQILDLQWALLGLRWQKRALML

SEQ ID NO: 66749 - protein, 742 aa, Zea Mays
MGFVDPAAPLLATCGGDTVKLFDVTVETGDPCVLAYTPAPAHPVNAVKWNHTNLIVASAGDDKKISLWHKKGQNVGQLPTSTVDRGDDIEECIYSISFSNKGSRYLCSCGSGHIVRIWDLQRKRCIKWLSGHTDTITGVMYNCKDEHLASISMKGDLILHNLASGARVSELSDPNGQVLRVLDYSRNSRHLLVTAGDDGSVHLWDTTAKSPKVSWLKQHSAPTSGVCISPSSDKIIATVGLDKKLYTLDSGSRRPAHTIPHEAPFSSLAYNDDGTIIAAGTNSGRVVFYDIRGKPKPLTILRAYNTSEAVTGLCWQRSKPVVVNENSSSEVALLGGTNEESVLMPDPLPSATPTGLGSGVATTSLLSLTANTSGYLSASNSSTMEETPYRTRPLTGGPLSKLQAPLSNYNLKDDMDVFSPLVDVQPFTPSSGNWWDEHGSDDAKKDDKPGEKKFSTTRKYSYMEGNDEPHPIADWRSTARQDSISSVTTTSMPSWKSELSVSSPEPATGNALPDRLTQRQLISRFGSSAFPTGGLAFTASQDPASAPSHSLKGSLTSNILMNLQNKGILNNVSSSLDASSPNLQSSLPSSYVSKTMPSVIPDQLGAAQSTSLWRPTTYTDRMSSSSVFSDGLASAFGSPKSKKTGAEAKDELLSNILSRQTAAGSSSAIPLASNGVVPPQLANTGSSSDQLGASSFSLQYVQRMLEESLGSVQKSIHEDVRNLHIELLRQFHMHEANVCSSG

SEQ ID NO: 66750 - protein, 537 aa, Zea Mays
MRVAVVGAGVSGLAAAHELARSGGSRVTVYEKEDYLGGHARTVAVEDADAASTVQLDLGFMVFNRVTYPNMLEWFEGLGVEMEISDMSFSVSTELGASGSRCEWGSRNGISGLLAQKSNALSPSFWRMIREILKFKNDALRYLEDHENNPDMDRNETLGQFIRSHGYSQFFQEAYLTPICACIWSCPSQGVLGFSAFFVLSFCRNHHLLQLFGRPQWLTVKGRSHSYVHKVREELESMGCQIKTSCEIKSVSSSEGGFRVTVFDGSEETYDRIIFGVHAPDALKILGAEATHEELRILGAFQYVYSDIYLHSDKSLMPRSLSAWSSWNFLGTTSKGVCVTYWLNLLQNIESTSRPFLVTLNPPHVPDHVFLKWYTSHPVPSVAAAKASLELHHIQGNRGIWFCGAYQGYGFHEDGLKAGKAAAQDLLGKESDLLVNPKQMIPSWSEAGARLLVTRFLGQYVSVGNLVLLEEGGTMFSFGEVGKKCHVKSVLRVHDPMFYWKVATEADLGLADAYINGYFSFVDKREDSHCEQGRKQE

SEQ ID NO: 66751 - protein, 1768 aa, Zea Mays
MFGNVDDSGDLDADYLDEDAKEHLFALADKLGPSLKDIDLMKSSPAPTDPSEQDYDEKAEDAVDYEDIDEEYDGPEVEATTEEDNVLSKKDYFSSSTVYASVNSTVSVFDDENYDEEEEPPNDNEPPGDSAAQNLSSVSIEQADTTTSSDNLAMEKIGLLSHPEENMDFEYEDLENEKGTGEGQLEPESATSLPVLCIEDGNAILRFSEIFGIQEPVRKVKTDHHKRPVDKELQIANVADNVEEDEELILRSTMQNFSTLKHIHVNEDFVESDSDESISDVTLRLKDSCLSEQPMKDVHMDIRIVQRSPTCPDFYPLEHYDWESDIIWNNSPATDQQAYAKICESEESEDTHGEDQGKDYGQASRCWDVQSKTNGSPVIKETFCCTEMPAPANYCPPGKSYPPLTNEDNLDHIMPNNLDDAVKIDTMVRLNNLSVLNRELLEGSWLDNIIWDPNEVTPKPKLIFDLKDDHMLFEILDEKNVDHLQSHARAMIVSQSTKTSTPTVDNFGDQPKPLSGRFNISNDKFYSNRKTPQQAKSHTKKRALMGIKVVHSAPAHKLQTMKPVLSNKEIANFHRPRAKWYPHENKIASQLQGPACSHGRMAVLLMSLGGKGVKILVNAEDTPVSVKLKASKKFELKPSEKIKLFCSGKELQDDISLAMQNVRPNSIVHAVRTEVYLWPKAQKLPGEDKPLRPPGAFRKKTDLSIKDGHVFLMEYCEERPLLLSNAGMGARLCTYYQKTTPTDQTAASLRNNSDGLGTVLAIDPADKSPFLGEIHSGSHQSCLETNMYRSPVFPHKVAPTDYLLVRSAKGALSLRRIDKLYVVGQQEPHMEVFSPGTKNMQNYLLNRVLAYVYREFRARERPDAIPQIRADELPIQSPLTEAIVKKRLKHCADLKKGPKGHFFWTQRPDFRVPSEEELRRLLTPESVCCYESMQAGLYRLKRLGILKLTQPVGLASAMNQLPDEAIELAAASHIERELQITSWNLTSNFVACTNQDRENIERLEITGVGDPSGRGLGFSYVRVAPKAPASNSVLKKKSAAAKGTTVTGTDADLRRLSMDAARELLLKFGVPEEQIDKLTRWHRIAMVRKLSSEQAASGITIDEIPVSKFARGQRMSFLQLQQQTREKCQEIWDRQVQSLSALDGDDNASDTEAHSDLDSFAGDLENLLDAEEFDDEDTSTADLRIDKADGMRGLKMRRCSTQAQINKEIEDDETEASLAKKLLEDDGNDVKRKKQPVELTNCGTSLVANKMKQSKTGQTIKSSGYAGALTPKENTPREGKEVENSFVEGGLSSKLKPKMALDVNETVLVKKKSVPGKDGPKEKKQGARGDSLVCGACSQVGHMRTNKLCPKYREDPEMSEMDANSVKPNSMDINHLQAKTPKRLITKVSSEVTETEGPEGIEKTKSVPVKFKVGAPDKSLERNMSVSVSLVSDKRVMDVTDSRSTGKVNKIVIPNKMKSDDFPPDTPKPSVVFRPPAEEKDVPRKKITIKQPKGIDQQRHVESRSVQEPTRKTRKIVELSSFEDKSREDDHWVGGEPSQVNSSHGRRLGLEGKISKATMENERSWRDFEERREMPQARLFDATIYASREEDHLKAKKKNKKKKKHEFKDDDLLDHRPYRNDRRVPERHRALKRSSPAPVVGYASSAKRRRGGEVELSNILEKVVDHLRGLSGSLLFLKPVTKKEASDYLDIIRYPMDLGTIRDKVRKMVYRNRDEFRHDVAQIQLNAHIYNDTRYPHIPPLADELMEVCDHLLYENADLLTEAEDAIE

SEQ ID NO: 66752 - protein, 74 aa, Zea Mays
MASGPRHGPTERERANRRRAGVAGPDSLGQSLFFSLPWRRREESRSGCDVRGWVYWVGGWVGGLPLGWPEQRPR

SEQ ID NO: 66753 - protein, 321 aa, Zea Mays
MTRLNLFSPCKINVFLRITGKRPDGFHDLASLFHVISLGDTIKFSLSPSKSRDRLSTNVPGVPVDESNLIIKALNLYRQKTGTNNFFWIHLDKKVPTGAGLGGGSSNAATALWAANQFAGCIASEKDLQEWSGEIGSDIPFFFSRGAAYCTGRGEIVQDIPNPLPENLPMVLIKPPEACSTAEVYKNLLVLQRFRLEQTSQADPMTLLEEITQNGISQDVCVNDLEPPAFEVLPSLKRLKKRIIAAGRDDYSAVFMSGSGSTIVGIGSPDPPAFVYDDEDYKDVFVSEACLLTRDENEWYREPISANATSGKEGLQASVAD

SEQ ID NO: 66754 - protein, 78 aa, Zea Mays
MDEGATTSDSSAAETFDPQDLIHAIFKLVWRRRAGKGAGGGGSIEDIDAERAPETSRRNRSTTGKRVFFPSLLLELAA

SEQ ID NO: 66755 - protein, 469 aa, Zea Mays
MAVELAKQLLAVIGSYTPPLWATLIAGVFVIISVSLSLYLLFNHLSAYKNPEEQKFLVGVILMVPCYAVESYISLVNPSISVDIEIMRDGYEAFAMYCFGRYLVACLGGEDRTIEFLNREGGSGSAAPLLGQASEQRYVNHPFPMNYVLKPWPLGEWFYLVIKFGLVQYMIIKSICAILAVILESFGVYCEGEFKLNCGQSWALYCLVQFYTVIKDELAHIKPLAKFLTFKSIVFLTWWQGIAIALLFNWGLLRGPIAQELQFKSSIQDFIICIEMGVAAVAHLYVFPAKPYELIGDRLVGDVSVLGDYASVDCPLDPDEVKDSERPTKFRLPQPDDHVRCSTAIKESVRDVVLGGGEYIVNDLKFTVNHAVEPINEKLHMISENIKKREKGKKKTNDDSCIGSPTSLTRVISGIDDPLLNGSLSDNSGPKKARRQHRKSGYAGAESGGESSDHGLGGFEIRGNRWITS

SEQ ID NO: 66756 - protein, 545 aa, Zea Mays
MADEALDQPPDATPSPTPATPPVPATPSPTVLLRPRREAFEHGLLPIPKLIFPEGTLAQTLAQLKEKLAASAPDGRVRAAALAEALQIPQEQAALALATLAAVLPAEDPALGDGAVDGSAADIRDMLLFLYIQSYKRLVPRSAHKDSPVVADVWPSTSAFDGYLSALSPIQLVRSNSRRFMPSQADEEIHQLSYLQKHMANILTLLADSVEGDGDDSLVLTMETFEHLGFLVQFSEGTSLSQAATFFACSDPDMPDVPVPAAQVLDWMSQKIAFSLEYSAERSAAKESNQQTMSDLDVTMAEANTSHPRNSTPSANPAYYRNVTFVEGFSKTSVVKHASDVKGNSIKVLNCHDSVIYILAPLKYATVYGCSDATVVLGAVGKVVKVEHCERVHIIAAAKRICIANCRECIFYIGVNHQPLVLGDNHKLQVAPFNTCYPQLHEHMIQVAVDPSVNKWDQPFVLGVVDPHDSLSHPAGVSDVKAESATCLDPDLFTNFLIPSWFGDERQGTTNRNPFPLPEIYGTSQSKKLVHISPCCITKGQMFLS

SEQ ID NO: 66757 - protein, 519 aa, Zea Mays
MDAARESMAALLDAGLFGPAQTLGCFLVSSAGAGNDAGMSMKVESLVQHGDALYGEKEFRRALNAYKQAMQYSRSIPRQATSNTRSSVSVTGRSPSPNSSNLLSFNENEVKFKIALCHSALCEHREALHEMEGIPSKVRTLKMNMMLGKLYRISRNSRTAVVCYKECLRQCPYVFEAITALAEMGLSAKEFSLLFSQAPNRGGKLSGDFVDTQRWWSRYVEAQCCIASHDYKGGLDIYLELMQRFPNNVHILLEIAKVEAIIGRNDEAIMNFEKVRLIDPNIMTYMDEYAILLKSKSDYIRLNKLVHDMLHIDPARPETCVALAAMWERKDERKALTYAEKSLRVDDRHITGYIMKGNLHLSLNRPDLAVTDFRGAQELRADLRSYQGLVRAYLALSKCKDALFTAREAMKVMHQSAKALKLVGDVHAISSSGREKARKFYESAIRLEPGFLGAALALADLHVAEGRNKEAVMLLERYIQQWSDDSLHIKVAQVHAATNMLSDALSHYQSALRNSIVFQ

SEQ ID NO: 66758 - protein, 89 aa, Zea Mays
MTPARVEIWERTGTPDPENRALHETTGLDGRGMLKQQLQQQRSRRIPCLSLAIGKDQPGRRFGSSAESVNHRRPNDAAQGGQGHAISFP

SEQ ID NO: 66759 - protein, 2770 aa, Zea Mays
MKPLSRNIVRFEIVHLVYNPLVDHYLAVAGYEDCQVLTLNSRGEVTDRLAIELALQGPYIRRLEWVQGSQVQLMVVTNLFVKIYDLSQDNISPMHYFTVADDVIVDATLVPSSMGKLVLLVLSESGVLYRLNVTLEGDIGAKILTETVLVEDVISMHRGLSLYFSSTYRLLFVSHQDGTTFMGRLNADSSSITELSYINEDHDGKSKPAGLYCWRELVAGSGILTCLSKSKSNAPLVALLSPHQLVAQNMRHNTGANSSVVGVAAYKPLSKDKTHCLLLYDDGSLHIYSHTPSGGDGSMNLTAEQTKKLGSSILSSRAYTGTKPEFPLDFFEKTTCLTCDVKFNSETTKSGDSESIKQRLTSDDGYLESLTPAGFKVAISNPNPDIVMVGCRIHVGNTSASNIPSEITIFHRVIKLDEGMRSWYDIPFTTAESLLADEEFTITVGPTFDGSSIPRIDCIEIYGRAKDEFGWKEKMDAALDMEALGGNATGGRSGKRLQIVKAAPIQEQVLADALRILSRIYLLCQPSCFTDMVDGGMELDNMKCRALLETIFQSDREPLLHSAACRVLQAVFPKKDMYHHVKDTMRLLGVIKSLPAITSRIGVGGAASSWVIKEFIAQIHTVSKVALHRKSNLASFLESHGTELVDGLMQVFWCILDLDRPDTQTINSLVVPCVEFIYSYAECLALHSNEKTSVSVGPAVALLKELLFAPYEAVQTSSSLAISSRFLQVPFPKQTMIANDDAPENQAKASASAMNSTSANSQVMIEEDPVTSSVQYCCDGCSTVPILRQRWHCSICPDFDLCETCYEILDADRLPAPHSKDHPMSAIPIEVDTFGGEGSEIHFSVDELTDSGVLHADRSVQTSPSSIHIFDASESADLPETITDQATVSISASKRAINSLVLNHLIEELRGWMGTTAGTRAIPLMQLFYRLSSAVGGPFMDSSKPENFDLEKFVKWLMDEVNINKQFPAKTRCTFGEVLILVFMFFTLMFRNWHQPGSDNSHSKSSGSSDLTDKGPAQVLGSTTITLPSSSADLDKNEFASQLVRACSALRQQKFLNYLMDILQQLVHIFKSSSINGEAGSSGSGCGSLLTIRRELPAGNFSPFFSDSYAKSHPTDLFMDYYKLLLENTFRLVYSMVRPEKEKSAEKDRCYKVPNTKDLKLDGYQDVLCSYISNPHTAFVRRYARRLFLHLCGSKTHYYSVRDSWQCSHEVKKLNKIINKSGGFRNPVPYERSVKLIKCLSTLCDVATARPKNWQKFCLKHMDLLPFLMDNVYHFSEECVIQTLKLLNLAFYSGKDANHNAQKAETTDLGGSTRTSSQSPDMKKNRKADDGSEGSSEKSCMDMEQVVEMFSDKEGDMLKNFINIFLLEWNSAGVRHEAKCVLFGVWYHAKNRLRETMLSILLQKVIHLPLYGQNIVEYTDLITCLLGKVNDFSAKQNHSELVNKCLTSEVISCIFDTLHSQNELLANHPNSRIYNTLSCLVEFDGYYLESEPCVTCSCPDVPYSRTKLETLKSETKFTDNRIIIKCTGSFTIQSVTMNVYDARKSKSVKVLNLYYNNRPVTDLSELKNNWTLWKRAKSCHLTFNQTELKVEFPIPITACNFMIELDSFYENLQASSLESLQCPRCSRSVTDKHGICSNCHENAYQCRQCRNINYENLDSFLCNECGYSKYGRFEFHFMAKPSFSFDNMENDDDMRKGLAAIESESENAHRRYQQLMGFKKPLIKLVSSIGEQEVDSQQKDAVQQMMVSLPGPTCKVNRKIALLGVLYGEKCKAAFDSVSKSVQTLQGLRRVLMTYLHQKSSSDTNALPAFSIPRSPNSCYGCSTTFVTQCLELLQVLSKHENCRKQLISAGVLSELFENNIHQGPRTARTLARAVLSSFSESDEDAVHELNNLIQKKVMYCLEHHRSMDIAQSTREDLLLLSETCALVDEFWEARLRVTFQLLFSSIKVGAKHPAISEHIILPCLRIISQACTPPKSDCGDKESGLGVSSLTLHSKNDDTTGNTASNNPNTKIQSDISGKIYDGSRRDQDIPLLSYSEWEGGASYLDFVRRQYKVSQAVKGSAQKTRHDSYKSDYLVLKYGLRWKRRACLKSSKSDFSKFALGYWVSDLILSSCSQSIRSEICTLISLLCPSNSPRQFQLLNLLMSLLPRTLSAGESAAEYFELLGTMIDSESSRLFLTVRGCLTTLCSLITKEVSNVESQERSLSIDISQGFILHKLVELLNKFLEVPNIRARFMSDRLLSEVLEAFLVIRGLVVQKTKLINDCNHLLKDLLDSLLLESTENKRQFIRACISGLQRHVKEKKRRTSLFILEQLCNLICPVKPEPVYLLILNKAHTQEEFIRGSMTKNPYSSVDVGPLMRDVKNKICNQLDLIGLLEDDYGMELLVGGSIISLDLSISQVYEQVWRKHHGQTQHCLSNVSAITGASSIRDCPPMTVTYRLQGLDGEATEPMIKELEEEREESQDPEIEFAIAGAVRECGGLEIILSMIQSLHDDEFRSNQEELTSVLNLLKYCCKIRENRCALLCLGALGLLLETARRAFSADAMEPAEGAKKSNKQQRNEEMVARILPYLTYGEPTAMEALIQHFEPYLRDWSEFDQLQKQHEDNPKDDNISQKLSTQRSAIDNFVRVSESLKTSSCGERLKDIILEKGITKAAVEHVKESFASAGQTGFRTSEEWTTGLKLPSIPPILSMLKGLAKGHLPTQKCIDEEGILPLLHALEGVPGENEIGARAENLLDTLANNENNGDGFLGEKIQELRHATRDEMRRRAL

SEQ ID NO: 66760 - protein, 430 aa, Zea Mays
MSRIRSGVEVVASRGCARMVIPGMHHNPSSAASVSSSAASRAAPAAGSGPAAHADGPFAGLVICVTGLSKEARVQVKEATERLGGEYSGSLHPKCTHLVVQSFAGRKFEHALKHGPRNGLFLVTLGWFVDCVRRNMRLDESLYAIKSIGENGVPPGEFSRLVGVPVNEKSCLPPLIFQDKACSDMTQKHSLQTPGNGGGHDGLVFMNDTIYIDPGISDEMRKKISDAVTREGGKLLEHWFIGCPTTYIVCEDVCVKRYVGHSENIVTPLWILKTVKEKNLQRLVHLSSDLARHVAMVLENVQTSEENRKLGSVPSINTSSCGRPSTKEEINEVHQAKQKFVEGAKKEVRDRRARRMQSCEVTIHPITPATLLDSICWTISEPTSSASIYMDSSWSDDANEQQSTTYFDANGDVRDPDQPNDNFSRPLKER

SEQ ID NO: 66761 - protein, 579 aa, Zea Mays
MEVRGGVGQGSAARHPPAPEPSRAAARVQAGDALPLPIRHTNLIFSALFAASLAYLMRRWREKIRSSTPLHAVGLAEMLAIFGLVASLIYLLSFFGIAFVQSIVSSGDDDEDFLVGSGAPASAAAPSRQHAQAPAPCELLGSPAAAPEKMPEDDEEIVASVVAGKVPSYALEARLGDCRRAAGIRREALRRITGRDIEGLPLDGFDYASILGQCCELPVGYVQLPVGVAGPLLLDGRRFYLPMATTEGCLVASTNRGCKAIAESGGATSVVLRDAMTRAPVARFPTARRAAELKAFLEDPANFDTLSVVFNRSSRFARLQGVQCAMAGRNLYMRFSCSTGDAMGMNMVSKGVQNVLDFLQDDFHDMDVISISGNFCSDKKPSAVNWIEGRGKSVVCEAVIGEEVVKKVLKTDVQSLVELNTIKNLAGSAVAGALGGFNAHASNIVTAIFIATGQDPAQNVESSHCITMLEPVNAGRDLHISVTMPSIEVGTVGGGTQLASQSACLDLLGVRGASRDRPGSNARLLATVVAGGVLAGELSLLSALAAGQLVKSHMKYNRSSKDVSSTTATEKTRQREVDV

SEQ ID NO: 66762 - protein, 339 aa, Zea Mays
MELLRDSISMVSLAVLVTAVCARAASSWLRPGLPRLASLLPMVAFLAAAPLAFSSAIIRGLAGFFLGWLGVFKVVLLAVGRGPLDPALPVLPFVFTTALPVKLRCSSTGAAAACRAKSVSLVSCAVKVAVIAAILHVYQYTDQLHLYTRLALYSVHIYCFLDFLLPCIAAAGGALGMDMEPQFDKPYLASSLRDFWGRRWNLVVSDILRPSVYGPVRARAGKAPAVLATFLVSGLMHEVMIYYLTLRSPTGEMTAFFLLHGVCCIAEESCARRWMQWGWRPPPRPVATLLVVVFVAGTAFWLFFPQICREGMEELLLEEWAAVGAFFNDAARKLLQMFT

SEQ ID NO: 66763 - protein, 251 aa, Zea Mays
MRTSSLPAVIEASGNDDWKKRKEAQSLKRLEVKKKRIERRNSLACNTSKEAAGQSPKEMNANTDKLVSSDETIVSANESHSSGKHLVKGLPPKYQATITSEDSSSAMRKKPNSAFKAITEEQNSSSSVPSSGEAISSVTAPSLPLLSLVPITATLGSREDQSILGRAGARANGMGDVERRMMQEMPGVFTKGLSNGSRVEGFLYKYSKGEVRIVCICHGSFLTPSEFVEHAGAGKVDNPLRHIVVSATPNL

SEQ ID NO: 66764 - protein, 300 aa, Zea Mays
MGAQSSCALSRKKKALHKSFHELNGKMVEVKKAVPKEQSPGPVARSPVGVGQNYAANRVHSFLNGFNQGYNPIPMGGYGMRVDGRYGFLSGARNGFSSFGPGYGMGMNVEGGMSGTFGATSGFISNSNGRQMGSYFNASSNRLGSPIGYLGLNDVPGSMLGSMSRNVWGNGSLNYPSNPANMSAFASPGNGGQVSLTGDNWGGLPSAHGIGNISGLGSGNLGRGAGDNNFGLPSGSYGRSNSTGTIGEPFSAAGNTYDVNNADTYGSSSVYGGTVWRFTSSEVDMHSFGHDIGNVGPTIK

SEQ ID NO: 66765 - protein, 1081 aa, Zea Mays
MARGGGGRSKKEDEEELRGAKRGYKEASAEGNREEEARWANVIGDIYKRRCEYVEALRWLRADYEVSVKHLPQRHLLPSCQSLGEVYLRLGRFSEALTYQKKHLQLAKESDDLVEQQRATTQLGRTYHEILLRSENDHSAIRNAKKYFKSSMKLARILKERSPSQKSDFLKELIDAYNNMGMLELELDNFEEAEKLLIQGLKICDDEEVDSYDDARTRLHHNLGNVYTELQNWKKARGHIEKDIEICRKIRHLQGEAKGFINLGELHYRVQKYDNAKLCYNKALEVARSLEDEDALIEQIHQNIETVTKAVEVFEQLKEDELKLKKLIRDTSNARGTSKERKLLLDQHAWLDSLIEKARMICAWQKHKEFSKGKKRVANELRDKEKLSDSLLSIGESYQKLRNFSKARKWYMKSWNIYRSIGNLEGQALAKVNIGNVLDSCGDWAGALQAYEEGYRIAVEADLPNVQLSALENMHYSHMVRFDNIEEAKKMQEKIDNLKQTLNQCEARDTVSDYCSETDTEGGCTSDNTLDAQNDHGQAANNYEEPDDDVTLASLVQRSGSSSKIKVPKIRNSSKKFDELCDVTEDIHNSSKKVDELGDMAEGTRAVLSRSRSDHSVGRKRVRVILSDDESDENHENVQFKKTSTSPADSMSVSDHGASSSRNQDTLQVNQTRDAPYPAEESICSFKSSSPIDHAFEGIGLGASSAGKGPTSKSAASFSKLSTPGSNSLNESQNAVGSQSKDADNHFWAFRIGGHLVYLDGRACVHEGAFSIDSLKVEVACVYYLQISDEKRAKGLLPIIGELKFRGKVLEDAVSIYYDDQLASEQKCVDVVIDDWVPKQLMKLYVDFCMKSLEAPNKKLLTKLYNLEVSEDEIIVSDCGLQDMSIVPFLDALRSHKTIAVLDLSHNLLGNQTVERLQHIFASSSHTYGGLTLDLHCNRLGPTALFQICECAVLTDRLEVLNLSGNRLTDACSSYLFTILKKCKALYSLNVEQCSITSRTVQKMTDALHEESVLSHLSLGKNNPISSNTMLNLLSKLASLTRLAENVHISCIVTKVLASIDQPCMLFLQVFRTKPDWYKTE

SEQ ID NO: 66766 - protein, 52 aa, Zea Mays
MSREVKAPCDASQELDVKHELGSHHCSCEVQAEYIVLEGDLVLKPKPAAPLF

SEQ ID NO: 66767 - protein, 194 aa, Zea Mays
MVTQTQRSPILEGLDLSSSDKHYNVNQPRGFCPVCRKVFDEKDIEHVRDLLGDNTSRLASLTVDLGEDEKELLHSEAEQNRRKRIESLVNLQQELNGLIEPKKDLAIQPGMYVSVPPSTPDTAEEENADPSQGTATSTSETEQRGQASNASSNKPKNPGHRRRNRANASRRQPHGQGQPARQQWQRKEAGTSHQ

SEQ ID NO: 66768 - protein, 712 aa, Zea Mays
MARRRMRRGGGGGGGGGGGVVDVVRVRRLLLLSLTCCSSIWPGGRIFAAADTDPNDLNVLNTLFTSLNSPGQLTGWQANGGDPCGQSWKGITCSGSGVTKIDMSQNNLGGGGQIQYNLPNMKLEKLNLAGNQFGGNLPYSISTMPNLKYLNLNHNQLQGNISDVFSNLYSLSELDLSFNSLTGDLPQSFTGLSSLKKVYLQNNQFTGNINVLANLPLETLNVANNHFTGWIPSQLKKINSLQTDGNSWSTGPAPPPPPYTAPPPPPNHWNADGSSSSSSSGGRSGIGGGGVAGIIISLLVVGSVVAFLVIKRRKRKAAMKEHFEQHQPFTSFPSNEVKDMKPVYEATTVDIESLASPASVNLKPPPKIERNKSFDDDDDFSNKLVAKKSNITPINATVYSVADLQMATDSFSFDNLVGEGTFGRVYRAQFNDGKVLAIKKLDSTVMPFQSSDDFAELVSNISKLHHPNLNELVGYCMEHGQHLLVYDFHRNGSLHDLLHLSDEYSKPLSWNTRIKIALGSARALEYLHEICSPSIIHKNFKSSNILLDSEFNPHLSDAGLASFIPDAEFQAAEQSAGYTAPEVDMTGQYTLKSDVYSFGVVMLELLTGRRPFDSSRPRSEQSLVRWATPQLHDIDALDRMVDPALKGLYPAKSLSRFADVLALCVQPEPEFRPPMSEVVQALVRLVQRANMTKRMLDGDTSRRPDDLDQDFI

SEQ ID NO: 66769 - protein, 190 aa, Zea Mays
MAAHQDSAASGSGPPRRPRVLLAASGSVAAIKFEVLCRSVAEWADVHAVATASALEFIDVASFPGGVPLYTDDQEWSSWKRVGDKVLHIELRRWADVLVIAPLSANTLAKVAGGLCDNLLTCVVRAWDYSKPVYVAPAMNTFMWGNPFTARHLAVLRDLGMSVVPPVNGAMAEPSEICKTLMLFFGPQHL

SEQ ID NO: 66770 - protein, 163 aa, Zea Mays
MFERVDSCLQEEKCVLVASRDNLDRLYRDSSNSLTILERSHRFTMEELDNHRCKLQESADEVIRLKQLISAKDATIKELRASKKSIAQELEAARLAAKVAEETSITLRAQRDRAMDKAIRAGQILMRRPGVVVPEDIKADVNAAPDSLSRPSSSIAPEKDITK

SEQ ID NO: 66771 - protein, 441 aa, Zea Mays
MHGRPRRPAKLEDEEAASAKAAKLRDLQAQVLHNHHGRTYTKEAIGLSFKLLEINPEAYTAWNYRKLAFQHNVKELSDPEAIKSAVDDELRVVEVALRQNPKSYGAWYHRKWLLCQKLAPVDFKREFGLLDKLLKVDARNFHGWNYRRFLARFMGVSDEEELKYTMDKISDNFSNYSAWHNRSILLSNLLIQQSKGFESKQKIFSEEFELVTQALFTDPSDQSGWFYHLWLLAQTSCPDNPQLIASWPSNAAKLSSSLIKEKAEQHRQSSILSRTVPIVLYFNEPVKGLNQSSVNLKSDLEFSKDIIWRPLTMADSGYSNCWATDLQIINECSSLQEYSVEVSIPCSNGIVSRSGSNYNCPVHFTFGIELISNDPVQGLDMFDKPVAWNCSESFQPHGNRDPIPFDLLKITSALIEHDSNWHFERLSEEIDLFRELPDDNS

SEQ ID NO: 66772 - protein, 461 aa, Zea Mays
MLLLISVSGMELQFQSDQVAAFVRQTDGSLFSWRERYSCFRYLIYGIVNKTNSEVVLKFDDKEFHWKQSESLLTRLEAEGVVKLVFPLHDEIKRKQLLRNWALNWLDFTWQPIDEIYSYFGTKIATYFAFLGMYARWLFFPAVFGLATQLIDFGSLQWLVLPGFFIFVISWAVLFLQFWKRKNSALLARWGIHCSLSEYKNLDNVSFLSDSLTVEEKEFGVVSVVVEKRKFQRNEWFGVLLRIRNNAIIVLAIICLQLPFELAYAHLYEIAETEVMRYLLTAVYLVAIQYYTRIGGKVSVNLIKYENNQGEESSSASLVYKAFGLYFMQSYIGLFYHASLHRDILALRRVLIQRLIVYQVLENLIENSIPYLKYSYKKYIAVHKKKRGKESTVGRSVRLSTRVEKEYLKPSYTASIGAELEDGLFDDFLELTLQFGMIMMFACAFPLIFCFAALVCALSKN

SEQ ID NO: 66773 - protein, 81 aa, Zea Mays
MGKWLINLDQALSRQSRPSVSIKDRTVDWPVVVETLPLATYPGMGQGKLEPGYSIREGTIAHWEWRDGESSMYPPGTEHAW

SEQ ID NO: 66774 - protein, 571 aa, Zea Mays
MNIELVACGEYHTCAVTLSGDLYTWGDGTFKFGLLGHGNDVSHWVPKHVNGPLEGIHVSSISCGPWHTALVTSAGQLFTFGDGSFGVLGHGDRESISVPREVESLKGLRTVRAACGVWHTAAVVEVMSVNSNSSNCSSGKIFTWGDGDKGRLGHGDKEPKLVPTCVAALVEPNFCQVACGHCLTVALTTSGHVYTMGSAVYGQLGNAQADGMLPVRVEGKLYKNFVEEISCGAYHVAVLTSRTEVYTWGKGANGRLGHGDTEDKNTPTLVEALKDKQVRNVVCGINFTAAICIHKWVSGVDQSMCSGCRQPFNLRRKRHNCYNCALVFCHSCSSKKSLKASLAPNGNKPYRVCDTCYSKLTKGLETDMHFSAKRAATVPGFSDTIEEDLETRSNAQLSRLSSMESFKHLDSRYSKKNKKFEFNSTRVSPVPNGSSHWSGLNISRSFNPVFGSSKKFFSASVPGSRIVSRATSPISRRTSPPRSTTPTPTLGGLTSPRVPTDGKPTNDALSQEVLNLRSQVESLTRKSQLLELELERTTKQLKEAISIAGEETAKCKAAKEVIKSLTAQLSS

SEQ ID NO: 66775 - protein, 645 aa, Zea Mays
MSMKSEFERRSNVQAMKLSSHEITTIAGRPATSTNSQDVKSAVAAVPSSNASDSICKPAAGPAPAPPPPPRPGYPLPKAPPAPSAPTPPVPPPKMPTAAGSSNPPPPGPPPPPAPRPAVGPGPPPSPSSAGPGPPPPPGRGGAGPPPPAMPGGPKARGPPPLKKAGNVAGPPVADNKTKLKPFFWDKVTANPDQAMVWDQIKAGSFQFNEEMIESLFGCHAADKKNADGKKDLAAKDTPQFVRILDAKKAQNLAISLKALSVSADEVRNAVMEGHELPIDLIQTLIRWTPSSDEELRLRLYTGELTQLGPAEQFLRTIIDIPYLYQRLDVLLFMSTLPEEAANAEQSFKTLEVACHELRNSRLFKKLLEAVLKTGNRMNDGTFRGGAQAFKLDTLLKLSDVKGVDGKTTLLHFVVQEIIRSEGVRAVRAAKEQNNSSISSVTSDDLTEDVSDDTEHYKQLGLGVVSSLGDDLQNVRKAAILDADTLTISVASLGHKLVKANEFLNTGMKSLDEDSGFHRKLGEFIEQSQVRVTQLLEEEKKLRALVRTTVDYFHGSTGKDEGLRLFVVVRDFLGILDKVCREVKEAAAKAAANNKKPSAAGSGSKGRQPSQSSSSFRDPRQQLVPAIKDRRSAAARSSSSSSDSD

SEQ ID NO: 66776 - protein, 353 aa, Zea Mays
MALSGMRGLSVFISDVRNCHNKEQERLRVDKELGNIRTRFKNEKGLSPYEKKKYVWKMLYIYMLGYDVDFGHMETVSLISAPKYPEKQVGYIVTSCLLNENNDFLRMVINTVRNDIIGRNETFQCLALTMVGNIGGKEFSESLAPDVQKLLISSSCRPVVRKKAALCLLRLYRKNPDVVNIDGWADRMAQLLDERDLGVLTSVMSLFVSLVSNNSEAYWNCLPKCVRILERLARNQDIPQEYTYYGIPSPWLQVKTMRALQYFPTIEDPNARRALFEVLQRILMGTDVVKNVNKNNASHAVLFEALALVMHLDAEKEMMSQCVALLGKFIAVREPNIRYLGLDAVSNRCAGYH

SEQ ID NO: 66777 - protein, 637 aa, Zea Mays
MEEKAVTNGAAAADVAAPDNKDNTKEEVSKSKEPVANKDAEEQNKGSENGAEGHSGGDVNMAEAEITEEGGGGDAGAAKQVDSGDVKTDADTKEDANARTEEGEDAKMTEADVGSTEVKDKEEKEDEVENTNEQDESKEQEKGASAEQEENEGKETDADENQEEEEAEEKGSADKKDEAEAEGDKKTEENKETPKNKKARSARDRSQGKDKEQDGSKSKEAKSLLNTPSPYGTNRPQRERKIVERLVEVIDKEPNKNFVVEKGTPLKDIPSVAHRISRKKPSDLKFLHSILFGRKGKAVDFKGHILQFSGFVWHESDEKQRAKAKEKLDKCVKDTLLDLCWTLGIPTPKANIRKEDIVSKLLDFIAEPHSAAESWGSDDQGSNSKKRKRGGESASKTPDGTPSRSRKKFVDDGTSSKRQNKALQYDTEEDESMKSDSEENIDEDSDEAADKQEVDYGSGKEKAGKKLSEVKESSGKKKSNTGSGHKSGPPNKIIKNLVKKVSSKIHEEKESPNGSAKVFSRKKKPTAEKEIKEKKSSGKKVTKGKGESAEAVLPSKDDLRKTITEILKKVDFNTATFSDILKKLDNHYKMDLTPKKEAIKVMIQDELTKLSEEDEEGEGDEDAGKKQQQPQAQEIEA

SEQ ID NO: 66778 - protein, 329 aa, Zea Mays
MCVLHPTVSCACLLTEVHEKTRALASGYFFCLEDRALLCRDCDVAIHTVNSFVSVHQRFLLTGVQVGLDPADPVPPIAEKHVNAAGGSVNQPVRHQPKRSPTVQFSVEGSASVPTKNVTNGDCSRQNFVPTARGEVVDWTMNNSTIRSVESPPKYISEESPTLLQSSQTTTVFSNQINGNSDGAYHLSFSGGNVTDSLPDWPVDEFFSNSEYGPNFGFSENGSSKGDNAKLGGAGGSPQCRLAEGSVAEELLGQVPGLITDEYMSRVPENSWTVPEVPSPPTASGLNWHGNLCFPAYDSTMFVPEITSLQNSESHFTVPSSFKRRRREY

SEQ ID NO: 66779 - protein, 728 aa, Zea Mays
MSGEMARAEALPEGEAPGFGVDLYAQATKAVSLRTPFEGDEAAPRVPTLPARLVSWAGPGDARKKHKKILPPPPDDAAPEPPPQSPVVTPAKVGLWDQFEAYFRPVTLADVEMLRPKLPFGYSKVDSCMLVPFLGSGNESTTQAETYDVAVAETTLYLGVGGEEVVTNRERGVQSVHLASQKERNDQSIEHDIHDVVVQQMVSDKELNRHRGVQGIHEVSIQLGGRSSGVDQAGSSSGIVLGQFVNEEGTSLNWLLGATGRFVLTSERPNKKRKLLGVDAGLEQLVLLPRVGAEASASCDVCCLGESSMESNRIVNCSNCKVSVHQKCYGLHAVPDGQWLCAWCTYLESTGWSLKEDAGNTQSMPCALCPKEKGALKPVKVESTRNEGIGHQKFVHLYCSLWAPEVFVEDMESMEPVLSLENVQENRMKLTCSICKIKHGACVRCSHGTCRTPFHPICARESKHQMEIWGKSRHPNVELRAFCSKHSAVEYASSVDTSNLASEQNPRKSGPYNTTLNSGKIPVIRFTRKNKDKFISCGTSASSSGNLIRVKTIEQDALANTVRNANSQPIRIWETGTGHPSVSGDHIRSSGDIAVVLRKLIDSGKVSVSDVASEVGISSESLEAALVGETTTFSHGLTLKIIKWLQNSVHMHDDDKGVLVDVPDFAVTEPARTRSKSNSKILKENNATCATGVFSKQQQGCFKGRTWNIDTERHLWKQRIWYLHTDTK

SEQ ID NO: 66780 - protein, 171 aa, Zea Mays
MIRNQPLLWVLSIGFELMELTFRHMLPNFNECWWDSIVLDILICNWFGIWTGMRTVRYFDGRTYEWVGLSRQPNIISKVKRMLGQFTPAQWDKDEWHPTRGPWRFIQVLSLCVVFMAVELNTFFLKFCLWIPPRNPLIVYRLVLWWLIAIPTIREYNTYLQDRSNFGCSVC

SEQ ID NO: 66781 - protein, 604 aa, Zea Mays
MPDNTQPMQYGIEEEEVPYTDERITSLCSSVQLLLEQGGNFVVSAPNMAHLCHRFTVGCFVATAQMVTQAQPEFIDLGHGPAPSGFVNHRIRSSGQESCCGCSVRAVEAAACQFGFTTKPLASSLPRPSAQPCPAPSDANSQLRCSFRSSELRNRAKHPSLRRVKPSKLPRFIPFPPPIPRLSPQLRPSVSEAPPPTWPPSAPMALPYLEAVLCFMIFMYIFETYLDIRQHRALKLPTLPKPLLGVISDEKFERSRAYSLDKSYFHFVHEAVTILMDTTILYYRVLPWFWKKSGELVTSVGLSAENEIIHTLAFLAGSMVWSQITDLPFSLYSTFVIEARHGFNKQTIWLFIRDMIKGILLSMILGPPIVAAIIYIVQIGGPYLAIYLWGFMFVLALLMMTIYPIVIAPLFNKFTPLPEGVLREKIEKLAASLKFPLKKLFVVDGSTRSSHSNAYMYGFFKNKRIVLYDTLIQQCSNEDEIVSVIAHELGHWKLNHTVYSFVAVQLLMFLQFGGYTLVRSSKDLFGSFGFKDQPVIIGLIIFQADAFAKNLGYAPQLRAALVKLQEENLSAMNTDPWYSAYHYSHPPLVERLQALEDSDSKKED

SEQ ID NO: 66782 - protein, 344 aa, Zea Mays
MTQQATRHARRVYVGGLPPTANEQTVAIFFNGVMAAIGGNTAGPGDAVLNVYINHDKKFAFVEMRSVEEASNAMALDGIMFEGAPVKVRRPTDYNPSLAAALGPSQPNPNLNLAAVGLTPGSAGGLEGPDRIFVGGLPYYFTEAQVRELLESFGPLRGFDLVKDRETGNSKGYAFCVYQDLNVTDIACAALNGIKMGDKTLTVRRANQGASQPRPEQESILLQAQQQVQMQKLVYQVGGALPTKVVCLTQVVTADELRDDEEYNDIVEDMREEGRKYGNLVKVVIPRPDPSDAPVAGVGKVFLEYADVEGSTKAKTGMHGRKFGGNQVVAVFYPEDKFAAEQYD

SEQ ID NO: 66783 - protein, 99 aa, Zea Mays
MQLNDIEAAETAKLWCPVCKQGDLRETRNLIYCTLCNLRLDLGEDKMTLEFLRERLANAHMDHFDRGCKSAPKFCLQTMFGLTALYIQCAECSTFDIVV

SEQ ID NO: 66784 - protein, 87 aa, Zea Mays
MLSRRLKGKWSLRQRQGFHSTLTVSFTLCCLSTLLSNWYNLSLIFTCTNGGENKKGSQSLRFWRLMPKGEKVLAQSKRTAPPPFEKF

SEQ ID NO: 66785 - protein, 1235 aa, Zea Mays
MSISRLENGVDAESLTHLKGEIKRLFINERRRRVELWINGTVKSSLMLPRINPNFIGSEEDPTCIICRQYLYLSAVSCNCRLSSYVCLEHWKHLCECSPKKHCLLYRHTLAELGDLVCEVSLVSPQRDNVMQNPHLLNDVYVPSKKVKDHYILYRQLAEDWVSNSEHILQMPFVERSYATALEEAEQFLWGDHAMDSVRNITVRLTKAMKWALGVRKCLSKIQDFLKDGCSEKVNYVEIEELVATKCAPCCEPSLTKLQAYAEEAKLLINEVNNALSSFLTVDKLETLYSRVSEFPVKLTESSTLFWELSSAKSWLKKASDCLEQNKLGIIDIDVLNKLKSEIIQLRVLLPEIDLISKLWKDVESWQTRCQLYLQDFPDLKELEGFLLAADGANFSIPELNILKQHYSNCCSWVSRAKNILRKLYATSDYHNAVEELTVDELPIVEKELKRSLCRKQASEALATVMPMEVVEEILKEASILHIEEEQPFDDLSRMLKEATSWEEKARLILERSASLSEFEDHMRCSEGIRVILPSKLHMKAEVDIAKLWIDKCQAYLRPGCNKLAFGDFLKVDDIKDLINQPANLKVILDTSELNSVLNNIEKWEHSSLSLLNNFRALLHLNSIGSTVDTLQRKLEELQGKMNTEIEVGLSLGFEFKVLWELKDSSLMLRWILNALSLCCMIPLLQDVDRLIEEAVHLPASLADCSLVTLLMRALSCLRKSLILLPGSGTSAKSKLEDVENILAEFKEVDVPYPIMTAKLEDAVNNHNSWIEQCNTFFMLSDGQSWAMLQNLRDNGQSVAFDCPEMDKVVDEVKNVEEWLNQCHCTLLLDGNNSSLLSILVKIRGLLDDVCTLYAEDCMKLRLCAVCSCDIGDRLASRCVTCQDWYHGSCVENLSATTQTTIEWMCSFCSLLQSEDQLKNQLSVKMSKGNCPALAALDELISSAKGLYTGIEEINLLKEIVDKARNLNAYLMQILDDSDCYHGEDLTVIFKSLLVALKATSASGLYDDNVSCRIESVLSRYLWKKQIHKLLYGGKKSSIQEVLCLDEEGSHLEICDQDFFKLEISKIKETSLQWLAKAEEVACDSGELALDLVYGLIAEGENLSVDFEKELKLLRDRSVLYCICCKPDDNRAMIACDQCDEWYHFDCINLLGPPPESFFCPACHPNNGEESVSLARSEDDEDRSSTGAGAHTPPDRVVERDLIKLLSCHSGSSWSESRRAPHRTARRRSSFVGLL

SEQ ID NO: 66786 - protein, 108 aa, Zea Mays
MSLISCLESLAGRIWELKIEYFCRGICQAFVVVTSHIEGGIELEALSEGYCDAWSDTELAEMVKAAEPFARKLGVALLDCAPPRGVKENLCLCNGLRDITFFDISSIL

SEQ ID NO: 66787 - protein, 172 aa, Zea Mays
MRCNKGFKLTKQSGYSPAQSWEAVSTSRPLSATHFMGMHQSLGIQLAQLGKDASAAGAARRVSAQRKAVEVESVAAAGKQEIREVVKKLFRAEFVEKRYEGLDEDIDLRALENGFISVTPLNVHGQVELEIGATASDWLSAAVSLDKEKVAASATADQQDVAAEEKEAPSAA

SEQ ID NO: 66788 - protein, 434 aa, Zea Mays
MLGDILHPAINWADKESHLDPDEMAKMKSAFIGNLPEDVNEEYLRKLFGQFGEVVRVAISRKGQCPVAFVHFAKRSELENAIEEMDGKTVRGPGRGPSFKIQVSVARPTADNDKKRSREEVRTRRSNASGDRRDYSHGRYGHDSLDRQVKAPRLSNYVADAADPYESAVNSLPSAVKEVLLRILRLRIGTRYDIDIHCVKSLDELPESSALAVLNQFLISGGDKHNKGDYFASLVAKAETFGLTHALHGTTYLSRNPEMHSKRYPHEDYDFVTPSRYDSSAHHPSTYYEDDPPVSESRVRRYAEERSTIVRSPEPRPRYDETDIRINPEPRLPYESRHNAEKHLDRRYIQEHSSNIERPAEEALLSRERRFLPAAGYMPNPGGSDFRSRSPAEYSAQRQQMRFDPFTGEPYKFDPFTGEPIRPDPNQRRSGSLY

SEQ ID NO: 66789 - protein, 589 aa, Zea Mays
MLCSSHLLLRAQVNSCLRPPRPTPVPMARSAPTFVAVFLLVLVLLTMDAAQGQQPFPLSTDPSDADALHAVFRQWRLEGGAAMEDPCRKGVWSESSGINASVECNCLPSRVCRITSLNVSGHGNISAIPRELFNLTELVSLDLSNNNLSGSIPPEVINLSKLETWRIYGTNLQGPIPKNFSNLSNLEVLMLGDLAGNHSYLNVIGAWANLSVLSLRKCGLTGQVPNTPPNLPKLKYLDLTSNNLSGSIGGLLLSYKTSNYIYVGGNNLSGPVPSEIVQSSVSLDVSYNYYVDGSLSNNPSGQKQFINYLGTSIDASGRINSGNLTILNCLRMNECNINNLTNRATSFAINCGGKQVEYSDLMPIMFSEDSTDLGGSGFHVNATSHWVVSHVGSDPFNESTGIVNTSDIFETNMQELYQTARTSTSSLWYYVVGLANGNYTVQLFFAEIVITHGPGKRLFDIDIQDQNIRKDFDITKEAGGSRKATNITYEVTVDNSILAIHLYWSGRGTCCIPYEGAYGPLVSAIKVTHSQDPKTSPPQAPHSDSARDDVKRRGVVAGIAALSIAAAVISSSVVYLWWKWVSLVKRPMA

SEQ ID NO: 66790 - protein, 126 aa, Zea Mays
MSLESLKEASDEMDEKKEALEIALERAGRANEGKLGAEQELRKWRADHEQRRRAHESAKRAVNPLNGPSRVFVEQKSPYHKEQESKVQASGSSSYEGLVPNQKMQRKKSLFPLMGSVLSRKTRAQT

SEQ ID NO: 66791 - protein, 495 aa, Zea Mays
MEAQGVPPNIVTFNTLMSIHVQQGRVEDALRVYADVQGRGLVPTAATYSTVMSAYKKAGDASAAIQLFALLRERYRNGELVGSRGDPEQELVKLEKLTVRACYLSMRRSLVGGKNPVGEALKVLLDMDEAGVRPERSDYERLVWACTRDEHYAIGKELYQRIRDGGDEISLSVCNHLIWLMGKAKKWWAALEIYEDLLDKGPKPNNLSHELIMSHFNVLLDAAKRRGIWRWGVRLLDKMQEKGLKPGGKEWNAVLLACSRASETSAAVDVFKKMVERGLKPDVVSYGALLSALEKGRLYDEALRVWEHMRRLGIEPNLYAYTILASIYIGKGDHAMADAVLHDMLSKRIAPTVVTFNAIISACARSGSGGNAFEWFHRMKMKGIEPNEITYQVLIEALVQDGKPRLAYEMYMKACGQGLQLPAKSYDTVLEACRAYGSVVDVATLGPRPSKGVEVEPIRIENSFSRFSQFKDVHGSSHRFAGVGMYGFYGYRMAR

SEQ ID NO: 66792 - protein, 335 aa, Zea Mays
MGINGEEWEETVLGDGVGRRKGGAEASGLVASSSFAEGMGEFVLRSMDARFSGSVDDDEYVSSRQPVFGHSKSTATTSGTIKGQDNVFVRSYSDRLLKCDLTLDMLSENEKIKITERLVKIQNDGTVEVDVTRSALVASELSEIDAFGCVPHDIEEVTPGITKSVPKLKIAILVVGTRGDVQPFIALAKRLQEFGHYVRLATHVNFRTFVKSAGIDFYPLGGDPRVMAQYMTKNKGFFLAAPTEIAIQRKQLKEIIFSLLPACTEPDLDTGTPFRAQAIIANPPAYGHLHIAEALGAPLHIFFTFPWTPTNEFPHPLARMPQSATYRFGGAPGDS

SEQ ID NO: 66793 - protein, 605 aa, Zea Mays
MLSTTWASPKATPIPSSPASQTATRLHPASSSNRTLRLVALPSPSAPRRRRRPGLPPPARAGLVATAAMPAPEPKARVLVAGGGIGGLAFALAAKRKGFEVLVLERDMSAVRGEGRYRGPIQLQSNALAALEAVDAAAADEIMDSGCVTGDRVNGIVDGVSGSWYIKFDTFTPAAERGLPVTRVISRMTLQQILARAVGDDAILNGSHVVDFIDDGSKVTAILEDGRKFEGDLLVGADGIWSKVRKTLFGHSDATYSGYTCYTGIADFVPPDIDTVGYRVFLGHKQYFVSSDVGAGKMQWYAFHNEEAGGTDPENGKKKKLLEIFDGWCDNVIDLINATDEEAVLRRDIYDRPPTMNWGKGRVTLLGDSVHAMQPNLGQGGCMAIEDGYQLAVELENAWQESVKTETPIDIVSSLRRYEKERRLRVAIIHGLARMAAIMATTYRPYLGVGLGPLSFLTKLRIPHPGRVGGRFFIKYGMPTMLSWVLGGNSSKLEGRLLSCRLSDKANDQLYQWFEDDDALEEAMGGEWYLIATSEGNCNSLQPIHLIRDEQRSLFVGSRSDPNDSASSLSLSSPQISERHATITCKNKAFYLTDLGSEHGTWITE

SEQ ID NO: 66794 - protein, 1116 aa, Zea Mays
MTNDKCDKLQTLFSEDDWKLVQLVLTLFRNVLAIQEITLTQKASGEATHLLFLSDNFLELMFQENVMDIILVLTQHIDEPSGYLKEENLLLMEIYHYLFLGRDPGLIARASNKGLKDRVNGDIVSSVDSLRLMMEEEERKKRMFRQLNSEHSSLSGTFTCFSVDGSKSLCKGNPSSASANSLLKIRNVQRGPQKRIAWDNELLYVPKEGITEMLRSFMDQFLSGAYNILMQSVCGDIMDEHHSIEKSDITTFFKVARFVLAFQHEKASNDQKSAKGIQPSGVSPSNEPDDNLPFHGDICGPVAATLNEDMFNIVISRWRETYEALKETNDYKTLSAAGSLMKNMIDMIYLVLKVLPEDSRESQTARVLLYKLFYDQTEHGLTQFLLNLFRSFDSHKQPKSDLVDLLETIHIMLQLMEKLQARGALRVAKKTKKVRRKKSTNDKKENSEPKVDNAEPNDANPTDGTKCSPETLPDLRSEGPALESSPSEPGKVDTSGAHVLDTLVDTVVNIESTAHAEGDPSCTDSGVMKRNLIEEEGETSDSSVDHQPATSEVDFNVSRLISSLANNSVVQNICWLLKHYKSNSYRTNHYIICMLRRFCEDLELSPMLYQLSLLTTFYDILAEQKLSSSKEYTNIVNFLSKVVRKMLRTIKKQPLLFVDILFWKTRKECHCIDADALLNELKNDVGSKDSEIGSSKGWRDRINIADSLGDDEVDVVIPQAPYDADKDGDLSAGEHTDDFRKSSTKYKRSRLSLSDSEADEIERNHVSRDSVPKVPKRRGRSLFTEEQERLIRDLYEKYKDGPKCSHIIAESLDPSGKISSAQVSRKLTQLGLRNVTRRKKVAGEQNHGSKAKSSRPRRKKLHTASDDHDDTSQRKSSDEDTLQVLKSRSKSKKVPLVDSSLSGSQHQEAQHDPDSDDATIGSMIRSRKKKRLSTSDFEGNVRNHQESSDNTKAKDCSPIISQHEKALQDIYPDDETIGSIIRSVKKKRSVTSNFSANIEAQESLRNINLQDETVVSNIMDASVNHGSDPVNNSDNTVEDELLDDFETELVNNGGNTVEAELLDDFEVELDDHEHTDQRITDDEIMTESGKATNSDAKGRAGLKRRHRMVIDDEDDD

SEQ ID NO: 66795 - protein, 77 aa, Zea Mays
MAKGEVPAIGIDLGTMYSCVGVWQHNRVKIITNDQGNHTTPSYVAFTDTERLIGDAAKNQVAMNPTNTVFDAKRLIL

SEQ ID NO: 66796 - protein, 147 aa, Zea Mays
MVGMKLGPDSIGIIAVSYNCSGVAAQADQGLVPEPQVVAHFGASWCVMSLSMNYKFEELAQTHPEVLFLYVDVDDVQVQPVWKSPDLRKAQQKSHASLPLVSVLLAQAEGSLGSKTKWERNLHLKWFSWTLELRHVEVYVQIHMLER

SEQ ID NO: 66797 - protein, 199 aa, Zea Mays
MMSEINLLLKVIRISPFANRLSFDAPSAVQRLRCLANFEALKFSKPIVSLSETLVSRMRERSAESDGKYISVHLRFEEDMIAFSCCVYDGGDEEKKEMDAAREIGWRGKFTKRGRVIRPGVIRMNGKCPLTPLEVGLMLRGMGFSNKTAIFLASGKIYRAEKNMASLLEMFPLLQTKETLASEEELAPFKVEGIEAALA

SEQ ID NO: 66798 - protein, 1172 aa, Zea Mays
MLTQMISIVFRRMESEQVSVSPGSSVVKDMPSSITNDSENGEISTDGQDEEKVTLGDALSMNRPSEAPPTSVEELQNLAGGADIKGLEAVLDKAVELEDGKKVSRGIDLDTVNIIQRDALLLFRTLCKMSMKEESDEVATKTRLLSLELLQGLLEGVSNVFIKNFHFIDSVKAYLSYALLRASVSSSPVVFQYACGMFSVLLLRFRESLKGEIGVFFPLIVLRSLDSSDSPLSQKASVLRMLEKVCKDPQMLADVFVNYDCDLEGPNLFERTVSALSRIAQGSQIADTNSIVSSQTVSVKSSSLQCLVIILKSLADWEQLRRDSSKQGSIVESHEEDASRRLTTDEMKNQEDGRNQFERAKAHKSTMEAAISEFNRKPSKGIEYLLSNKLVENKASSVAQFLKSNPSLDKVMIGEYLGQHEEFPLAVMHSYVDSMKFIGLKFDAAIRAFLKGFRLPGEAQKIDRIMEKFAERYCADNPELFKNADTAYVLAYAVIMLNTDAHNPMVWPKMSKSDFVRMNTASDAEECVPNELLEEIYDSIVKEEIKMKDDSHDTSKSTKRPETEERGRLVNILNLALPRLKSASDTKAESEKIIKQTQALFKNQGQKKGVFHVAQQVELVRPMLEAVGWPLLATFSVTMEEGDSKPRVVSCMEGFRAGIHLTRVLGMDTMRYAFLTSLVRFTFLHAPKEMRSKNVEALRTLLGLADTDMDALQDTWNAVLECVSRLEYITSNPSISATVMLGSNQISRDSVVQSLKELAGKPAEQIFVNSVKLPSDSIVEFFTALCGVSAEELKQTPARVFSLQKLVEISYYNMARIRLVWARIWSVLAQHFIAAGSHNEEKVAMYAIDSLRQLGMKYLERAELNNFTFQSDILKPFVILMRNTHNSKIRGLIVDCIVQLIKSKVGSIKSGWRCVFMIFTAAADDEDESIVESAFENVEQVILEHFDQVVGDCFMDCVNCLIGFANNKCTPRISLKAIALLRICEDRLAEGFIPGGAIKPIDVVPEANFDVTEHYWFPMLAGLSDLTLDSRPEVRHCALEVLFDLLNERGHKFSSPFWESIFHRVLFPIFDHVRHAGRDGLSSSGDDWLRDTSIHSLQLICNLFNTFYKVACVLPFSCLTNILCIIQNISVMKLVIRYFYRYHIETCLVGHRLTVALTGGILYASTSSQFAA

SEQ ID NO: 66799 - protein, 69 aa, Zea Mays
MVMPQPLPVILSHLDIYPIFSYNGMSLTPCVVDLFSYQVMFSEVIAPQEVKMWRSMVPFVHLLLLTVQT

SEQ ID NO: 66800 - protein, 198 aa, Zea Mays
MTKTELDHLDDGYRWRKYGQKAVKNSPFPRCTNSKCTVKKRVERSSDDPSVVITTYEGQHCHSIGPFQRGGGGGAAAARYHSAAAVALAEQMYSSSTTSSFIPAARQQLFSLPPLHPQSSPPSSETTPPPVVSSVTTTSFQRANDGDELWRTGTGYGSGVSVAQSPSTPPSVPPPVVSVQKAGLLDDMVPHGVRHGTP

SEQ ID NO: 66801 - protein, 287 aa, Zea Mays
METGKLPRVLQGQELMSFRTCHVPCAPQTAEAAKLQSSDASRFLSNAHGCALGGPTSRLAVHSSGFTYQCVGFNESIGFSEVLQGQEISRAVPKFQGMMSEACSLKDRYGLHSYMRAPVAVNGLSATTQECSLALSTPPGAQVPSLYPGNVVNRTVVPQLGLARKFGGGGTNGQQSGPFDRPRELWTRPQHETPDQMNLDQFETRRPSVPVDAAKLGSGGGEVRKTSCRLFGFSLTEKILPADDDDVKEVSYETECQNPRMLDLFGYNCSTPSAALPALCAAAPFGM

SEQ ID NO: 66802 - protein, 995 aa, Zea Mays
MGVGGGGGGGGEAAAVSAPAPAEEAGKDAEDGSGWTLKAKLIAVAVLVWVLGALALGVFLHSYFRHAALRKAEEGLVSMCEERARMLQDQFAVSVNHVHALAILVATFHYEKRPPALDQNTFADYTARTSFERPLLSGVAYAQRVVHGDRESFERQQGWIIKTMKHEPSPVQDEYAPVVYSQETVSYIEGLDMMSGEEDRENILRSRASGKAVLTRPFRLMSNHLGVVLTFPVYHVDLSSDAKEEDRVAATAGYLGGSFDVESLVENLLRQLAGNQELVVNVYDVTNSSNPLVMYGSEVSLGNPSPSHICMLDFGDPFRKHHMVCRNKPQLPWSAISSSSGVFVICMLVGYIVGAAWSRYDNVKEDCRKMEELKKQAEAADVAKSQFLATVSHEIRTPMNGVLGMLDMLLDTDLTSTQRDFAQTAQVCGKALISLINEVLDRAKIEAGKLDLESVPFDLRSILDDVISLFSSKSREKGIELAVYVSERVPELLLGDPGRFRQIITNLVGNSIKFTERGHIFVQVHLADHSNLATEPKVESVANGMNGHKDEKTAVATSVSLNTLSGFEAADSRNSWENFKLLLSYEKNEMPYESVSDKVTLVVSVEDTGIGIPLDAQAKVFTPFMQADSSTSRTYGGTGIGLSISKCLVELMGGQINFVSRPHVGSTFTFTAALQRCDRSAIGDSKPVMLHPLPSSFKGLSALLVDRRPVRATVTKYHLQRLGIACDVVATIELALGVLSGRNGSSLTSTKQPCMLLIESDSWGFKIDVPLRSRLLEMKQNGPPGLPKTILLAAAESGKLKAHYAVDSVITKPLKASGLAACLFQTLGITQSSNERRDNSGSLHGLLLGKNILVVDDNKVNLRVAAGTLKKFGAKVECVESGKDALASLQVPHKFHLCLMDIQMPEMDGFEATKQIRAMEAKANEQAVACDDSETDGATRAARWHLPVLAMTADVIQATHEECTKYGMDGYVTKPFEEKQLFQALQKFLDPGMSS

SEQ ID NO: 66803 - protein, 105 aa, Zea Mays
MSFIQSPATLVSLSPQPHAQHKLKRSSTQARSTSRRTHLRQKAESSCPSPRRHTASSCRPAAPATCRCRTAAPATCRTALLLVGVQLPKCRPCSSSASDVPCFEQ

SEQ ID NO: 66804 - protein, 562 aa, Zea Mays
MVMEGRTGSLYGRLNKSSTRGFLAYTAAGAACAAVLACFVLSAADSPASAARNDGERLRLSSRSPRVWPDLAFNWRVVVATVVGFLGSAFGTVGGVGGGGIFVPMLNLVVGFDTKSAAALSKCMIMGASASSVWYNLQVSHPTKEAPVIDYKLALLFQPMLMLGITIGVELSVIFPYWLITVLIIILFVGTSSRSFYKGILMWREESRILMETRGREEQSKSTCAASDVVIDPSYGEPLLTQPQPKKSAWETFMFNLRWKNILVLMSVWSLFLVLQVLKNNSKSCSSFYWVINVLQVPVAVSVFLWEAMQLCRESHARRMNGNLECVCEASIEWSPAQLIFCAFCGLLGGTVGGLLGSGGGFILGPLLLELGCIPQGAEKKSTVGWGKAGVRAIWEKSARWPSNNDVQKKGTRVGDGGRHGGSTTGGSVLGEAGGGRHRREGGRPVQSTRRAVARVGGRLAGKTPGSGGGSSVAAGQGGGDDASTAGSDGVDGVDSLVMGGIRRDDADPDGGGKARGRGGAHVARGGRPRSKNQSVKCFPHLSGHEKFIDFSPFSLEKLNPG

SEQ ID NO: 66805 - protein, 1162 aa, Zea Mays
MGVPAFYRWLAEKYPMVVVDVVEEEPVEIEGVRVPVDTSKPNPNGLEFDNLYLDMNGIIHPCFHPEDRPSPTTFAEVFQCMFDYIDRLFIMVRPRKLMYMAIDGVAPRAKMNQQRSRRFRAAKDAADAAAEEERLREEFEREGRRLPAKQQSQTCDSNVITPGTEFMAVLSVALQYYIHQRLNYDPGWKKIKVILSDANVPGEGEHKIMSYIRGQRNLPGFNPNTRHCLYGLDADLIMLALATHEVHFSILREVVFTPGQQDKCFLCGQVGHLAANCEGKAKRKAGEYDEKGEAIVPKKPYQFLNIWTLREYLEYEFRMPNPPFQIDFERIVDDFIFMCFFVGNDFLPHMPTLEIREGAINLLMAVYKKEFPSMGGYLTDSCTPDLNRVEHFIQAVGSYEDKIFQKRARLHQRQAERIKREKAQAKRGDDLDPHVRDDLIVPVSNFRGSRLASGAVPSPYEQNGSQRERYNQTRKAPRVSSSGSSIAAAIVEAEQDLEAQERENKEELKSMLKDALREKSDVFNSENSEEDKVKLGEPGWRDRYYEEKFGARTPERMEEIRRDVALKYTEGLCWVMHYYYEGVCSWQWFYPYHYAPFASDLTSLSQLNITFELGSPFKPFDQLMGVFPAASAHALPLKYRQLMTDPNSPIIDFYPTDFEVDMNGKRFSWQGIAKLPFIEEDRLLAEIKKVEDTLTPEEARRNSTMCNMLFVNGAHSLSPYIYSLNSKFGHLPDKDRGAIKEKLDPSARLAKFFRIIDSLTLLLLFLLFSGGMNGYIALCGGDPSPPVFRSPVDGLEDIMDNQVICSIYKLPDPHKHIARPPAGVIIPKKSVEAGDLKPPPVLWHEDSGRRPHDNNHRRPYDNSNRQNPSGALSGRQLGEAAHRLVVNSLNVRGGGQNNSPSMPYQTMMSGMNYPNGRHHVGNHGVPPRMEQPAGRSGWHVSDDNMTNGQAAYGQYQPERLGPSRHERGNHGRQQYNPYARDNHHDSSGRVQPPGYHQNRGNPQSAAPSAGPGLYGPYPPAYAGGYSGGYQPVPYGGQQWQQRPYGGGTPPTRPNSHQSQNRYGTLDRSSNKRSSDVEENELLDLDLDDLEDLTDALGESFLDFFLLYFLGGFGMSGIGLFLDRYFWGDMPTGHISGCSSNSASQRLVPEAVRSGTTPSQRAN

SEQ ID NO: 66806 - protein, 306 aa, Zea Mays
MHRPLLQTFVAGETQITEVYLCRSANIGVFICVKCSGVHRSLGTHISKVLSVTLDKWSDSEVDSMIEVGGNSQANAIYEAFIPEGYQKPHSDSTQEEREKFIRSKYELQEFLKPSLRIVSHQPSDSGKHAGNASHSDGSKSQVGMIEFIGILNVKVIGGTNLAIRDMSSSDPYVVLTLGQQKAQTSVINGNLNPVWNEELKLSVPQQYGPLKLQVFDHDMVSKDDLMGEAEIDLQTMINAAAAFGDPELLGDIQIGRWLKSEDNALVRDSAVVVSGGKVKQGMALKLQHTESGELELEMEWMPLNV

SEQ ID NO: 66807 - protein, 115 aa, Zea Mays
MSLLKELNEKDNSLKDHRLRVNNLGEQLDLLQKDVQAREVTQMQLKDIVIRIETNIMDEVAKAFEIAMLRGEIRILSTHWTNKTKNLESQELKKRVLKLEFCLWSCHPLVWCIKK

SEQ ID NO: 66808 - protein, 359 aa, Zea Mays
MAFAARRSIATRLSHHLTRRLHPCVPHSRTSDSLDEQASRPSPPLPLPLPPLHVQLKQRSREVQILGFLPFSLRLAGPTRRTFSSSAPAPNLEAAPAAEVDAAGVLADAAEAAASVPAPFPGEVAAAAADSFPPVAALQHIIDAIHTFTGLNWWVCIALTTFIIRIATVPLLVNQLKATTKLRAINPEMEVIKDQMNSMDPKSVQEGQAKMKALFKKHGVSPLTPMKGLLIQGPIFMSFFFAISNMVEKVPSFKGGGTLWFTDLTTPDSLYILPMLTGLTFLATVELNLQEGMEGNPMAGKMKYFSRGVAVLTVPFTMNFATVRSQKGRPGVVVRAISLVRSNPSTFARARLVSVYSFP

SEQ ID NO: 66809 - protein, 744 aa, Zea Mays
MPLPPLLLCVCLYLTHLPRLASSEPDADKAALLAFLAGVGRGATARARINWPTTPLACASPGHGPGWTGVTCSPDGARVVALHLPGLGLSGAVQSGTPFLVASHHHRNGGSRRSTTVTRNRCRRRFQNSNKFLRPGPAAFVSLLHLHSSDPSTRETEAGSHAAAAAAAAAPALRLRLRLPLPLPHPPPPPRLLRARRRQGGAAGVPRRRGPRRHRARAHQLAHHPARLRRPRTGLDGSHLQPRRRARRGVAPPGAGPLGRRATRHARPPHGAAAAQPALQQPVGPAPRRPPAPARARGAPPPPQRLLRRAPARARGARRAPGARPLLQRLRRRHPRRAHQPHPPCRARPLQQLALRPRPGPRPPRAPVPQPLQQPPRRARATVPPPLRRRRIRGQRPDAPARSSSSRRRRPRRADAAGQAQRGGHPRRRRRRLRPRVRRRRGAAPRILQQGGPRRRRRRHGRGRREGRGEEGEGVAGVQGRHRQGRGGQPDGLLRGPGAGVRPGGSAPRLRRGPRQGRVRDGVPGRAGGRHHGRRQAAQQGGERRAPRLRAADGAGWPDSPSQRRRAPRLLLLQGREAACVRLLRQRKCIQHASWEEGRGANAIGLGNQVEDRSGCSKRSGTRPRREQRQICPRQHQGLQRVRQQGRIRLHLGPRPGTAGEPDRGEVPLPRVLRAGGRRHEEGVAGFRRVQPRRPRAGAAHGEVARPGIRRARQRGRPPREVGAVGRPRGVDRRGVRRRAAAGP

SEQ ID NO: 66810 - protein, 828 aa, Zea Mays
MKRLRPGGHGIGETTYPTPIPQRAWSMDDLPRTVACSLSHGSNVTSMDFHPTRHTLLLVGSANGEFTLYEIGLRQTLLSKPFKILDTNACSPQFQNAVVKDPPMSINRVTWSPHGELIGVAFTKYLIRVYAYQPPNETRHVLEIVAHSGGVNDIAFSRPNKQLCVVTCGDDKLIKVWNMHGQKLFTFEGHKAPVYSICAHHKQSIQFIFSTSLDGKIKAWLYDNVGSRVDYEAPGKWCTTLLYSADGTRLFSCGTSKEGDSYLVQWNENDGSIKRTYSGFRKRSAGVAGVVQFDIAQNHILAAGEDNKIKFWDVDNNNMLICTDAEGGLPALPRLRFNKEGNLLAVTTVDNGFKILANADGLRNLRALGSRPPFEAFRLQYEDASMKVSGAPVVATISPNIGRMDHLDRNSPAKPSPMLTGGDTASRSIDIKARISEEKSDKAKASELMEVLNPQQCRVATMPETPDQARKVVRLLYTNSGVGLLALGSNAIQRLWKWSRNEQNPSGKATASVVPHHWQPNSGLVMTNDTSDTNPEEAIPCIALSKNDSYVMSACGGKVSLFTMMTFKVLTTFMPPPPASTFLAFHPQDNNIIAIGMEDSTIHIYDVRVDKVKTELKGHQKRITGLAFSTNLGVLVSSGADAQLCVWTNDTWEKKRTVSIQMLAGKAPSGNTRVQFSSDQNHLLVVQETQLAIYDASKMERIYQWIPQDTLSASISHASYSCNSQLVFSAFIDGNIGVFDAENLRLRCRIAQSVINSNPHVHPLVVAAHPHEPNQFAVGLSDGFVKVLEPLESEGKWGTPAPVTNGTPNGKTPASSTTSNPATDQIQR

SEQ ID NO: 66811 - protein, 908 aa, Zea Mays
MAPSSPSSARPTRASGRKRSAMAEEIHQNQEEEEEVVAASTAKRRRKAASSGKKPKPTPKQAKPAVAGMKKKGETEKTEPVVDDVCAEEPDEEELAMGEEEAEAEEQAMQEVVAAVAAGSPGKKRVGRRSAAASGDHVPEFIGSPVAAAEAHSNWPKRYERSTAANKPEEDDELKARCHYRSAKVDNIVYCLGDDVYVKAGENEADYIGRITEFFEGTDRCHYFTCRWFFRAEDTVINSLVSINVDGHKHDPRRVFLSEEKNDNVLDCIISKVKIVHVDPNMDPKAKAQLIEHCDLYYDMSYSVAYSTFANISSENGQSGSETASGISSDDAGLETSSNMPERTATLLDLYSGCGGMSTGLCLGAALSGLKLETRWAVDLNSFACQSLKYNHPQTEVRNEKADEFLALLKEWAVLCEKYVHQDVDSNLAGSEDQEDADTLDKDEFVVQKLIGIRYDGTGRKKGVYFKVQWEGYGPEEDTWEPIDNLREFVQEGRKRKILPLPGDVDVICGGPPCQGISGFNRFRNRDEPLKDEKNKQMVTFMDIVAYLKPKYVLMENVVDILKFADGYLGKYALSCLVAMKYQARLGMMVAGCYGLPQFRMRVFLWGALSSMVLPKYPLPTYDVVVRGGAPNAFSQCMVAYDETQRPSLKKALLLGDAFSDLPKVENHQPNDVMEYGGSPKTEFQRYIRLGRKDMLDWSFGEEAGPDEGKLLDHQPLRLNNDDYERVKQIPVKKGANFRDLKGVKVGANNVVEWDPEVERVYLSSGKPLVPDYAMSFIKGKSLKPFGRLWWDETVPTVVTRAEPHNQVILHPTQARVLTIRENARLQGFPDYYRLFGPIKEKYIQVGNAVAVPVARALGYCLGQAYLGESDGSQPLYQLPASFTSVGRTAVQANAVSVGTPAGEVVEQ

SEQ ID NO: 66812 - protein, 796 aa, Zea Mays
MDKLIVSKPLSIGYLYSVAELKSGAYSKDTTNISLHATSTSAASKISVIHDNALPNALLGTVEYELPHVPPWFFHAGSQKLYGVLAGIIRLVGLSTVSGEGTAATLSLFVDILLDQFRRLSTELRDKDVYNDGLQRWYMKGEAGQALRQASSAVCMLNELMYGLSGRSLGMFLQLFSNGSAQMPRTVCQKNQLLACVKHNAVTNKREVWGFSEQKGTKDNILHCISSILHEYVSPEVWDLPTEKDTELHLIELNLPLHFYRDTTALHTVVLEGIGVLGVLLGQDFALSGFMHSSLYLLLRELISSSAQIRTACDAVLRALATAGGHCSVGQFVVANADYIIDSLCRQLRHLDLNPHVPDVLASMLCYIGASRDILPFLEEPMQSISSELEVLGRHDHPRLTVPFLKAVSEISKACRHESTCLPDEAQSFYEKVSSEGQEVKIMIEKRMESSAISERKNVDARSYFMTLEYWEDLFCKLNEMRRYRRIVGSLAGSCLSAAIPLLSSNKETACLVALDIVESAAISIANVEEAYKCECQSKGVIEEAIQFCSFDELLDGTDATEDVDENRLLPAMNKLWPYLVICLRNKISVPVVRKCTEMLRRAICISGGDFYVRRFHKDGPIVWRLLALSPFRRLSKMDEKAIILPYRDTSLNSEEPMAEISSQKIQIAVLDMIAAISSNKRSAVALESVLKKVCGLVVGIAYSSLTGLQEAAIRALAGLACMDADLVWLLLADVYYSLNQRESLLPNQDLALVSDLLPPPVSSREYLFVQYGGEGVRCDVDPSSVHYVFRRMQGV

SEQ ID NO: 66813 - protein, 55 aa, Zea Mays
MGDSMNRNQFESMLCARPCRTRPDVRDARAQDQQGPRLLHLRVHDNNKSAKCGIV

SEQ ID NO: 66814 - protein, 419 aa, Zea Mays
MEQDCYGSLPMPMSYGLNNTQGTVIPAKAKSHKVAIAFGATTACISLLFLAVGSLFWWRCRRNRKTLFNVDDHQHIENGNLGNMKRFQFRELQAATENFSSKNILGKGGFGIVYRGQLPDGSLVAVKRLKDGNAAGGEAQFQTEVEMISLAVHRNLLRLYGFCMTASERLLVYPYMSNGSVALRLKGKPPLDWITRKRIALGAARGLLYLHEQCDPKIIHRDVKAANILLDDCCEAIVGDFGLAKLLDHRESHVTTAVRGTVGHIAPEYLSTGQSSEKTDVFGFGILLLELITGQTALEFGKSSNQKGAMLDWVKKMHQEKQLDILVDKGLGSKYDRIELEEMVQVALLCTQFLPGHRPKMSEVVRMLEGDGLAERWEALQHTESHKFKVPEFSFSRCHSDLTDDSSLLVQAVELSGPR

SEQ ID NO: 66815 - protein, 349 aa, Zea Mays
MCLVIDEADRILEQNFEEDMKQIFKRLPQNRQTVLFSATQTPEVEKFAKLSFEKNEESKKKPVYVGVDDDKSKATVEGLQQGYCVISSDKRFLVLYAFLRKKRNKKIMVFFSSCNSVKFHAELLNFLGIECSDIHGKQKQQKRTTTFFSFCKAEKGILLCTNVAARGLDIPDVDYILQYDPPDEPKDYIHRVGRTARGEKGKGSALLFLLPEELKFLIYLKAAKVTLTEYEFNQKNVPNLQSQLENIVGENYFLNQSAKEAYRSYVLAYDSHSMKDIFNVHQLDLQKVAASFGFKNPPKVNLDLDSSAAKHRKKMRRVDGGKRHGISASNPYGRKDKGGAGDKRQLARF

SEQ ID NO: 66816 - protein, 107 aa, Zea Mays
MAARQRILDTDEELGRIWFITSSCDSASSITPTQRRSLAQHRPQTGRTDGTHQQRSPRRSLSQSLCNPTSTRRSLSSFSLSLSAMKLGAIFPMAARPTSPWRESPGA

SEQ ID NO: 66817 - protein, 64 aa, Zea Mays
MYSSQDMFWCTMYSVVPKRLYHQLATLVLIILTKYIPLNLRRCLLNFLVSVLAVADRKSASANL

SEQ ID NO: 66818 - protein, 233 aa, Zea Mays
MAMDKPLEGNGSPASHLNLGTQTNKSVHIGEALQMQIEVQRRLHEQLEVQRHLQLRIEAQGKYLQSVLEKAQETLSKQNAGSVGVETAKMQLSELVSKVSTECLQHAFTGFEEIDGSQILQGHTIQLGDGSVDSCLTACDGSQKDQDILSISLSAHRGKEIGGMTFDIQEKERGREDLFLDKLSMTPPGQLDRRERGSFSMTRKAAKLDLNINDTTDGPQNCKKIDLNGFNWT

SEQ ID NO: 66819 - protein, 54 aa, Zea Mays
MGVRFSPRSQRRNQTTAFKRLPFLVENLCTVLDPEESTRGLILKWFSFLGGWGA

SEQ ID NO: 66820 - protein, 216 aa, Zea Mays
MKWGKLLVRRRQKLMNWKKTTYQIGKNLDVEKVLPWTDQESKLLVKKKLKERMDDFQTLREAIRQEYREVVERRVFTVTGNRPDEETIDDLIETGKSEQIFKDAIQHQGRGQILDTVAEIQERHDAVRDLERKLLELQQIFMDMAVLVEAQGDMINNIETHVSNATNHIQQGVSALQNAKKLQRNSRKWMCYAIIILLVIVVVIVVAVIQPWKKGT

SEQ ID NO: 66821 - protein, 1153 aa, Zea Mays
MQPPGPPLATPQPLPPAVAAELAQLESRLGQVAGEPARHELAELGEVAAVRVLRRIARSQEQVRTLTGYIVSAAVQETFALNAQAVPTAESRACNSSAPSLSDGSVQGPQCASELRMEEVTAGLSNYRMAICEGQGQEDHAVMMAIDNPPDCIPPWGWDQDCIEVDNLVPGIASQANQMPMQYGDRDRIQELVSIVPHGVRMLAESLENGRASELQNYVQNGIPEQWMVPADQRMESTSSRLQHVLKCLQGVGPFGHHLGPECAIMIPKPEPNVVVENLFREIASPHITDNKLRNTASPQMCALEDLEFSKRFLILSYLCRNNLEDEVVLTVDYIKSLKFLSMVHFESQIWRKFGQKNFQASNRAATDRAKNFDSDPTTTKLYHCNIEIRGESIFFVLKGPYMENKRTYLQKVLGDDNVLLVKFMVSSDKSTDFYRQHYHRVVEDGIVLGLRRYNFFVYKDPGKETKKKDSEQGDIKKCTSPVRCYFICTKSGWRGDEAYIPIDKCRKLFMHIHTAPTIANYMKRFHLILSKTLTLDVDLSTIDVILIDDEPCRDEHGNIVMLDGKRLIHTDGTGFISENLAKKCPSRIIKGKKSKVYMHQGETTPLLMQVRLFYNGYAVKGTLLVDKRISNNTIVIRPSMVKVKADPKLCRMKSLSSLEIVSTSHQSNRTSTSRILIALLHYGGVKAEYFMELLHNAIEGVNNARYSFRHALKLAYGYANMEDSMLERMIHSGIPLEEPYLLSRLSFMAKQEMKVFREGKLPIDECYYLMGTTDPTGTLKPNEVCVILDSGQYSGDVLVFKHPGLHFGDIHILTARQIDGLEKNFIGYSKNAILFPTSGQRSLADEMANSDFDGDEFWVSRNNMLLKTFEKRSEPWVELLKLKETQHRLSKPGDLNELILERVLFNECLTTMFIPNYTKGLAPDCWLAHMDRLLTEGVDQDEKKSIVENMIKLVDLYYAALDGHKVDVDRHLRVKAYPHFMEKKGFESYHSSSILGRIYDETEEIIAQQCDEQIQITTLPCFSEVEATPECTSLWEHRYQEYLTKSRGLFDLGKEEKNDEFQKLYQHYKHLLYDADELEETSRDLSDVFMEACAIYRIVYERAWCTRSVSRCRFVWNVAGAALCHLHATKYAAQRGEKTALCPLSVIRQLYI

SEQ ID NO: 66822 - protein, 659 aa, Zea Mays
MRASATQILDIAKTKNLRVQFVFFCGNGSDAYNSAFQELTSHMGLPDVSIKRFSVTHDIRNLLMFVDVVLYGSLRQEPVFPPLLLLSMSSEIPVVAPNLTVITKYVSDGVHGFLFDSADPSTISSAFIQILGEKKLLDTAYSVALEGKLLSKNMLAHDCIKAHVKLLESVIHFPSYAKLPSSVSKVQERTWLWDPFELKAALENSLLEDESHASTKAVDILREFSQSNQTTYADTNDTSSYDYPRLSDWYDLGEIEIFEDIERREMEEIDERVERPLLSWDEVYKNARKSERLKSEGNERDEGELERTGQPVCIYEIYSGEGAWPFLHHGSLYRGVTLSKGGRRPRSDDVDAVTRLSVLDNPYYRDLLCEFGAIFAIANRVDTVHKLPWIGFQSWRAAGRKVSLSERAEETLEEITSGESNEDVIYYWSPMDMDQTSDFWLTCDSLNAGNCRSLFEDAFRAMYGLPENVLALPPMPNDGDHWSTLHSWVMPTPSFLKFIMFSRIFVDSLHSLNVNSTETTSCFLGASEPERRHCYCRILEVLVNVWAYHSGRKMVYLNPFTGDTSEQHLLDKRNGMWVKFFNFTLLKSMDEDLAEEADDGMHPGNEQWLWPLTGQVFWPGIADREREEKYIKKLDKKLKNKVKLLERQKSGYKQKPLGQ

SEQ ID NO: 66823 - protein, 462 aa, Zea Mays
MGGAYCRRRSPLEQQLLPAVLVLLVIVAASSSFWGVAAKETGRNVITHIKGFRGPLPFHLETGYVEVDDENGARLFYYFIESERNPAEDPLILWITGGPGCSALSGLLFEIGPLKFDVAGYTEGTFPRLVYFEDSWTKHHVFLRKWLAEHPEFASQPLYIGGDSYSGYTVPVTAMDIATSSRSRDDDDGYPKPNLVGYLVGNPGTDDRYDSGGKVPFMHGMGLISDELYEAARLGCGGDFYKTPDLTNTRCASAMIAIYMVTVGVNPMHILEPFCGPQGPGVRSIFQDNGSRRSMLVQDDVPHPGFFTKQPVECRNNGYRLSNIWADDPEVRDALGIHKASIGSWSRCTMLPYYRHDVSTAIPYHVNLTKAGYRALVYSGDHDLGMTFVGTQEWIRRIGYPIVSDWRPWFVNRQVAGFTRTYAHNLTFATVKGGGHTAPEYRPKECLAMLDRWTSSAAGQLS

SEQ ID NO: 66824 - protein, 262 aa, Zea Mays
MLREKLGMDSINISSSSVGSKHEEFDGSVNMDDKDSDDSNIDAGPGSKDLSSDPTAVPRIKILKVVPMQNVDKDYIINIFDQISEENDDPEVENESSEDAGDEDNSGVAETVSAEENGDESGDESDIEPLVSIDFVIENNDDYASHPSAEAFERMPARLEKRDRFSFSFYTEEYSKKLDAGKAQQTSKKTVRLHTDQQDYDGFVELDRVKLSGSNKKLSILQLGIKRNNKVQKKLHGVTHFSRIQMPISSDPLTGCFPCKSW

SEQ ID NO: 66825 - protein, 497 aa, Zea Mays
MAAPSHLHLHLPGCPQTLALPLPSPGGFSAWPGLRSCSRSRQPRIRPVAALGPADAGDLLGRVEAFLYTVADAAVNAEPVAAAADTGTKEAAAGDWLSGITNSMETVLKVLKDGLSALHVPYSYGFAIILLTVLVKAATFPLTKKQVESALAMRSLQPQVKAIQQRYAGDQERIQLETARLYKLSGVDPLAGCLPTLVTIPVWIGLYRALSNVANEGLLTEGFFWIPSLAGPTTIAARQNGQGISWLFPFTDGHPPLGWSDTLAYIVLPVLLVISQYISTQVMQPPQSNDPNQQGAQAVTKFLPLLIGYFALSVPSGLRLYWLTNNILSTAQQVWLQKLGGAKNPVKEYIDKLSREETTTVQKNDSTVQSEPLSKHSKPQPSQEPKPSGPQRGERFRKLKEEESMRKEVMGQGKQSEQSSSESRVTDGTQNSDVSSGDQKDQQGSHENGPVVASINGGVNHIRNEKTQNLSSEKEAADDHSPDVHKLTDRENGNDAV

SEQ ID NO: 66826 - protein, 441 aa, Zea Mays
MPAFRDVIDVPLVVRRLHRSRTEVRKELGIANDVKVVIFNFGGQPAGWELKKEWLPDGWLCLVCGASDTQELPLNFIKLAKDAYTPDLMAASDCMLGKIGYGTVSEALAYNLPFVFVRRDYFNEEPFLRNMLEHYQCGIEMIRRDLLTGHWKPYLQRAITLQPCYDGPINGGKVAAHILQDTAVGKKYISGKLSGARRLRDAIVLGYQLQRAPGRDVGIPYWYSHSEKEISVGPAPTSHDMNGSDESSFEDFEILHGDMQGLTDTMSFLKSLSGLVGNDLRSPEKQTRERAAASVLFDWEEEIYVARAPGRLDVMGGIADYSGSLVLQMPIREACHVAVQRSDPTKQKQWKHTQARQLANGGAVPVLQIVSFGSELSNRAPTFDMDLSDFMDGDKPISYDNVKEYFSRDPSQKWAAYVAGTIFVLMAELGVRFKDSMSILV

SEQ ID NO: 66827 - protein, 61 aa, Zea Mays
MAPPGGRCRARSGRSFPHLLRRRPGHHHGSRSAAGECDGGGGPATHPSLPPKSQPARPQVC

SEQ ID NO: 66828 - protein, 117 aa, Zea Mays
MYIYSQLGLIKAQHSNQGGGESLDQLSERCVSFLYDIVGKHKGERVILVSHGGTIRELYRHVSPTKPLHGKIHNTSVSVILVSDATGRCIVKMCGDVSHLQETGVLENAFGGDKTSA

SEQ ID NO: 66829 - protein, 131 aa, Zea Mays
MASLLQVPRNQLHCHCDPLPPMALTFHRQNCSSSIPPMALTLNPHLLDPVLITILPLARRPTSPRALAVPREDTEVQCSAVLYSSAPRIFGTGQIGTNSTFIGSTKVSSSTFHRCQLRGVLNGNKAMAQLY

SEQ ID NO: 66830 - protein, 58 aa, Zea Mays
MSGAARSSTARSVAPSDPSVCVRGERVRESKCKGVFVKLECQQGAGAEGLLCNIRADR

SEQ ID NO: 66831 - protein, 55 aa, Zea Mays
MANAIYGVWAKYRMQITGRPPLEKLQANVKMTKYARCEHKKCSTVLHTSLTYIHA

SEQ ID NO: 66832 - protein, 447 aa, Zea Mays
MGWAHPAVTMEEVLRLVRGFVDVLVLAGGRTSSGAAATWSADEIKKALRWALFFEEIFKDLLDSGQYEDSARELDAALLELTSSPEFPKGLAAVRSDLLSMARVLVMRHFLKPNTMSVENFCALLEAVAGMDIDGICASGAHNACQEYAESILNMNTSCFAQTMNACDGGLPTSSYDLRAESTGHSWIIVKEFQKTLDSASCGRLADRGLETFLNSVKRNILENGSNKPCVPAIPKTSQMIDEFLMWKQWRAKCLSYLLDQRTIRVLSGASLIFKAPKEQWMKVFEPLKSIEETCHSGLVETMELCLLGSITRRWNTLIEGFMSHTFCSIPISKKHADLHQCLHRTFQDKFQDEYLNLEEKDILDYARQTLERKPSVLWLLPPVLTAAAIPPQSSLFQIYLAQIDKQIHEAAPADRKCSCRGDEIDRHVNWLWMSRKGSDARPQGVG

SEQ ID NO: 66833 - protein, 552 aa, Zea Mays
MRWQRSKFSWLLSACLICLLLQLVGAIRTSLFWPQSCLPSPAIPREDESVEQLWHSCALDLRIPQDVRNKFHYSLLFNTISNSYRENDNKSYPQKVGIEEATTATFSPAEVANTFLDCLNKHNFPFSDHGLQKHQEETISLLPNSNSINLPFAMKRRRLLEEDSAIAPPRPKAKQAIRSVLSSEGEAHLLVTTVKKSGKPEPKNKSKDNSGTIIAGLSVACVALVALICSSRKSCSTPIDVNRLGALSTSSSASQRKEFKFPPIKAEVREMSMKSEFERRSNVQAMKLSSHEITTIAGRPATSTNSQDVKSAVAAVPSSNASDSICKPAAGPAPAPPPPPRPGYPLPKAPPAPSAPTPPVPPPKMPTAAGSSNPPPPGPPPPPAPRPAVGPGPPPSPSSAGPGPPPPPGRGGAGPPPPAMPGGPKARGPPPLKKAGNVAGPPVADNKTKLKPFFWDKVTANPDQAMVWDQIKAGSFQFNEEMIESLFGCHAADKKNADGKKDLAAKDTPQFVRILDAKKAQNLAISLKALSVSADEVRNAVMEGGLQAATRS

SEQ ID NO: 66834 - protein, 970 aa, Zea Mays
MSSKKVPYHKHREAEEARKKREEDEAARVYAEFVESFKGDSSSGAKFIRGGVIDPNAKLKTDSEGGKSKDGGSVPKKGSRYVPSFLPPSFAKEPEKKKEGERPKEKEKEKGKPRVIDRFLEEIKLEQEQREKRHQDRDHRREGRHGDSSMSSSRFDELPDEFDPTGRFPGSFDDGDPQTTNLYVGNLSPKVDENFLLRTFGRFGPIASVKIMWPRTEEERRRQRNCGFVAFMNRTDGQAAKDEMQGVIVYDYELKIGWGKSVALPSQALPAPPPGHMAIRNKEGGTATVILSGPGGPAVASIKPQTSELVLTPNVPDIVVAPPDDGHLRHVIDTMALHVLDGGCAFEQAVMERGRGNPLFDFLFNLKSKEHTYYVWRLYSFAQGDTLQRWRTEPYIMITGSGRWVPPPLSSNRSPEREKESTFAAGRSRRVEVERTLTDSQRDEFEDMLRALTLERSQIKDAMGFALDNADAAGEIVEVLTESLTLKETSIPTKVARLMLVSDILHNSSAPVKNASAFRTKFEASLPDVMESFNDLYRSITGRITAEALKERVMKVLQVWADWFLFSDAFLNGLRATFLRSGNSGVVPFHSLCGDAPEIEKKGSSEDGNDGFKLNEDGALATGKAAATKELLGLPLAELERRCRHNGLSLCGGKEMMVARLLNLEEAEKERIYEKDVDVKYVQGEQHVVGREDSGVNAHSTSRFGEGSNGDELDVSRNSMRAGKGRSGGSASAELESFPSKKPKYDPVLPASKWSREDDISDDEDRKGGRGLGLSYSSGSDIADGLGKVDTTEASTDHTSHHHDTIVDEEHRQKLRQIEISVMQYRESLEEQGLRDLDEIERKVASHRRRLQSEYGLSTPTDGANSRRSSEHHRRRSGKRGMAMHMIILGNVAGARVEAAVLQGSLRRGIESTIAVGTEIGYARKVQAEGETTTTTEAEIERTGERGGDRPEKPRHYAPFALTEGPRSII

SEQ ID NO: 66835 - protein, 363 aa, Zea Mays
MEKILRVYDMNRPDAAPRELDKSPGSVRTAAWLHSDQTILSSCTDMGGVRLWDVRTGKIVQTLETKASVTSAEVSQDGRFITTADGSSVKFWDANHFGLVKSYDMPCNVESASLEPKSGSKFVAGGEDLWVHVFDFFTGEEIACNKGHHGPVHCVRFAPCGESYASGSEDGTIRIWQLSPANADDNEVANANGKTTAGVNEVTTKIEGFHIPKEGQTEGRLPSELQWSFSFPLRSHHVCDPRVSWLHESSSALGKNKQANGGGFLDGALALIEHSNCSVKNKQELGSLGTVFAFIKVKYSVSPQSPKKILEAFIVGTPTFKAVDHFLILRYPIRRTSGIWHMFRFAANIPAFAKGNRVTCPAM

SEQ ID NO: 66836 - protein, 216 aa, Zea Mays
MIHKQEVIENVLRLLVLLSLTNAGLPKKNFDYMRREILHSYGFEHMHLLYNLEKAGLLKRQESRSNWVGITRALQLIVDVNDTANPTDISYIFSGYAPLSIRLVQHAVRSGWRSIEELLKLLPGPHLDLKRGGLTINSSPEVHPGLGAQQSIDRVGHRSLVLVVFIGGVTFAEIAALRFLSAQEGMGYDFLVATTKVVNGNTILRPIIANSKEGMM

SEQ ID NO: 66837 - protein, 402 aa, Zea Mays
MSATSSSDVDKLTKLLLHNPFVLTLSEVGQAKDDVIPKNVQQFWISCDAKDKILHILALLKFELIQKKVLIFVNSIDMAFRLRLILEKFGIRSAVLNAELPQNSRLHIIEAFNARLFDYLIATDDTKTKEKQTNEENKKEATLSRKRKKQTNKENQKEQKVSRKHLQQTLDAEFGVVRGIDFKNVFTVVNFDMPLDATGYVHRIGRTGRANKTGASISLVSPKEDSTFKEIEHMLQDVEKKDMDCISPFPLLTKDAVESLRYRAQDVARSVTTRDVQEARRQDIKNEILNSEKLKSHFEENPTDLDLLKHDKLLCNKEIPAYLRDVPDYLIDPKTKEASNAVKLSRAAMHIDKPQRRKRQGFKGGSGKSRDPLKTFSAEGKRGRRRKEREGEPDRRKKSKKA

SEQ ID NO: 66838 - protein, 269 aa, Zea Mays
MADDEQAEKKEEVPELAPFDPTKKKKKKKVVIQEPSDEVDNLAEKTESLTVTESSEPSFAGMKKKKKKHVELDSSLTETGDVDDTGDDQVREDEEGEGIVLAGAAATRYPWEGTDRDYKYEELLGRVFNILRENNPDLAGDRRRTVMRPPQVLREGTKKTVFVNFMDLCKTQPEHVMMFLLAEMGTSGSLDGQQRLVIKGRFAPKNFEAILRRYINEYVICNGCKSPDTILSKENRLFFLRCEQCGSSRSVAPIKAGFVAQVGRRKAGS

SEQ ID NO: 66839 - protein, 176 aa, Zea Mays
MRASSSGARACCADSAAAAATTSNCSSGLTTEDAAADHALPPPPFAQFFTYPQYVWCHSAARDPAEEEDGRRSGVADVEVTLVETHASVRVMTARRPGQLLSLVTGLQALRLAVLHLSVVTALDALVLYTTSVKVEEGCGLATADDIAAAVHHVLCIIDAEATEQQLLAAAGPQPQ

SEQ ID NO: 66840 - protein, 482 aa, Zea Mays
MAPLLTLDALLFHMIGGQMKRFAKARKDLLVAVNEIVRHMFDEIDYILEGKNAERFATLYSHGSSGVNSEASTSIKVPKVYWNYTCKTILTLEWIDGIKLTDAERISKANLNRKRMIDEGLYCSLRQLLEEGFFHADPHPGNLVATEGGSLAYFDFGMMGDIPRHYRVGLIQMLVHYVNRDSLGLANDFHSLGFVPEGTDLLAVADALRFSFGDVRRQSNDFQGVMNHLYDVMYEFSFSLPPDYALVIRALGSLEGTAKALDPEFKVIESAYPFVIGRLLADPSPDMRKILRELLICDDGSIRWNRLERLIAAISEQSSESSSASGADSSENANGSPEWRSFDMHSVIAATEDLFDFILSRKGWRVRVFLVQDIVNASDVFLQEATFPYVYAKVGKIGDLNPERSKMIRRLVNTVQSFRQAINLAPDAWSAMLIRTLLKPESQKFVLDVFLALANHSSYKIPETFWLFMSRFLNYLDKQDIL

SEQ ID NO: 66841 - protein, 289 aa, Zea Mays
MKRGGQLIYSGSAIPGVPKINKGQNPATWMLDISSHITEYEIGVDYAEIYCNSSLYSKDEQDVLNILGIVYGSALFLGFMNCSILQPVVAMERVVLYREKAAGMYSTMAYAIAQVSVELPYMLVQVMIFSSIVYPMIGFQVTASKFFWFFLYQVMSFMYYTLYGMMTVALTPNIEIAMGLSFLIFIFWNVFSGFIIVREMMPVWWRWVYWADPAAWTVYGLMFSQLADRTEQILVPGLGEQTVREFLEGYLGLQDRYFVLVTCLHLAIIGLFVFLFFLAIKHLNFQRSF

SEQ ID NO: 66842 - protein, 94 aa, Zea Mays
MNTFALLHLWHFGYLLSLCSGFPGSMGDDLIINMSNSKGRSYGRVVAQVAIMAGSLLDFTNHFAICLSKLSVICFYFTIGCSSIYFGTTRKLSG

SEQ ID NO: 66843 - protein, 720 aa, Zea Mays
MWRLRIAEGGGDPWLRTKNAHVGRQVWEFDASADPDPAVDAARRAFAGSRGHLKHSADLLMRIQFAKENPLELDLPAIKLGEHEDVTEEAVSTTLRRAISRLSTLQAHDGHWPGDYGGPMFLMPGLIITLYVTGALNTVLSSEHQKEIRRYLYNHQNEDGGWGLHIEGPSTMFGSALTYVTLRLLGEGPDSGDGAMEKGRNWILDHGGATYITSWGKFWLSVLGVFEWSGNNPVPPEVWLLPYLLPFHPGRMWCHCRMVYLPMCYIYGKRFVGRITPLVLELRKELFKDPYSKIDWDKARNLCAKEDLYYPHPFVQDVLWATLHKFVEPVMMSWPGSKLREKALETAMQHVHYEDENTRYICIGPVNKVLNMLACWIEDPNSEAFKLHIPRVYDYLWLAEDGMKMQGYNGSQLWDTAFIVQAIVATNLTEEFGPTLKLAHNYIKKSQVLDDCPGDLNDWYRHTSKGAWPFSTADHGWPISDCTAEGLKASLLLSKISPEIVGGPIEANRFYDAVSCLMSYMNDNGGFATYELTRSYAWLELINPAETFGDIVIDYPYVECTSAAIQALTSFRKLYPGHRRKEVDSCISKAANFIESIQKSDGSWYGSWAVCFTYGTWFGVKGLIAAGRTFESSPAIRKACGFLLSKELPSGGWGESYLSSQDQVYTNLKGNRAHAANTGWAMLALIDAGQAQRDPAPLHRAAKVLINLQSEDGEFPQQRS

SEQ ID NO: 66844 - protein, 121 aa, Zea Mays
MPPLAPIPAALCQRLRHSSIGCHNSRGRPRLALGISSLAKSFGTMALSQPSTAVAYWVDSDATNHTTFDTGTISTLRPPHLALPSSILVGNRFSLSIILVGDSVLLGPLYLNNILLAIILS

SEQ ID NO: 66845 - protein, 215 aa, Zea Mays
MFCIPNYHFAICHPQLPRAHFAVFHSITPSPPVPRPFPLSHLLPPHLAMAFFSHHHLQQPHPQQAPPPNQQQPVLPSFRNALPVPVDGQIPAPLTFFNPPPAFPEQPAQTTLVDAVGLTAAAGLGWRQPREQELLGENSQMSSIDFLQTGSAVSTGLALSLEDRRHGGGGAGNSSGDSPLLLLPMLDDDISREVQRLDADMDRFIKAQIWTSGDG

SEQ ID NO: 66846 - protein, 77 aa, Zea Mays
MELPGQVRRWNGLAATIILMESADGAPPIPSAKLKIRFMVRVIGCGVHLIDRCEEISVRRLELLSEFPRDIHGVSSA

SEQ ID NO: 66847 - protein, 96 aa, Zea Mays
MKKTSSPLLIVLFLTAAAMAAEPEKQAAPAAQETAVHIVYVDRPEDADPEEFHIRTLTPVLGSEQKARDAVLYHYKNAASGFSAKLTPQQVKDLKG

SEQ ID NO: 66848 - protein, 296 aa, Zea Mays
MDVVAPRSCHHDGMQKGRHVPTSMRAQTTTRMSGEIVSVTKHRRWNCVKCLNRVKSPGPTTTSETVSIQQDGTNDGCSISIVRTLPNNSDSRRLFSWTQQSSQGNDQSTLSKSAQECNSKCSSPYGSRAVTTVNVPDTLTEANVPDTFTEGSVPATEGLWSSFNNIDVSANILNDVSMDISDLPDDVSRMISSIEENGTQNLHGPKPCVVSIEDDNRTAQDVPSDDCNEPNARKPKSGHNVSKQISAHKTNQVRNQVPLQASLKRNVGSVDKKKRDQSANLADISDLKFCQRKPKR

SEQ ID NO: 66849 - protein, 75 aa, Zea Mays
MDLLSSGTSFEEAVKPRKWLNPTDWGRRAWCRSRLGPHEVNSEARMATTMTPTTSSPWTPKVTGVEWVTYQAQSN

SEQ ID NO: 66850 - protein, 238 aa, Zea Mays
MASPDDPVLSACKKNLSHFRIKELKDVLHQLGLSKQGKKQDLVDRVMAVLLSQQDQAFETNGLPKAKSAVKIVEDTFRKMQDPTNTVAVSRSHELGDSVTCKKKPDDSAQAVKVRCPCGDSKPNDSMIKCIDPQCNIWQHVGCVVIPDTEKSADNISPELPSCFYCEVCRLSRADPFWVTVNHLLLPILIGPSTVAADGFGVSFSVTKYLLGCTGLYTLTCKLMVFMLGWLTGNPHKS

SEQ ID NO: 66851 - protein, 1475 aa, Zea Mays
MLAPLPRLTSALRGHYDADQAYLLRKSALQALTLPRPHDEWKFARKIVPGWDDASSEVRQAYKQFIGAVVELLSGEAVSEELYQVAQTVYTLFGGDDTEYVGAKKVLSKRNELESLVGYTVQDSVLKKLAQLAQKLDSLQRASAYESVHRIADDVNENDRIEFGADFDFKPLARFIVDVSLDAPLESAELGSGPFEKWQYDAWSTSTTSHSTAVRGSIAGELLDLVGDTAFEIVQDLLLHRKELVDAIQHGLSILKSEKMTSGNQPKMPTYGTQVTVQTESERQLDKIRRKEERRSKRSADSGNNDIGVDDFSSLLLASERKEAFDDVIGSGEGSDSFTVTSLPQGTTRKHMKGYEEVKIPPTPTASLKPNEKLIEIKELDEFAQAAFQGYKSLNRVQSRIFQATYYTNENILVCAPTGAGKTNIAMIAVLHEVKQHFRDGILHKNEFKIVYVAPMKALAAEVTATFSRRLSPLNLVVRELTGDMQLTKNEIEETQMIVTTPEKWDVITRKSSDMSLSMLVKLIIIDEVHLLNDDRGSVIEALVARTLRQVESMQSMIRIVGLSATLPTYLEVAHFLRVNPDTGLFFFDSSYRPVPLAQQYIGISERDYTKRSELFNTLCYEKVVESIKQGHQALVFVHTRKDTGKTARTLIDLAAKAGELELFSSADHPQFPLIKKDVSKAKSREVVEFFESGFGIHNAGMMRSDRSLMERLFGDGLLKVLVCTATLAWGVNLPAHTVVIKGTQLYDPKAGGWRDLGMLDVMQIFGRAGRPQFDKSGEGIIITTHDKLAYYLRLLTSQLPIESQFLGSLKDNLNAEVALGTVTNVREACTWLGYTYLFIRMKTNPLVYGITWEEVMGDPSMGAKQRTFIIDAARALDKAKMMRFDEKSGNFYCTELGRIASHFYLQYSSVETYNEMLRRHMSESELITMVAHSSEFENIVVREEEQDELEALARKACPLEIKGGPTDKHGKISILIQVYISRAPIDSSSLHSDAQYISQSLARIMRALFEICLRRGWSEMSSLLLQYCKAVDRKIWPHLHPLRQFDKDLSPQVLWKLEERNVDLDHLYEMEENEIGALIRFSHQGKLVKQYVGYFPYVNLSATVSPITRTVLKVDLHITPEFVWKDRYHGMSERWWIIVEDSENDTIYHSELFTLTKKMARGTPTKISFNVPIFEPHPPQYYIHAISDSWLHAETLFTVSFHNLTLPQTQITHTELLDLKPLPLSALGNKTYEDLYRFSHFNPIQTQAFHVLYHTDNNVLLGAPTGSGKTISAELAMLHLFSTQPDMKVVYIAPLKAIVRERMNDWRKRLVIQLGKKMVEMTGDFTPDLMALLSADIIISTPEKWDGISRNWHSRSYVMKVGLMILDEIHLLGADRGPILEVIVSRMRYISSQTERSIRFVGLSTALANARDLADWLGVTDDGLFNFKPSVRPVPLEVHIQGYPGKFYCPRMNSMNKPAYAAICTHSPNKPVLI

SEQ ID NO: 66852 - protein, 419 aa, Zea Mays
MPSRQRAHRQHRRRRRARRRAPRRRGAQYRAGRRVAQGKWQRGKYVGVTLVGKTLAVMGFGKVGPEVARRARGLGMDVVAHDPYAAADRARAVGVDLVSFDEAISTADFISLHMPLTPSTAKLFNDETFARMRKGVRIINVSRGGVVDEEALLRALDNGTVSQEGVALEIAEAVIGALRGDLAATAVNAPMVPAEVLSELSPYVVLAEKLGRLVVQLVAVGSGIKGVRVVYSSARDPDDLDTRLLRAMVTKGIVEPISSAFVNIVNADYVAKQRGLRIVEERVFLDGPPEVPLDSIQVHLANVESKFAGALSDAGHICVEGKVRDGGASHLTLVGSLSVDVSLEGNLILCGQLDHPGIIGRVGSILGKMNVNVSFMSVSRTAPGKQAIMAIGVDEEPGKEALKLIGDTPSVEEFVFLKL

SEQ ID NO: 66853 - protein, 498 aa, Zea Mays
MHPFCCAPLVPVSPAASAAPAASSAVAGTQAVMPPPQPPPLPPPPPRNNSATGGERRARAAGVSGGGGGDSSPLEGVKLNEIVGGGISGIMYKWVNYGRGWRPRWFALHEGVLSFYKIHGPDRIILSRETERGAKVIGEESLRRLNRPSAFSPSHSNGHHHPRNPIGEIHLKVSTVRESRSDDRRFSIFSGTKTLHLRAETREDRAAWLEALRVTKDMFPRMSSSEMVGPGDTAAAVAVSTERLRQRLQQEGVSEAAIADSERIVREEFEALHKQLVLAKQKHALLLETLRQLETEKVDLENTLVDESQRQSKEYGSASKPRHEKYSEGSASESDDYNEPQDPAEETDDEANLYFDTRDFLSSSSFKSSGSDFQRSEAGSDDEDDYPMDGINPSMKSIGVSYAYVRRRNRLPDPVEKEKGVSLWSMIKDNIGKDLTKVCLPVYFNEPLSSLQKCFEDLEYSYLIDRASEWGKRVRCMIHAAPHHFSGEKNTHNTHLIS

SEQ ID NO: 66854 - protein, 84 aa, Zea Mays
MASGYRAEEEYDYLFKVVLIGDSGVGKSNLLSRFARDEFSLETRSTIGVEFATKTVQVDDKLVKAQIWDTAGQESGCICCCYSS

SEQ ID NO: 66855 - protein, 472 aa, Zea Mays
MHPPLASAALRLLSFTSRTRLLSHCPFFLSRRDDDGGREGPSSPLPPLSPSGSTFWPRSLLLSASDAAGLFSLRGGWRRRALPPAASRPPGAVTDAAPVRLTVSRKYSLRVAKGKKKAHFDDEHSHRAVNMALWCNFLVFSLKFGVWISTSSHVMLAELVHSIADFANQALLAYGLSSSRRAPDALHPYGYSKERFVWSLISAVGIFCLGSGATIVHGVQNLWNCQPPENIHWAALVIGGSFLIEGASLLVAINAVRKGAEAEGMGIWDYIWRGHDPTSVAVMTEDGAAVTGLAIAATSLVAVQMTGNAMYDPIGSIIVGNLLGLVAIFLIQRNRHALIGRAIDDHDMQRVLEFLKSDQVVDALYDCKSEVIGPGFFRFKAEIDFNGVVLVQNYLERTGRGTWAKQFREAAMSKDDTELLRVMANYGEDVVEALGYEVDRLESEIKKLVPGIKHVDIEAHNPEGLTLRAEVL

SEQ ID NO: 66856 - protein, 151 aa, Zea Mays
MHYMHDLRLIHTDLKPENILLVSSEYIKVPSTKKNSQDEMHFKCLPQSSAIKLIDFGSTAFDNQDHNSIVSTRHYRAPEIILGLGWSFPCDIWSVGCILVELCSGEALFQTHENLEHLAMMERVLGPLPEHMIRKSRCVICNLNLVDHFIF

SEQ ID NO: 66857 - protein, 155 aa, Zea Mays
MRAGAGPDAGPDAWRRRRPGRLLGRQAVGPIRDGLSALDAGALRRAQGLAAGVSPHARRWRPAPHARAPPPHPAGRHGSRRAGISRITPCGDLADHAGRGSRPSLIRSLGPYQSDSQKWRLGDRSGGGGDDGGAEVRLESGDTEKDQSFSFYFVG

SEQ ID NO: 66858 - protein, 302 aa, Zea Mays
MDPRREELLHELGGMWDEIGEAEEDRRGMLQALEEECLNVYRAKLEKVRQHRAQLKREIADSVAEVAAICATIGEPPSTVHTACSSLQGTGSLKEELGLIAPELAEMRRRRDERRRQFADVAQRVNKIQQEMDLQLGGGGGQGQPHAHVAVDGSDLTTTKLDELRAYLRRLQQEKESRTKKVAELMATLHSSSLVLGMDPRETNSVVHGGVQTQASGISDSAISGLAGGIERLREIKRSRMEKLQDLLGSMLELWNLMDTPAEEQRRFQGVACNIAASEDEITEPGALSMAFIRNVRTWRRR

SEQ ID NO: 66859 - protein, 84 aa, Zea Mays
MDSRGFDSAGRIFSSATEMWTEELGSSITASTAGEAEAAPAPAAAAEASEEVGGDGKRKEWYSKAIAYWAWRRRPRGSWEVMGV

SEQ ID NO: 66860 - protein, 1149 aa, Zea Mays
MVMVPPGEWVPHVEAYVDVSRPAVQHSASVDALAALVNKDKLTLFDLVSKMDLYLTTTDHIVRSRGILLLGETLSRISFKYLDVITITTLSDFFISRLTDMFIFISGIKLVNVRRAGLSDWQAIRGALVGCLALLHRKHGVGCIVIADVKRLVESFLQNVPVQSLAAADRKLCFEILSCILDRYPEAVKQMDGEQLYGICEAIDEEKDPECLMLSFHVVEVVMKLFPDPSGLAAQFAGDVFEILSKYFPVYFTHGVGNGLDTTREDLSRALMHAFCSTQYFEPFVIPLLLDKLSSSLPLAKIDSLKYLDKCIRFYGADRMVRHASAVWYKLKEVIFNLSSDQLLISEALNCLKTAIMYTDSSDKDLFINLILLDEDIVNKIHSVSSVEKTILSSLEDLAQLHALGSVISILAESSTYFCTRVLQEHFAHLVDIVGTKADYESWQLNNCNGSSSAPVNYGALYLSVQLLSSCREVALVSYEDFSSVKLAKGSWWLILQKKLEQLIHLLRSIFAIASQSMQPNFRQEYVSCAVKGLLTLATFPEQCSPLPANAYEDILLMFTSIIINKFENLDLWRLSLKALASIGSSIAKFHASEREVVYYRTVVDKIVSLAESYDTSMPLGLRLEASYEVGTAGLNYMLRVAKSLEVAVVTNISESEANGRMECADHVAHLFECYSNRVLPWLLASGGVNELALSFALHLLDETEDLTVLDRISSQGLLDSLMTGMKLLVGVCTEEQQSLIVQKAHSTISSMLSLPMELMTDRLLPVDELVPLHSVSETALISMFSSIIIGLRPQTPVPDMMVMIKLFTVFLLNGKMPAAYALASIFNKYLHNPEFSHENQMDKILDDILERCFSTVLANSCSKTSQSCAGTSDVNFSDVSSRNKLSKINILSSLAWIGKGLLMRGDEKVKDISMFLLKILFSDEILSTVPSHQEEPYGGDSSDTSLAISAASAFHVMMSDSEMCLNKKFHARIKPLYKQRFFSIMMPIFLSKIKETTVVTTKLALYRAFGHIISNAPVPAVITEAHQILLVMVDSLAKLSMDVGDKDLVYSLLLVFSGMLMDEKGKECILDNIQITISVLTELVSYPHMMVVRETALQCLVAFSTFPHSKIYPVRRKVVQAAVRALDDKKRAVRRVAVRCRHTWQSFT

SEQ ID NO: 66861 - protein, 247 aa, Zea Mays
MGQSYVTAGKHEETPEAFPLPRGVAIVRADAGWAHCVAITDEGDVYTWGWKECVPTGRVIGDQSSVGTKEKDERQMAMATDQGVSPRSQVSRTSSGAASGPSESRGTDDSTKRRRLSSAKHGPESSTSSDESLSAPPCVVTFNTGVKIVSVAAGGRHTLALSDLGQVWGWGYGGEGQLGLGSRIRTVSSPHPVPCIESALYSKDRPSAMKGNKAAEGHVSKVLGNCVRAIACGGRHSAAVTGHLYIF

SEQ ID NO: 66862 - protein, 280 aa, Zea Mays
MLSGVDHDVPDGIGMARLAWTRLPTADGEGAGPSTSEAADDELLSGAAIESLDYEVIENYAYREEQAQRSKFWVPYYVMLKWLFALLIGVGTGLAAIFINLAVENFSGWKYTATFAIIKHSYFVGFFVYTVFNLALVFSSVYIVTNFAPAAAGSGIPEIKGYLNGVDTHGILLFRTLVGKIFGSIGSVGGGLALGKEGPLVHTGACIASLLGQGGSAKYHLSSRWVRIFESDRDRRDLVTCGCAAGVAAAFRAPVGGVLFALEEVTSCYSFSCWQQILQY

SEQ ID NO: 66863 - protein, 222 aa, Zea Mays
MLDFLDEPEDSKRRKQAGVYASYMFGPEGKRVKVILLDTRYHRDPLLSDGTILGDPQWQWLERELHGPQSEITIIGSSIQVVSNLSATTGPLFYVESWARFPRERERLFRLIDSSKRPGVLFISGDVHFGEITRFDCGAEYPSYDVTSSGLTQSVENSVPEVFQPLMRLLAILTPTTMRVLSPNCQYKSCTIGTILSWVEPYKYESTSVDNLFCFTEFLSFF

SEQ ID NO: 66864 - protein, 388 aa, Zea Mays
MAVDPRQVVAGFLTLSMFVMLGNMIKHDHFSPVTEEMGLKATGARSNTMKLDNNAEMNSVDMAGVEDLMDTIEEVKPCWTKPSPKNQPSNGFVTFSLTMGPEYHISQITDAVVVARYLGATFVLPDIRGNELGNKRKFQDMYNVDKFVRSLDGVVEVIDEIPDEVSAKKPAVIRVPNRVTESFIMDTIQPIFKKNKYLRLAVIFSSVSLRPKETSNKDLDATACLAMFSGLELKHEYSEVARKMLDRLQELSKKSDGKVLAIDLRTDLLEKKSCKTTSGARRKGCYNPNEVLAFLRSVGFSANTTIYLTETWWHKGLNDLKEEFPNTYTKDDIMPAENKGEFLKSSNADLASALDLEICSQSDVFIPAVAGLFYGHVTEVIFLNVVIF

SEQ ID NO: 66865 - protein, 163 aa, Zea Mays
MVRVPWATNFNSTAAAVGKSLTSSSTRAHYLAPPHSATGRHEGASAGYCCNLFQVPVHVLLFRTDGIHGIQVAAHVQVQCAEGVHLILWGKKIQIRNNKISRDVKGMSSRCLVLGQVDSIFEHPLCGSSRASCLSSRGVVSGPKEAHGGAAAATAMGPPRGIR

SEQ ID NO: 66866 - protein, 329 aa, Zea Mays
MAGVHTPGSGYVLLHHVMGETGGQRGVWAYVQGGMGSVSSAISKAALEAGVQIVTNAEVSQVMVNETSGMVEGVALVDGTEVHSPVVLSNATPYKTFVDLVPSSVLPEDFLCAIKAADYSSATTKINVAVDRLPQFQCCNTNLEGGPEHMGTIHIGSESMEEIDVAYREAADGISSKRPVIEMTIPSVLDKTISPPGQHVINLFVQYTPYKLSEGSWQDSNVRKAFAERCFSLIDEYAPGFSSSVVGYDMLTPPDLEREFGLTGGNIFHGAMGLDSLFLMRPAKGWSDYRTPVKGLYLCGSGAHPGGGVMGAPGRNAAAVVLEDHVKTK

SEQ ID NO: 66867 - protein, 121 aa, Zea Mays
MDGHWVISHLLSEHDGAARSVAAAGRGSRRRGRCWPSIAAAVLPGSPSKSPSKQSLRVGHGSDIEALSLSARQGALGDQIPPGLWQWEKLAQMDEERGSRRSAFIHLMGRVRLPESSDGSV

SEQ ID NO: 66868 - protein, 519 aa, Zea Mays
MGIQGNKAATHEHDFLSLYAAAAAAAAAKDAPLLLHDSKTPPPSQGNFLLKTHDFLQPFDQKPGAPPEPSPLPAPAAEIRHRQQVAVAKQRALPLPLPGGVGTFSISPAPVSVALPSAVVKSEPPPFVLWGQPAATLQPGARGHQQQWALPFAGSLQVSPPPQQAQPDRKGRGGGGVMDSGSRSSGGAGFDDEDGLTTRREVSSSLQDLAVRVDWKGGSCSDGGTNQGPNTPRSKHSATEQRRRSKINDRFQILRELLPHNDQKRDKATFLLEVIEYIRFLQEKAQKYEATFPEWNQENPTMLPWSNMYFRSFWKNAQSKGQIPGDSPPDPSHFVRNGSSPGSNFTGKLDDNHTSAAASGALDQAETNHVASGCYRSSETPANITNNAISQSQPQWTGPSPVDDSAVKSEMLNSQELAIDEGMISVSSTYSQELLISLSHALQSSGVDLSQTSISVQINLGKRAGKRSASAGGVSSNSKEPPADPASSNELGGHHVTTLGASADGLLPHATKRHKRDNS

SEQ ID NO: 66869 - protein, 1397 aa, Zea Mays
MASLLSSPDDSKSLSVTTSSLFLSSIASLPSSHAFSIFTSASTPLPPVPVSVPPAALIPGSRFLVDAFRHAGNFSVAYFLSHFHSDHYSGLGPSWRRGLVFCSAPTARLVSSVLSVPPQLVVSLDIGVRITVDGWGVTAVDANHCPGAVQFLFASPGPRAERYVHTGDFRYTESMTRDPNLLEFVRADAVFLDTTYCNPKFTFPSQEDSVDYIVNAIKRVKEESSVSGERVLCLIATYAVGKEKILLEVAQRCGCSIHVDSRKMKILTLLGFGGKNSVFTEDATGTDVHVLGWNLLGETSPYFQPNFVKLKEIMMERGYAKAVGFVPTGWMYETKKEGFAVRVKDSLEIHLVPYSEHSSYNELRDYVKFLHPKSVIPTAGVDAGKLDSKEAVALQKHFAGLVDETANKQEFLMAFHRRSIDATRSCKDVVVNCSSQLDGEDAALLPAISSASEQQDKLMENTMQETLKELSDFLPSWVSQEQITDLLMSSEGDVVKAASIFFERERDFFEEANVSCNGTPKTEKNHSSNHGSSADVSSQQESSLFSQKPVEYSAKLVNLSPMRMKPNTPKKVNKRGSSNTNKPKKKGRLTSSTESGGRKQSTITNYFIRATEAAFKRCRPERVTVEAHQNNVENSDQLADTEKTQDQIVDQLLQIVDGSMSREYAVYLLEKANGDVAVAVDIFYSSSEGNNVIEVDKNIMLQNAQGETADNCSETDMASGYSQATPKMSNLHVGTSLAHGDSANTSLLIEKYLPIEHACWIAGQPAPYLHLARTFDLVEKEKGKIKTIAIFCNMFRSLLALSPDDVLPAVYLCTNKISPDHENMELNIGGSLVVTTLEESLGTSRSKIHEMYKTYGDLGTVAQECRQNQTLIAPPRSLSICDVYSTLRKLSAISGSGSAGRRKNLVLHLIRSCRETEMKFLVRTLVRNLRIGAMMKTILPALAHAVVFDRNCAADPAVSLEGIKSQLQSLSTEVAEAYNVTPNLDLLIPSLLREGTAFSASSLAMVPGTPIPPMLARITNGLTQSLKAFHGRSFTCEYKYDGQRAQIHKALDGSVRIFSRQMKESTSRFPDLVNMIKELCKPEVSSFILDAEVVGINRKKGNELMSFQELSSRERGNKHSSISIENIKVDICVFVFDIMFHDGERLLDCPLRQRRKYIHDLFHEKPGYFELAQQLNIEACEASPDNSSTLARMDTFFRNACQSSCEGIMLKTLDVDAGYSASKRCDSWLKVKRDYVQGLGDSLDLVPIGAWYGNGRKAGWYSPFLMACYNPETEEFQSVCRVMSGFSDEFYKEMKEFYSGERILPKKPVYYKTDEQPELWFTAEQIWEIRGADLTLSPVHHAAIGLVHPSRGISVRMPRYIRSVPDRSPEDCGTAADIASMFKAQTRKMDVSSEGQE

SEQ ID NO: 66870 - protein, 1526 aa, Zea Mays
MSNGYQHLNTNISQNSTTNNVESTMGSVGVQRQLSHMIPTPGFSNQQNVPSNPDYSNGTGYFNGESAVAPHMQHQKQFPSNHNSNQIQHIGGHNNSGIHSSLLDNSSAYGLSDGHMNGGIGVHGSNMQLTNRTTAPEAYMNISSYGNSPKPMQQQFNQHPQQRIPTSVDMAGSGSFYAIGSTPLTTANSQSMNVANLQSRSSMNQMLVSNQLNIQSVQQQSQIKNGPLDQTEKVNFQSTQLTHDQLLHQHPMSQHQVQPNSQFIQNQYHINQQQPNSQHQQAMLRNNSLKQSQMASNHSMQLPEQGTLPHTELVSSQASDPADLPNFQGQYQQRNALDNVKGGQMLGHLSSSQNFLPSASHGSQQLLPSNPQLDNGSNAVSYVLKGSQTEQMLLSQWQPQTMEKAPVATNSSLEKQVQEDCCQRIMSQDGVQQPFSSDWCLSNGTLASVDPAVPKPTAGGFGQVKRNIHYLRQIKWLLLLFHAKTCTYPVGSCKFNGCVQVQELLNHFQNCQRKDCSYRSCTKSKAMSHHYKTCVDEQCPVCSVVRKFLRQSTEQASKQKTLESRKLAQQNVPQRIMNGIEGDRMDVDPMSAEAFEDQPSVPKRLKMHLPSLSGPENDISVVSNHHVNPGFLLQEAQPEQLEHNNRTTYLKREVDAKADIRAPQKPIKISYDIDENVTTSRHNVIPGVPSEMDSHIKQENLSVNKETSETALEVKNETNDLTDATVTKSGKPKIKGVSMIELFYPDEVDVHIDSLKLWVGQSKAKAEKNQAIGHSENENSCQLCRVEKLTFEPPPMYCSPCGARIKRNAPYYAVGTGDTRHYLCIPCYNESRGETIEVEGQTFPKAKLEKKRNEEETEEWWVQCDKCQCWQHQICALFNGRRNGGGQAEYTCPHCYVEEVKCGLRKPLPQSAVLGAKDLPRTVLSDHIEDRLFKRLKQEKQDRAAAAGKSIDEIPGAEGLVVRVVSSVDKKLEVKPRFLEIFQEDNYPTEFPYKSKAVLLFQRIEGVEVCLFGMYVQEFGAECSSPNQRRVYLSYLDSVKYFRPEIKTVSGEALRTYVYHEILIGYLEYCKLRGFTSCYIWACPPLKGEDYILYCHPEIQKTPKSDKLREWYLSMLRKASKEEIVVELTNLYDHFFITMGGCKAKVTASRLPYFDGDYWPGAAEDMINQLRQEEDDRKLQKKSKTKKIITKRALKAAGHTDLSGNASKDAMLMQKLGETIYPMKEDFIMVHLQYSCSHCCTLMVSGRRWVCHQCRSFYICDKCYDAEQQLEDRERHPCNSRDTHMLHPVDIVGVPKDTKDRDDILESEFFDTRQAFLSLCQGNHYQYDTLRRAKHSSIMVLYHLHNPTAPAFVTTCNACCHDIETGQSWRCEICPDFDVCNACFQKGAVTHPHKLTNHPSAADRDAQNAEARQMRVQQLRKMLDLLVHASMCRSGSCQYPHCRKVKGLFRHGMQCKTRASGGCVLCKKMWYMLQLHARACKDSECKVPRCRDLKEHLRRLQQQSDSRRRAAVNEMMRQRAAEVAAN

SEQ ID NO: 66871 - protein, 1238 aa, Zea Mays
MFSASNSSRSAAVNSINLVQSLALDLRPATVDHKTSRLDLKKSISSIFGTSAEDSTSLPSLGRNLPNAIEEIRRMRSNLNDNSNKARERSRAFGGAMAKIDKLCPNIVRKRSRGDSSSNERSSVLSSGGVTPKNVPQSHLNADDMEAGLQREERTKNAGQNRRIRTSMVEGKLGAVVRAVSPSLQVAGLIWQCGLVAVFSMMDARTAGPSRGPGPTDRISDPGKATNGSSAVPEEKIRGLATTIDGWEKPKMKKKRSTIKADMSLAGVLRTVDVDRESKQGMQHKFTNDGRARMTSSSFRSGTVASGTTKADLLSTQNGLVMRPLNRSDQDNGFHPTNKRERQAALDKETPNPRTINKPNEDDSGCNIASLPKANGSARGPRSNSGSILKSYPNIHRSQASSDDWEHPSGTNKLISAGGSGIHKRTKSTHSLSPPIQWGGQRPQKISRSARKSNLVPIITTDSALVPGSLDSPVNEDCAGLPRRASVNSLQQTKRGDHGLSTGPEGNEPVVAEKKLRDKGKRAGELDDGHGSGFQKIAMLGHPSKRNKLPADEDIGDALRRQARVVPGFTLTRPGTPVSIDKLENAPITKQRSVRTVSERTESKSGRPLMKKISERKSNARPRHTSSSVQSDSPVQSEDDHEELLASANAALRSACASTFWRQVEPFFAFLTAEDITYLSQQIHLPDDSSSSRSMEGGECQKYKGGLEYISHPSTPAASNKDDHAALPNGFGLNQLDNDIGVGWEASCIEPILDQLVHGIGVPGWSSVGQRLIQALIDEDRIDSITNNTYISEGYAFDTHEIHFDGGGWKPHSNNYKLEPLANFEASRRGPNGLTMDSDWKYNDVSNRSGNVMDKTKVWPEFQYSEMCFNDRIIIELSEVGVSIEPVPDLAQSEDEDINAEICKLEGQLRKEVVEKKNLLLKLDGIVATAKESQHREFSRLAMDRLLLRAYEKYMAFCGPNVSSSKNVNRTGKHAALSFVKRVLVRCQNYEEAGTSCFDEPIFKDMFLSATSHRRSLDTASQDNNTTARPVHRAGAPDASRGSSHPTDLSFAKEDPWTNNVKQRELLLDEVVGSITGGALRTSSSVLGISLVSNTKGKRSEREGKGHNRDSLRSGRPSPSNAKGERKNKTKLRQKAANISAPSGGLQLPAKTTPPSSGNGKEESAAAAAAAAARHGGDPAANASNDAEMPDLANLELPGLDADFGGWLNLDDDDALQDLDLMGLEIPMDDINEINLMI

SEQ ID NO: 66872 - protein, 266 aa, Zea Mays
MRVESSGGLPLPELERQQAGAKRRRRRARAAAAAAAPRTMAAPATAVQRLFEACREVFTGAGPGAVPPPAGVERIKSVLDSITAADVRLTSSMPYFRRVDPYGTPKITYLHLYKCEAFSIGIFCLPSRGVIPLHNHPGMTVFSKLLFGAMHIKSYDWAASQQDTPDVQLQAGPRLAKVKVDGILTAPHETAVLYPEDGVLDVLGPPYDDGSGRHCQYYNVRSSAISVAGSTILPGGDRYEWLEESEPSRDFYLVGSTYMGPKILDH

SEQ ID NO: 66873 - protein, 693 aa, Zea Mays
MKISELSPEYRQPPPPPQSALLTDLNRVVADVEALDASDSSSPEKLAADLRCLLTNLASAASSSSSGLNGAFRLKVWNLAFRLWNACVDRANHFAARGAEAAVAETEIRQAAPELLLVAGLPEGVPNAAAKAASLFHRTGLFWLDLGRADLASACFEKATPLVCAADTEEDRDILLDLNLARARAASSEGKQALAVALLSRSKPLAAASSVGVKALAEGYLLLGKAALATKSPDPAIDASSLLTEALDLCERAAASPCCTTPTSPRSSPATPNLQVIKDQCLRCLAAERLQANDYEGTLRCIMVSRASPGLGKEHSSIAFMALRACLSSGKLLEAERELDRLMANAEAPEFVCVSAAELYVASVGLDAALKVLVALAARCRASASAVAVRVLKTVVQGAGGEAGHARAIAELVSDERVVALFNGPANAHERGTMHALLWTCGTVHFHAKNYEISADLIERSMLYVSRDEESRSRRANCFRVLCLCHMALRHLDRAQEFIIEAEKVEPSIHCAFLKFKILLQKKEEEDAIKLMKAMMGYVDFNPQFLILSIHEAIGCKSFCLYSAGKPMPMSEATVLRNLITLLLREPGSEAEILKYSRRAKLRMGELGLEAFFGKETVLKEDKYDYCSEFFELAAEFFSSGNGEDGANLLLICKSLIMSVSSMLLADDLNKSQLSDSDLKRGIEMLRRAGKLW

SEQ ID NO: 66874 - protein, 1689 aa, Zea Mays
MRTRFLTADYFAPSPSAAASSDLAIALASLPFPSLPVPTLPPEPHLTPFPFSADFLPAVSVAGDDLDSLPFDSAVTELLTAVIPQPLPVPDIPVADEGLDDYLYGRGVYGNAFSSTDPVAFRVFKGLEDSHTNGDKEEGLNLEGSAVTKRGDLLEALFEVPELDFLSDFIDIDTETRIPYAAEFAESIYQVEVPVKHDDDDNCPYAKDSYCMEIIGLENGQIIPQLEVSMNSWELDECPAKTMISNFFHSIIEHLFDGAQVCLPSFGSNEFLRPCDIDIFALVCKDAPLVEYQADKPITANDVAVMDFVRINDGILLDKKSALYPLKPDGTCSHFPCFILFEEVKIIDFPSKDAFKSLVLIQSEKAEMNTSEEIFKDDFDQAKHFYESVVSSELALVDDTFKSLPTPILHDDKAMRSMLPPIEEVLCSLKPLPLSAADGIYLDWHLLSEGPCNRESCSTYESMVEEVKPCSLNSELQISGQQMPALDIGFLEDFPRSAKPQHEDKQNEVYVPGPISHDPSANLEATQKNMLENVVRGHTHMDKLSSEKESSLFESTSQSNGLSFYLNVRNGTNKVRKAEDISTLDIPSSKQAASISTRPKVNKLIEIHPVNLSDIIQGLINDIHVSYTSALQESAYLRHSFSDGQGLSISKQKLLELITGEGSEGLYSCCKYEDKMELIVLYALKQVAYYLCFFGLHAAYLYVGNLTGTFEIIPERLRHLQRCIGEARLKAEKQLQESHPSLSVIETILRSNTQIDQKILIVSDRAFWLPLGQKLTAMKITSVEFGTYHSTTYSDAVIETNSKRCMLQELWKSDCILLDNKNIPASFPFSEFCMIVEYGGPNKSSILLSLAPKLDGLPPLHFLYVTVDGEGLPNALVEDNHTDPDLKSTLDAALHTLQKDLQEKMNKMRIVDSLNFIPATNQQQHLQTNHLTVDSSKKIPADVQLHNAGNLNEKNIVDSHNLVTATEQPNGLNQITIANLQNFVPVVEKSSSTVVSANVIKAPQVNQSAGVLPLSEKMDSTKAGRLPGPEVAIVVNTGNHGKNMLFSRRSSYQQILALERGGMQVVERDVDLPVDLILTAAVCLLWYDTRTSGSSELTISAGTSGITNFLEDIATNVLMALSFCFCGCIMVFEGENHLLSAVMEASDSLYASAVNLDMNLQLFFSEMPKSTDQIILNCIRNAVRINQALCPQITESESLVESFLTAFPSVSPLSAHMILSSGSLMDFLRWSHEQRTQAVEKYHLPPQSISLFSALCKFGELGESKSVMTECSSVDSDISSTLLQSPRKKKRRAAQDFSVAVSNPAFPNPCTQLHGDCVENDKIFSPPKLRKFFHIEDTMSDLPEVFMIDQRLNMGSEGVSCQPRKYDVDAVTGINIIDDDFINELTPNFRTYNERTSSMVDTCNFSKQSELGAKQPIRSSFPASLPSVCTTSSHPTFPSALEINNDPGSWDVPCSINQTWAGHVHGDFATSSGRNDQGVRYHEPRQEIMQTPVPSLSFLKQDFGCHGASQGSGWEIDYLRRMNENRKACREQSRCSVSTQPNSRTRDGSSRILSAPPIESFRYERNKDAPFRDQNRSDIESFRYRRDINTLLRDQSPSNEVRRYGKGRGGTKAQSHRVRKDFKAQPSINHEKSIMPSIEPTWTPLDKRARQKLTFATYGNEKQSKLVWRHQSSPGVGCGFPKKYHEEGT

SEQ ID NO: 66875 - protein, 1232 aa, Zea Mays
MDIQIWYAIFSSLSGAFVGLFAHLGEIRDMKQLRLRFQFFASAMSFNIMPEEQQVNESFLPSRFRNFWQRLQLRYGFSRSFRKIESNQVEARRFALVWNEIISKFREEDIVSDREVELLELPPELWNVRVIRWPCFLLCNELSLALGQAKEVTGSDRRLWRKICKNDYRRCAVIEVYDSAKHMLLEIIKEGTEEHGIVTQLFSDFDGSMKMEKFTVEYKMTELHNIHTRLVALLVLILKPTKDVTKIVNALQTLYDVVVRDFQAEKRSMEQLRSEGLAQSRPTRLLFVDAVVLPEEDNATFYKQVRRMHTILTSRDSMINVPQNLEARRRIAFFSNSLFMNIPRATQVEKMMSFSVLTPYYKEEVLYSKDQLYKENEDGISILYYLKQIYPDEWEYFVERMKREGMSDINELYSEKERLRDLRHWVSYRGQTLSRTVRGMMYYYEALKMLTFLDSASEHDLKTGSRELATMGSSRIGSSRHDGVAGGSGYYSRASSSHALSRASSSVSSLFKGSEYGTVLMKYTYVVACQVYGQQKAKNDPNAFEILELMKNYEALRVAYVDERQINGNEKEFFSVLVKYDQQLQREVEIYRVKLPGELKIGEGKPENQNHALIFTRGDAVQTIDMNQDNYFEEALKMRNLLEEFNRYYGIRKPKILGVREHVFTGSVSSLAWFMSAQETSFVTLGQRVLADPLKVRMHYGHPDVFDRLWFLGRGGISKASRIINISEDIFAGFNCTLRGGNVTHHEYIQVGKGRDVGLNQVSMFEAKVASGNGEQTLSRDVYRLGHRLDFFRMLSFFYTTVGFYFNTMMVVLTVYAFVWGRFYLALSGLEDYINKNTSSSNNAALGAVLNQQFVIQLGLFTALPMIIENSLEHGFLTAVWDFMKMQLQFASVFYTFSMGTKTHYYGRTILHGGAKYRATGRGFVVEHKKFAENYRLYARSHFIKAIELGVILTLYASYGSASGNTLVYILLTLSSWFLVSSWILAPFIFNPSGFDWLKNFNDFEDFLNWIWFRGGISVQSDQSWEKWWEDETDHLRTTGLWGCILEIILDLRFFFFQYAIVYRLHIADNSRSILVYLLSWTCILLAFVALVTVAYFRDRYSAKKHIRYRLVQAIIVGSTVAAIVVLLEFTKFQFVDTFTSLLAFLPTGWGIISIALVFKPYLRRSEMVWKTVVTVARLYDILFGVIVMAPVAVLSWLPGLQEMQTRILFNEAFSRGLHISQIITGKKAHVF

SEQ ID NO: 66876 - protein, 420 aa, Zea Mays
MLFSTPKVHIIIDFHCPLSSHSPEAVVATELFVDLLVDYLNAYAYDAQIAGLFYSIYVTSAGFQVSLGGYNDKMRVLLNAILVQIVKFEVKPNRFSALKETSVKDYQNFNFRQPYSQASYYVSLILGDKKWPVAEKLEALSKLESDYFAKFVPHLLSKTFLECYVQGNIEPSEAKSIVEEIENTIFTTPNSLFKSMSPSEYLIKRVIMLENDLKCYYQTEGLNQKNENSSVIQYIQVHQDDAILNIKLELFSLIAKQPAFNQLRTVEQLGYITSLSLRSDYGVLALQVVIQSTVKRNVKSLIDSKLEKFKNLWEESHFYWGEIEAGTLKFDRVESEVAMLRELKKEEFIEYFNQYIKVDAPQRRTLSVQVFGGNHLVEFKKAINEANPPKMYRITDIFGFKRSRPLYSSLKGGPGRITMD

SEQ ID NO: 66877 - protein, 888 aa, Zea Mays
MPQVAAPLRLLLPLSQTLAAPAPLLHHSRRLLSSCPASLSRAAGLRALAYRRRRHTEPRRGTSTLGKAPAKEEMDKEVAFNRKRAEGKDGGKRGSMELKTRRLNPVNTTCYVQILGTGMDTQDTSPSILLFFDKQRFIFNAGEGLQRFCTEHKIKLSKIDHIFLTRVCSETAGGLPGLVLTLAGIGDEGMSVNIWGPSDLDFLAGAMRSFIPNRAMLHTHSFGADRNASSPQSTDSVIVLDDEVVRVSAMFVKPKYNNGTGSSNDSDMKPGDTAIVYACELPEIKGKFDPSKAAALGLRPGPKYRELQLGNSVQSDQFDEMVHPSDVLGPSIPGPTVLLVDCPTQYHMPELFSLHPLSCFYEDSPEQSGKKVNCIIHLGPSPVTRSVDYQNWMKKFGATQHIMAGHEIKNMEIPILKGSARISSHLNFVCPQLFPSSGFWSEQPSNDVMENDKSVSSEACGSVSAQNLLKVCKFWQNNVNDNNILTPTGNHMGEEQWINKKSDKVDDGTLFQEIVLRKHPRDNQEIPCCVEDATREDMEITFLGTGSSQPSKYRNVSSIYINLFERGGILLDCGEGTLGQLKRRFGVNDADEAVKGLRCIWISHIHADHHTGLARILALRSKLLKGVPHKPLLVIGPRPLERFLNAYSTLEHLDMQFLDCRHTLKSSVEAFLSENDTDPATPQLETTMFAPGTRMENYNRKPASPRDTTALANFKEVLQESGLEILYSVPVLHCPQAFGVVLKAMEKANSTGKVIPGWKVVYSGDTRPCPGLIDASRDATVLIHEATFEDSMKDEAIARNHSTTKEAIEVGTSAGAYRIILTHFSQRYPKIPVIDEVDMEKTCIAFDLMSVNLADLPVVPKVLPHLKVLFKDELVVDEAEEVQEAAVY

SEQ ID NO: 66878 - protein, 1029 aa, Zea Mays
MQRSEAQARKASLAESVLAAISELMPSAAAAVDAEHESFMDVGSHLHHGALPTVSVEAQKVQGSPANALHVMEYLAANVDLAKDLVTRCSAIAQQLMDDDLLGITEDLDKVIKNISNELNKMPAATFESSRFAEPAVSGHLQVVRNQHDLFEQQSFDGYSEGDMPMVVAIERPPKRRTLHNSDMPRLVDFLQGMYQESHEIGGQSFGSLPEVAEYVEPLYDSFFCPLTNKVMVDPVTTESGITYDRKAIEDYFDKFTDGSEPVICPVTKMAMQSKTLRSNLPLKSTIAEWITRNEATRVRIARTALSMATTEAMVLEAIHELKVLARLRRKNRDQMHKIGITKFLARLLDHKDALIRCDSLDLLCLLVEDDTGKEIIAKTRAVSRTIKLLSSSSTDERHASISFLLELSKSELLLENIGSTAGSILILTTMKFNSSSDPIAAEKAGEVLENLEKCPKNIKYMAESGYLDPLQRHLVEGPEDVQMEMVSYLGELVQKQEMTINIAGSASEILIKMVCSGNTAIRKATLDVLVQISSHHPNAKTLVDAGAVPVMVEELFIRKIDDEPMGSKTEAAAVLANIVESGLDPEAITVNKEGHVITSKYSVYNFAHMLKCSMPDTLNLSIVRVLLALTALPKPLATVVSVMKEQDSGQTVIELMGSLTESLVIAAMRLLIALSPQMGHTIAEKLCKAPGQPGRLVKSIGLHGRIMERHAMSATLLAKLPYQHIALNLALINQGAMVTVLAKIEEMQRGETRASRHAKAYMEGLMGVLVRLTTTLYDPDVLLAAMDHNLTSVLTDLVRSAGSDEVQRLAAIGLENLSSQSPNLSQPPTEERRPKKKNILRRLREAHAGRVHDNRRPPAHSRVCPVHRGVCSPSTTFCLVEAGAVEGLLCVLESSENGRVVEAALGALCTLMDDAVDVTSGVAVLAEHDAARHVLRALRQHRDDGRRGGGGAAAGETVTRRCFWAVERFLAHGSERCVREVTSDRALPSLLVGAFHKGDAATKQVAESVLRCLHRMPDYSATYESVEL

SEQ ID NO: 66879 - protein, 482 aa, Zea Mays
MEKAFWDVVADSMRGDMPDYCYLVSLVKEIREALEELSPTGWKEEISDNINLEILTQVIIFQLVLWTMVNRDAYLRQIYIFFGGKLLESGSQDRQYLGQILQYSLDKLRKLSSPVKEHEMKKSHDTLLGELVEDSKSNYKDPNSFVLCVIKGLRFTMEELQALKTEVTRARIQLLEPLIKGSGGVEYLQKSFAGRCGSPSDALASLPSTARWIFSLKDVVEEQWNEHVSSLSILPEADHVQTLVATLRTGHAVAGVQSVIPAADNTGLPECRGEILGKLIRIGLLQLISSMEGVERESVPETFMLNWLRLRSVQSKFQQVIVIATSMLVLHQVLASENPKITSSELENATSELFNVLTRLLDNFPDVGTEKIIEAMMYSSTSRSLSDHERMNARKEILTRVFLRSLQTDDTVFKKVSQSVYCAFRAVTLGGSGEKGRMLADASLRRVGATKLTARLVKAAEVLIKAAMVSEQVHGPWYTQLL

SEQ ID NO: 66880 - protein, 101 aa, Zea Mays
MIHAEVHKYMLVDGTCQRYTVSTGTHFIFYVFQLEKTFKTTFSSFVLHMGLVSRHLKEEGNGGVKFGQYIYTSWSIGINVLNLLKFQIILVITLTIRIKSL

SEQ ID NO: 66881 - protein, 129 aa, Zea Mays
MQRLMSVLNVSDNKLKELPESIGGCSSLEEFQANGNAIEDVPASICNLVCLKSLSLNGNKIRQLPQNLLKDCTALQSLSLHDNPITMDQFQQMDGFGEFEARRRKKFDKQIDSGVMMGSTALDEGVDFH

SEQ ID NO: 66882 - protein, 278 aa, Zea Mays
MSFQDLEAGHVRGAPPGGGRRSGRAGGAGAGAGASQAVASGVFQINTAVATFQRLVNTLGTPKDTPDLRDRIHKTRQHITQLVKDTSDKLKQASEADHRVEVSIADAKLAKDFQAVLKEFQKAQRLAAEREAAYAPFISQAGLPQSYNSSEVNNGADRLAEQRTQLLESRRQELVFLDNEIVFNEAIIEERDQGIQEIQHQITEVNEIFKDLAVLVHDQGAMIDDIDSHIENAVVATSQAKGQLSKAAKTQKSNSSLICLLLVIFGVVLLIVIIVLAA

SEQ ID NO: 66883 - protein, 55 aa, Zea Mays
MPTRRRILVWVLLRSHHRGCVLSPSSGTLCRVRETRLSWLMHPLRRRAVRVTSSD

SEQ ID NO: 66884 - protein, 108 aa, Zea Mays
MQACPSAAVPSLTTDSEKKGPVIMEIPLDQIRRPLMRTRANDPVKVQELMDSIRVIGLQVPFLDYCRLMCWRSMGSIMASLDATATRLTSALVSQPSAAKFAVGQRKH

SEQ ID NO: 66885 - protein, 429 aa, Zea Mays
MGCVCGRPSAFDDGQCRATPPPAAKLSAAVRSKEEARKQQQLQLQQHVRAGSGREEALERRRAMMAMAAVCQVRSPVPRAVEAEHVAVGWPPWLVAVAPEAVRGWVPRRAESFEKLDKIGQGTYSNVYRARDLEKEKIVALKKVRFDNLEPESVKFMAREILILRRLDHPNVIKLEGLVTSRMSCSLYLVFEYMEHDLAGLASFPGVKFTESQVKCYMQQLLRGLEHCHSRHILHRDIKGSNLLIDNRGILKIADFGLASFFDPEQRHPLTSRVVTLWYRPPELLLGATNYGVAVDLWSAGCILAELYAGKPIMPGRTEVEQLHKIFKLCGSPSEDYWRKSKLPHATIFKPQHPYARRVPETFKEFPVPALALVDVLLSVDPADRGTASSALQSEFFTTKPYACNPSSLPRYPPSKEFDAKRREEEARR

SEQ ID NO: 66886 - protein, 228 aa, Zea Mays
MHLDMEALREDKSKLEMILEKKTDEEHKLCSRVEDLELQLNKEKEDCQRMSSKTKKLIKAHGRYIKAQEDLKRSQARFERLADLLASDILKPCTKEQGSIGITANEDPYNANEMSPSDQRQNHVSASRKRLISLPTSEEAKTGKRQRENGDDMIPTSENYRPEDALEHLQDSKGTDLPESFTVKKLREGDNDDVGNIVSSSNIFADRCFKGVTKVSRRLARLPCLGAA

SEQ ID NO: 66887 - protein, 327 aa, Zea Mays
MATSPEMLCCYCPAPFKQFLEIVTNMKFDEEPNYAKLISLFDGLIEAPASRQIRIDGALKVGQKRGRLVADLEEDEQPKKKVRLGSPAAQWISVYNARRPMKQRYHYNVADSRLSQHIEKGNDDGLYISSVASSANLWALIMDAGTGFCSQVYELSPVFLHKDWIMEQWEKSYYITAIAGSSNGSSLVVMSKGTPYTQQSYKVSESFPYKWINKKWKEGFHVTSMATAGNRWGVVMSRNSGFSTQVVELDFLYPSEGIHRRWESGYRITSTAATNDQAAFILSMPKRKPMDETQETLRTSAFPSSHVKEKWAKNLYIASICFGRTVC

SEQ ID NO: 66888 - protein, 332 aa, Zea Mays
MSSAGGMDGSPPVAEFQPTVTHGGRFLRYNIFGNLFEITRKYQPPVMPIGRGAYGIVCSVMNFETREMVAIKKIANAFDNHMDAKRTLREIKLMRHLDHENIIGIRDVIPPPIPRAFNDVYIGMEFMETDLHQIIRSGQELSEEHCQYFLYQILRGLKYIHSAGVIHRDLKPSNLLLSANCDLKICDFGLARPSSDSDMMTEYVVTRWYRAPELLLNSTDYSAAIDVWSVGCIFMELIDRRPLFPGRDHMHQMRLITEVIGTPTDDELGFTRNEDARKYMRHLPQFPRRPFASLFPRVQPLALDLIERMLTFNPLQRITGQSVGGSQRAYCT

SEQ ID NO: 66889 - protein, 474 aa, Zea Mays
MHVEDVAELVELIPLRGALVGLPGVNGLSTEQRKRLTIAVELVANPSIIFMDEPTSGLDATAAAIVMRTVRNTVDTGRTVVCTIHQPSIDIFEAFDELFLLKWGGEEIYVGPLGHKSCHLIKYFEGLQGVKKIKDGCNPATWMLEVTTVAQEAILGCNFAEVYRNSYLYRKNKILVSELSTPPPGSKDLYFPTQYSQSFITQCMACLWKQHKSYWRNPSYTANRIFFTALIAFVFGTIFLSLGKKVGKRQDLFDALGSMYAAVLLIGVQNGLTVQPIVDVERTVFYREKAAGMYSALPYAFAQVVIEIPHIFLQTVVYGLIIYTLIGFDWTVQKFFWYMFFMYFTFMYFTFYGMMAVAMTPNSDIAALASTAFYAIWNIFAGFIIPRPRIPIWWRWYSWACPVAWTLYGLVASQFGDITDVKLEDGEIVKDFIDRFFGFTHDHLGYAATAVVGFTVLFSFMFAFSIKVFNFQIR

SEQ ID NO: 66890 - protein, 641 aa, Zea Mays
MVLPQSHLAWTGHLMFNALLMSWIIFSHATWHKGHTLAQTVFTCIYLMRMERTSSHAVLNSFCRILRATCNAVISAVSTARTHEEEDLFTMSFGLPLRDEGDDKCLSILNSVEEIISRQLRACKAQALSKKKTLEGLESLQDNPDLEEDYCRALLCRLRFRKHFYHVIMCMRKPHGRGLELARKHVASCLTELNLMHKSRKFLKSQSSTMVQQSDGNCTTASGCQPVGFDVSLNSRLLSPTPPRAVKVLSWSNAIRYFERLLHDLDVICALSLNPVLDNVLHFIVQFQKTVPDLVPRAFLQTLLVQDGKLYGEYFFSDVISRALSLPDIIGDKEFQMNEFVVQLGQLVINLIKILCTNTAWQRRKLGKSLQDWSTISIQLELALKREFGETRNVLQNENMCMRVSKQLLIWTQEHAYWVAFRFLTLGFELDLYSPGEYSMVYWYMYVVLTKLIEKMQLRVLASSETSRRKGKKKKDHLKDSARDMAFSSSCLLPQCYLLLSEGLSMMLAVLRNESRSFQLPSIFNTEQERFMQHFDLLLKARVPEHISFYSFKESSSRAGMSDLVKYNFFKEIQKIVPSLRGSFASEPEKLAEVRRIEQVAEHNRIALNIISQVGAGDPSLRVSFEFTHHPHFAVAVVKRS

SEQ ID NO: 66891 - protein, 125 aa, Zea Mays
MVAAAAAVRPVSFRRLGVLLRAPLPCGLTTSRVAAPFPRRTDSMKICQLQLTATRFSKQNNSGEDDELLSELKDKVAYKVIFLYANNLGTKNYDDVYYSGMQWRTSPLLPCMVLEQSSLSGYPWS

SEQ ID NO: 66892 - protein, 241 aa, Zea Mays
MATTTDLGFEATELRLGLPGGGGGGEPALGGEGRSSSSASGKRGFAETIDLKLKLEPAAVVEAEEEEEDHGVAVALEKEEEAGKMKRSPSQSSVAAAAAAVLADPAEKPRAAKAQVVGWPPVRSFRKNIMSVQSDKGAAAANGDKSSPAAGGGAAFVKVSLDGAPYLRKVDLKMYRSYQQLSKALENMFSSFTIGSGSCGSQGMNGMNESKLVDLLNGSEYVPTYEDKDGDWMLVGDVPWE

SEQ ID NO: 66893 - protein, 89 aa, Zea Mays
MDLLRSLNQKIASQCLHLYSSLPRYDLSVYDSFSCWIYSDGKSTIPLWEFKNLCMQIFLLEGSQFLDIFLFLILSPRLILLSSPKKLLL

SEQ ID NO: 66894 - protein, 682 aa, Zea Mays
MEQRLGATYQWWSWSHSKSCESVERKGREWLDEAGLASGLQLVLDMLVTGFCGVTVAEKRPMMQSRDVDKYLNKADNINHVLMNSGDISKIGGHCLHGTHGLGTRLDSDAQSSSPGENMNNKIRRPIEICTFDAQGRCKKGKSCISLHEREGFGSAKTGLLAPAGSGNHRGMSFLTRAICEQQLAITEPTSYCSLLCIGSEGGSQVQHISDLKVHQFKDSEGLSKDEMCRNLIYAFGKDNQMSVHLAGKHSSPIPGVSQRMPVSIGHSLAQNPLVHEKNNKRFMGHHIDVAAENYLDAGGTYPRLDGGIFQFDIDKESSVSDSHVSRTYLSDYPYKSFGLSISSDPLQLSEKLSAYGGVTNTIPNIHQKEHHSCHASYSSHSLTGSRNPCFATSEHTFGSPSLLATSHLGIQSHHLFTSDIEKADLHRCLDVGKGYGTSSSGPALLVSSKPEPSMTPVGPHSPIKNEVWETSVPFVPSFSFPDSTTASESQYDPFVDYVEPPKVGNTNNLKPSTISCNITSQHTDQYAVTDKSLNCNDKLTRNITAKGSNEPAYFIAPDRGCSSSLDDTIKVKACDRKKDAVDYNEKTRDFRFHLAEHIKELVKPIWKKGNLSKDAHKLVVRKSVEKVVDSIEPNQVPTTEELITKYIATCGPKIEKLVKAYVDRHSTCHPTIKYSSSEMGA

SEQ ID NO: 66895 - protein, 987 aa, Zea Mays
MDVDSRMTTESDSDSDAAAAAARGGNAGGSGSGSETSSSSAPSTPGTPGTPAAAPNPAPVGAVGPRPAPGYTAVNAVIEKKEDGPGCRCGHTLTAVPAVGEEGAPGYIGPRLILFGGATALEGNSATPPSSAGSAGIRLAGATADVHCYDVSLNKWSRLTPLGEPPSPRAAHVATAVGTMVVIQGGIGPAGLSAEDLHVLDLTQQRPRWHRVVVQGPGPGPRYGHVMALVGQRFLLTIGGNDGKRPLADVWALDTAAKPYEWRKLEPEGEGPPPCMYATASARSDGLLLLCGGRDANSVPLSSAYGLAKHRDGRWEWAIAPGVSPSPRYQHAAVFVNARLHVSGGALGGGRMVEDSSSVAVLDTAAGVWCDTKSVVTTPRTGRFSADAAGGDAAVELTRRCRHAAAAVNDLIFIYGGLRGGVLLDDLLVAEDLAAAETTNAANHAAANAAATNLQAGRTPGKYAYNEQTRQTITESGPDGAVVLGTPVAPPVNGDMYTDISPENAVLQGQRRLSKGVDYLVEASAAEAEAISATLAAVKARQVNGEMEQLPDKEQSPDSTSTSKHSSLIKLDSALSNNLAAPPGVRLHHRAVVVAAETGGALGGMVRQLSIDQFENEGRRVSYGTPENATAARKLLDRQMSINSVPKKVIASLLKPRGWKPPVRRQFLLDCNEIADLCDSAERIFSSEPSVLQLKAPVKIFGDLHGQFGDLMRLFDEYGAPSTAGDIAYIDYLFLGDYVDRGQHSLETITLLLALKVEYPQNVHLIRGNHEAADINALFGFRIECIERMGERDGIWTWHRMNRLFNWLPLAALIEKKIVCMHGGIGRSINHVEQIENLQRPITMEAGSVVLMDLLWSDPTENDSVEGLRPNARGPGLVTFGPDRVMEFCNNNDLQLIVRAHECVMDGFERFAQGTANNAGAILVLGRDLVVVPKLIHPLPPAITSREASPDHIEDTWMQELNANRPPTPTRGRPQAVANDKGSLAWI

SEQ ID NO: 66896 - protein, 588 aa, Zea Mays
MSVIQSSCSHTWDAFQLAHASFRLYCVRNNHVQSVKLGPCLLGDAPKTNVIPAGDEVNEEQGCSEGFPDIRIYDEDVSMKFLLCGVPCTLDACLLGALEDGLNALLNIEIRASKLQNRASAHPPLQAEDLPHGVVTMRCDITTCSSAHVSFLVSCSAQTCFDDQLLGSRIKNEIIEKRQLVRALLNNEDNKPSSYEPLPSMCVACGASTFEVWITMPKWAAQVLKHLAPEISYRSLVALGIAWVNGTPVSSFDRQDADRLLFFCSNQCGDQAIQNGSYAHVSSWSAPLTKDRTTGSLESKQMSFGAKGVVGDNTISLSSLKPRLKPATMRPLPHSRKQQMHPFMGFPQSIIHDASQVKPSLPAPPVKHNAVPVTAVTPRKSSSGSPSSWSRVQLPIPLNPLPIKKHECNRLPIHSCSEEDFLKDVMQFLLQRGHIRLVPQGGLAEFPDAVLNSKRLDLYNLYKEVVYRGGFYVGNGINWKGQIFSKMHNHTVTNKMTGVGNTLKRHYETYLLEYELAHDDIDGECCLICHSGALGDWVNCGLCGEWAHLGCDRRKGLSTFKDYSKADGMEYICPQCSLAKYKPPLPAP

SEQ ID NO: 66897 - protein, 142 aa, Zea Mays
MGRLAQGTKVLAEGGYEKIFKQTFEVLPDEQLKICFACYLSTSAGPVMGVLYISTAKIAFCSDNPLSYKAGNKTEWSYYKVVIPLHQLRAANPSVSKLSPAEKYIQVVSIEGHEFWFMGFLMYDKAATSLQEALASARELQP

SEQ ID NO: 66898 - protein, 1859 aa, Zea Mays
METRSRKRAEASSSSATSSSRSSKRSRHNPNPNPPAGPSPAPKLVPLPPRTRRSTAVNPLPPMDSSGDNNSNPVPPPRRRGRPSNTDKGKEQQQPEPSHSSRVREAERLLGLGFEGIDDDEDSGFGAGAIPHSLTSASTALQGLLRKLGAGLDDILPSSALSAAAAAASSSSASGQLSGRLKNILAGLRADGEDGRQVEALTQLCEMLSIGTEESLGAFSVDSFVPVLVGLLNHESNPDIMLLAARALTHLCDVLPSSCSAVVHYGAVPCFCARLLTIEYMDLAEQSLQALKKISLEHPTACLRAGALMAVLSYLDFFSTGVQRVALSTAANMCRKLPSDASDFVLEHASVCLTRIAESFSPFPEKLDELCSHGLVAQAASLVSVSNSAGQASLSTSTYTGVIRLLSICASGSPLAAKTLLLLGISGILKDILSGSGLVAGTTVSPALTRPADQMNEIVKLADELLPSLPVGTISLPVYSGVHMKGCSVKKSTSSKQGEHGSTANELSGREKLLRDQPELLQQFGMDLLPTMTQVYGSSVSGPIRHRCLSVIGKLMYYSSAEMIQSLLSTTNISSFLAGILAWKDPQVLIPALQIAEVLMEKLPEIFLKMFVREGVVHAVESLICPELSGQVTPHVDSITSSHNRRNRRRNNAVNTGNNLPDGPKGSNSMIANSPPSMAEVPNNSLRALVSNHAKSFKDKYFPSEPGSSDIAVTDDLLKLRALCAKLNTTADTIKTKAKGKSKVVSDNSFDVLCNIEEQLDDIIAEMLSELSKGDGVSTFEFIGSGVVTALLTYLSCGTFGREKVSEANIPNLRHQAVRRYKTFISFALPNDKDGNKTPMAFLVHKLQSALSSLERFPVVLSHSGRASTLGGSRLTTGLGSLSQPIKLRLCRAPGEKSLKDFSSNVVLIDSLASLAAVEDFLWPRVQRTEPVLKPPMSSANNSGSGAASSTACAPSIPSETQSVRRTSLRSKSSAATSGAIKKDYQEGSINTSKGKGKAVLKLSLDEPKGPHTRNAARRKATSEKDVELKPSHGHITSEDEDLDASPVEIDDALILDDDDEDVPDDEDDDHEAVLRGSLPSCVPERVHDVKLGDADDSSVASLANDNQAQPSSGSSTKNTSSRGLDTAEFRSPATFGSRGAMSFAAAAMAGLTPVGGRGIRGSRDRNGLPLGARATEHYNKLIFTAAGKQLNKHLTVYQAVQRQVVHAEDDEDRFGGSDLPDDGNHFWDDIRGDVFTITYQKADNTAEKGSVGGSASVPKSSKSDSCRTLSEKQCTSLLDSILQGELPCDLEKSNQTYNILSLLHVLEGLNQLSPRLRLQSACDDFAEGKVATLNGLYDVGAKVPSKEFINSKMTPKLARQIQDVLALCSGSLPSWCYQLTKACPFLFPFETRRQYFYSTAFGLSRALHRLQQQPGNDNNTAFEREVRIGRLQRQKVRVSRNRILDSAAKVMEMFSNQKAVLEVEYFGEVGTGLGPTLEFYTLLSRELQRVDLGLWRSHSSDNSGMQIDANADDLIRSKNHESESLTESRNIVQSPLGLFPQPWPPTAAASEGSKFFKVVEYFRLVGRVMAKALQDGRLLDLPLSTAFYKLLLGQELDLYDILSFDTEFGKTLQELQILVARKQFLDSCSSESQKIDLCFRGAPVEDLYLDFTLPGYPEYVLKEGGENAEVNICNLEEYISLVVDATVKTGIMRQVEAFKAGFNQVFDISSLQIFSPQELDYLICGRCELWEPETLPEHIKFDHGYTSKSPAIINFLEIMAEFTPEQQHAFCQFVTGAPRLPPGGLAALNPKLTIVRKHSSVANNNSNATGATESADDDLPSVMTCANYLKLPPYSTKAIMLKKLLYAINEGQGSFDLS

SEQ ID NO: 66899 - protein, 2006 aa, Zea Mays
MYQISDVENLIPNLRSAVLSAISKYVTASTNHILHTLSQDSANAFINSDFDSQEINKILAEAGKELSEIWKNVHAVTESNLFNDNGFTIGVDEDLPTTKILIELFNHCFPYYKKLSLLDLQCPSQSKWLVLSLSLVLLLCSSKESCFYFVDTGGMEQIINLLCWRTPKSAATTLLLLGIVEHATRNGFGCEAFLGWWPRAEHTSIPVGSSDGYCSLLKLLLEKERHDIASLATYVLQRLRFYEILSKYESAVVKVISNIQADKLSTDGVPFLISASVELGEMLKLIIFCGPIEDPSPVATASRIFKSEHLEGLLSYKATIDLITSSKYSFLQYDTDPYLLSLIQERSFFPLSAALLSSPILHLPNGPAAEILMGIASSIESIILSLLFCRSGLSFLLSQPEATELILLSLQDAEKMNKSECITLRQAFVLLSKGFFCRPKEVGLITELHLKVGSAATRILSVPPNSDELLWVLWELCAISRSDSGRQALLALGYFPEAISVLLRSLSSYKDLDSVMAENGGSPLGLAIFHSAAEILEVLVVDSTASSLESWIGFAVDLHKALHSSSPGSNRKDAPTRLLEWIDAGVVYQRNGARGLLRYSAILASGGDAHLSSGNVLVSDSMDVENVVADSNSRDGQVIDNLLGKLVADKYFDGVALCSTSVVQLTTAFRILAFISDDKPVASSLFEEGAITVIYVVLMNCKSMLERLSNSYDYLVDEGAELSSTTELLLDRTHEKAIVDLMIPSLVLLINLLHILRETKEQYRNKKLLSSLLQLHREVSPRLAACAADLSFMFPTFAIGFGVVCHLITSALACWPLYNWAPGLFHCLLENTEATNASVPLGPKAAFSLLCLLGDLFPDEGIWLWKVELPSLSAIRSLSTGAVLGPQVEKGVNWYLHPEHVTILLVRLMPQLDRLARIIDNFATSVLMVIQDMLRVFIVRVALEKIECAVVLLRPIFMWLDDKVDKTSLSERDTFKVHQLLQFTVKLSEHPTGKALLWRMGFTRILSKLLQNCSRASFPYDNQTFGRAHSKNDLMLKWRIPLFKSIAYIFSIDPCNNEKADVEESLNEKSVHECSSVMHDLMMFCQVLPVGREMLACSLAFKELVYSYTCRSAVTLILSQIHTSNKDVLEKDESDPNHNSPSLDGWNCFSSLFKCWKKLVKYVGSNERTDYLVETIYSLTLGAITLSQYGENGSLESSGESPSEIELFMKTYEEKICQGIENSATAVGKTLLRKLLNSIKLLRSILENSGQSADTVQMVLEEGTDSLSEIARSVVMTAHLMPSLANVSVNDESPFLFSNMWKVIVDSEEPLDCQEGEFAKRLVWELPDSSLDRQLAPGQSARRKLALGESASRRVRDNQLPEPTGQFSRGLNTSNASSGHTRRDTFRQRKPNTSRPPSMHVDDYVARERNIDGASSASNIVNSTPRGTLSGRPPSIHVDEFMARQRERQNHAPAPTGDAPQAKSQTTSLDDSLRTKPENLRQPKTDLDDDQEIEIVFDEESGSDDKLPFPQPDDSLQSPPVIIGENSPGPVIDETENQENERVPFFQRATSIPKDDENLGIGISSQTAMLSEANSSLELKHSVSSPGKNSFRDHAEESNYDSIGVSGRPSLQADHQQLSRRHEKRSPRKFSETSLSNGFHGREHRHSNNHPPLPPMPPPISSVSMQNTDSVNRQSSSFSARDRPTPNPSGYPTQSFDSSMPSAFTGLQGQTQYMLAGAGSSSANELPNVEAKLLWNTFPANRIPLETFSSGLPARPMPPLTPYSAVATQHATMNSGSPANLYSQGSVVQPSPTASIISDSNLAMNSASGSMLASNLLPSFASQFLMSRPSMPTPFFGTPLQQVQFSSGLPQNISNPQPPVSIQPRPPPPPPPPQQPHPSQTLQQLGAIQLPHQDQQHSYPHSAILPQVTLQFPNQLPIPQVQLYHQSQQESGQTLRQVGEQSQLQNQGMQADSFSQQQQDSGINLNQFFSSPEAIQSLLSDREKLCQLLEQNPKLMQMLQDRIGQL

SEQ ID NO: 66900 - protein, 239 aa, Zea Mays
MGTSNAVRALKAAQIVCRDVSAIDINMGCPKSFSLSGGMGAALLSKPELIHDILTTLRRNLDTTVTCKIRLLNTPKDTVELARRIEKTGVPALAVHGRKIKDRPRDLAKWDEIADVVSALSIPVIANGDVFEYEDFKRIKDATGAASVMVARGAMWNASIFCAKGKTPWEDVKREYVRKSILWDNDVKSTKHTLKEMIMHYSCLELPEGKGVIKCDTSEDLARLYGEEDYYNFVVANRK

SEQ ID NO: 66901 - protein, 58 aa, Zea Mays
MNALKRFFVTSKIVFLMWHIYCICFNIKTYEWVISNFPCFRFFFHQLQVVFSLGVSCS

SEQ ID NO: 66902 - protein, 289 aa, Zea Mays
MSGLLAEALGAAAGGCALLLIVIIIIVLCLQHRKRTSDSSESGFSDQALPESQEARCLSLEELNFATRNFSNGNLIGQGTFGEVYKGLLQDGTIVAVKRRHSPPSQEFIQEVNYLASLCHWNLVKLLGYCQEDGMQMLVYEYISNGSVSTHLHGNSHALGSRLEFKKRLSIAHGTAKGLSHLHSLTPPAVHMNFKTSNVLVDEDFAPKVADTGIPGMLDRLGVTGLSSRTFNDPFVEPRMKEAMNLNFSIQSDVYSFGVFLLELISGRKAVSDQCIIQHRASRNQVTSP

SEQ ID NO: 66903 - protein, 254 aa, Zea Mays
MKTISVAHYPVNREKNRYIDVLPFDDTRVQLKSSARPPNNDYINASFIKATENNRVATFISTQGPLVKTFGDFWEMVFEYQCPAIVMLTHFDSIKCDKYLPLGSERRTYGDYDIKITKTRTDSHHLQLRDVKVQNIETGKVHSVLHIEYPDWPDHGVATNTDAVREIWKRLHHIPTEHPIVIHCSAGIGRTGTYITIHTTIERILLGDKSSYDLAKTVKNFRSQRPGMVQTEEQYKFCYRAIADELKDLLNSDH

SEQ ID NO: 66904 - protein, 465 aa, Zea Mays
MASHPPPAEPSSKSNKGQSEHEEIHVSSGGVLAYTDDDDCESRRPLLLRTPASAECYSVSAAVFPFLFPALGGLLYGYDIGATSGATISLKSSTFSGTTWYNLSSVQTGLVVSGSLYGALIGSVLAYTIADFLETAPSQIRGMLISLKEFFIVLGMLLGYIAGNLYVEVVSGWRYMYASSTPLCLIMGVGMCWLPSSPRWLLLCAIQGKGNLPETKENATRCLCRLRGQASPDLVSEQIDLILEELSYIDQEKQASFGEIFQGKCLKAMIIGCGLVFFQQVTGQPSVLYYAATIFQSAGFSGASDATRVSILLGLLKLIMTGVAVLVVDRLGRRPLLIGGVSGITVALFLLSSYYTLLKDASYVAVIALLLYVGCYQLSFGPIGWLMISEVFPLRLRGRGLGVAVLVNFASNALVTFAFSPLEDLIGTGALFSGFGVIAVASLAFIFWIVPETKGLTLEEIEASL

SEQ ID NO: 66905 - protein, 100 aa, Zea Mays
MKFQTLKEAIEINNSVPQGLSSFIFTKWPDIIFKWLGPHGSDCGIVNVNIPTNGAEIGGAFGGEKAAGGGREAGSDSWKQYMRRATWREVLEVVSHLFTP

SEQ ID NO: 66906 - protein, 260 aa, Zea Mays
MGGQNHDGSTEWKETWWEKSDWTGYKELGAEKSGKNAEGDSWWEKWKEVLYQDEWSNLARIEKSAEKQAKSGAENAGWYEKWWEKYDAKGWTEKGAHKYGRLNEQSWWERWGEHYDGRGFVLKWTDKWAETDLGTKWGDKWEEKFFAGIGSRQGETWHVSPGRERWSRTWGEEHFGNGKVHKYGKSTTGESWDLVVDEETYYEAEPHYGWADVVGDSTQLLSIQPVERPPGVFPAIDFSSAPPPKDAPPGMPPSPLDGGN

SEQ ID NO: 66907 - protein, 55 aa, Zea Mays
MPGTPTSLSPKGTGSTGGLNPPDVDSTDSNAKPLATTSLPSLALSCFMYIFLQLW

SEQ ID NO: 66908 - protein, 761 aa, Zea Mays
MEQDPERACLRSFELHESESSLYVLGTNSDRTLWRLLKIDRSEPSELVIDECSTVYTESEHPDLLKGLDDEHRSTGGVKFVTKFYGIIGFIKFLGPYYMLIITEQKKIGEIFGHPVYQVTRTSMVELANSKTRSTFQNFKDENRYRKILNALDLRKDFFFSYSYHIMRSLQKNLADPQDGWTLYETIFVWNEYLTRRIRNCLRNTLWTVALVHGFFKQDKFSISGKDIMFTLIARRSRHYAGTRYLKRGVNEKGRVANDVETEQIVYEAVPGPTENNYEATELHFENLRARYGNPIIILNLIKTRERRESILRREFDKAIKIINKSLSEENHLRFLHWDLHQNSQGKPTNVLDVLLKVAFRALNLTEFFYCQVAPNSETSAQCPTLLNGLDQYLCDDNNSDDTECTEIVGDVSQEDISGSSDSSGNATTEDKFENSGLPPPKPPKFQKGVLRTNCIDCLDRTNVAQYAHGLAALGHQLHALGFIESPELGLEAPLAHHLMHFYEMMGDTLAVQYSGSAAHNKVFSAKRGHLKLFIQSQEFFRTLQRHYSNTCIDANKQAAINLFLGYFQPQQEKPALWELESSAGKHNNNLFDGHPSTLKRVKSDGTILHESNASISGSGRCHNEQLSASQPDVQNGFQFPTSESDSLHENDISSACGSGVAHLRYTPTASDVLHVPRAKVEYCHDSGDSNFLDLEWLSTSGNSSDERSIATSTPDANLSNENVISGITPDIMENHLAEMQYQKLPRNFVQWVNHGDTFWY

SEQ ID NO: 66909 - protein, 57 aa, Zea Mays
MTSILKEHPAGFEPEWVRGHSLLDSFVACMEIGEAGKPRLRQVRPSHAPVAEATNHR

SEQ ID NO: 66910 - protein, 226 aa, Zea Mays
MEILLLGVAVQLTRCVTPTCLTPIIQNFQPGTPQARPYEAPTPGSGWANTPGVSFNDAPTPRDNYANAPSPYVPSTPVGQPMTPNSASYLPGTPGGQPMTPGNAGMDMMSPIIGGEGEATWLLPDVLVNVLSGGDDGPGVVREVLGDGSCRVALGSSGNGDMVTVLPNEVEVIRPKKSDKIKILNGSFRGHTGKLIGIDGSDGIVRLDDTYEVKILDMVILAKLAT

SEQ ID NO: 66911 - protein, 74 aa, Zea Mays
MTFGESFRHRSRWPSMSWQHQLLAWSYGAGRSAAGVPRAVVTSHRRLALPVSHLLEVRNHAHVVYHRLGSGIGH

SEQ ID NO: 66912 - protein, 206 aa, Zea Mays
MQHGGDRMLLGTASAIQWHGNQEPHPPHRSAAAGYGNHAYNNCHGGGGLVAAAAGASMLSSAFEPPPGGGGCVAGATAADSSCALSLLSTQPWDTPTQSGSSHHNRSPAMSAAAGAFEVAPSSVVASSYTASSSWSGSRDPADGARKNAQRHDDGLHLVHPPGPVHHGHFSGELELALQGSGPPHVDHGGGTCFSHSDTNAMNWSL

SEQ ID NO: 66913 - protein, 500 aa, Zea Mays
MSNGIYLPMGNEPAKILEELSPIDESSTDTQSDLCRSTEMNFTSLEGVVRMEAEGQLDSIVCCGVRPKHMLLDMEIGHTATGTFTFDKTIDLAHPANFVAQDGRLESIVYDVLNNHAQRTTSKSKSSVGLPDTAVLQSSLIEFTDNCLEDKRASDDKFSHPNNVDLPLKDTLNSTIDYDICRSINNEGSEEEIVPQHQLYQSCSDKFNLSSVMPEISNAEKSQKLSAGTQNSSATSLETDGRIKRPNFFVDEESIEEHAPKVLLSKRKIMSPTSQEKLYSAVTGIDLCDGVQRSNSKIIIEDCDKTTISLPQPAHMQGKSMFHTDRRLKDRTSVSPTSKGLLKSTGSPPNQQTCSCMRSSPVVLDTEKAVEFSQRQMHDIENIAAKLIRSLKHMKSIVDESLSTEAYSLLPNFNIAQIRAASEDALEVERTTRKWLSIMNKDCSRFCKILSLAKKNDVSHPEAPRKQRKITFADEAGGMLCHVKFFKDGQASLSECQSDL

SEQ ID NO: 66914 - protein, 508 aa, Zea Mays
MLRRFCEDLELSPMLYQLSLLTTFYDILAEQKLSSSKEYTNIVNFLSKVVRKMLRTIKKQPLLFVDILFWKTRKECHCIDADALLNELKNDVGSKDSEIGSSKGWRDRINIADSLGDDEVDVVIPQAPYDADKDGDLSAGEHTDDFRKSSTKYKRSRLSLSDSEADEIERFLNHVSRDSVPKVPKRRGRSLFTEEQERLIRDLYEKYKDGPKCSHIIAESLDPSGKISSAQVSRKLTQLGLRNVTRRKKVAGPEGKNYTRQVMTMMTQVRENHLMKTHYKSKSKKVPLVDSSLSGSQHQEAQHDPDSDDATIGSMIRSRKKKRLSTSDFEGNVRNHQESSDNTKAKDCSPIISQHEKALQDIYPDDETIGSIIRSVKKKRSVTSNFSANIEAQESLRNINLQDETVVSNIMDASVNHGSDPVNNSDNTVEDELLDDFETELVNNGGNTVEAELLDDFEVELDDHEHTDQRITDDEIMTESGKATNSDAKGRAGLKRRHRMVIDDEDDD

SEQ ID NO: 66915 - protein, 71 aa, Zea Mays
MIGRCSELEQRIKASEHKVETRFISLEMDQARFEEWRPDVEKRLDNMFLNSPGRPGSWSAAPSLPKLPNPV

SEQ ID NO: 66916 - protein, 125 aa, Zea Mays
MAKFLHSCEREQPSPQSHHNPQPEPLPKSARSQSLALSLSVFGPPQHPLRNAHTDGGACAHGTAQPASRLLLLPPPSVRLSRRPSGITIRTKGVHRSHLSRHTQAVQRERDSTVRCLSRHRHRRR

SEQ ID NO: 66917 - protein, 272 aa, Zea Mays
MAASHGAGTLKSTSINGVKLYSLNGGRYVAPWVVAKKKRALRKDKEYQRRLDLIHDLRFETATTKIKLTPDDQYLIASGIYPPQVKVYELKELSMKFERHMISEIVDFQILGDDYSKLAFLCADRSVNLHAKYGSHYSLRIPRVGRDMAYDCWSCDLLCAASSPDLYRINLEQGRFLASLSSESPAINAVTRSKIHGLVACGGEDGAVECFDMRKKTSVGRINIPAVSSEDYSQEVTSLQFDEDQGYFMAVGTSTGKAIACLTFMFFLKCAN

SEQ ID NO: 66918 - protein, 171 aa, Zea Mays
MQQRKNKQRGIVAYRWGQRMVSLLTSSLLNGTHGKRFCQPGEGGAGQAGPDEHAGGASCGRAQGFRPREWSVEGAGDGHACCDKHAGMERKRDRHGKRRRRKGLTSGRCTTRREEWVRRSFDVTAQREATPAMAARSVVMRGSAGGHGWLAVRKGARPSPGLQAASALPGT

SEQ ID NO: 66919 - protein, 2371 aa, Zea Mays
MSGSGNSSQEKDLLKNASFHTHKKALDKRFISLTNRIKELPGINKHIHFDSTDDETNSCTGSEDGKSDGNENENECSILDKKDGDKRVNSCPYPSKTEELERLGLKSEINKRQSLENSKPRDSGKKGKVLEMLANYYGRTISGKRRIRNFFSQYPGIGLLNVAVKSMGCGLLDSIYDVIQLADENDVASSPPPNTTTEVMEIEPPSKENTGSTNGAHEKSEDNMTAHGVAIDDVIRRISEYIESNSKISGDVALQVRALNDCETWVTTQFSANQFSALGHGTFLEFLDKHCHQFRTALSSFFKEGPSNSSSLEVSVLQQQIEFLLCQAESNWLEDSDFSEDSFVMLLKKQFPTISFNIVQDKSDGGVSGFIEGQKKDIRTYSLKFSISLLEKRWSGTLPSRHGNVDELGNIVAEQSCYHTTVCSREAINCLLRAPMLSDLHLWSHWDSLFAPTLGSFVHWLLNTGPIQELACIATTDGRFIRVDSSATVDQFLEAIIHRSPLQVAVKLLSLLYIYNGSMNTPMSLLKCYAQRAIKLIVDNNNDLMNAKSENKIFMPDEPQNLSSESSTCFADQCQESSQASPGRLIRSDSLPNINNTVHLITKFVLDCLDHLPSEFRSLAADILLAGFRVVTKNWHAVMLHEATENGQLCMLHDIGLSLGVVEWVEDCHRLCLTDEVHVQTEMHSSAKLATPASVGATHEDSNMHISSDVNMMDKRKQLFPVINDRAGIDKEDNKMLNPAGTEADVAELHTTSRSSMMEETSLEEASLVIETIRREEFGLDQALSDTENSLLKKQHARLGRALHCLSQELYSQDSHLLLELVQNADDNTYPEDVEATLAFILQEDGIAVLNNERGFSAENIRALCDIGNSTKKGSNQGYIGNKGIGFKSVFRVTDAPEIHSNGFHVKFDITDGQIGFVLPTAVPPYSTTSFSRMLSVEDDKDAHSLWNTCILLPFRSKFRECTDLHPSLLLFLHRLKCIKFKNLFDDTLLIMRREILGDGIVRISHGIETMSWLVVSKRLQGTIVRHDVCTTEIAVAFTLQQTEEGDYEPYLKQQPVFAFLPLRNYGLKFILQGDFVLPSSREEVDADSAWNQWLLSEFPSLFVSAQESFCALPCFQRCPGKAVTAFLSFIPLAGEVHGFFSQLPHLILSKLRLTRCMFLDGSTVQWVYPCNTLRGWDEQTKMLFSEGLLHEHLGLGYLSKNIVISDKLSRALGIHDYGPNILLDAISSICRIDGCIESLGLEWLCAWFVNLYLTLLSHSSQNVSSARNLEDILLDKVRKIPCIPLSDGSFTSISDGRIWLPYDVASSIPECSSIPNFPALYGNLRTVSPNLLSACCKNKYLMEEVRINDLADMLQRIGVRKLSGHDIVKNHIMVSLRNGLDANVADIVIREYVSFIMVHLQSSCTSCNFERGEIVSELRKSPIFLTNHGYKSPADEPIHFSKDYGNSVDVTRLLQNVEISWIELDSSYLQHHGSQSSSFAREKWRQFFEEMGVTDFVQVVKVEKTLSQVDSILAGGLSLADVSTKQCTVYDWESPELSRILSIFSSKRCKENCVYLLEVLDRFWDDHYSAKSRIFTDATHCGENRAVESSFMKCIQSFKWIASRMDEDLHYATDLFYDCENVRSLFGSVAPYAVPQVSSSSLKKAIGFKTEVSYCDALMVLKSWITSKVPFRASMSQMCKFYTFLSEGVADAKIDIKREFMSSPSIFTPLQRPRASEVIPGRFLAPEDLYWHDPTGCSEITEDFVATKNRSMFPRKMLSAAYPNLYELFTLTCGVPKAPTTSNYVEMLLRLSTIALPSQAGNHVFCVFVRWAKCMHSESDKMNDILYLKESLQKLETTILPTSADKWVSLHPSFGLVCWVDDDELKQQFVNSNDVYFIQFGDLSSEDKQMLYGRVAALMKSLGIQALSKVVYREAIFYGTSENREKVSLICWLLPYMQRYIYKMHRDTYINFQKNDIMKISNLQVVVVDKLFHKYVLRGLESSSKKRFQCHCLLQGDTLYATQEADSHSVFLELSRIFFDGSHDLHFANFLHMIKTMAESGTHAEQIETFIVNNQNVPELPEHEAIWSFSSLSAAKHGSANQGGADTQGVDFQPVHEFSIPNHQKAQVMVSSWPLNYWRTAPVFRTPLINQHASMQEAKVNDAGPSSNLNMPAMYGHTEDSLLSADLERDWIIEENPRTETTLFGDSSSEILDEPQMVMSAEPFHAPAYLNLEAGNSSPTVHVELTNSDEKLANLAEDKNQRLSDANQLRTGRLGEELVEKYLAKQLGSNNVRWVNNRIETGLPYDIVITHPEGFTEYVEVKTTVSSRKDWFDVSAREWQFALEKGDSFSIARVILGTKKASIEMLKNPHKLCKQKALRLALLISRSAAT

SEQ ID NO: 66920 - protein, 306 aa, Zea Mays
MQRDTSSSDVSASHVGRVRRRKHPSEATTDGNRANGQPLLVNDQNKYKSMLIRTYSTVWMIGGFAFIIYVGHLYIWAMVVVIQIYMARELFNLLRKSSEEKQLPGFRLLNWHFFFTAMLYTYGRFLSRQLVNTVTSDHLLYKLANVMGRFQWLTCPRKDLSTGWLYCDPGPMFKPEHYSLGESVPHWFPWKDLAIMPVQWHALALGLFASIIAPFGGFFASGFKRAFKIKDFGDSIPGHGGITDRMDCQMVMAVFAYIYHQSFIAPQNFSVEIILDQILRNLTYEEQKYLYEQLGEMFHERQLGQN

SEQ ID NO: 66921 - protein, 358 aa, Zea Mays
MAMDDLAGASSSSSMAAAASSDPSHGWQTVSYPKRNRKQAQPPRTTAPDLALQSNGKPGGVFDAVEKRSQERHRALQQQLASRAADLDDARIAVATGAAYSDDDDSDEAAAPRQEGEVKKPKKPKVKKPKVTVAEAAVLIDAENLAAHLFEISASYENQQDIQLMRFADYFGRAFAAVSASQFPWAKMFKESTVSKMVDIPLCHISEAVIKTVSDWISQRSSDALGDFVLWCIDSIMSELSGPSAGPKGSKKVAQQSPRAQVAIFVVLAMTLRRKPDVLVNVMPKIMGNNKYLGQEKLPIIVWVIAQASQGDLVSGMFCWAHSLFPTLCAKSSGNPLARDLVLQLLERLQKGLKQPTQ

SEQ ID NO: 66922 - protein, 771 aa, Zea Mays
MGSQPPASRAALEHLATLDPAALAGLPVSSPLTVRSAAVSAHLLYLGTGGGKLLLFSLQDPSTPEFLRLLPIGATLPVSAIVPLPSVARLLVLADGLLLLADPLLSRPVRRLGSLRSVTAVAARRVVLADPSSCSVAISVGKKLLRVDFTLHDADELDVQTREIASVEGVKALAWVDDSVFVATATGYSLYSSTNGQGVDIFSLPESAGHPRVKPLSGGDEVMLLVDNVGVVVDRFGQPVGSSLVFSTTPDYIAEVFPYVIVAGDSKVDVYRRRNAAHLQTIPVARTGQGVLIVAGDDDGIDTELVVIATTYKVFCYRKVSALEQIKASLRRKNYKEAISLLEEFESDGEISKDMISFVHAQLGFLLFFDLRFEDAVNHFLLSETMQPSEVFPFIMRDPNRWSDLVPRKRYWGLHPPPKPLEEFIDDGLVTVQQALFLKKAGVDTVVDEDFLSNPPSRADLLELAIRNIIRYLCASRMKNLPSPEMEGVDTLLMYLYRALHLVDDMYNLASSQNSCIVDELESLLDDSGHLRTLAFLYGSKGMCSKALSIWRVLARNYSAGLWKDLSENDSCGTLVTKRSGEEIAAVEAAKILKALSDEDLVLEHLGWVADIDQDLAIAVLTSETRENQLSPEKVVASVDAEKVVIHQRYLQWLIEGQGCDDPHYHTSYALSLAKSAIEAVDMESKYRGKDDSEIDSDAQFVYSVRESLQLFLQASDLYDPEDVLDVIAESELWLEKAILYRKMGQENIVLQILAFLLVALLNVCCLLCGE

SEQ ID NO: 66923 - protein, 255 aa, Zea Mays
MKLPTKLSGATGDSSRQGSEDTARRPPSVKASLSVSFGQRAPHRASTRDSSPVRRTVTRDGHRSSYSPSRRSGSREGPDHDRSDRELDHSSRDRERARDRSNRDRYHSSRDLDRDKDARDYHRHERDSRDREYYRSRHSEERRDDRRDHESSRHRRSSSRHRSRSRSRSRSRSRSRRSRSRSTSRRSLNEQRSSPFRDANKEKAATVSSNLAKLKDLYGDITAKKEDSDAEKLHRDSCAEEVIRLGGPRWRKSPA

SEQ ID NO: 66924 - protein, 247 aa, Zea Mays
MPSSFLTSSSSSASSHLSYLIPARAAPPPPFAMGYGATSGGGVANATSAAAAPPPPRQGASRNAGAGHPPLPRPPPRQCPRCRSANTKFCYYNNYSREQPRYLCKACRRHWTEGGTLRDVPVGGGRKNRRGAKGGAAAKGSASAAAAAPAQQGGNVLGADTFPGDLLRQLVQFQPDAAVGGGGYAIDLSAWHQMVAATAPPPPPPGTGGDVSSLGLGAAGAGAGAEANCVALQYWSEDGMPGLDGAC

SEQ ID NO: 66925 - protein, 474 aa, Zea Mays
MDYDKSRRSNSKKRRHSNSDDGKRKRLSSRHDDTSMSSEPIETIYRILCPAKKIGSVLGRGGDIVKALREETKAKIRVADSIPGADERVIIIFNYQNQPELTDEAAEKQISDGLGNMKPHCFAQDALLKIHDKIVADEIYDEVAHDESSDDVTARILVQGNQVGCLLGKGGSIIQQLRSDTGAGIRVLSSENLPQCALQSDELVQISGAPSLVRKALYEISTRLHQHPRKENRPLEQIIDASTQRKHESPTLQHENPMLPHLHSHHPPPIPLLDPYRSGPQYPVSETEEFSIRILCASELIGSVIGKSGANVRRVEQQTGARIKVQEIDKDASGERLIIVSSNEIPTEPISPTIEALILLHDKAAGQIHGLEDYRGLPSASGRFSSTIELRIPNSSLESIVGVGGVNLAEIRQISGARLRLHEAHAGSSESVVEIQGTLDQAKAAQSLLEGFISANSRQQQSHSSRMPLYPRWG

SEQ ID NO: 66926 - protein, 350 aa, Zea Mays
MFLYGATPTGGGHFPVQFLFLHNIQFRWINGRELTLLREQAAGLDNLPLRDVADLEPVVIGQLPVEYLEVLLQPLPVVALDDARHSLLMYPSQRHLCHGLPPRPGYLREHLRVEHGVAPPVPVLPSQRRVGGDVDAPVGAVRPQRPLLPRRVQLHLVHRGRDRGDGQDLVQVPGGEVADADRPGEAQPLALLHGAPHARHVQRHRVLLPVRELGRPAGRPEAHRPVDQGRQHEVRVGLRTPQLGRDEELLPGPQEAAPQRLGHGVAERLLGAVQEGRVEVAEPHLDGRQHGVPDGLVHHGERRRAHAHHRHRLSVARPQGHLRHRRRRRPRGCHADAVKYGALQLEVRLV

SEQ ID NO: 66927 - protein, 164 aa, Zea Mays
MDLIGHLTMQHGSYFKMQRRRRVRKVSSGSHSLLSLLRKDLRNGSLQSFLGGSSYVSNPPAAAPDPFVSSLICTLPVAEPSKDLHSDSSDNNFLLNKFPDEKPVERYVTSSLSFLLPHSSPSLPRYHWIWAEPSLSEKDQKERVQRSKFVRGLVLSTIFDDDNL

SEQ ID NO: 66928 - protein, 103 aa, Zea Mays
MDMDWLASFNSMRVAWAKKWLTIPYNGSTVMLQGKSEVIPTCTIIKLLSWIHLLFQYHTVIGIPGFSLYCTNMIQSLRTQEDYHPNESVSISFHSYLVHNHFQ

SEQ ID NO: 66929 - protein, 666 aa, Zea Mays
MARPYKPKNILITGAAGFIASHVAIRITKKYPDYKIIVLDKLDYCSNLKNLLPVSSSPNFKFVKGDIASVDLVNFLLVTENIDTIMHFAAQTHVDNSFGNSFEFTKNNIYGTHVLLEACRISGQIKRFIHVSTDEVYGETDEDAVVGNHEASQLLPTNPYAATKAGAEMLVMAYGRSYGLPVITTRGNNVYGPNQFPEKLIPKFILLAMRGEPLPIHGDGVNVRSYLYCEDVAEAFEVILHHGEVGHVYNIGTKRERTVLDVAKDVCRLFNLEPDKVIMFVENRPFNDQRYFLDDEKLKSLGWAERTPWEEGLKKTMEWYVANSDYWGDVSGALLPHPRTLMMPGCEGSEEIKGILSRFNNIQTKVGSTSDNAPEPHAFKFLIYGRTGWIGGLLGKICEKKGIPYEYGNGRLQERSSLVLDIQTIKPTHVFNAAGVTGRPNVDWCESHKPDTIRTNVVGTLNLADVCRKHGLLMMNYATGCIFEYDAHHPEGSGIGFKEEDTPNFTGSFYSKTKAMVEELLKEYENVCTLRVRMPISSDLSNPRNFVTKISRYNKVVNIPNSMTILDELLPISVEMAKRNLRGIYNFTNPGVVSHNEILEMYKQYIDPSFKWTNFTLEEQAKVIVAPRSNNEMDATKLKNEFPELLSIKDSLIKYVFEPNRKVPTD

SEQ ID NO: 66930 - protein, 89 aa, Zea Mays
MGSTGALLWHPSPQVHSGGVLFRQSRRIVRQRNLPLLSLADAALEPERRRGQRLRCAAGDGDGGPREAQKESPSGIGAALEDPSPGPPG

SEQ ID NO: 66931 - protein, 129 aa, Zea Mays
MSSRGLWFHLRILCMPLLEQLKQNLLWMISNGSRTGCCTHLSLYSSSPLLRYSNGFLSGLMQSCSSIAAAQRYIEQNGSKAFENLVNKFKSSNPRRSILEEVEVERRARIQLESEAREVNPFFNPEYQY

SEQ ID NO: 66932 - protein, 135 aa, Zea Mays
MVTAWRRRRRRSPLRKGSLPSRASWTSTRSARSSPTGHFPERPIMPGVLMVEAMAQVGGLVMLQPEVGGSRDNFFFAGIDKVRFRKPVIAGDTLIMRMTLTKYQKRFGLAKMEGKAYVGGDLVCEGEFLLVSATE

SEQ ID NO: 66933 - protein, 313 aa, Zea Mays
MNSPEPRISQEDDYLGVSQMPAYEESLGRSDQIRNNTSMEPPGYEFDSNDGKVIEHPDILYDDIIFRILCPNDKVDNLVATNDGILEMLQADVGVDVRLSDIIAGSDERVVIITSREGPDHELFPAQEAVLHIQTHIVDLGPDKDNIITTRLLVPSSEIACFDGREGSLSDIQRQTSANVQILPKEDLPLCALESDELIQDSGGSASGSFDQGSNIIDEIRQGATKRFAVPLVTRSTLEVVIPNSAVASLTMRAGSKLAQISEISGATVTLAEDRPDILEKVVRISGTPEQASKAENLLQGFILSIPDDIPSG

SEQ ID NO: 66934 - protein, 251 aa, Zea Mays
MSPSSEAEGGDGGWLGAAVRPRCALLHRHQRRGCPGRWWVGGAGDRRRVEGNVRVLRSGHRKIYGLREDLSSFPRLPTALQDIPVRPCFALMVAFSEPLATVPVHGFSFNNSNSLSWAFCNSSKPGRACVPPNRQSWVLHSTTEYASKVINNIGPRKPSAEALAKVAEELFREFQATGLSIPRPIFLKAHRWGAAFPAIAISGDDKCVWDKSTNLAICGDFCTSPSVEGAVLSATRGVSEILECLRCPSSI

SEQ ID NO: 66935 - protein, 64 aa, Zea Mays
MRIIRGVLVLWVIIFFSFYRFLFCSLSGQPVDGWESSSLESLEDELGCEGAFACYCEQLGYDSF

SEQ ID NO: 66936 - protein, 87 aa, Zea Mays
MAHDEEVEDLGDLDGTLPDSTLPETSGVGLAPPSDADKGPSVTPAPTRAGEDSALAPALMGEDASKEVGEPAAEDPAAAARPSQVAQ

SEQ ID NO: 66937 - protein, 655 aa, Zea Mays
MDETPTSSGQSEASSCEPNWWPPDFLEKIQSASIPRKHDVLGNQSSSSWKASQLLWSTGSYSGLIPNGFYSIIPDKKLKETFPTIPSLDDLQTLEADGLKADIIIVDTERDKKVFMLKQLSAALVKGLSSSPALVIKKIAGLVFDCFKRQIPDASPTRGSIEDTHFFGNKGPQLLGQIRHGSCRPRAILFKVLADAVGLESKLVVGLPDDGAVGFVDSYKHMSVVVSLNSMVLLVDLMRFPGQLIPFSAKAIFISHISAAGESDSAENDSCDSPLEPNSPLYGLSDKVEVEGIESSSYLSGRSLRNMMLRSRTFSEGKLSTSCSEPNIANAFWRRSQRRVAEEPRGASSSPEHPLMRARGRSILGSEKQSFQEYTESGAASRSDGLGGPSTSNARRIRRRSISITPEIGDDIVRAVRAMNETLKQNRLQRDHVEGSCSYVMEDQSNTNDCPNKDDASWRIGATDSDSRNRTGSTQKAMSLPSSPHEYRGQVTQKSDDFISKEKMALAWNKVFQSSPFLNKALLPFKEWNIDFSEITIGTRVGIGFFGEVFRGIWNGTDVAIKVFLEQDLTTENMEDFCNEIYILSRLRHPNVILLLGACITPPHLSMVTEYMEMGSLYYLIHMSGQKKKLSWRRKLKIIRDICRSNVTEQFDHKR

SEQ ID NO: 66938 - protein, 596 aa, Zea Mays
MELLSGGALAWQQYRALLRKNATLTWRNRRSAALQLFSSLVFIFLIFCIDRAVRSRFSSTTAYRNVPDPEALVAPPIPPCEDKFFIKSPCYDFLWSDGGSARIRGLVDAIRRNNPGRPIAPEKVLGFRTPDDVDAWLFQNPMRCPGALHFQDINATQIKYGIQTNSTPVARRGTYEDPTFKFQIPLQVAAEREMARLLIGDPNFSWTVGFKEFAHPATETFSTIAQAGPTFFLAIAMFGFVFQISALVAEKELKLRQAMSTMGLYESAYWLSWFTWEAFLTTLSALFTVLFGMMFQFDFFLHNNFGILFLLFFLFQLNMLSFAFMISTFVAKAASATTVGFAIFIIGFLTQLVTTFGFPYSSDYKKLYRTLWSLFPPDLFAKALNILGKATATPEDKGFSWNQRGECPSFETDCVITIDDIYKWLISTFFLWFVLAIYFDNILPNVNGVRKSVFYFLMPSYWTGKGGKMEEGGLFSFFGSSRPADDATPTDEDVLAEQNLVKEQAANNAVDPNVAVQIHGLRKTYPGTFSIGCCCKCSKSKPFHSVKGLWVNLEKDQLFCLLGPNGAGKTTTISCLTGITPITGGDALWECQTSVG

SEQ ID NO: 66939 - protein, 639 aa, Zea Mays
MRRAAPLFLHQARVIRSYCPVTHLSSQACWLNSSDNEEPSQSFAYGDYRSRRLLPLITQALRASNWDAARNISFRECVRLYGSSQSVGLFALIMQAFLPRRIREVRCLIRSIVDYCGNAGSELFELAPMLVSNLGQSMTLLQVYAAVIRIFVESSMFEDALLTYIQAKNIGVDRRLCNFLLKCLVEGNQIMYARSLFDDMKSCGPSPNVCSYSILMSMYTHGERSCLEEAFELLCEMESNGVRPNATTYGTYLYGLCRSRQVTSAWDFLQTLSQSGGPCSNYCFNAVIHGFCCEGQVDKAIEVFHGMKKCGYVPDVHSYSILVDGLCKQGDLLKGYDMLEEMARNGICPNQVSYSSLLHGLCKTGQVALALKIFKNLQDHGFEHDQINYSIILHGCCQHLDLKAISDLWFDMIHHNIAPDVYNYTSLIYALCRHRNLQDALGVFELMLENGLSPNIVTCTILVDSFSKQGLVGEAFLFLDRMHQSLGIVPNLCMYRVMINGLCKTNKYSGVWNVFADMIKRGYVPDVVLYSIIIEGFVKALKLQEALRLYHKMLDEGVKPNIFTYSSLINGLCNDDRLPEAMGLIRDMIGEDLLLDNVLYTSIIACYCRRLNMKAAMEMAQRDGKKRCVARCFCIYLYD

SEQ ID NO: 66940 - protein, 343 aa, Zea Mays
MSIDNLHRFFDLNVGKWDGRFYQFDAHGKVLQEISTRLSVSSYGEDKLISLLQSLYIKQGSSAISIVDEEDSEPEWVEYKIKETNMFTVDKYQQIGFFPEQKAFALRYQTAGMLETVLRIGVLGEDDTGEESPKNLKIPSRKPSIVCENCLYSLEGNGRIRAFHIMDPKGVLDTLLVFHEKRQGSKVPQPLTNYSVGTKSASSDRINALLGRWEGHSVTKRSGVYGATLVEADTAIVLKMDSNGQLIQDTLSTKFGTGTTTVNWTGSANDNLLQFDGGYEITLLPGGMYMGYPSDISKSVAQLDSFHLEFCWMESPGKRQRLVRTYDSAGLAVSSTYFSETKV

SEQ ID NO: 66941 - protein, 622 aa, Zea Mays
MGFERVELRCPRELDPRPSWTLGDVLAELDALDATRRAAPPTPLKQPPDWANGGGEKAFVMRVDDDDEDDTEDEDDGTSGGKSRALVAKGARFSCNDLASSDSEDELDGQVAPYHLMEKRDLAKSILLELEHEHHLKVQEEVRSKLASLEVCHQNEIRRTISAFARLQKYAESRKEIDRRLDVHFQRRIEQHLRHQAFLILFQYLYPNAEVLDKHLSMVQRDHEQKSQIVERRIRDDAALEEAKRKEQAVKEEKLRQERAQQEAEARQKEAAKLAAEARKTAFEAAKKEAAEKEAAEKEAAKLRDAAASQPSPNSQNNTAEGIKVFGDKYALEAESRRHALVQNQVPENIHHSKEFSKYDRQIAKSISKLMPTTDSVRTRASELVKALNGQDCPRPISCCLFANKIISIVKSRNTKDKTFGNLAFACGYVMLLVTNQVPDAMDYLLAEFNRVCIYTVPKHMHALNAQARNRDYYRLIGYQEENGQLESTESYLTYVVAYVKLYAAMIQTEIKGVRHPHGLAEGWKWLAMFLNSLPATTATACALHAFLKMAGFALHKKYGSQFMKILDVISRCFLPALKEQGNKMQAEAVNNLQNYLNDKIYLEEPEGQYLVQQLLSKELFM

SEQ ID NO: 66942 - protein, 194 aa, Zea Mays
MKGNKAAEGHVSKVLGNCVRAIACGGRHSAAVTDSGALLTFGWGLYGQCGQGNTDDVLSPTCVSSILGSKMQDVAAGLWHTVCTSVDGDVYSFGGNQFGQLGTGSDQAETVPKLVDATSLENKNARSVSCGARHSAIITDEGEVFCWGWNKYGQLGLGDSMDRNVPCSVPVDAYHPLNVSCGWWHTLVLADSPT

SEQ ID NO: 66943 - protein, 597 aa, Zea Mays
MGNTCVGPSITMNGFFQSVSTALWKTPQDSDALPAAAANGPGGASPGRSQSALPKPASDVHHHIAVLSEAPEPVKIGAYHSEPAPAVQSEAPEPVKIAASHSEPAPMAAKPGAAAANASPSPSPRPRPQVKRVSSAGLLVGSVLRRKTENLKDKYSLGRRLGQGQFGTTHLCVERGTGKELACKSILKRKLATDDDVEDVRREIQIMHHLAGHPSVVAIRGAYEDAVAVHLVMELCGGGELFDRIVRRGHYTERKAAELARVIVGVVEACHSMGVMHRDLKPENFLFADHSEEAALKTIDFGLSIFFRPGQIFTDVVGSPYYVAPEVLKKRYGPEADVWSAGVIIYILLCGVPPFWAENEQGIFEEVLHGRLDFESEPWPSISDGAKDLVRRMLVRDPRKRLTAHEVLRDRREPVGGRDRRAEGDVQDDRRGQQRADHVRGAQGWAGEGGRQPAGVGDLRAHASRGRGQQRHDRLRRVHRGHAAPEQGGAGGPPVRGVPVLRQGRQRLHHRRRAAGGVRGVRPGRRPAGGLDRGSGPGQRRAHRLQRVRGDDAEADGGGAPEEGRPAEQLQYRVQGGAQDGLDLSVSAPLLPACRCR

SEQ ID NO: 66944 - protein, 65 aa, Zea Mays
MDAEPPLFSAFLYSPCVAVRVRCLYKCSRGVTCHGQPFWRRRMFDVLCIPSTTPSTIGAKSVKSR

SEQ ID NO: 66945 - protein, 274 aa, Zea Mays
MAQFSSRGPNVLEPSILKPDITAPGLNILAAWSGASSPTKLDGDHRVVQYNIMSGTSMSCPHASAAAALVKAAHPDWSSAAIRSAIMTTATTSDAEGGPLMNGDGSVAGPMDYGSGHIRPRHALDPGLVYDTSYHDYLLFACAASSAGSGSQLDRSVPCPPRPPPPHQLNHPSVAVRGLNGSVTVRRTVTNVGPGAARYAVAVVEPAGVSVTVSPRRLRFARAGEKRAFRIKLEAASRGRSGARVARGQVVAGSYAWSDGGAHVVRSPIVVIFD

SEQ ID NO: 66946 - protein, 62 aa, Zea Mays
MQYASPIGTLDNYANWRAWIRMDHKVALMDPSRYGRLDQVSGLLMLAKRTSSNHTKLVYPRL

SEQ ID NO: 66947 - protein, 251 aa, Zea Mays
MRATPLTPSEWKERLEARTCLDVSSGETSGRGLLLLDVRNDYEWDVGHFEGAQRPNVDCFRSTSFGLSGETDPLNGVDKERTDILMYCTGGIRCDVYSTILRKKGFRNLYTLEGGVSNYLKVEGPAGWVGNLFVFDGRLSLPPATFNEEEDEEEQQENKRWVGCCYVCGSEVVELRHRNCANIDCNRLYLCCGWCAEELCGCCCSDCKVAPRLRPLLPGHQRYLKWHVYRDGRTDDENKLYGFVDDDSSGL

SEQ ID NO: 66948 - protein, 365 aa, Zea Mays
MPLYLFSSPAAAKLATGPHASLHRRRQFLFRVPHRPSRRAPLLTSAAERPAGRTMATADTGASTVTDSRLRGVKQALISLSDKTDLANLGNGLQRLGFSIISTGGTASSLEASGVNVTKVEEITQFPEMLDGRVKTLHPSIHGGILARRDQEHHLKALKEHGIGTFDVVVVNLYPFYDKVTSGAISFEDGIENIDIGGPTLIRAAAKNHKDVLVVVDHKDYPALLEYLEGKQDDPDFRRTLAWKAFQHVASYDSAISEWLWKQSNKADSFPPSFTVPLTMKSTLRYGENPHQKAAFYGDRSLSLVNAGGIATAIQHHGKGFAILRTSSYRKCPTTTIWTRTLRGTASRSLRARLASWLSTQIRVA

SEQ ID NO: 66949 - protein, 115 aa, Zea Mays
MLGPARGGFFWLDAGAYLSARSPSPAAAGLAAGGEREGRGATPVRFIQTEPGEFPRFFAVFSTIFRLGFGSKAGTGGGLDGGDRRRRAPGGEARRRRRRRARERGGYLTQGGKGD

SEQ ID NO: 66950 - protein, 606 aa, Zea Mays
MLPAVAAASPGLSHLPRYHHLGRRFHLRRHRLLPAIPARLSCGATHARRLLLAGAFAKGEGSSGQDVDHSAGATNSGSAYLGLFVRLLGLDNDTRDREHAVCTLYQYSLGGRKSIDEIMQFPGCIVLIISLLKSESILACEAATGLLRNITSVHIYRKMAGESGAMEEIINLLCKSTITPKILEQCLCTIWNFSIDEKWRYKVLKSDVLMKIVGYLDEEDIQVKEAAGGIISNLALSSSSHGALVEVGVIPKLVHLLQTKEDDYKIIRKEAKSSLIQLATDDCYYSLIIEEGLVRVPLVGSAAYKAFKPLPHSWPSFPDGSKIQRSSHPSKYGATELLLGLSVNENDTKPDEAKINAMIGRSNQQFLARVGAIELDDQGQEESGSEKNDMYTILPWVDGVARLVLILGLEDVSAIKKAARAMGDASINEHMRTSFKEAGAVKPLLQLLKHKDVHVREAGAYALEKLCVSATVCHNIKTEGGLELLVNIVKDRHTPVELLEKIIYILSRMFDMGICMVAVPDTEGYKDSENSAKTSVNQEMSSELIFDFDAISHLTEVLKEASPRLQAKVCCVLDHIAASEQHATAMTAACTGSVIEAILEIGVIHA

SEQ ID NO: 66951 - protein, 148 aa, Zea Mays
MVLQAMVQMGVLVPTGDMTVVRRTAQFFLNSFQECLTAQRKEREMATAELGFKKQLTKEEKFEKRKQRLAAIGEDLLAIAADQPFRFPATFTFVVRAFSVLDGTGKGLDPRFHITEIAKPNAKELLRFNDAGVEIVVKVCGETCVFLL

SEQ ID NO: 66952 - protein, 177 aa, Zea Mays
MVLTDYCMPEMTGYDLLKAIKALNPLKPIPVIVMSSEDEPQRISRCLNAGAEDFIVKPLQSKDVQRLRNCSTVGRPSNKGGATLPCEENAVAKWSNNKLPPSAGAGAGASATSPSGRRANLAGVAMRQVLHSSRVEISQYLPLLLKLVVLAYAALCLGELLHRWSSGGSCSLSPWCA

SEQ ID NO: 66953 - protein, 393 aa, Zea Mays
MNARSCMLLLNKEAMGENRKITRGSRLVTNKLLHRCQQLHGHGSVSGVSETLGKRPLNGNKDTLVYSVFASTWNVGGVTPSDGLDLEDWLDTRANAYDIYVLGFQEIVPLNARNVLGPRKSRVSAKWNSLIGEALNRRCREEGGANTNSSAKDDEGSVEGSQGFRCIRSKQMVGIFTSVWARSSLRPLIRHLDASCIGSGIMGCLGNKGSVSIRFVLHDTSFCFVCCHLASGGKQGDVLLRNLDVADILARTRFPGPAAHELPEKILDHEISLEEAETRSLVRAKRWPVLLENDQLLFEFSRGRHFEGWQEGLITFSPTYKYQPNSDQYHWCFDSAGSDKKRAPAWCDRILWRGKGLKQVQYETCSYRLSDHRPVRAVFHAECDALSEAVSHK

SEQ ID NO: 66954 - protein, 115 aa, Zea Mays
MPSINDVTYPELVEIINKLKDADGKLSNVDASGLLVANSGNDLPVIDLSSVSPELAFMANDADLVVLEGMGRAIETNLYAQMKCDSIKIGMVKHPEVAQFLGGRLYDCVFKFNEA

SEQ ID NO: 66955 - protein, 182 aa, Zea Mays
MASDEFISLDAPCEADAKDEGGDVQVKAPDVSGMEPLVSDLQPEGKAGAVGSNPKTSAGNLDLEEGQVEDMDLADDDVVVGKDQLLDASIQPEISVAAVQTVIGFEVKLDKGDGTENEIIYESNSISIEESRILLNGILCISSNILVQLQVSMFSEDSFVSIESLELYLHKKCRLLLILLGP

SEQ ID NO: 66956 - protein, 1178 aa, Zea Mays
MKCHSVAALWSPLPPSHHVTAAATTPVALFTGAADGTVLHWPLALASASPSPRPSSLLCAHAAAITSLCPLPSPASLLVACTAGVLSLFSTYAPLRCLRRRSLPLWVGSPSLIASLPSITSADPRVAILCHAPDDGHRHVSALVVVDARTLAVLYTVFHGILSVGTPNAIAVSGGGDDAVSVVLADAQGRVQVMPVAEGAAVEVDPPRRLIVSSVASVASAELADERVEAVALSHDGKNVALVLKTRCLLKCVTEGVVLGEVSLLGTSLCKDKNTVDKVCTAGAFFLSSDEWDAHVSDDGVVVRNLVLWSNNGAVTMYRIALGSSYFDSEIVCEIPSNLSMQGEGLEVKFCWSNQHLVRVECCSYKVAGSLLWKPTVAIWCMDQFELSKTVNTQKPPMRKMLGEGGLQGEEFRPEPSHSQYNINRGSEVISQMCSLERYRGTVSSSMLLSEDSYAPYAVVYGFHNGDIEVIRFLNLSPAAAKFGGRGLYPHISERLFLGHKGAILCLAAHYMHAHPDSRNFHRALISGSLDCTVRVWDLDAGTLLSVMHHHVGSVKQIVLPPPWTYHPWDDCFLSVGEDGLVALVSLQTMRVERMFPGHPDYASLVAWDGVKGYIACLCKNLHSCNDAGSGLYIWDLKTGARERVINGTASQLAFEHFCRGISKNTVTGSILGGTTSASSLLVPIFEDMSHIRSHADKNGHDISSVSTNLHNGCTDSVTVNAPTTYDFKGKTPAPDEAHEFHGDNSVYNSGKAVSSHSIHNKKIKCPIKCSCPYPGIASLRFDLTAIMSTQGMTNSNSDRHLKDHLHSENPKEMLQPGTLDSPSRVHEMDSPSRESLEGCLLRFSLCFLHLWDVDCELDKLLVDEMQVCKPEGCHIATGVVGDKGSFTLMFPGKEATLELWKSSAEFCAMRSLSIISLAQLMIKLSRSCTNSSSALAAFYTRHFAEKVPDIKPPSLQAINYILHTMDPSNLIMRKACIISSMMALREMARVFPMVALNESMTKLAVGDAIGEIYDGTIRVYDIESVTKIRILDASGPPGLPSLLAGSSNRTTTILISVLSFSPDGEGLVAFSENGLMIRWWSLGSAWWERLSRSLTPIQCTKLIYVPPWEGFSPNSARLSIISSILDDKPGRSEKELGEADNLKLLLHNLDLSYRLHWIGGKTIKLTRHGQDLGTFQL

SEQ ID NO: 66957 - protein, 74 aa, Zea Mays
MQLHVGRWFRFSLPSQDHARILESRPVVFLANDGNRRIEIAPRFGAMTRTARHPAGGDAAAGLPGRRWLAGAGA

SEQ ID NO: 66958 - protein, 449 aa, Zea Mays
MEGRMTSLEATMKVSSSMASSISRNADPDQQTLRPNSVEQFYFPRPGQSLPGIPPFFGPPSSSLYLPNDNEAKFGNQFESNPSQNTDWDPQAIVSNLTFLEQKIKQLISTAGSLLPSMKNPLLSSNPAVRQLGNTLGSPMGLGMNANQRPSVDSKTDIPDTGKTSDYDELMNSLNPAQDERDEMIKCPNPCGGEGSEPTPMEDHDVKESDDGGEGENLPPGSYVVLQLEKEEILAPHTHFCLICGKGFKRDANLRMHMRGHGDEYKTPAALAKPTKDSGADHAPVTRYSCPFVGCKRNKEHKKFQPLKTILCVKNHYKRSHCDKSYTCSRCNTKKFSVIADLKTHEKHCGRDKWLCSCGTTFSRKDKLFGHVALFQGHTPALPMEDVKVSEASEQPQDSEPMNEMARSNMYSFPCSSSDGISNLDMKMADDDLAVMGSRTEIADGCRHR

SEQ ID NO: 66959 - protein, 389 aa, Zea Mays
MAETVMQSPLKISTTPQLSIDAQKIEERTMRQCILRPLTPSSNKIPASSSLDKLLKSKGARAGESNGPIKVAPQLSTQPSSNSVRTPVKTELVKQSQSGSLQVLSREQNGAVNTAAKDSTSNPVSPVLGRSSSMEPMRKSIVSPKLKVGTNGRSLHPLQGSFADRKASAKDKYKFFEMLRSKSVNGSSAAIESPSSLTDDQQNSNLDLPFKFIENGSSSCEEANSCEGSQRHLSDNETIPPSESHDVLDEGSLGIQVEDKDVSSSQVLGGTQDLSSKKPQEDNVNIVPIVPVYVNDGLMMPNSVDDEASLPLEETNPAEVLQHIGAGEENPCPAQEFESIGAGGEEELNLLRSMGWDENEDVQPLQQEEIADCLKQNVRLQQKLQECKG

SEQ ID NO: 66960 - protein, 446 aa, Zea Mays
MMPQQQQPGMAPPPPQAAPGAPPHWGGIPPPMAPQHQYAPQMWGQAPPPPPPPQAAYGQAPPPPQAAYGQALPPPQAAYGQAPPPPQAAYYGAVPAPAAVAAAPVGPSEVRTLWIGDLQYWMDDNYIYGCFASTGEVQNVKLIRDKHTGQLQGYGFIEFISRAAAERVLQTYNGTMMPNVELPFRLNWASAGEKRDDTPDYTIFVGDLAADVTDYVLQETFRAHYPSVKGAKVVTDKLTMRTKGYGFVKFGDPNEQARAMTEMNGMLCSSRPMRIGPAANKKATVVQEKVPSAQGVQSDNDPNNTTIFVGGLDPNVTEDMLKQVFTPYGDVVHVKIPVGKRCGFVQYANRSSAEEALVILQGTLVGGQNVRLSWGRSPSNKQVQPQQDSNQWAGANAGYYGYGQGYEAYGYPQSQDPNMYNYGAGAYAGYPNYQQQPVAQQPPQQQ

SEQ ID NO: 66961 - protein, 109 aa, Zea Mays
MFCLRTLRSPAASDSPDPASPAISAAAPATSITPTRDIPPRTPSTRSGPSPNVIWARKARARCPWPRRGVRPRRGVRPRRSRKTAARLLHLRGQIPHICILCLPRALRS

SEQ ID NO: 66962 - protein, 162 aa, Zea Mays
MAPAFSAQVPALRRGALRVRWVTAALFSSGILAGNKPILVRDFVRSALYDPNHGYFSKRAGPVGVLDASIRFNQLEGRSAYIQHLDKLYKKHDIAWFTPVELFKPWYAYTIAASILRTANLSVPLKIYEIGGGSGTCAKCILDYMMLNAPPKVYNDMKYIRD

SEQ ID NO: 66963 - protein, 161 aa, Zea Mays
MLITDIGVESPNPHLRSTPTRGRGSRRRRRRKAGRPWRRRRRRPRRPSARCRRISRSRPTPSARSRKTSPRTTRSASSTPSRSWSCSAMGPTCTSSSDRCWSSRTSLRPRPTSRSASRSGWIGRSKTWRKSKTARRNRYSSCSRGCRLYKLRLRQLFVGCN

SEQ ID NO: 66964 - protein, 223 aa, Zea Mays
MQAWFSSGSGPSSSSAASSSQPSLLAEWNSYAAARSAEDAGDGFGIDIEAAVRSANDRVAGTFGVVSKGVKGFPGSFKSTTSSVPSGRSLMYFGLFLGSGVFLVFIAFTIFLPVMVIMPQKFAICFTVGCAFIIGSFFALKGPKNQLYHMISKERLPFTMGFVGSMVATIYVSMVLHSYILSVFFSVLQDCCFPVLIAVFLVDDLAPLWLCRLACAASLISEV

SEQ ID NO: 66965 - protein, 516 aa, Zea Mays
MAIKTEYGVRKNWMGDPCFPIKYAWDGVKCSNASGNTSRITSLDLSNSSLHGTISNDFTLLTALENLDLSYNKLSGSIPDSLPTLPSLRVLNVSGNQLSDESLCKNYTGPLIFRRDFDGSVCNKPSPSPSRNKVAIIAISVVVPVLVLIVLLLTYFIWWQKRKPIVQPVPTHGSTRDPEPDNASGIKKSYGYNLNITENRQFTYKELEKFTNNFKKFIGQGGFGPVYYGRLEDDTEVAVKMRSESSSHGLDEFLAEVQSLTKVHHRNLVSLIGYCWEEDHLALVYEYMPQGSLFDHLRGKNGVSEALNWRKRVQVVLEAAQGLDYLHKGCSLPIVHRDVKTNNILLGQNLQAKIADFGLSKTYLSDTQTHISVTPAGTAGYMDPEYYQTGRLSESSDVFSFGVVLLEVATGESPTLPGQGHINQRVKQKIATGNVGSIADSRLGSAYDISSMWKVIDTAVMCTADSTAQRPTMATVVIQLKESLALEETREKGSSNRVSRGSDVEAMASTLGPFAR

SEQ ID NO: 66966 - protein, 522 aa, Zea Mays
MSKVTWCRSAGVKKKANMPQGKSKKNVVKEKAKKIKKNAESRAKVHENTDQIEINIREGVSIWITKAAVQKCFEFPPGTDKKLPIDPTTKTFDSLYRVLSVSEKKINVKKKKMKENMKEKQVEEEKIEMNMEEKKQNLVEDEGSQQEESEEEDGEDGEIGEEEGEDGAIGDAKVGGDGDKESAKRGGIKVAVRRNVLTPLNINLMLQNINNDEILKLLVKRNEDTDGTEPNLDIDLIVRCFFAVSSVAEFGKDKKKLISGCTTVLMVVFLDHLVENPLDPLTIPRINLYTSDFIADLIMVPKDSPGPEKKRRKFKNSEDTCYHEDSEMVPSPGRASPVVASVQSHKNFVDHADLEIVPSHENSVDLHSVYMAHVLERSRQSIVVDILDYNIPESTFADCLLPTGHMHTDVFYLQCQLLSKDWKDKVILSWKATQELIHQDIGVKELDKELTAEVMNKVDLVCALFYITVEFFQIDSRVCAFFRYLFLSFMPVTGPLLFFPLPNKRHISLTPTQGTVGWPRMF

SEQ ID NO: 66967 - protein, 117 aa, Zea Mays
MGARGYNPDSSPSYLVAGEERHQWRVEVHYTAAGSWSIIRGLGASTQLYPKGVEEERRYAGGDKMTMVVGIDDSEHNFYTLKWAHCSTSSRRPSCNTTALLSSPPSPLSPPLFALPT

SEQ ID NO: 66968 - protein, 51 aa, Zea Mays
MGKHLPTAWLPNLVTSAHFSSHKGLCSVKIFACPQILAIAHYLSVQPLCSC

SEQ ID NO: 66969 - protein, 390 aa, Zea Mays
MVCGENDTSINVTIPVVMIPQSAGKKLKNLLHHGASVEVQLYSPNRPTVDLSACFLWIMAVGTIVCASLWTEFVTCEQVDERYNQLTRKDGPDTGTKYREDKEVFEISAKGAFIFIIVASVFLLLLFYFMSSWFVWVLIVLFCIGGIEFYTIILYTSYNRIFKDCGQKTVQLPVLGEVLILSVGIVPFCAVFAILWAVYRHASFAWIGQDVLGICLMITVLQMARLPNIKVASALLSAAFVYDIFWVFISPLIFHESVMIAVARGDNTGESIPMLLRIPRFFDPWGGYDMIGFGDIIFPGLLVGFSYRFDRANRKGVLSGYFLWLIVGYAVGLFITYLALFLMDGHGQPALLYLVPCTLGVIVILGWLRGELYELWNFGKSPGENFVNEP

SEQ ID NO: 66970 - protein, 401 aa, Zea Mays
MALECARNALLQNTMDNKENTDKFRADLMNIAMTTLSSKILSQDKEYFAELAVDAVLRLKGSTNLESIQILKKPGGSLKDSFLDEGFILDKKIGIGQPKRIENAKILVANTAMDTDKVKIYGAQVRVDSMSKVADIEAAEKQKMREKVQKIIAHGINCFINRQLIYNFPEELFADAGILAIEHADFEGIERLALVTGGEIASTFDNPDSVKLGHCKVIEEIMIGEDRLIHFSGVAMGQACTIVLRGASEHVLDEAERSLHDALCVLSQTVNDTRVLFGGGWPEMLMAKEVDELARKTPGKRSHAIDAFSHALQAIPTIIADNAGLDSAELISQLRAEHHKENCTAGIDVITGTVGDMQRLGIQESFKVKQAILLSATEAAEMILRVDEIISCAPRRREDRM

SEQ ID NO: 66971 - protein, 237 aa, Zea Mays
MFLREYPIPRNSSAVCIYDTRGWSNDLEKNFKMLHQWMTKGISHGETTMWDDDEGNKIGNMKPLGRQYSFLRYKIRKVNFVLFVVDGVAVLESMDDSNKGYTEILRQTFMYPFLSIGDDKPVVVVTHGDRLSIQQRVHVQAELAELLDIPAQQIYDIPGSDDDQTDMVVLDMLHYCVRHAEQNLPVKLNYHLEVLGHETLNKMAEQLMGLDAVIEVAIIFLCILVLLLRFSDKLVQP

SEQ ID NO: 66972 - protein, 1671 aa, Zea Mays
MGRKKSRPVRAAGAAFAAAEADPCAPSPSGSTKRRTKGEARRDVCVEVDRSTWGHADIEHRDVAEVVLRDVSVYGDGDGEGALEEAFGASTFSLRLRVRDAPEEGFRMGQWPVVESDCVLLEYVVHGGREGKHAEYVVSGCFDGPDEGVSGLVHLVSLRFITLRVQSFRAFQHMGEVRVESFRVRVEVMEQAFSACGSLLEVARHPWRKSLMNVIAWLRPEVTTSAAIYGLDNLGVPMDDGGNADLVPKSDSQFDLAAFYEAIKPSANAGQLERDLPDLIPQLRPYQLRAAHWMVQRENGNTLHQEYANSAPYCVPFDFVHKNSRMFYNPFNGNISSQPEPSPPYISGGILADEMGLGKTVELLACIFAHRRPISLDFSVFQNKTEMDQIKRQKVERVECICGAASESSAYTGLWVQCDICDAWQHADCVGYSPKRNILFADTTEDVVSTNKKSTMKSGFRRKKKPRCSIVETEDKYICALCLELIEATQTNILSHATLIVCPAPILAQWHSEITRHTRPGSLKVCIYEGARNLDPSTIQKNDMTEIITADVVLTTYDVLKEDLSHDFDRHDGDRRFLRFQKRYPVIPTVLTRIHWWRLCLDEAQMVESGRTSVTEMALRLNAQHRWCITGTPIQRKLDDLFGLLRFLRTNPFDTYRWWVDIIRDPYERGNKVAMNYAHNFFREIMWRSSKIHVSAELQLPPQEECFSWLIFSSIEEYFYKKQHATCMDHAHQIIRSLRNDTNRRESISDSNALLNVYLSNDDIAKLLVPLLKLRQACCHPQVGSSGLCSLQHNPLSMDEILQVLIGKAKIEGEEELRKIVVALNGLAGLAVIEQRNQEAISLYKEALALAHENINDFRVDPLLNLHINYNLAELLRISSEYLQECPLKNPAFEVAISRKRKEIDTVETNVLSVKRNKICENSVLSLTANGLEISEDKNTIGQTCMTRDVDVENVTGCHSSFECFADDCLRKTCNTITEKYLSTFTSRLVVAQKDFNASFTEVLNITKELQSEYMNWWLYALDCIEENNISADDLIKKIDNSSSKSTTGLGSWGISSRVKSIAGLKYAIQADIDSLQSSRQHLMDRLLEVDKTMANPRDEDIEGQRYCPNCYDGTGSLCIQCELDELFQRYESRLFLVKKSNNGSVIDSVEEAHDLLRRKYELNHFFRNRKSKEGPEPDYDNNNPRSARENIQVYRHPSRTETALRVIWNHSKTVLGKQYSTMAKKHLLLFEAMRKEFPQARFLSIAQTQLLRAHDEIKMSISRLQLKEKEDDPSAANIVTREELIPYNVQFTSEKFMSLSSLARVRGQLRYLKGLAVCNKKTHNQHDESLAKAGDAVDTATSCSATGQTVSDFRNEPCPICQEKVFDQKMVFQCGHFVCCKCCLYMTEQTAAQFGKRKQWIMCPTCRQRTDIENIAFVVEKPWDKHEKSIEDLAESTISVQGSYGTKFEAVTRRILRITSTDGTAKVLVFSSWNDVLDVLEHSLAANNISYVRMKGGRKSQAALSQFKGQESNINVDKVNRAACKMQPVQVLLMLIQHGANGLNLLEAQHVILVEPLLNPAAEAQAISRIHRVGQDKSTFVHRFIVKKTIEESIYKLNRSRAVCSTINRKSKNFKDEPVLTLKDVESLFPMAGPDEPLEQADQNYGDSLRSLPPSVAAGLAAERRRLMEQ

SEQ ID NO: 66973 - protein, 523 aa, Zea Mays
MLEALGGPGFRGPPADVLRDKWLQRLKSEILQKTKEIEKDWATTGCTILADSWTDNKLKALINFSVASPMGTFFLKTVDASSHFKTHRGLYDLFDEVIQEVGPENVVQIIADRNINYGSTDKLVAQNYGGAIFWSPCASFCVNAMLDDFSKIDWVNQCICQAQTVTRFIYNSRWVLDLARKCVAGQELVCSGITKSVSDFLTLKSLLRHRPKLKQMFHSAEFSSSSYASRSIPCVEILDDDELWRAVEEIAAVSEPLLRVMRDVSGGRQAIGYIYESMTKVTDSIRTYYIMDEGKCKSFLDIVEQRWQTELHSPLHSAAAFLSPGIQYNPEVKFFRTIKEEFYQVLDKVLTTPDQRHDITAQLHAFRKAQGLFGSNIAKEARNNTPPGMWWEQYGDSAPSLQRAAVRITSQVCSTLTFQRDWGVILQNHYEKRNKLDKEALADQAYVHYNLTLHSEPKARRRPDADPIALDAVDMTSAWVEDSDGPILTQWLDRFPSALDGGDLNTRQFGGSIFGTNDNLFGL

SEQ ID NO: 66974 - protein, 63 aa, Zea Mays
MTSVRVLILPFVCLCEFLFQEHKRLLPCLSYQNSRKETFCFLTGKGLHISVRIISNTLVLCLA

SEQ ID NO: 66975 - protein, 98 aa, Zea Mays
MCEAPRLGNRAGGSPRIPLSWPRRRRCSAASWSVACGRTGRAASPGGPSSGSAASPTTPPRPSSASSTPAGAARMRMTTWRSTRCRCWCWRTRTRCRG

SEQ ID NO: 66976 - protein, 366 aa, Zea Mays
MSSAGPPPPLPPWSRLEGQVVLVTGASSGIGRDFCLDLARAGCRVVAAARRADRLRSLCDEINASAASRAPRAVAVEVDVAAGGSALEAAVQKAWDAFGRIDALVNNAGIRGAVHSPLDWPEDEWDRIIKTNLTGSWLVAKHVCRRMRDAKLKGSVVNITSIAGLNRGHLPGSTGYASSKAAVHYATKIMALELGADRIRVNSIAPGLFKSEITAPLFQKRWLSTVASKIVPLKEHGATDPALTSLVRFLIHEASSYVTGNIFIVDSDLLRCRPGGDAQVLNPSCLSLLQLFEADVYSVLDGSTNKTHKSVTGKRLPRNFLEMKTKETMMLLVPQTLMLSNVLLDTSTTSCEGSLLGTVPVRLGYS

SEQ ID NO: 66977 - protein, 138 aa, Zea Mays
MRVKKRSKHRKAVKFYATCFGFREPYKVLIDGTFVHHLLTQRLLPADEALRDLLSASRTPALFTSKCILAELRRLGKSHAESFDAAQLLTTTKCEHDKVVGAVNCVQSLIGDKNPEHFFVATQDPGLRENLREFLGFL

SEQ ID NO: 66978 - protein, 354 aa, Zea Mays
MGAALLASWPWDNLGFYKYVLYGPLVGKAVASRAWEAASPDRWILLLLLLFGLRALTYQLWSSFSNMLFATRRRRVVRDGVDFDQIDKEWDWDNFLILHALMAAAALCAFPSLRHLPAWDGRGFAVALVAHAAATEPLSYLAHRALHGSSGRLYARYHSLHHSSRVPQPFTAGLATPLEHVALGALMSLPLAAARAAGCASVALAFAYVLAFDSLRAMGHCNVEVVPASLFRAIPALRYVLYTPTYHAIHHTKKEANFCLFMPLFDLLGGTIDRRSWDMQRKMSAGVDEVPDFVFLAHVVDVMQSLHVPFVMRTFASTPFSVQLFLLPMWPFAFLVMLAMWVWSKTFVVVFFFF

SEQ ID NO: 66979 - protein, 801 aa, Zea Mays
MTSADKSPPSEVVDLDALQEQQVQRQDSVGKTTNGIDKQTVPSTMDLLGVFPTGLATSTPETNTSQSQGSSDSSGNNKSKSHSTEPVTVVNSHDKSTRDFSAAGFMRSNSTHESQPHIYKQTEQETRPYLSLQLFGSTEEDFPPKMDSVNKYLSSESSNPLDERSPSSSPPITRKFFPIHSVDEEVRHPHITDYGEDATMGEVSTNQAWLAPPLDLFKDSERPIENGSPPNPGYQSCYASTSCSDHSPSTSNSDGQDRTGRIIFKLFGKEPSTIPGNLRDDIVNWLKHSPTEMEGYIRPGCLVLSMYLLMPGIAWDELEENLLQRVNSLVQSSDLDFWRKGRFLVRTNSQLVSYKAGMTRLSKSWRTWNTPELTLVSPIAVVGGQKTSLILKGRNLSIPGTQIHCTSIGKYISKEVLCSAYPGTIYDDSGVETFDLPGQPDLILGRCFVEVENRFRGNSFPVIVASSSVCQELRNLEVEFEDSQVLDVSSDGQIHDSRQPKTSVQVLHFLNELGWLFQRASACTSSTRSDVSDLDLIRFSTARFRYLLLFCSERDWCSLTKTLLDILAKRSLASEELSKETMEMLAEIHLLNRAVKRKSRNMVHLLVKFVVICPDNSKVYPFLPNLPGPGGLTPLHLAASIENAEDIVDALTDDPQQTGVTCWQTVLDDDGQSPETYAKLRNHNSYNELVAQKLVDMKNNQVTVRVNGDGIRADRLGNDVGDRKRSGVQALQIRSCSQCAILESGVLMQPVRSRGFLARPYIHSMLAIAAVCVCVCVFMRALLRINSGKSFKWERLDYGTI

SEQ ID NO: 66980 - protein, 481 aa, Zea Mays
MAGAVVNCVNIRLNAATVAFLLEHSSAEVVMVDQEFFTLAEDSLRIIADKKKGTFEQPLLIVIGDATCDPTTLQDALRKGAIDYEAFLESGDPEFAWRPPQDEWKSIALGYTSGTTSNPKGVVLHHRGAYLMSLSGALIWGMNEGAVYLWTLPMFHCNGWCYTWTLAALCGTSICLRQKVICTTSRTRAQVKSGHQKRHSGFSEGHLLSYSQRGRDSLLWGTGRPEHHHQRPSSRHDSPPTSCRQRHDRWRCSATLCPGGNVEAWVPHHSHLRPVGDLWTIHGVRLEAGMGQAASRRARPAPRASGRPLRGPGGPGRGGPEDDDAGPGRRHHDGGDRDARERRHEGVPEEPGGERGGVRERVVPLGRPGRAARRRVRRGEGPRQGHHHLRRGEHQQPGGGEGGVPAPGGAGGVGRGPRRRAVGGVAVRVRDAQGRRGPLRRGGAGAGHHAVLPREAARLLGAQVRGVRAAAQDSDRQDQEA

SEQ ID NO: 66981 - protein, 92 aa, Zea Mays
MDCMSFFGDHSMCPVVIDDCSCVCVSSTLRFYILNQLRFYWLGVGVLKLKPVVLNKVSTLGIVLRSVGLTICRIVPCLYKKIIASFFSISTC

SEQ ID NO: 66982 - protein, 375 aa, Zea Mays
MNIEAALIERVGEPAKKLHTARSRNDQIVTDLRLWCRDAIDRILIRIKQLQVSLVILASKYVDLIVPGYTHLQRAQPVLLPHLLLSYVEQLERDAGRLVNCRERMNFCPLGACALAGTGLPIDRFQTAKDLKFTAPMKNSIDAVSDRDFVLEFLAANSIAAVHLSRIGEEWVLWASEEFGFLIPSDKVSTGSSIMPQKKNPDPMELVRGKSARVVGDLMTVLTLCKGLPQAYNRDLQEDKEPLFDSVKAVLGMLEVCTEFAQNISFNSKRIQSSLPAGYLDATTLADYLVKKGVPFRTSHEIVGRSVALCVSKNCQLAELELADLKSVHPVFEDDVYEYLGVENAVNKFISYGSTGSEQVKKQLEDWRIQLGVSS

SEQ ID NO: 66983 - protein, 239 aa, Zea Mays
MDVVKAAQLSGRTLERVVVHPLVLLSIVDHYNRVARDTRKRVVGVLLGTSSRGSVDVTNSYAVPFEEDDKDPRIWFLDHNYHESMFSMFKRINAKEHVVGWYSTGPKLRENDLDVHALFNSYVPNPVLVIIDVQPKELGIPTKAYYAVEEVKENATQKSQKVFVHVPSEIAAHEVEEIGVEHLLRDVKDTTISTLATEVTSKLAALKGLDARLREIRSYLDLVIDGKLPLNHEILYHLQ

SEQ ID NO: 66984 - protein, 146 aa, Zea Mays
MAMDAERRQAELIAQFSSQAVALSSAQQLAALVLEATSHPALFAFSELLALPALSMLAGTQYSSSLDLLRLFAYGTLKDYKNNSGSLPALLPDQVRKLKQLSVLTLAESTKILPYDQLMQELDVSNGIVRGKLDQLRRCFEVGNIR

SEQ ID NO: 66985 - protein, 374 aa, Zea Mays
MALRRVTPQRRPVLPLPRAFFSSCPPFTPPPSPANDPDDDHSPSSSPPPNPGAPRNPSSSLFQDIKDRLRLSPTSSPPRRNPSNLLRPNPARGPPSKPSLEEVRRMLDDFRPTVGAPSPSAPGVAPSFLDIIKRSSVAQGANAGQGVTGFDSVRESLKRSPLRTPHPPSTPFLTLSQSNIFSPELQRKFKAVDARKDGKESNVALSRLYSYEELGKKLGELRPAVGAKDGKEWFSLKELQGRIAKLAELEKQENQLSGSLWEIKNCIGNLNHKPENATQRVNIHALLNLRGQPTPDYMSQPPQEELLEKYFHPDHMSSEETMKLELQRVRDEFKMSENDCGSARVQTLSIPCSQTLFTGEKASPKHEKLSLLLI

SEQ ID NO: 66986 - protein, 239 aa, Zea Mays
MALAIWRGATRVDWATTSDGGQLTEQRSSESDKSRGEFDSRPTRERSPAPVACKGSTAAGHAGGSECAHVYRRLGICACGGASLVHEVAPTVEQAHAGINALALSQITINKLRENFIDIDKLCQECQTLIENHDKIKLLSNTRNNLNTTLKDVGGMMSISVEAAAAHDSLSNDQELIHTYERLIALDGKRRFALAAAASHKEEVGRLREYFEDVDQTWETFEKTLWGHITNFFKLSKER

SEQ ID NO: 66987 - protein, 328 aa, Zea Mays
MDDGDAAEFVRGKRVTVIGSGKSAFDIAAEVAKVNGAAQPCTIVYRTRHWLVHKSSVWGVDLSYFYLNRISQLLVHKPGEGFLRCMLAAALSPLRWAISKAIETYYKWSVPLRKHGMVPDYSFSFAMSSCLIAMLPEGFYDRVDEGSIVLRKSKAVGFSSDGVVLRDRNESVRSDIVILATGFRGDQKLRDIFTANWCREIVAGSPDTAAPLYRECIHPRIPQLAIVGYSESLTNIYASERMSNWVAQFLAGGFQLPSVRCMEESVAEWAEYKNRYNGRYFRRSCVSTANIWLNDLLCRDMGCNPRRKKGFLAEWFQPYGPADYAGLC

SEQ ID NO: 66988 - protein, 1873 aa, Zea Mays
MEAGPSSSAAMSAARRRRDALAQTLASRRLPEGMAEAGELVPGALAPEVMPFLRAADEIEPYNPRVAFLCRKYAFKKVQTLDPSSTQRGVRQFKTYMSIKLDQDDTQVLGNDANEIQQFYKKYCASMSHISKKRNFEEMARYYQVVYALYEVLQDVTNKNIDDQVLRCADMVEENGRHFKNYKYNIIPLNFPGSSEEIMELPEIRGAIDAISDIDGLPMPDMSSIQRHEDKSIQDLIEYLSLAFGFQKSNVENQRENMVLLLANISTRTAAQEGHPLVDTVNELWKKIFGNYKSWCCYLHITSSIIISHDITEHKKQQLKLLHIGLYLLIWGEASNVRFMPECLCYIFHHMAKQLHDMVDENNFQPPQAPVEEGSFLKNVIEPIFKVLQKEAQKSRGGTAGHSAWRNYDDLNELFWSEKCFTELNWPPDLSSNFFYKGCGMARKPKTNFVEVRTFLHIFRSFNRMWMFFILAFQAMLIVSWSSSGSLSGITDGTVLKNVLSVFITAALLNFITVTLDIMFTVQAWGSMEWTKLVRYLLKFVVAIAWIIILPLTYSSSIKYPSGAGKILNSWIGDWYNQSVYNIAIVIYMVPDILAALFFLLPQLQNVMERSDSRVLVLLMWWIQPRLYVGRGMHGDILSILKYVFFWAVLLISKLAFSFYVEISPLIDPTKFILDQQVGNYEWHQIFPFLPRNLGVVITIWAPIVMVYFMDTQIWYAIFSTVFGGVSGALSHVGEIRTLGMLRARFKSIPEAFSQCNAIKQREQAFEHRSFFRVWNSFINSLREEDFISDREKDMLMAPSYSSNLSIIQWPPFLLASKVPAAVHMAMNSKEGDEHELIEKIKLDGDRYDAVIECYKSLMIILNSLLLDTNDQNIVNDIDKKVTYSMIKKTFLEDFEMAEIGKVSSTLARLLQLLKSEPINDVGERKIVNALQDFMEITTRDFMKDGQSFKDEDERNQRFMNLNMNMIKEDYWREKFVRLHLLLTMKDSAMDVPINLDARRRITFFANSLFMKMPRAPRVHDMISFSVLTPYYNEEVLYSSHDLNRKNEDGISILFYLQKIYPDEWNNFLERIGVESNNEVSIKGRMDDIRLWASYRGQTLARTVRGMMYYRRALELQCYEDMINDQGYGLADLDTAKAARSKAIADIKFTYVVSCQLYGVHKTSKDSRERGLYENILNLMLTYPALRIAYIDEKEVQLRNGKIEKQYYSVLVKGDDEEIYRIRLPGKPTEVGEGKPNNQNHAIIFTRGEALQAIDMNQDNYLEEAFKMRNLLEEFLLTHGKSEPTILGVREHIFTGRVRFHYGHPDVFDRLFHLTRGGISKASKIINLSEDIFAGFNSTLRRGNVTHHEYIQLGKGRDVGMNQISNFEAKVANGNGEQTLCRDIYRLGHRFDFYRMLSLYFTTVGFYFNSMVAVLTVYVFLYGRLYLVLSGLEKSILQDPNIQNIKPFENALATQSVFQLGMLLVLPMMMEIGLEKGFGRALAEFVIMQLQLASVFFTFHLGTKTHYYGRTILHGGAKYRATGRGFVVRHAKFAENYRMYSRSHFVKALELLILLVVYLAYGSSYRSSSLYLYVTVSIWFLVFCWLFAPFVFNPSCFEWHKTVDDWNDWWKWMGNRGGIGLAPEQSWEAWWVSEHDHLRNATIRSLLLEFILSLRFLIYQYGIVYHLHIVHGNKSFLVYALSWLVIAVALVSLKVVSMGREKFVTRIQLVFRILKGIVFLVLIGLLVLLFVGFDLAVSDVGASILAFIPTGWFILLVAQLCGPLFRRLIIEPLHLLCCPYGTGGACRGPCCARFRQRTGAALRKMGPWDSIQEMARMYEYTMGLLIFLPIAVLSWFPFVSEFQTRLLFNQAFSRGLQISRILAGQNGSGTKSD

SEQ ID NO: 66989 - protein, 200 aa, Zea Mays
MADIVIRDLERVVKVALAIKKAVETAKQNKEDCVKIGERAAEVSTHMKRLKENTKAMEDPLMSDTLKSMEETLQRALKLVNECQRKHVVLHYLNAGGMSKKLRQVQEDISYKLWNGVLATVVDTRIALEKQIQSAIDAPLHQHQQRAGQVETSQSSHSRTDQASEKGKAMLARVKREQSELLSGSITRRTRCCHQEVSSL

SEQ ID NO: 66990 - protein, 510 aa, Zea Mays
MGCRSSRLDAADVSPAAALCRERRDLLRAAADHRARLAAAHAAYFRALPRVADALARFASHHHAATPPGSPVLTLPPPSDHADADADAEPKKQRSGSASGSATPHTGSGHSHIHFHSDDSSESDPDSSTDPCAGPGGCGAGHVDGDGDGDGEVPRPAPALRPGVPLPGRGGHGEPQERQIQDPAFARPEMPWEYASYDPYPSFPNTEFQNATFPRYYYMKASSTPANTVYQEPYGYGNFATSSSYMGYNNPMYGVPLQPDGDRPVEDRGRESVAPPPAAPPPMPMPETSPWDFFNPFDSYEQELPQYRGKGYDSNGSFTSSPNSSEVRAREGIPELEEETELESMRESVKARKAVESTASNRIDNADVSAKVKVSMEHKEVEIESVYSVSVLESGDESVCSCDCDHANTRTEGPMQVPAGDDQGGKVSSEDHSSIVVGEDVWPPEITGTRDVAVVVEEIKEQFKSVAACGDDVARILEVGRMQYRSRNRVLRCCMCGRKDFIRKLWRKKN

SEQ ID NO: 66991 - protein, 193 aa, Zea Mays
MTSMIDRWRPETNTFHHRIGEVTPTLQDVSMLCGLPLKGKPVYSINVRNDWLEDLNKRFSSIPWKEGMNVPEVEKIDTKHSNGPLLHWLKSLSGNVADKFFITYAKLLADMNNRDCIYSWGSAVLAATYEGLSKICITTGLSMPKVRTLTGCPLLLNLFVYERFIELRPRLKNAYNYSTPDNMDGDTMGSRWC

SEQ ID NO: 66992 - protein, 428 aa, Zea Mays
MASEIEVLEDTTTSSTSLVAAASTAPSAAEGAGAPAENESLKNDVYTAAAYGDLEKLQRLVEGEGRPVTEPDGGGYYALQWAALNNRVAAAQYILEHGADTNAVDHTGQTALHWSAVRGHIQVAELLLKEGAKMDAADLYGYQATHVAAQYGQTAFIYRIVAKWNADPDIPDNDGRSPLHWAAYKGFADSIRLLLFLDAYRGRQDKEGCTPLHWAAIRGNLEACTVLVQVGKKDDLMVKDKTGLTPAQLAADKNHRQIAFFLDNARRVHDRGCGANTRFGKLSKLGLAPFLWCTIIGMLITYVHSVILGQYVMTMTAPFGMFAWSGVFLATAGLVMFYKCSRKDPGYISINTRGSQNQRDDEPLLKMELENPALLFGNWSQLCITCKIVRPVRSKHCSTCDRCVEQFDHHCPWVSNCIGKVHRYMFPM

SEQ ID NO: 66993 - protein, 770 aa, Zea Mays
MPWSGMNPMQVVGAVGFQDRRLDIPKEVDPLVARIIFECWQNDQQRTGIYLVHLKAGARASTTHRAPAPAPARNVFLPAIPPPPTPSLPFPASRPRRPSLQSRPRQRRVPAAHLSHLFLSLALLTRRRSVGCRLSCLLARPLFMVMVDEGGKGEAQPPGLDPRTRRSAATRATDDMDGGGRGEEWEGAPPATCSRSRRRRCPCPSSSPAWTPPSGARGATISATVAIRRAGPAAPAPGPHTPTPAEERSAKRVRMCLQCGAAVTPQWRSGPMGQGTLCNAYRVRLKVAGVLRDQGRLLPEYRPLASPTFEPSEHANKHSQVMQLHRQRKSQGQHHPLPAEHPRAMDVLQFPQRWQAYTALRSAGKSVEIIFVSLDRDEASFRDHFQGMSWLAVPFDAAGLLRQKLCARFAIERIPALIPLSASATPSSGLGCGEDAVRLVGEYGVDAYPFSAQRRRELESMDDARRGGGRLQELLGCEERDYVISADDIKIPIADLAGKTVGLYFGAHWCPPCHVFTKQLKEVYNELKILRPVSFEVIFVSIDRSKGEFQASMSSMPWLAIPYSDAVRKKLTRIFVVKGIPGLLILGLDGKALKTDVHRPELLPTYEGSRCNKIKGIKAPRITPKNVIRFSSYTDTFYFITPEAWYWSEYLYLKKESLTVVISDVKCDDLKEEGKVQQTKRGNSIHDHSSSHSIRSFSALTESGPGLTSVHPSSRTRPPPFYALLPRSDGPFAGDEHTPQQSSAKREIQWRRRRGSGCSWQRGGRRLTLR

SEQ ID NO: 66994 - protein, 469 aa, Zea Mays
MLWIFGLGLRSWMQTGMCLAYFNLRFVNVTFWRTPEAAESHAKMAHSTGLVQAILFEVVDRDNIGGSAYGGQRSICCTPDLAKLEGCKQGEVIRRPSSDDPDWPFVLDTHFSANHLSVKLEDEPVRITKTGMYNLFFISCDPKLRGLTMSGKTIWKNPGGYLPGRMAPLMKFYVLMSLAYLLVMIVWFSQYVRFWRDILPIQNWITLIIALGLFEMTLWYFEYLNFNSSGVRPVGITTWVVTVGAIRKTVSRLLILSISMGYGVVRPTLGGLTSKVLLLGLTYFLASELLDIAENVGTINDISGKARLFLVLPDAFLDAFLILWIFTSLSRTLEKLQARRSSVKLDIYRKFTNALAVSVIASVAWIGYEVYFKATDPFSERWQSAWIITAFWDVLAFVLLLVICYLWAPSQSSQRYAYSGEAADDDDEESQSLTKGDGEVGMVKIDKDRNAGVSSAFGLEDEAEEDKRE

SEQ ID NO: 66995 - protein, 1044 aa, Zea Mays
MELALGAMASLAPKLGDLLMEEYVVHKGLKPDIESLSDELVMMNAALLDASRIPPDQLTAVEKLWARKVRDLSYDMEDAIDDFILRVAGGDNSATDSKLLKKILVKVKDVMSIKKLKDRRQISDKVKDIKKLSSELAELRAKYTVRGAGADLAASIGIDPRVINLYKKESDLVGIQESRDKVIRMLSLGTKYDDAHASHQDLKIVSIVGVGGLGKTTLAKTVHDMLKKQFSPSAFISVGRTPNLNRTFEKILVELDAKYKQVDMTRWDLEQFGKELHEFLQNKRYLIVVDDIWDVGSWEAIRYGLKNNNCGSRIIMTTRNFELVTKVEEVYRLKPLSNENSKKLFYKRIQSQEGESLDDELSTEIIDKCGGIPLAIIAIASLLVERPCEEWSKVYHSISLGNGDNTTKILSYSYYDLPSYLKPCLLQLSIFPEDYQFDTNAAIWMWIGEGLVHLEKEEGSLFVVGERYFKELVNRSMIQPIEDKYDRLVEVFRIHDIVFDLIRKLLKDEDFITLLDSGGQHSPQASLRREKKTCVPRSDCKLRRLAVRNHHVQRFPEDIMDIPEALRSLNIIYCNIAIMTPLHSFRVCRVLCIEYSYVPISLKHLGKLLHLKYLELYGTPVDELPKEIGHLRSLQTLLLVNTGLDELPPAVCSLTRLMCLMAEGFKRLPADKMGNLTSLEELRLESIVGQSATQALVAELGKLTRLRVVNITFSEELEESLQEALVQSLFNLWGLQELALSSKWSQQGSAMWGDWEPPRQLRRLIIKGIIFSRQPRWINRSCMAHLCFLSLAVHAVEAQDLDNLARLPELRYLKLDGVSWPPRYDTGPDDFRNLRFCDVGTMLVFHMGAMPRLEELVFGVCAGYWSWEHNGVLLEQCPTMDVIEDLDLGLDNLLSLEQVTVVVDCSGATAAKVQEVEAVVMRAMENHANRPTIKMERVCENFILSDKEQEDLLQRRIEKEGRLLEFKDKSDAFFITFLRLLRHPLKSVISHDCAGASMCEVQKVEPAWRHAAEVHPNHPSIELIRKNNDEIASSSDHPNTELRN

SEQ ID NO: 66996 - protein, 54 aa, Zea Mays
MEDSHPHDGHQVGRLHLGEEEVGRGARVEGWRCNHLGKKKRDWGGCKSGRERGG

SEQ ID NO: 66997 - protein, 487 aa, Zea Mays
MSSPNNSVSAALSETTPVFQLRVWQLIAIAVGIVMAILLVIALCLSLQRKKKTVKGFDNSSLAEIPIVSKEINVDRVGAQSLHDSEAPFMPVRDKYTQTKGAGQLGESRSVDADTFSQFSSVYNVEKGGSSYSEDYSHSSSGPARKGSSPYAYSASPLVGLPELSHLGWGHWFTLRDLECATNRFAKSNVLGEGGYGVVYKGRLVNGTEIAVKKILNNLGQAEKEFRVEVEAIGHVRHKNLVRLLGYCVEGIHRMLVYEYVNNGNLEQWLHGMNQHGVLSWENRMKILLGTAKALAYLHEAIDPKVVHRDIKSSNILIDDEFNSKVSDFGLAKLLNSDKSHINTRVMGTYGYVAPEYANSGMLNEKSDIYSFGVVLLECATARDPVDYSKPADEVNLIEWLKMMVTSKRAEEVVDPNLNVKPPKRALKRTILVGFKCVDPDADKRPKMSHVVQMLEAVQNAYHEDQSKLSQVGSQQSLEETSNSADA

SEQ ID NO: 66998 - protein, 310 aa, Zea Mays
MSRAGRLVMVKVLTMETFEHLGFFLQLSEGTPLSQAATFFANSDPDMPAAPVPAALVHDWVLQHIASALEFMAEKTVAKENSQHNAFDPDVTMSDAVTNTRIHSSSPTGSSAPNYPGYYRNASFVEGCSKTSVVKQASDLKGHSIKVLNCHDSVIYILAPLKYATVYGCSDTTIILGAIGKVVKVEHCERVQIIAASKRICIANCRECIFYLGVNHQPLIVGDNHKLQVAPFNTYYPQLGEHLAQVGVDPNVNKWDQPFVLGVVDLHDSLSHPAGVSDVQAESTTCLDPDLFTNFLVRELYIPFIIAILC

SEQ ID NO: 66999 - protein, 684 aa, Zea Mays
MPYESWWTPKVNSVAPVPNPIFMDASPLNPPPLVEEELVLRRSARCLNRPTRPSYAEQEPPKKPGGRGRSKRKRDEEKPELAPAQQGAKSPDRKDSKDEAGEKKPTPMIAALPVSCAGVAAEDDATGTGKSAKLRVKETLRAFNSHYLHFVQEEQKRAQAALQEINAKSGLKRQTKGGEKKRPSKRPDLKAITKMQEMNAVLYPEKTIGHLPGIDVGDHFYSRAEMVVLGIHSHWLNGIDFMGLKYQGKEYSNLTFPLATCIVMSGVYEDDLDKADEIIYTGQGGNDLLGNHRQIGSQQLKRGNLALKNSRENGNPVRVVRGHLSKNSYTGKIYTYDGLYKVVDDWVQKGVQGHVVFKFKLKRLEGQPSLTTSEVRFTRAEAPTTISELPGLVCDDISGGQENIPIPATNLVDDPPVPPSGFKYLKSLQIPKDIKIPSSIIGCDCEGGCASNKKCLCAQRNGSDLPYVSYKNIGRLVEPKAVVFECGANCSCNHDCVNRTSQQGLQYRLEVFKTASKGWGVRTWDTILPGAPICEYTGVLRRTEDLDGSQNNYCFDIDCLQTMKGLDGREKRAGSEMHLPNLHPENDSDAQPAPEYCIDAHSIGNFARFINHSCQPNLFVQCVLSSHNDVKLAKVMLFAADTILPLQELSYDYGYRLDSVVGPDGKIVKLACHCGAPDCRKRLY

SEQ ID NO: 67000 - protein, 257 aa, Zea Mays
MRCLPFLHGDTKEKDPVTKSASLRSMSTTSTERDVRSGSDFTSLNVSDMSAESIRRTQYPSFTDRPSNLRVFSFAELKSATRNFSRSLMVGEGGFGCVYRGVIKTSDEPNERIEIAVKQLNRKGLQGQKEWLTEMNVLGIVDHPNLVKLIGYCAEDDERGVQRLLVYEYMPNGSVDDHLSSRSTSTLSWPMRLKVALDSARGLKYLHEEMEFQVIFRDLKTSNILLDENWNAKLSDFGLARHGPAEGLTHVSTASSR

SEQ ID NO: 67001 - protein, 52 aa, Zea Mays
MHWSLIIVCMPTKEADSGPIILHLDSLGLHSSQKLFDIVAREDMEASFEKYQ

SEQ ID NO: 67002 - protein, 679 aa, Zea Mays
MYLRPPFASEEMKIDDWIKVRQCGIRYYLSLGDQRIVDKYFIIRPKAEFEVGRTTLGGLLALGYNVVVSFKRTCTSVNIDQLLIAAETIDTLNETFLVLKGPSRKIVAAEASKLGIKGPWITKSYLEMILESKGVPRLNTPPPVSSKLLTESQEKKIAAPKPIRVSAENITNLDDLMQPWTRSPPKKLEQEHVLAKWQFISDSSSRSNIQLAPLPDSYDLDRGLLLSVQAIQALLENRGYPIIVGIGGPSGSGKTSLAQKMANIIGCEVVSLESYYKPEQVRDYKYDDYSSLDIALLTENIMDIKKRHKAEVPCFDFENFSRKGFKELQVSEESGVVIFEGVYTLHPAIRKFLDLWIAVVGGVHSHLIARIQRDKNRAGFSISQTEIMTTVFPLFQQYIEPHLVHAHLKIQNDFDPVLSPESSLFVLKSKKQVSCQDILKVLDASKVCSSVQNFTDVYLRLPGIPSNAQLTEGECIRVRICEGRFALLIREPIREGNFIIQPKVDFDISASTVAGLLKLGYQAVAYIEASAVIYQDGKILIEVDHLQGVSTPYLQIKGTNKEIVTSAGSALCLDGSYTTKSYLQIILESLPADGNVSIGIHNQQAARLQELVEFIQSQGGSFNSDLSSPIRETSSTDSVIDDMQSRIRKLERWNTINMVLWTILLSALVGYSLYQKKRH

SEQ ID NO: 67003 - protein, 97 aa, Zea Mays
MLHPALQYPRVLFMVRAASEGREKGVVAALSPAEARRMCMAQGVVADLERELAARTRRRWEGRPQGFADSWQERRDFLLISCLPSIDTISSYIERVT

SEQ ID NO: 67004 - protein, 242 aa, Zea Mays
MGEKDDGSDSIAVQLADETHWNDLVIIIAVVSSKQKETSSTSGMRDSVETSPLLQYRAQTVVPGRVLKMEEAIKNRDFESFAKLTCADSNQFHAVCLDTSPPIFYMNDTSHRIISLVEKWNHSEGTPQVAYTFDAGPNAVLIAQNRKTAAHFLQKLLYYFPPQDNDLSSYLVGDKSILGDAGLHSMKDVEALPAPPDTKIPDQKFKGDVSYFICSRLGAGPKVVVDEGQALIDSVTGLPKGV

SEQ ID NO: 67005 - protein, 434 aa, Zea Mays
MGAFLLFVCLLAPVVVLACAVRGRKRRASSAAAGGKALPLPPGSMGWPYVGETFQLYSSKNPNVFFARKQNRYGPIFKTHILGCPCVMVSSPEAARFVLVTQAHLFKPTFPASKERMLGPQAIFFQQGDYHAHLRRLVSRAFSPEAIRGSVPAIEAIALRSLESWDGRLVNTFQEMKLYALNVALLSIFGEEEMRYIEELKQCYLTLEKGYNSMPVNLPGTLFHKAMKARKRLGAVVAHIIEARREGERQRGSDLLASFLDDREALTDAQIADNVIGVIFAARDTTASVLTWMVKFLGDHPAVLKAVIEEQQEIARSKGSSGEPLTWADTRRMRTTSRVIQETMRVASILSFTFREAVEDVEYQGEASIILMRSCPSLSKKKKKTPATVSRWIGGGGSLSLSCAAADELDGRDAFLTEMNRQTDSSAVCWLQGT

SEQ ID NO: 67006 - protein, 952 aa, Zea Mays
MPPAVAPASPRQDPSGSSLSAAAAAASMANPVLGLGLAPPGAEPSAGTPPSSRRAPRLAKRRHAPASSRFRAAQASVGTWNPFGGGGGTDGQTRGFVFGAASPVSQQPSEPAVEISSSSEAPFVFQSVRENLPRFEEGLSGSSMLPDKMGKLNLRTSGEVGDGLGQGRDRKDGSSAFGVDISGLFSNKEDNGLQEKLTQLNLGHREPLQSEKRDSANGVPQAFVFGCNGAGSFADCKNTVASGAQSDDPSSVCGTDAKAMAGKSTQFNIGSQAPSWGGGIEGTNGAPEAFTFQSTAVSGHVDNINNVVSGANTSANTSSSTVAKGVGDVDLLPEKLTRLNIGSDMPLHESKSGYQPKVFRAVQGTIFGNETSSTSDRSSEFLSANSNTSSSSSDLFSTANSNTSNSANGTYCFPPEKTPDLNAGEGVMSESLESDSSNCPPQTFLFERNETRSSVSHSASIAMDDGGNFVNHKNTDTCSSARGTFDYAGALPEKMTKLNIGCRNSYHSRKDETATEPPEVFVFGCNVSSFSSTHTASKSHDPTTPEFCFQSKAEATSGYGAVPQTKVQESYLFTTLNNSCSPSTFENAVPAFSFGTMDAEIETAPDDHFSVKQDLPGFSRETLFGLDSIKSAYKDKREAHKGKMKNKRPTRLKQHAQLHQVISKEACNDGKSSDLAGDYSPMDCSPYPAEAEHVPTEAYVASGQPVHIGDSVISNWNTSCAEDDVVSATEHLIIDVNLPMFGDEGRGPKLDASESNFGSSFSSFQGDQSNGPQHSFTNIGQDCNDNTYRTPHDFVEPPAFQSSSSNFSGLNFRFGVSSSPQISAAAQRRNTRRKLRTKGSLASKPSTIGSFEQSKSSQDTKGMRFFCETSKNEDPVKEQPSRKSSTSAALEACETWRTRGLLYPWNKLCYPLWCFWTLFSRIDAVLQQPCSYKNVAWHDVGSTSRLFDCYIN

SEQ ID NO: 67007 - protein, 74 aa, Zea Mays
MTPSTSRLVWATTPRPRAMPPPEPDEGPPDARSTAIGYGSPPKQTPTASPQNQNPPLLNYAWDMVIMRGVPYQG

SEQ ID NO: 67008 - protein, 168 aa, Zea Mays
MAEHLISTADHDRLPDSYVRPETQRPRLREVVPDAEIPVVDLADPDREAVVARVAEACRTHGFFQLLNHGVPEQLTAAMMSVAYEFFRLPAEEKAKLYSDDPAKKMRLSTSFNVRKETVHNWRDYLRLHCHPLEQYVPDWPDNPPSFSVAGALMCTGRSVSVGDELAV

SEQ ID NO: 67009 - protein, 117 aa, Zea Mays
MFGAGAEKVKLENKTWKIDTGTRTLEIELAMLSSAHHVEMNPSDAGFQDRYVVQEIIKEMAKNRPIDAKGRRAFKGAQDAPWIKGYFSSGSFRGQVHEHLQGVPGGYIWLSKTSSYN

SEQ ID NO: 67010 - protein, 344 aa, Zea Mays
MLLLRRLVRAGRSWGTEARGLASGAPREAADAVVVGAGVVGLAAARALAMAGREVVVVEAAPSFGTGTSSRNSEVIHAGIYYPPRSLKARLCVRGKEMLYKYCEERGVAHKRISKLIVATGAAEVPKLDMLLRNAKENGVDDLQLMEGSEAMEMEPELRCLKALLSPSTGIIDSHSLMLSLLADAENLGTTISYNTSVISGHVGSNGLELHVCESKELQNYHVGSHVNAQLVLLPKLVINSAGLSAVLLAKQFHGLDQEFVPTPHYARGCYFTLSQTKSPFSRLIYPLPEDGGIGVHVTLDLNGLVRFGPDVEWISDGGKDHVSCFLNKGGMSMVFLDWLICLE

SEQ ID NO: 67011 - protein, 707 aa, Zea Mays
MAGRYYQGQGGGGGTSMEVVSTPNQELALTNCAYVCPADLRRFPNALAVVADSWVFTLREHNAVASGRIALNAIQRRQAKVSAGDSVTVSSFVPPDDFKLALLTLELEYAKARANRNDELDAVVLAQQLRKRFLDQVMTLGQRVPFEFHGTNYVFTVNQALLEGQESSTPLDRGFLSSDTYIIFEAAPNSGIKVINQKEAASSKLFKHKEFNLEKLGIGILLYGPPGTGKTLMARQIGKLLNGKDPKIVNGPEVLSKFVGETEKNVRDLFADAENEQRTRGDQSDLHVIIFDEIDAICKSRGSTRDGTGVHDSIVNQLLTKIDGVEALNNVLLIGMTNRKDLLDEALLRPGRLEVHIEINLPDENGRFQILQIHTNKMKENSFLSPDINLLELAARTKNYSGAELEGVVKSAVSYALNRQITMDDLTKPLDEESIKVTMDDFVNALHEITPAFGASTDDLERCRLRGIVDCGKAHKHIYQRAMLLVEQVKVSKGSPLVTCLLEGPAGSGKTAMAASVGIDSDFAYVKIISAETMIGFSESSKCAQICKVFEDAYKSQFSIIVLDDIERLLEYVAIGPRFSNLISQTLLVLLKRVPPKGKNLLVIGTTSEVGFLESVGMCDVFSVTYHVPKLKKEDAKKVLHHLDVFDDGDLDAAAEALDDMPIKKLYTLVEMAAQGPTGGSAEAIYAGEDKIDINHFFSILSDIIRY

SEQ ID NO: 67012 - protein, 354 aa, Zea Mays
MGSEGRVWNGAGVAAGSGYGGSVEAKATTAAPADVPTSAASVDISLPLPEMSPHIIGLCKELVKGWSSIDSSRFSIETVSGGITNLLLKVSVKGNNGNDSSVTVRLYGPNTDLVIDRKRELQAIPYLSAAGFGARLLGMFENGVVQSFIYARTLSPADMKEPKIAAEIAKELRKFHQVDIPGSKEPQLWNDIFKFLKKAAALKFEDNEQQKRYVKISFTEIQDEVKELKDLLDILHAPVVYAHNDLLSGNLMLNDLEGKLYFIDFEYGSYSYRGYDIANHFNEYAGFDCDFNLYPDKDAQYHFFRNYLHPDRPSEAQDMEVLYVETNTFRLASHIYWALWALIQHLNAGKGIPN

SEQ ID NO: 67013 - protein, 440 aa, Zea Mays
MDSDNDCGSDAGAEWVWVRRPSEVEAAAAAAGWLADEEARPLKVVFGSPAKYFTDAAPIGNGRLGAMVWGCVESERLQLNHDTLWTGGPGNYTNPNAPAVLSKVRSLVENGKYPEATSAAYDLSGDQTQVFQPLGDIDLVFGEDIKYTNYRRELDLHTATVTVTYTVGDIVYTREHFSSNPHQVIVTKISANKPGNVSFTVSLTSPLDHKIRVTHANEIIMEGSCPGQRPEEIKTAADQPIGIKFSAILYLQINGANSTVEVLNDNMLKLDCADSVVLLLAATTSFQSAFIKPSESKLDPTVSAFTTLSIARRTSYSQLKAYHIDDYQTLFQRVSLQLSQGSNYDLRRSRLVQSAETSSQGANVSDYGFQISGCTRLTSLNSFVKPTVERIVTFKDNEDPSLVELLFQFGRYLLISCSRPGTQISNLQGIWSNDTSPPWE

SEQ ID NO: 67014 - protein, 541 aa, Zea Mays
MMSKVDTCKDRIAAALETLRPTSSWERGAASGHEEDAVLLGGRGFGTAMSALIEYLSSGYGSTFALARVFAFLSGAPDYGAGLLDTRRYGEQYASKGVDANLALLPEQIPFYRDLAAVAVQSGVCIDIFAVTDEYTDLASLKFLSIESGGYLFLYANADDSTLPQDIYRLLSRPYAFGCVLRLRTSSDFEPGNSYGHFFPDPQYESVQHIICCDSFATYAYDFEFSHNNGFSRHTDPAVVQIAFQYSVIEPAKETSGDGSQSSASYKFSLKRRLRIRTLQYRPARNISEIYDSVDPEVVLHILVHKVILECVDKGVREGRHQVHAWLSLLAARYNQVLSSDVRTPLSSIDIDFSQCPQLQTIPQLVFALLRSPLLRLHEEGVHPDYRIYLQCLFSALEPSSLAKAIYPVLISYSSPDKQAFPRHTLSRAALIMSESPIFLLDTFTNLIVYYSSTADPSFPFPPPRDCLLRTTINKLKQDRCITPKLTFIHGGEDDSTLFESYLIEEQDVDGSGLTTGSGFVAFRESVRNVAGEIIQEEIGS

SEQ ID NO: 67015 - protein, 497 aa, Zea Mays
MEGGGGSGMGGFPEATGNLLDAAAQEFHPTVCAPYPLQPLPQQLYCPHPYPAMPVPPPPQIAMLQPVPPMAMAMAPQPGYTLPTTTPVVNGPSSRVVVLGLVPPHAQEADVAQAMAPFGAIRSVDACAVASEGVATVHFFDIRAAELALTCVREQHMRQQSRLGQLYAAAAVAPAWAPAPTPQAWDWPHPNDDGRGLVLGHAVWAHFATGADDGDNRGSLVVLSPLPGVSVADLRQVFQAFGDLKDVRESAQRPSHKFVDFFDTRDAARALAELNGQELFGRRLVVEFTRPSGPGPRRRGYAPHQHRPTAPTPPRLQATWRPSQPTSSQPPASSSSSGSVRAREGVVLLRRSSCKSSAGSDQSSKGGNAGTSHERKTKGGKIVVAAAAASSSTPTASGKQTQKGVGSSGGGSWKGRKSGWEARFLFKEPEAGGGADTQATPASEMDTRTTVMIRNIPNKYRSCCSTCWTTTASNPTSGSWRAARSSPSPPTISSTSP

SEQ ID NO: 67016 - protein, 76 aa, Zea Mays
MPWIWDRVSLNTAIPYMKRQSHTGSGEMARVARTLLAKDRLKGVVCSRVARTSSCSEGSVGMVDICKSYEKHMSCG

SEQ ID NO: 67017 - protein, 672 aa, Zea Mays
MSMDFGAPADDPKAFRNICRDRILKDLLKPDKDKETKSSWKVLIMDKFTVKIMAYACKMAEITDAGISLVEDLFKRREPMPSMDAIYFLQPLKENVIMLLSDMSGRCPLYRKAYIFFSSPIPKDLVTYIKNDSSVIPRIGALREMNLEFFTIDMQGFVTDHDTALIDLYGPSEQNSKKFNDTISTMATRIATTFASLKEFPCVRYRAPKGDASTTTKFDMVPKWLATAVWEIVSKYKSTIPEFPQKETCELLIVDRPIDQIAPVIHEWTYDAMCHDLLEMDGNKYIYEVSKMGSEPEKKESLLEDHDPLWLELRHAHIADASERLYEKMNNFVAKNKAAQLSRDGGEVSTRDLQKIVQALPQYSDQVEKLTLHIEIAGKMNRCIREYGLRDIGQLEQDLVFGDAGAKEVISILRSKQDMSPENKMRLLIIYAIVYPEKFEGDKGEKLMQLAKLPHDDMDIINCLGYLDGSNTKKSSRTGTFSLKFDAQKKKNAARTDKQDGEETWALSRFFPLIEELIEKLSKGELPLKEYPSMSEPSSASASQDATQTASSTARPAQNPQPMSMRSRRTPTWAKSRNSDDSSSSDSSVLRHASGDFKRLGNRIFVFMIGGATRSELRTVHKLTMKMKREIVLGSSSIDDPPQFISLTHYTYFTNEQLYILLGCCRLSPATH

SEQ ID NO: 67018 - protein, 109 aa, Zea Mays
MEPPTVHFLPSASLSPRPLYKTAGSLLSLLTRTSLTLSLSLARRSPSCWSPSVQHPGTRSSATHPPHKALLCSRRAHPVRRSSAIRGASPELTPHRPNASPELRRPSST

SEQ ID NO: 67019 - protein, 705 aa, Zea Mays
MAEELLMSDSIIKVFGALRMSVKMLLMWNSRMEIDGGGDSIVATSLLDASNLIVLKESSVIHSNANLGVRGQGVLNLSGDGDTIEAQRLILSLFYSIQVGPGSVLRGPLVNRSSDDVAPKLNCEADSCPVEIIHPPEDCNLNSSLSFTLQVCRVEDIDVWGVVQGTVIHFNRARSVTVHTSGTISATGFGCRSGVGQGKMLRSGVCGGGGHGGKGGNGFYKGDLAEGGAIYGNADLPCELGSGSGNDSTELSTAGGGIIVMGSWDYSLPSLALYGSVESNGGSYASGSVGGPGGGSGGTILLFVHTLSLAESSVLSSVGGFGSTGSGGGGGGRIHFHWSNIPTGDEYVPVAAVKGSILTSGGVSKGLGYSGGNGTVTGKACPKGLYGTFCKECPLGTYKNVTGSSKSLCFPCPPGELPHRAIYTNVRGGAAETPCPYRCVSDRYRMPHCYTALEELIYTFGGPWLFGLFLSGLLILLALVLSVARMKFVGTDELPGPAPTHQGSQIDHSFPFLESLNEVIETNRAEESQGHVHRMYFMGPNTFSEPWHLPHSPPEQITEIVYEDAFNRFVDEINTLAAYQWWEGSIYSILCILAYPLAWSWQQWRRRKKLQRLREFVRSEYDHSCLKSCRSRALYEGLKVTATPDLMLGYLDFFLGGDEKRPDLPPRLRQRFPMSLIFGGDGSYMAPFSLNSDSVLTSLMSQVSF

SEQ ID NO: 67020 - protein, 649 aa, Zea Mays
MAQKWGNIYIVNPKWVDQSVARRACQDENSYLVCQTSSAFSGSKSSHKEQQNPEISSASASFQPVPATSVDDSVSMSQHLPASFGDASRISSTDIVGAPSVQETDDMQVDSHIAEDSEPENDDLYLSNCRISLVGFEEKELLRLVMLIRNGGGSRHILLSEKLTHIVIGTPSDEEKKEVRRLAAWGVINIVKVTWLEDCNKAKKEVKVSSMHIATELLLKGFSQVSMENSADTRETKVAKSSGGIFHVPTVNDLHEKHHEKGVSSERKPKRGKHENSISKTRSAARTEKSSQQNGLANVSEYQLQYKVTSIMNSGSSRSNIFKGRTFSFSNSFSHDKRPEVVDWVRDGGGVMVDDIHSTAADFIIECHGQNSLPCDFSHSLVSTQWIRSCLEENCLQDVGSHPIFSPLRCRIPFPGFESFRFCISLSQYGEKERHLLKNLCFLLGAKFTDKAYKGVTHLICKFASGLKYEVYSKRGTPTITSEWLYECVKQDKLLPVDHFQPKPLTSQDKDAYPCTASQYSTQATRFDSSELLSGCQVTKNNATHNSVNEETTMPAVSRKRRISVPGKVNGICGNIEKTEKQLDNSSVPDVADAIEVLSSKIQDVQSPRSIFQPDNSVVQEQKDTHSFDISRSWLNISKIAPLSQRFKT

SEQ ID NO: 67021 - protein, 406 aa, Zea Mays
MAFWGVEVKPGKPYTHIHHADHGRLRICQATLGNCDAAARTVLQCNVGNKIPIKLCSLNPKLAETCHLEVEFEEVDDVIFSVIGHSSIHLSGYYVCASNRSNVGDDESESYGEDIGHSSTDEEHDTSEDSYESDFIDDREVPLSEKYGSGSIDDSDDECTQRCHRQKAEKTTQNAERRRRLKKHQVGSTDYDDDDTPVMKHVAKRCAPKISDSDNAKVAEETEHQNGQANGITKKRIIDVKKRKQSSISEDPASSMDMTDANAPSVSKQVDEIKKKSKKKMRNQSGENNEKQSNIRTLDDGLVVEYLSMGNNDAKVASDGCKVYIKYVGMLKDGKIVESNVSEKPYKFKLGAGKVIRGWDVGIHGMRVGEKRKLTVPPSMLSGGKSVGEVPENSSVIYEIELVKVK

SEQ ID NO: 67022 - protein, 351 aa, Zea Mays
MEAVDKIAEPKDPFVLTAQKVQSSEPPIPIKASCEGNDSQQQEETDLPDDGEESFRSMDSSDEGVRSSFSGASHPPEPIDMDIMKTVYVAIDEKSEPPVSLVRGVSVKGPFIDDLSIRVTGAKANLVVGAGGAEGMAEERKVSASAVASVTTARSSQATSLPQDSEEKECVWDASLPPSGNVSPHSSIDSMGVVTAMSTLNSCTSTYKSETIAGEAMLNVERNCESVKGVRGDLLESAKTSMSRASDSSVVSDDSSWSHITGGASKPHKGNDPRWKAIHAVRTRDSVLGMSHFRLLKRLGCGDIGSVYLSELSGTRCYFAMKVVICILCDRDNQESISLSMLQGFMPQKYF

SEQ ID NO: 67023 - protein, 1178 aa, Zea Mays
MASVEVRSVRKSTALRARGGPSKLQSARSMPLDYRYSDGPSAANGAGGGPAGNGVGRRAVAVEAGKEEKEGEVVRLEGDDADSPYSSNVVTAEEEAGNTGGGGDEVDSAAAATPRRLSPRAAASPTQVDARWGDTSSYGAKKKHRVFCQLRNGDWALCTVLATSGDESVLKVSEGKVLRLKTESLQPANPEILDGVDDLMQLSYLSEPSVLYNLQYRYSQDMIYTKAGPVLVAVNPFKKVSLYGNEYIDAYRNKSMDSPHVYAIADAALCEMKRDEVNQSIIISGESGAGKTETAKIAMQYLASLGGGSGIEYEILQTNPILEAFGNAKTLRNDNSSRFGKLIEIHFSTTGRICGAMIQTFLLEKSRVVQCAVGERSYHIFYQLCAGAPASLREKLNLKKVDEYKYLKQSCCYSIAGVDDAQMFRTVTEAMDIVHISKEDQENVFAMVSAVLWLGDVSFTVIDNENHVEIIADEASKMVAELLGCSIEDLNLALTKRHMKVNNENIVQKLTLAQATDTRDALAKSLYASLFEWLVEQINKSLSVGKRRTGRSISILDIYGFESFDKNSFEQFCINYANERLQQHFNRHLFKLEQEEYVEDGIDWAKVDFEDNQDCLSLFEKKPLGLLSLLDEESTFPNATDLTFANKLKQHLNSNSCFRGERDKGFAVRHYAGEVAYDTSGFLEKNRDLLHMDSIQLLAKCKTFLPKMFASKMLVQPDDSMSVPYRSSAADSQKLSVAMKFKGQLFQLMQRLESTTPHFIRCIKPNNLQLPAIYEQGLVLQQLKCCGVLEVVRISRSGYPTRMTHQKFARRVSVAILHQFNILPEMYQVGYTKLFFRTGQIGKLEDTRNRTLHGILRVQSCFRGHQARHHARERIRGVLALQTFIRGEKARQIYSSLLRKHRAAVILQSNLRCWLARRYFINVRKASVIIQSGIRGSLVRRCNGNIDLINVLREFESKQEAEGDQILIKASVLAELQRRILKAEATVREKEEENETLHQRLQQYENRWLEYEQKMKAMEEMWQKQMRSLQSSLSVAKKSLALHETPRMSDSSVDQSWESNGNHVSSGSQLVPRTGGREMSAGLSVIGRLAEEFEQRSQVFADDAKFLVEVKSGQADASLNPDMELRRLKHNFDSWKKDFSGRIRETKMILNKLGNGNESSPNSVKRKWWGRLNTSKFS

SEQ ID NO: 67024 - protein, 53 aa, Zea Mays
MPRIPLIRFPKRNLKAPSPSAPAASQPADQHATLMFRLAGGLHLISPHMNWKF

SEQ ID NO: 67025 - protein, 57 aa, Zea Mays
MFSRPRQLSVVRSCRKPKQGLCLVLLDNPGSLVTGQAPSTTCGGGGIFRQNRRKAAF

SEQ ID NO: 67026 - protein, 166 aa, Zea Mays
MNRARQMCSGFFMDGKFYVIGGKSERHNEILSCAEEFDLESSTWRLIPDMAQGLNGGSGAPPLVAVVNNELYAADYATKEVRKYDKENNAWITLGLLPGRYTSVHGWGIAFRSCGDMLIVIGAMSAGGSGVIEICSWVPNNGLPDWKIIGTRRSGSFVYNCAVMSC

SEQ ID NO: 67027 - protein, 363 aa, Zea Mays
MGDEKHIFSFGPDDKDGFKVCSKCSKSNNDNIKEEANKCPGDKKENMENHASSAWTDTETLLLLEGVLKHGDDWDLIAQHVRTKNKSECIAMLIQLPFGEHMLGTINGKFVSRLHINQTDDGKTNQHIMESSSHSTEMADGMQIDGSEDSADKSVEEYPTKRRRLFFSMDATTSLMEQLAILTTAASPDVAAAAADAAIKAFGNENPQARKAFRLNEQEYKTKAFASNHVQQIDHKVSNKDTAMHGQSGSDKQEKKFIASAYQLRAAVATAVGVAAARAKMLADQEEREMELLMASVIETQLRKMQYKIKHFEELDSLMDQEYTAIQQMKGSLMNEWIKVLEHAFRAGVSLPRDELLTKLLLN

SEQ ID NO: 67028 - protein, 97 aa, Zea Mays
MVITTTIVLRWWLTLSQLSQNLILLSHQFLHGRRRRWWWRNALILSTARSSCHLKILDVLNIILLKSRLAHSKRFERTRFVKSQTFPCIFHKRHYIT

SEQ ID NO: 67029 - protein, 182 aa, Zea Mays
MPQDAARSSPWQSPMQFQDPMSGYQGGPPSAPRPWGSHSGPGGRGSYSNPPNFGFRHPNPSRGGSPMNYGPRGGPYSSYGRGRGPNYFGSPGSRGRGGRVGCHGRSYFNKSMLDDPWLDLQPGVGNILIPRGEYDSNKSWLPESLRKKKETPPAQGQIKPTPGLSLAEYLDMSFNEVSDKEK

SEQ ID NO: 67030 - protein, 150 aa, Zea Mays
MAGLILLITCTWLVFKPKDKHKSKKSQYTLQHSDASNRFENENLEFPSIALEDIIVATNDFSDFNMLGKGGFGKVYKAMLEGGKEVAVKRLSKGSTQGVEEFRNEVVLIAKLQHRNLVRLLDCCIHKDEKLLIYEYLPNKSLDAFLFGTF

SEQ ID NO: 67031 - protein, 454 aa, Zea Mays
MAASGGDAPELAVITNACNAASAPEENRLADDSNTISENAQESLSSLPEQESNDASVNTEKKEPGISKCKSVDEIPKTVAVKRCKNIDSKKVSSNNNNNPSFTGSLVLKKQPAKGGHLFQLCENGMSQDTKTPSTRICINSACKAVFNSDNAFCKRCSCCICHGFDDNKDPSLWLVCSSEIGDQDCCGSSCHIECALKHRKTGCIELGQSIQLDGNYCCAACGKVIGILGFWKRQLVVAKDARRVDNLCSRIYLSHRLLDGTTRFKELHRIVEDAKAKLESEVGPLDGTSSKMARGIVGRLHVAADVQKLCTLAIEKANEWLSSNIQSETKQNGLNLKILQLHLWCWFSRKLFPHSIMLSKAINSGTGIAEKHLSQESLLFSPKTKEGFLYPICSPAQNIRSVLFHLLRMVNWAILNQKYLPRVWKLFVRTQSSEQKVAHLLPRELVRDKMLGH

SEQ ID NO: 67032 - protein, 59 aa, Zea Mays
MGKNISLILSSPSTQCAPPLLDPCCAGEGRSRGRRKPWRGAAMGGEDSQPKGKEERGGQ

SEQ ID NO: 67033 - protein, 621 aa, Zea Mays
MYWCLWRYVLSDLPSDIVVHVDDARFYLHKFPLLSKSGLLQRLIVEASQNGSDEVAIQDVPGGAKTFEICAKFCYGMVVTLNAYNVVAARCAAEYLGMTEDVEKSNLVFKIEVFLSSGIFRSWKDSIIALQTTDALLPWSEELKLVGRCVDSVAAKATVSASNVVWSYTYNRKSASSDEIVEARRSSQAVPKDWWVEDLCELDVDLYRRVMVAVKSRGRIPSDAIGEALKAYAARWLPECCDALVDDAYSGAYKHLLETIVWLLPSDKGSSGISCRFFLKLLKFTVLVGAGELLKEELMDRTVLQLHKASVSDLLIPSRPPAQTVYDVQLVQTLIGRYMSHAGVSQGGIFLNDLDQEMFETNVDGESLLALCKLVDRYLAEVASDPNLSVSSFVDLATSMPETARPTHDGLYTAIDVYLKLHPGLPKMEKRKISNLMDVRKLSKGACIHAAQNDRLPLRVVVQVLFFEQLRAAGAAAAAGTPSASVARCIARLAEQEEEEERWNDGRALPEPPTPGALKRQLGSLKLQGDHHQGAGDDGRRLVARSNSVANQSSRMSLSSRSRRIFDRLWVGGAKLPGEAAAAGKGSSDTSGSSQSPRSSAKPPESKSSSSSSRNRRYSVS

SEQ ID NO: 67034 - protein, 179 aa, Zea Mays
MLLIFRMFVDALDAQMYDKHHQTGHCILSLHKDQHCYSRLLELIVNVWAFHSARRMVYVNPATGQMQEQHHLSGRRGQMSVQFFSYATLKSMDEELAEEFDLDHPDRRWLWPQTGEVFWQGLYERERSMRQHEKERRKQQSREKIQRIKSRARQKTLGKYIKPPPDDTVVSNDTTTVDL

SEQ ID NO: 67035 - protein, 128 aa, Zea Mays
MAMAARLIVIISTRWRRMSSYTNNLKILMGDGRLLGSKRLLWDVVRGGPKERKHLAQVETRRAEDGSTHPSGHLAANRIIMGRRAATHPCLALYVPHHLCMKPTLERATESRETPDIIITSYHDKIII

SEQ ID NO: 67036 - protein, 1033 aa, Zea Mays
MPRDQMVTNGFGAKRDNAGAKKSPQQIQRLEKFYSDVQYPKPEEMGEYATCVGLTYSQVRIWFKERRRKERRMEMGAIGSQMERQFSARSSGPRCSSSSSFCNQAPIYDISRSESDTWGMSTAGEESKILSQVLFPKDYILSKIFRKDGPPLGSEFDPLPQSAHGCIRDTTCHHSSENQRTVKKRKIIESTNQRSDVYENTAPVRKHGIGKGLMTVWHAMYSHNVKCQSGRNFIDETGCLRSLRPFDDFDGLEDRDNGRKTQNQGMTRKKIVKRSKVLVNRKKVPCKRVTGPKVHPPMACHLSVDESESLELQTELVTLVDDEELELSELQTDLLAKFPPQSLKMKKLFSTKPWESSPEMVKKLFQPTYIDWRINPDRLSGFGPKQHLLNQEFFNKEKNQMAKYGLRPRTLKGELFALLSKAGSCGLKVSVLAKSSEIIDLNVSSPLELEQLISLALSSDITLFEKIAPSAYRLRVDPQIKGEEDSMSDSDDSGSVDEDEDASRSDDGSDGSQKLKFLENESRLARRKEKNAHGSPNKCSEIDESYSGEKWLLALMEGEYSDLSIDEKLDCLVALIDVVSGAGSVPRLEEPQRVLHNVPRVHPPQSGGKIKKSTKNLCQYSDESLNGSGSLDCCHQGQSGRRKNQDYTTDPGRNDLPIAAHGPQVVLLGSDRRYNSYWLFLGPCREDDPGHRRVYFESSEDGHWEVIDSPQELLSLLSILDSRGTREAHLLTSMEKRQACLFEAMKKHVEGGKAARLPASSDSYCSQTSSGDGTSPKTSSVDGASSVSDIENTSVPTSLKDSNLDSSSAVVIESGRGGDEKISMWERLQAFDKWIWTSFYSILTAVKSGKKSFKESLLRCGSCHDLYWRDEKHCRICHSTFEVGFDLEEKYAVHVATCREPELSHEVPNHKFLPSQLQALKAAIHAIEASMPEAAFTGSWMKSAHKLWVKRLRRTSSLPELLQVLVDFVGAMDVDWLYKSSSARLRTNLDDIIVDFQTMPQTTSAVALWVVQLDALIAPYLDNAMARQLVNAR

SEQ ID NO: 67037 - protein, 789 aa, Zea Mays
MSSRPSSSSSSRRSSSPFSAGHRRPPTASSSSSSSYFSSGRLIPRSSPSSASSSFYGGGGGGSTRSTTPGRRSSSVAPAPTPAPALAPVPFSSSDELVIEDTSRSGDSISVTIRFRPLSEREFQRGDEISWYPDGDRLVRCEYNPATAYAYDRVFGPSTTTEAVYDVAARPVVKGAMEGINGTVFAYGVTSSGKTHTMHGEHNCPGIIPLAIKDVFSMIQDSPGREFLLRVSYLEIYNEVINDLLDPTGQNLRVREDAQGTYVEGIKEEVVLSPGHALSFIAAGEEHRHVGSNNFNLFSSRSHTIFTLMIESSARGDEYDGVMYSQLNLIDLAGSESSKTETTGLRRREGSYINKSLLTLGTVIGKLSEGRATHIPYRDSKLTRLLQSSLSGHGHVSLICTITPASSNMEETHNTLKFASRAKRVEIYASRNRIIDEKSLIKKYQKEISSLKQELDQLRRGIVGGASQEEIMSLRQQLEEGQVKMQSRLEEEEEAKAALMSRIQRLTKLILVSTKNNIPALTDGHQRHNSVSEQDKLSTSQDSSTLVQNEGTTKDHLPDSLDEINQLRSGSGEHSSATCSATDSMQAGFTASDHMDLLIEQIKMLAGEVAFGTSSLKRLIEQSIDDPEGSKDQIENLEREIQQKRRHMRALEKQIMESGEASVANASMVDMQQTITKLTAQCSEKAFELELKSADNRVLQEQLQQKNAEVNDLQEKVFHLEQQLSAKVGISPEQETDCAQQEAIDLKSKLQSKVLLLILFFYFVYSRPWCSIPTCKIWHTLEHGIIHGS

SEQ ID NO: 67038 - protein, 618 aa, Zea Mays
MPTWWGKSSSKDVKKTTKENLIDTFHRLISPNEQKGSTKSKRNCRRGNNTAAEKVCKSTTVSRPTSPSKEVSRCQSFSADRLHAQPLPIPGVRPRVTRAVADVNVSKPILEKRGKPPLLLPLPKPNPLHRGPGSSDIPSEIVVASVSSNCSADSEDRADSQLQSPVGNDTNNVKKVSSKNKSSNVCKDHSGAITTKTTKEILKPAANAFLSNHTQSAPPRGISADNNQLNLQNPQPVVFESAPNSLMSSPSRSPRPICPDHILTSAFWAVKPHADVTFLGSGQCSSPGSGQTSGHNSVGGDMLSQLFLQPTRGSPECSPVPSPRMTSPGPSSRVHSGSVSPLHPRSGGLAPESPTSRHDGGKKKQTHKLPLPPLSIAHSPFFPNNSTPSSPISVPRSPGRTENPSSPASRWKKGKLIGRGTSGHVYVGFNSDSGEMCAMKEVTLFLDDPKSKESAKQLGQEISLLSRLRHPNIVQYYGSEMVEDKLYIYLEYVSGGSIHKLLQEYGQLGEPAIRSYTLQILSGLAYLHAKNTVHRDIKGANILVNPSGRVKLADFGMAKHINGQHCPFSFKGSPYWMAPEVIKNSNGCNLVVDIWSLGCTVLEMATSKPPWSQYEGFK

SEQ ID NO: 67039 - protein, 362 aa, Zea Mays
MEYAFALHPRTVSVVSAASLTETDTHQRERETERRASGTSKHGGGRPSAQAASSAAYQGLSFLIPLAVCPCLHLPASSPEKIAPPPESRPRRIALFVEPSPFAYVSGYKNRFQNFIKYLREMGDEVIVVTTHEGVPQEFHGAKLIGSWSFPCPWYQKVPLSLALSPRIIAEVARFKPDIIHASSPGIMVFGALIIAKLLCVPLVMSYHTHVPIYIPRYTFSWLVKPMWLIIKFLHRAADLTLVPSVAIGRDLQAARVTAANKIRLWNKGVDSESFHPRFRNMEMRSRLTNGEPEKPLVFYVGRLGVEKSLDFLKRVMDRLPGARIAFIGDGPFRCSQVCRWCSRARCKGRSYHRPMPVGMCL

SEQ ID NO: 67040 - protein, 321 aa, Zea Mays
MDSTPAPEAAPGASSSSPAAAAAAEGLAGGVAAMTLDERFEMLRGIGEECIQEDELRRLLENKPVPICYDGFEPSGRMHIAQGVVKTINVNKMVNAGCKVKIWIADWFAQLNNKMGGDLKKIQTVGRYMIEIWKAAGMNLDGVEFLWSSEEINKRAHEYWPIVMDIARKNNVKRIMRCCQIMGRSDQDDLTAAQIFYPCMQCADIFFLKADICQLGMDQRKVNVLAREYCDDIKRKNKPIILSHHMLPGFKEGQEKMSKSDPSSAIFMEDDEAQVNVKIKQAFCPPKIVEGNPCLEYIKYIVFPWFGRFEVIRKESNGGNK

SEQ ID NO: 67041 - protein, 144 aa, Zea Mays
MYTARKKIQKEKGLEPSEFEDSVAQELKSDLKDLYINNAIQMDVTGSRKAVVIHVPYRLRKAFRKIHVRLVRELEKKFSGKIAAMRCPLPRPPDHSDGAGSGRRWGILLASQSQMSLMASFSNRQVQRHPPVQNSICPILISSI

SEQ ID NO: 67042 - protein, 107 aa, Zea Mays
MAEMEPSIGNHMAEDQPTPAASTVEEAAMDADTSGERRSAAALVGLLRGFLAVQQRRAEAYSTLRRGFSEYMAYGGELAYQQLCGNITAEFNDCSKQNLVAAILPIY

SEQ ID NO: 67043 - protein, 447 aa, Zea Mays
MRRTETSPRSPMVMQVPGSASPSTAPGSTTPQVLLCQNAAEHSHEPSSESELVKHIKSIIKFRSGPISIAEYMEEVLTNPQSGFYINRDVFGESGDFITSPEVSQMFGEMIGVWAMCLWEQMGKPAKVNLIELGPGRGTLLADLLRGSAKFANFTKALSINLVECSPTLQKIQYNTLKCEDEHVGDGKRTVSKICGAPVCWHASLEQVPSGSPTIIIAHEFYDALPIHQFQKASRGWCEKMVDIAEDSLFRFVLSPHPTASLIYLAKRCGWASSEELEKIEHIEVCPKAMELTEQIADRISSDGGGALIIDYGKNGIVSDSLQAIRKHKFVDILDDPGSADLSAYVDFASIKRSAEEASDDISVHGPMTQSQFLGSLGINFRVEALLQNCTEEQAESLRTGYWRLVGDGEAPFWEGPEDQAAPVGMGTRYLAMAIVNKKQGTPIPFE

SEQ ID NO: 67044 - protein, 2108 aa, Zea Mays
MILWPHSSFVRAMLLKKKVFDCCFSTETMDQYRYKNYLDNIILQLREQFADSSLMVLNFRDEGKSLISGIFSKYNITAKDYPCKYLGCPLLPLDIILHFLRLSERWLMLEGQQNILLMHCEKDGWPVLAFMLAGLLLYRKQYNGEQRTLDMVYKQAPKELLQMLTTLNPQPSHLRYLGYICRMDDGIGWPTQPIPFTLDCVILREIPNFDGVGGCRPIVRVYGQDIPTTDRSHSVISPPSKAKKHIRRYRQADNAPVKLNVGSCVQGDVVLECLHVDDGQGNERLMFRVMFNTFFIQSHILPLNFEDIDVPWDADHQFTKNFKAEVLFSEFDAESDASTEVAPDYDYDYDYDNDMDVASADEFFEAEEIFSNAESQDGNKDADTLSMVSTDYIRTPSAECWKNSPFSNFDLNIDIDGSQDNKADNLGLLLETVNDGKTCTSTEANILLNNETAVVKSTFTATIACTSTEANILLNDETAVVKSTFTATIDGDTDSGISSSTYKEDGCMFEKGSSKQDIRMGSNQDLSQIDNVLVKEVIILETNSTDDIQMIKEVIISEVTTPKQVVEGNMMETELDEAVHSSESTALGEDEDTKRPNTFFKKDEGQSARDEYAAYDNGIVIEREESRNKEKFTITGTDSLVAEPKDLPHLDSSNTSLELSSANENIDQLRACSSNVTAERRAGIDTSFSSSRSQSSNISCANILPEESNLIINHASTSVNANTDTTDSSRLVLKKKPFLPLATSSLFSPSSPRRNLLRAASTDLSFFSPSQTESKQNSVTSTSGRGDSDTSSVLPPFQLYTSLGSSSKMSLVHPTLRPIRTISSLPSLSFGTFIEMSMASSRSPKHQEHVRSPSIPQDQHLHPPMTEENDLHSGSLTLPASNQYGPQTPHPPPLPPPHDSCTQSYSSTIIYEPEQIRADGSCSYSPDYRQSVLNLGDSSLTSLSNSSIAATECPLGASDFVDEEVTSRPNIVTAMDVPFTNEDTNSLLHMTCSSPPKTLQRAEPPTLPPPPLPLVPPPSQLPLPTICSDSGSVPLVYSNPSSDCPYKEPTMLPEHKSDVPATSLEGHEASEVQFLQSDTAVELSPSEHSEYKVQHVVGSAEDTISSMSSYIPAAPPYPMFHIVTDNSSCSISAEQVNCEQPLDQTTLSIHLRPFEVEISQGETINGVLASIIDDKEHGGIPILQLPQKLPHSGEHMKSPPPPPPPPQPPPCHATVIPSLCLSSKPPSPTEHYENPPSSPPPFSRESCVVLPPLPAPLLNHPSLPGKHINLYPPPPPPPPTLHHIAPASPCSYQPSFYADIATQPTFSEDIVIVPPPHSKGVNIIPLPPPPPRTSETLSQPLDGGQSTGPASLLEVTKENPPPPLLPPEGQMGSPLSTLCGEIVNIPIPPPSLPGGHGEVPLSTPPRGCGAIPPPPPFTKGIGGITLPIGFHSGDLSFLQSTRESKGPSCLPPPPPPPPPPPPPPLSSNGHIGDLPPPPTSVFVEASIPLPPQTGCGGDPPPPPPTGGHVGPPPPPPPLGECAWDLQPPKACVRAPPPPPPPGGYAEVLMPPPPPRGYVGAPAPPPPPGGYAGAPPPPPPPGGYAGAPPPPPPPGGYAGAPPPPPPPGGYAGAPPPPPPPGGYAGAPPPPPSYGGIGGVPPPPPPFGGLGGTPPPPPPAGFRGGAPSPPPPPGGHGGPPPPPPRGHGSGPPPPPGAPSPPMPPGMSGGPPPPPGGRGMPTPPGGRGHGLARTLGPTLQSAMRKSSLKPLHWVKVTRAMQGSLWAELQKQVEANSHAEFDVNELESLFTIAPKAKAGSKSEGRGKSLGTKSDKVQLIDLRRANNTEIMLTKIKMPLPDMMSAALALDDSVLDADQIENLIKFCPTKEEMELLKNYSGDKEALGKCEHFFLELMKVPRVESKLKIFAFKIQFQSQIRDVRKNLQTVSSACEELRSSEKLKVIMKNILLIGNTLNQGTPRGQAVGFRLDSLLKLIETRATSGRMTLMHFLCKSLAEKSPEVMDFHEDLVHLEASSKLQLKALAEEQLAVVKGLEKVEQELTASESDGPVSDVFRKTLKEFIDCSSADVCSLSAFYSEVGKSADALALYFGEDPAKFPFEQGNIHAYRPMEMV

SEQ ID NO: 67045 - protein, 232 aa, Zea Mays
MKSNYGAGKSAKKRAKKKTPNEASGLAGLLDTTRSAIEEKKRKPTGGTRARANKNKRERERERERERERERERKGPGAGRAKVIHLDLEDGSIVDVWWCEAGAREECPADWRSGEWGCRWEAEGEGRGSSRRHKKPAKPKGGRKGCGRRGVRCAGRQTPRPEEAASVRRLPSPTAKRIPRSRTTPTCYTAPSPAARTKKVRAVVGWLARRELRYTVALCLYSASSSLLVRFN

SEQ ID NO: 67046 - protein, 190 aa, Zea Mays
MTSFLTCTMFFRSSWLPRFYLVRCGSKRICQIECSFINYAQLWMFRGIQFQCVLQYLGPPVLGLRSAPRTSTAAPPISSTASGARRCPGDRPSRKSSAEKRKVSRLFQSTSMHPKPVPQKKLCRIERNFNLNQREYRYKDCLKSSRNDIEWNFKLNKRKHLYKDCLKSSRNDIERNFKLNKRKHLYKDCL

SEQ ID NO: 67047 - protein, 99 aa, Zea Mays
MHRHAPTEHQCTSTLVKHIKAPVHLVWELVRRFDQPQRYKPFVRNCVVRGDQLEVGSLRDVNVKTGLPATTSTERLEQLDDDLHILGVKFVGGDHRLQS

SEQ ID NO: 67048 - protein, 375 aa, Zea Mays
METFGRYLDLHELYNEFINSKFGTLMEYSAYVGCFSQTDKISHSHKATRKYREYLEHILEYLTSFLYRTEPLQDIDKIFLKLESEFEEQWANEGILGWGNKGTEKESEIDLDYYSTVEELVELGPEKLKQALAARGLKSGGTVQQRADRLFLLKVTPLEQLDRKHFAKVPHTKDGSNTAPNGNAFKEDMKKEIALMEVKMKRLCELLDEAFVRTKENAEKKLTLTYEEMEAEREEEEVQVDTESDDEEQQIYNPLKLPMGWDGKPIPYWLYKLHGLGQEFKCEICGNHSYWGRRAYERHFKEWRHQHGMRCLGIPNTKNFNEITSIEEAKALWEKIQARQGVNKWRPDLEEEYEDQEGNIYNKKTYTDLQRQGLI

SEQ ID NO: 67049 - protein, 79 aa, Zea Mays
MDRCVYHKRRQVWMTGSEMDLRRCTSIEERPSGESGLLPLLPATKSSSSALHLLVFPPPLSLKLRELQAVDFLFKRAHM

SEQ ID NO: 67050 - protein, 91 aa, Zea Mays
MAPGLKAAAKSTKPSEVPLTEYDKLRAENLMRNNQKLQRFDVTKLASILTILLQRAKVTLVKNLDLCMRSMKVKVLKMRKSISVQQDKETN

SEQ ID NO: 67051 - protein, 837 aa, Zea Mays
MANAAASSSVQSAVVAAASIPVPPNQAVSMLKRPALTDYQSAESEQLMKRLRPGGHGIDEATYPAPTPQPAWSVDDLPRTVACSLSHGSNVTSMDFHPTRHTLLLVGSANGEFTLYEIGLRETLLSKPFKIRDINACSPQFQNAVVKDSSISINQVTWSPDGEMIGVAFTKHLIHLHGYQPPNETRHLLEIEAHSGGVNDIAFSRPNKQLCVVTCGDDKLIKVWDMHGHKLFTFEGHEAPVYSICPHHKESIQFIFSTSLDGKIKAWLYDNMGSRVDYDAPGKWCTTMLYSADGTRLFSCGTSKEGDSYLVEWNESEGSIKRTYSGFRKRSAGVAGVVQFDTAQNHILAAGEDNHIKFWDVDNNNMLICTDAEGGLPALPRLRFNKEGNLLAVTTADNGFKILANADGLRTLRALGSRPPFEAFRPQYEASSMKVSGAPVVASISPNIGRMDHLDRNSPAKPSPILNGGDTASRSIDIKPRISEEKPDKAKPWELMEVLNPQQCHVATMPETPDQARKVVRLLYTNSGVGLLALGSNAIQRLWKWSRNEQNPSGKATASVVPHHWQPNSGLVMTNDTADTNPEEAVPCIALSKNDSYVMSACGGKVSLFNMMTFKVMTTFMPPPPASTFLAFHPQDNNIIAIGMEDSTIHIYNVRVDEVKTRLKGHQRRITGLAFSTNLGILVSSGADAQWIPQDTLSASISHASYSCNSQLVFAAFTDGNLGVFDAENLRLRCRIAPSVINRSIRSVIELTQGFRQLGCLFCLCNPPVHPLVVAAHPHEPNQFAVGLSDGSVKVLEPLESEGKWGAPAPADNGIIPNGKTPASSATSNPAADQIQR

SEQ ID NO: 67052 - protein, 348 aa, Zea Mays
MTSAGVNVPGDDGVGNPAAASGSASAPECRTMQRRRRRLEPQGSGDAAAGPSWVRRLRPAASRFSPSPSQGSADRPNDEEQEEDDPDVQEMELVPLPPAGPQELQPADVPAQVWPVAFGSLSMAGRMRMMEDTISLHPDLCTWADGSPVHFFAVFDGHGGSHVSALCRDRMHEFVAEELGKEGAAFLRRRQEWLAWGDGAGAETSAAAFVRGPRGAWPEREEEERAWRSALRRSFRRADAMAALACACGRVARPSCRCPLSSVVSGIVGSTAVVALLVRGRLVVANCGDSRAVLCRGPAGTPPVPLSSDHKPNRPDERARIEAAGGLVVFNNGHRVRGILAMSRALGC

SEQ ID NO: 67053 - protein, 417 aa, Zea Mays
MICFSKLLQVHNEQINDLLEPSQRDLQIRENASNGIHVENLTDEYVSTADDISQILMKGLSNRKVGTTSMNLKSSRSHVIFTCVIEAWSKGSSNGFSSSRTSRITFVDLAGPDTDELGAAKHSTKEERHLKKSLSRLGKLVNVLSETPESHKVDLPYEQSRLTHVLKDTLGGNSRVIFLCSISSEHRCRSGTLSTLRFGERAKLMPNKPVINEISEDDVNGLSDQIRQLKDELIRTKSGDTTTCKARYFSAQSARESLHTLRVSLNRSLIFPHIEVDSEEEMDVDEEDVQELRDQISKIHSSSEDTLDDFMDAESGDESTPCSVGRSEDDQVIIDDFEGPQQEEQKEVSNNTNANEDLGSDRKSNLSIIASTRLSPIQDPTLCSSPKIHNKARMSITSLGLSPSKIRISDSPGWQHN

SEQ ID NO: 67054 - protein, 102 aa, Zea Mays
MCFPVMCQIAVIVGNVTDDKRVYEVSAVKVAAWARILSAGDECLAFDHCPLSIVRETVKDFGSAFGVPHNHTGAREGSLRRQGGGGKPLLPPRKRSNETTKR

SEQ ID NO: 67055 - protein, 55 aa, Zea Mays
MFVNYVCMCICGPRNSVCEQQEFLFVNCISVFVNTNCILFVNHSQKISLFSVCVP

SEQ ID NO: 67056 - protein, 182 aa, Zea Mays
MDGTLQPAVGADGRQVEAQGNVLLASIENMQYAVTVDVLHTVFSSFGSVQKIAIFEKNGGTQALIQYPGYHYARAPLELFGGYVQTILCVGEAFLELVLSLTYHVYHHSVLDPFLYGRKSIVTFVFSQHLSVERGIFFCRPTFCIIQHNRFNHHSIKLAFQLLWYPLVTKCQMFANTSSTML

SEQ ID NO: 67057 - protein, 151 aa, Zea Mays
MLVGAYPFEDPDEPKNFRKTIQRILGVQYSIPDYVHISPECQNLVSRIFVADPATRITIPEIRNHPWFLKNLPADLMDDSTMSKQYEEPEQPMQSMDEIMQILAEATIPAAGPHGLNQFLNDGLDLDDDMDDLDSDTDLDLESSGEIVYAI

SEQ ID NO: 67058 - protein, 266 aa, Zea Mays
MEKLSLVLPETSPYVPRHFGRCAVVGNSGDLLKTKFGDEIDSYDAVFRENGAPTQNYTEYVGRKSTFRLLNRGSAKALDKVVELDETKKEALIVKTTIHDIMNQMIRELPITNPVYLMLGTSFGSSAKGTGLKALEFALSICDSVDMYGFTVDPGYKEWTRYFSELVKIHSPMRGDPGRTVRWLPTKATIEAARVASEKLLKRPGAGSDDPLGTCTMIKKRRKGKAPNRSGLRDAAMKHLEDMKGAARYPLERNAGGGYLCMINDR

SEQ ID NO: 67059 - protein, 103 aa, Zea Mays
MTKTLEGQEALDLFISQMIMKLSVPRMLWMGRAAIANKFCPWKSSWRISYCSSTFYGEMSRSIGRGILAWTDGHIRRVAKYPYRLVFLILQGRDLSRRRLAMA

SEQ ID NO: 67060 - protein, 636 aa, Zea Mays
MQPPMGNERPPPPGRTVSAFVPGAAVPPPPFAAGGPFAPPPWQGVPPPQSGAAAPHFGAVPPAAMGGFRGPPSSQGPFGAGTPPQRPFTSAPPPQSPFTSAPPSQGPFASAPPSQVPFASAQPSQSPFTSPPQSQGPFAAGPPPTGPFAATPAPFRSPLSSLAQPQSPTQGALPPPPTYARPLSQPLQAQGYYPGAPPSNPQFPMSRPAFQQPVQNMPPPPMGSAATFGNQAAYQSGGPPVGGTLQSLVEDFQSLSLSSVPGSLDPGVDVKGLPRPLDGDEEPVKLIESYPFNCHPRYFRLTTHAIPASQSLVSRWHLPLGAVVHPLAESPDGEEVPVINFGSAGVIRCRRCRTYINPYATFADAGRKWRCNLCTLLNDVPGEYFCALDASGRRYDTDQRPELSKGTVEFVAPTEYMVRPPMPPSYFFLIDVSVSAVRSGLLEIVAKTIKSCLDELPGFPRTQIGFLTFDSTLHFHNFKSSLSQPQMMVVADLDDVFLPLPDDLLVNLVDSRHVVESFLDSLPNMFHDNVNVESALGPALKAAFMVMSQIGGKLLVFQSTLPSLGIGRLRLRGDDVRAYGTDKEHTLRVPEDPFYKQMAAEFTKNQIAVDIFSFSEKYSDIASLGVPLSIIPGTYT

SEQ ID NO: 67061 - protein, 384 aa, Zea Mays
MQALLDLLFAVEDSVSDAAKILGLSTGALSRLILSDDSLRTAANELRASKCFFDCRAPVLYYVLLTLQDSVHKVFYAVVEAAAVRADNSHLGGLARYPVSATLPQIGSRLFLTWGVFWSFPEMAPFTSTNRYLIPILYVSVELVKALQAHIINWDIHMFDEEIGNTTQVHTSNLNEPMRTLAGFIQFCLIKPGGKFDHADRLFQSIENAYINSLSNTSDVKELIPEFFYMPEFLENSNSYHLGVKQDGEPIGDVALPPWAKDDNSSDEFDKDSIESDDRSLEELSWETLELLVVPHIFSIRRSTWRSTFTSSVSVSPTVMFAFSASRPLRSLPTFSPRGCRRVYSLSFDLVSTSVQDRIETVGGVRLLLRVRPGPSCIYLITPM

SEQ ID NO: 67062 - protein, 352 aa, Zea Mays
MEAAGGGAEDEQVMSEVHLGCPPHFSGLLVSHFSFSSRPLGPYGHKGGGGGGGGSELVAATSGSVAVDEDGDLVLDRRRRNKYARGDRHLFTIQHGVTSSLKSVGLQVWKAALLLSDFILHESFSSPNFDGVTAIEIGAGTGLVGLALARVARRIFVTDRGTDILDNCLANLHINSGMLRFDEAKVCVRELDWKMAWPPPVGTYDPSDPSRYLWSASEVEEAEKATVLFAADVIYSDDLTNLFFNTVKKLMSVGAKKVLYLALEKRYNFSVDELDVVANGYTHFRSFFTAQDEHGDPSNRSGPGFVGKQIDPAEIPQYIREYERGKDLEMWMIMYSPEEKQHSNSTKTVFSF

SEQ ID NO: 67063 - protein, 299 aa, Zea Mays
MADSAPSIPGVIASLQAYSTALSAFTAAWRAVETHASTLDSALAARLAGFSELELICSAMDGAGLRAYLTEHRDELKDPTRALDAALQVAPDPGLLVLSAAASFCRTLPEVAKSDGSVKASCRLLIALLDRLRAIGVKPSPEAREEARAVATDWKRGKRIGTETMFKQETFAFLHLVGVFGLVEDVGGTSEVLDLVVSISGRERAVDAFVVLGLDLDQHMPILIQKMVNKNKQLEAVKFIQALNIAHKYALLPIMRSYIDHAAVAGKMIRIRGDDLATQLMQKSAHLLEHCRSSLRNRS

SEQ ID NO: 67064 - protein, 152 aa, Zea Mays
MHGTPHHSPPTFLYLADCTLPQDGFLFLISTATHPSPAPLPPPLLLCPRRISSFSLTTGWYRRRRRQCVGDGGMDAAAEEDVLGRRHRALARAAAGGAVPGVRGVHLLRGPARDVHPGAVLLRHQLQHPQPSIRRLLLHPAHLQLPQLPPLA

SEQ ID NO: 67065 - protein, 185 aa, Zea Mays
MGKRWIPLEANPDVLNQFIWGLGVHEEDVQFCDVYGLDDELLAMVPQPVLAVLFLYPLTSLDEEKEESSVSAATSTSAGKELSKKVYFTKQTVGNACGTVGVIHAIGNATSQIKLVEGSYFEKFYKQTADMDPAQRAAFLEEDDEMEDAHSVAASAGDTDVNFMSLMDENHNPHPMALHHLKPCC

SEQ ID NO: 67066 - protein, 2258 aa, Zea Mays
MSKLVLKFLPKDHGLSINNEIGSISLRCTRLQPQDFGEVTTHIRLETDVTEIHLLMDGATSVLEVVKVSTVVSANIPSQPALPVQAEVDIKISGFQCNLIVSRIKPLIRINSDKKKPLVLHENPQQKKAPKEKLALSLACTMSVPELTLVLHSLDDVPLYHCIFQSANVSASKMIDRGTQLHGKLGDLKFLVPSKHQQSMKEGASGTLLHISHSTLDLEQNDPGQDNDEDHAKSAISVNISGIRMHFCFSYLESLCATAMSYKVFMKSILPPKKRSVQENASQKSTKKAKRALLLKINVAQCSIVYDGEMRLEDMSIADPKRVNFGSQGGRVVIINEANGSPRMAYVNSTSLPDHKNVHFSTSLEIYQFGVSLNKAKHTMQVELENFRLTHKEDQLDNKPVEETKLFDVRKAKFVQRSGGLNDIAACSLINVTDIAVRWEPDPYLELLEVATRLKSVLHRMKLQNSVTEVKDETLNMDILSKKESPSDHGQQEKAQKKRESVIAIDLESLKISGELADGVEAMITVGYIFSENAKIGVLVEGISVSFCGAWILKSSRMQLSRIPISVSDSNSDKKLQSAAACDWVIQCRDVNICLPFRLQLRAIDDAVEDTLRAFKLISAAKTSVLFPEKKSSTTSSKKSKPKSTAFRYVRIIVRDLIAEIEEEPMQGWLDEHMILMKNVFCESTVRLNLLDELSSGKNKDSPKAKLDSSEKNSGCPDVDAYVPGTHSIEKLREEIYRQAFQSYYQACQKLPVSEGSGACSSGFQSGFKMSTRRASVMSVCAKDVDVSLSKIDGGDEGMISFIKSLDPVCDKDDIPFSRLYGSNFSLKTRSLSAYLRDYTFPLFSGTNGKCDGRLVLGQQATCFQPQARQDVYVGKWWRVNLLRSATGYTPPMKTYADIPLYFKKAEVSFGVGYEPVFADVSYAFTCALRRANLAKRWYFERPEPPRRERSLPWWDDMRNYIHGKFKLCFNETKWHLPASTSPYEKLDELLIITDFMEIHYVDGYVSLSSKYLRVYLTSLESLAKKSSLEIPHHPAIPFLETPSFFMDISIEWGCDSGNPMDHFIFALPAEGKPRDKVFDAFRSTSLSLKWSFSLKPYTTEPIEHQKKSNLNTTAPTVNVGVHDLAWLMKWWNLVFLPPHKLRLFSRFPRFGVPRFVRSGNLPLDRVMTEQCIRFDAMQLQINNMPLQADDPAKGLTLHFTKFRYEIAFSRGKQIFTFDCKREPLDLVYQGIDLHLLKVFINRIPESSTSMDSKIENKVLQTKDKDSLGCEKGKKKTSPTEKSRDDGFFLYSDYFTIRKQTPKADAARLSAWQEDGRKKTEMPLIKSEFDGGDESDHDQSGSDDEGFNVVVADSCQRVFVYGLKILWNLENRAAVLSWVGGLTQAFQPPKPSPSRQYTQTKILEKKQLIKEAEMSKDGALSSVSSTSQPSEPQQIKSSESPPSNGSGKPDLTSSSENALKRSNNSDSEEEGTRHFMVNVVQPQFNLHSEEANGRFLLAAGSGRVMVRSFHSIVQVGQEMFEKAIGSSNDATGGTGPEMTWSRVELSVMLEHVQAHVAPTDVDPGAGIQWLPKIHRRSSEVKRTGALLERVFMPCQMYFRYTRHKGGTPELKVKPLKELTFNSPDITAGMTSRQFQVMMDVLTNLLFARTPKKPKSNLSYPLDNDDDNIEEASDAVVPDGVEEVVLAKIGVEVKERARKLLLDDIRALSICGETSHGQSQSPKANDIAWIVTGSRLMLVKQLKKRLVNVRNGRKEAYSMLRTAMQKAAQLRLMEKEKNKSPSFAMRISVRIKKIVWSMLADGKSFSEAEINDMIFEFDRDYKDIGIAQLTTKLFVLKNGLANAKSDTVVSPWNPPAEWGKNAMLRVNAWQGAPTGGNPVIESFLVDIYPLKIYLTEAMYRMMWGYFFPGDEQQPQKRQELFKVSTTAGTRRKKNTSVAETNSPNNQSSKETTFAQKPELRRTSSFDRTWEETVAESVANELVSQMEGQTNTQYEPQDAAKDSKLLRPVRSTREDKKIVEPNELKQSRPQKMMDFRNIKISQVELQLTYEGLPFAVSDVRLLMDTFHREDFTGTWARLFSRVKKHIVWGVLKSVTGMQGKKFKAKSSSQKEPSTALISAADFNLSDSDGDEAGSSDQLPAFLKKPSDGAGDGFATSVKGLFSTQKKKAMAFVLKTMKGDADHDFHGERSENEIEFSPFARQLTITKTKKLIRRHTKKLNKSKVHKVTATELEVAELPPRAPGYNTDSSSDSSSAETSPKD

SEQ ID NO: 67067 - protein, 702 aa, Zea Mays
MSKRPKLEGFSIPRPTSYNFERSQSVQRLYRPTDDPDLDDIAFSDDAPSDAQASTAVEGKAENEEEMDPLDAFMAEIQEEIRAPPPPPKPEALRRTDSDDDEDDPVESFLRAKKDAGLTLAADVMRAGYDSDEEVYAAAKAVDAGMMEYDSDDNPIVIDKKKIEPIPALDHSTIEYDAFTKDFYEEKPSISGRDIIGIAKTGSGKTAAFVLPMIVHIMDQPELEKEEGPIGVICAPTRELAHQIYLEAKKFAKPYNLRVAAIYGGVSKFDQFKELKAGCEIVIATPGRLIDLLKMKALKMFRATYLVLDEADRMFDLGFEPQIRSIVGQIRPDRQTLLFSATMPYKVERLAREILTDPIRVTVGQVGGANEDIKQVVNVLPSDVEKMPWLLGKLPGMIDDGDVLVFASKKARVDEIEKELNQRGFRIAALHGDKDQASRMETLQKFKSGTFHVLVATDVAARGLDIKSIKTVVNFDIAKEMDMHIHRIGRTGRAGDKDGTAYTLITQKEAHFAGELVHSLIAAGQDVPNELMDLAMKDGRFRAKRDSRKGGKKGGKGKGGVGGAGRGRGVRGVDFGLGIGYNAESGSQVPAARSAAVNSLKTGMLQRFKSSFVSGSSNTPSSSAPSFVRPALRGFVSGGTIGGDTRPAQAAPTFIPASRPAQPAPAVPASQPAGNNNENGNPNPESSRDQFRERKRPSGWDR

SEQ ID NO: 67068 - protein, 1204 aa, Zea Mays
MEAALEAARAKDTKERLAGVERLHEALDAAARRGLTAAEVTALVDTCMDLTRDANFRIAQGGLQALSAAAVVAGDHFKIHLNALVPAAVERLGDGKQPVRDAARQLLITLMEACHLLNILSKELLGDFEPCAELFIPMLFKLVVITVLVIAESADTCIKTILRNCKVARILPRIVDTAKNDRSAILRARCCEYALLILEYWADASEIQRSADLYEDMIKCCVADAMSEVRATARTCYRMFAKTWPERSRRLFMLFDPAIQRIINDEDGGVHKRYASPSLRDRVVQPSRASSHSSGTYVPGYGTSAIVAMDKSAAISSDSSFPSTNLRLSQSKTIGRSSERSLESVLSSSKEKVSAIESLLKGVSMSGQNFSAARSTSLDLGVDPPSSRDPPVLLAAPASNVLSLQNSALLDSSLPTIPPSSRNGGSRLLETMTTHLPTKERSRSPYLSNMSSESMSGLSLPYSRRSSERLQEGGRMDESYDIRSTRRMPQMHFDRNYVDMPYRDASHRDSHNNNVPNFQRPLLRKQVMSRASASGRHSFDDSHVPSGDVPSYTDSLASLNDALSEGLSPSSDWVARVSAFEFIRNLLKQGQKGIQEITQNFEKVMKLFFRHLDDPHHKVAQAAFSTLAEIIPASKKPFESYVERILPYVFSRLIDPKELVKKPCSITLEVVGRTYAIDMLLPALVRSLDEQRSPKAKLAVLEFANKSFSKYTVDSDGYSNSGFLKLWLSKLAPLVNEKNAKLKEASISGIISVYSHFDSTAVLNFILSLSVEDQNLLRRALKIKTPRIEVDLVNYLQSKKERPRPKSYDQVDFGTSEDGYALTSKKSYPFGRFSSSSLDAEGGKMISSMHEPVLHNVSIGRTTSDMSMDHAIQSLESSTGAEVHLTRSREPKNNINSVVEAARSWTNYTEKTDASLDGETATSTPRLDVSRFVTSDGHNTVGSTTEESVQEGDMIVNLSSIKTSLQMDNGLSVPQLLYQISNDTEVSSSEKREALQQLVDASLDNNSSIWAKYFNQILKVVLEVLDDSDSSMRELALSLITEMLNYQKDAIEDSMEIVFEKLLHVTKDAVAKISNEANQCLNVLLAKYNPFTCLAITVPLLVSDDEKMLVVCINCLTKLVGRLSQEELIVQLPTFLPALFDAFNNQSPDVRKTVVFCLVDIYIMLGKAFAPYLEGLSSTQLRLVTIYANRISQARSGKPIDSNQ

SEQ ID NO: 67069 - protein, 281 aa, Zea Mays
METYYQESGRAGRDGLPSECILYYRPGDVPRQSSMVFYENCGLQNLYDIVRYCQSKRSCRHGAFFRHFGEVPQDCNGMCDNCASTIEQKDIDVTCSFNEAVDLRKEEVEQLIVNLILDNVLKEEFQHTAYSTNAYVTLGALWKPALQGNRVVKLEIAIASKDRDVRSKGAKRGRMSDLEAKLDELRRDLSSTGSDAIFPHAVLTAQQISLLSSQKPTTPAELEKVIGKVKTRKYGSKIIELMRSHDNSGSGRGKEAGDEHRAKKIKTKDEDVVCVESSEEE

SEQ ID NO: 67070 - protein, 414 aa, Zea Mays
MSVAVGKRVLDTGWLAARSTEVALTGVQLTTTHPPAADPAPAAPWMSAAVPGTVLGTLLKNKLIPDPFYGLNNQAIIDIADAGREYYTFWFFTTFQCALSGNQHATLNFRGINYSAEMYLNGHKEVLPKGMFRRHNIDITDILHPDGNNLLAVLVHPPDHPGKIPPQGGQGGDHEIGKDVATQYVEGWDWMCPIRDRNTGIWDEVSISISGPVNITDPHLVSTFHDDFKRSYLHCTLQLENKSSWIADCTLKIQVSTELEGNICLVEHLQSYAITVPPQSDIEYTIPSLFFYKPNLWWPNGMGKQSLYNIEISVDVKGFGESDSWSHYFGFRKIESTIDDSTGGRIFKVNGEPIFIRGGNWILSDGLLRLTKKRYMTDIKFHADMNFNMLRCWGGGLAERPDFYHFCDVYGLML

SEQ ID NO: 67071 - protein, 676 aa, Zea Mays
MSSSRFDELPDEFDPTGRFPGSFDDGDPQTTNLYVGNLSPKVDENFLLRTFGRFGPIASVKIMWPRTEEERRRQRNCGFVAFMNRTDGQAAKDEMQGVIVYDYELKIGWGKSVALPSQALPAPPPGHMAIRNKEGGTATVILSGPGGPAVASIKPQTSELVLTPNVPDIVVAPPDDGHLRHVIDTMALHVLDGGCAFEQAVMERGRGNPLFDFLFNLKSKEHTYYVWRLYSFAQGDTLQRWRTEPYIMITGSGRWVPPPLSSNRSPEREKESTFAAGRSRRVEVERTLTDSQRDEFEDMLRALTLERSQIKDAMGFALDNADAAGEIVEVLTESLTLKETSIPTKVARLMLVSDILHNSSAPVKNASAFRTKFEASLPDVMESFNDLYRSITGRITAEALKERVMKVLQVWADWFLFSDAFLNGLRATFLRSGNSGVVPFHSLCGDAPEIEKKGSSEDGNDGFKLNEDGALATGKAAATKELLGLPLAELERRCRHNGLSLCGGKEMMVARLLNLEEAEKERIYEKDVDVKYVQGEQHVVGREDSGVNAHSTSRFGEGSNGDELDVSRNSMRAGKGRSGGSASAELESFPSKKPKYDPVLPASKWSREDDISDDEDRKGGRGLGLSYSSGSDIADGLGKVDTTEASTDHTSHHHDTIVDEEHRCLSVFNIFLPLPC

SEQ ID NO: 67072 - protein, 213 aa, Zea Mays
MVFKCGFVDIYDVPHFINTLKYDVRIVMSIPKITAQGKTKKLKAYKILPPRDAPVTWYRTTALERLRKYGAIYLTPFSHRLAEKIDDPEFQRLRCRVNYHALRFKPSIMKTSSDIANKLHSEGHFMSIHLRFELDVLAYAGCFDIFTPEEQEILLRHRNKYFPLLLRYWGKYFPGNTPDYRERRLIGKCPLTPEEILAQGYCQAWPCISERRS

SEQ ID NO: 67073 - protein, 412 aa, Zea Mays
MSSKLLEVQTETPEKLMEAKNIVVPPVGGHTRDRRNTIDTDHGFNRTLRDRRRQTSKVTPYALAVETHAEHGGPLPEVGAIEVALTLIGGVQRVDASGTKVRGESHMLLVGDPGIGKSQFLKFAAKLSNRSVITTGLGSTSAGLTVTAVKDGGEWMLEAGALVLADGGLCCIDEFDSMREHDRTTIHEAMEQQTISIAKAGLVTTLSTRTTVFGATNPKGQYDPNESLSVNTTLSGPLLSRFDIVLVLLDTQNTGWDEIVSSHILKENSDEKKDKADASDIKWMLPQLRRYINYVRRKFKPVLTKEAERVISSYYHLQRKSGTHNAARTTVRMLESLIRLAQAHARLMFRNEVRQLDAIAAILCMESSMTTSPIVDIVGNALHSNFTVDPDEEYKTQEKKILKKLGITQGSP

SEQ ID NO: 67074 - protein, 118 aa, Zea Mays
MHGGSVTYLVDPGNNDSSSRTVVINYAYARDNETLFDIISVKFFRCGDGSGGGAVQRDAGSGERVRDPDPVAPQSSFQAPPPQRSVPTRLLLSLSSCSRFLTGNTTGKPPAHHYVGFY

SEQ ID NO: 67075 - protein, 128 aa, Zea Mays
MKDPFEADVEEQDSPPESPAPPEDEPGAAGPAEDPEDYDGGPPPRQPSAPASHAAGAKAKARVHREQQEDDDEDEDQIEVDLEKLPSSTGDPDKLAKMNCWQASLEVRRFLSLLQLWYRESPKYLLVS

SEQ ID NO: 67076 - protein, 195 aa, Zea Mays
MEVTPKTLADVKGGTLISYEGRVQLLEIAQVPDEHVNEFKSIEKFKIFNTNNLWVNLKAVKRLVEAEALKMEIIPNPKEVDGVKVLQLETAAGAAIRFFDKAIGINVPRSRFLPVKATSDLLLVQSDLYTLVDGFVIRNPSRANPANPSIELGPEFKKVANFLARFKSIPSIVELDSLKVSGDVWFGSGITLKPR

SEQ ID NO: 67077 - protein, 548 aa, Zea Mays
MAAVKVDKATNELLLGPDWTLNIDICDAVNSDHGQGKEVIKALKKRIQHKNANVQFLALTLLETLIKNCGDHVHYQVVERNILEEMMKIVKKKRSGVEFPKRSPDAASMFISPVTQPESLPTYLQAGYGMPVDSSSRLDEAMSSNGAPLSISDLERMLGAVELLNEMLRAVNPNEKDAANDEIITELVTQCRSYQKKIMSSVSLVRDEDLLGQALDLNDRLQILLEKHDSIASCSPSSADVIDVVCEVPSGTAPNQGTNFPPQAALRTAIVPTNVLDDEDEENEDDEFSMLARRNSRFQPTNTQSTSSPTVHDETASSTASVPYTASPSVANNALPPHDPPAPPVRVSPEEQVMSDLLALTVSSNPSPSSYTPVTPEPGRLNQSSAPTGELPRAYHGDQGHVSAPYVAPWAQPQSQTAGSQQPTRTQAQVSYSSYAYPPPPWASQDSTESNPFVAAASSSQQYQSTSRTPTMPPNLRPLLQQSHSFGVPLPTASLDSPINGNLKQPLSAGARRPSYVSSNKFFDDLFERNSDGSLKVGSTRHSDVYGK

SEQ ID NO: 67078 - protein, 286 aa, Zea Mays
MGGAGPARDESGQVPGWGQLAAAMAAASRATAVGRTAAVLWARWTSWKWNGAVRSHVLKSLMSVGTASIALKRGVPHWVVRELLVLPYYMMEGDLPTPANARVVAVVTGGNKGIGLEVCRQLACSGVTVVLTARDDARGAAAVENLRGLGLSDVLFHRLDVTDAPSIARLAGFLETRFGKLDILVNNAAIGGVEYVHDQDCGSVTSEEKAKLSGMDMDQRLGWLWENCRETYDDAKTGLRTNYYGTKQVIETLLPLLQASSDGRIVNVSSHFGQLRVRSAHHFVQV

SEQ ID NO: 67079 - protein, 865 aa, Zea Mays
MVTEMAARGGEAAAFGAEADRGDFEVFRSGSAPPTVEGALGAAAAAADLLVDDDLRADPAYQSYYYSNAHLNPRLPPPLLSKEDWRSSHHRLRSAAFGGIGDGRRQQQPAAQGTVGLPGIDLARQRSFSTVFQEDSYQRDMDRQTASHNSSESLCSSGIQYGLNRGPGTIGGLHSSNSLRSLDEIPNNDLPSNTFASLLGSSLSRSASPDPELVRRAPSPSLPPIGVKVGNTDKMNGGSSSFRRSSSAIGGSDDLVAALSGMNLSSRAMSGQTMDQSQLYQDVDNVQKFLFDRQGDQPNGNQQHYMRRPEHGQSKLSDGYSANLANSSTMRNQINSGSFTSFDSLSLGSGFPSPRIGSRSPGGTVSSRQNLAGMSNMLNYNGIGSPTASPSLQTSIDPAYIQYLAQIAATWDDPLMDRSHLGSSYMDLLGTQKANLGPLLQSQKQYGYCGNLGFNLGGYAGSPLTSPVLPSSPIAPGSPLRHGDRNMRFPPGMRNFGNSFGSWNSGMSGKMDANLMPSLLEEFKSNKSKSYELSEIAGHVVEFSADQYGSRFIQQKLETASTEEKDMVFSEIMPQALTLMTDVFGNYVVQKFFEHGSTAQIKELAGQLIGRVLALSLQMYGCRVIQKAIEVVDLDLQTKMVAELEGHVMRCVRDQNGNHVIQKCIECIPQHAIEFIVSTFYGQVVMLSTHPYGCRVIQRVLEHCDDPKTQQIMMDEILQSVCLLAQDQYGNYVVQHVLEHGKPHERSAIIEKLIGQVVQMSQQKFASNVIEKCLAFGNPVERQVLIGEMLGSTSESEPLEFANYVVQKVLETCDDQQREMILTRIKTHLNTLKKYTYGKHIVARVEKLVAAGEKRLGLQPACTAA

SEQ ID NO: 67080 - protein, 747 aa, Zea Mays
MQPKVIDCTGIPENEAGRRIFRARFSSVTEKDISSAMDNLVLPNKDESLSVDARQEIDLKVGVAFTRFQTRYFQGKYGNLDSRVISYGPCQTPTLGFCVQRHQQITTFKPEKFWSLKTYIIKDSDEIQLEWDRKKLFDFDVTVMFQKMVISDGTLKVADISVKEECKTRPSGLNTVNMLKVASSALGIGPQTAMHLAERLYTQGFISYPRTESTAYPSSFDFRGALAALLNNPLWSNDVRKLLDAGFVKPRQGHDAGDHPPITPMRSATEASLGTDAWRLYQYICQHFIGTVSPDCRYTRTAIEFTSGGETFHCVGYRVTSKGFTSIMPWLAVSENSLPAFKKGDSVSIHKADIYEGSTTPPDYLTESELISLMEKNGIGTDASIPVHINNICERNYVQVNSGRRLVPTPLGTTLIRGYQCIDADLCLPDIRSFIEQQITLIAKGKADHLRVVQHVIQQFMKKYSYFVKKIENMDALFEAQFSPLADSGRLLSKCGKCGRYMKYISTQPMRLYCITCEDVYYLPQNGSIKLYKEIVCPLDGFELLLFSMVGPDAKSFPLCPFCYNCPPFEGIDKLFGALKLDDTGKVGKGAGMPCFLCPHPTCKQSMITQGVCACPECSGTLILDPVSAPKWRLYCNMCNCIVLLPHAAHRITTTDKKCLTCESTIIEVDFNKKTTPLQDGATLHEGCILCDDLLHSLIEMKHGKSFFIRRGRGRGRGRGRGRGSSRGRGRRGNSRYDDPKMSFRDF

SEQ ID NO: 67081 - protein, 857 aa, Zea Mays
MDRRSWLWRRKSTDKSPGETETSASEKITDEQIRQNDTYTVSGKRKSKSLFSMFLSETVQPVFKIGNEIDDSTMGRGRGRQCDCPGGFHTRSAVSNGNVAQSDQDSAKSSPNSTRSPEITSKELEDDNDVKVKVLSERLSSVVLDVRAKDDLVKQHSKVAEEAVLGWEKAEKEISSLKAQLSAATAKNSALEDRLVHLDGALKECVRQLRRAKDEQDQTVQDALARQARQWESHKADLELRIVELTARLEAKSERSVVGATDGDTRSSRLAALEKENSALKLQLLAKTEELELRTIEKELNRRAAETASKQQLEGIRKVAKLQAECRRLQAAAQRRASSVNVELRRSPSSACVESLTDCQSDCSDSWASALVTELDQFKKDKSGASTRTASLVAADIDVMDDFLEMEKLASANGSSKGDAVEDASGQVEKALHEAQRELRTCRRRVMVAEERSAELQRQLNHANGDKHAMEAEAEAAEAKGRELEGKLELARADIAGLLDKGRILEERLESEKALTLELAAKYQDMETLEAEKRELNAQLETSRSEAKKLSDKIALMERKLEVEKALSIRLATKCHGVDALEAKKKGVELELESAREEIASLRNKASSLELQVMEEKASSAGLAMRCQELEELRSQLVSSNSRIVELNEKVKTLEDVIEKQRPVTAELESQLQSRHDEISSLKEDISLLQKKLESQKNLSSAYISALGASETEKKELATRFELGEKEAEELRGKTSLLEEQIHEERARSSEFAVKCRKMEEQFSRRSLLGHQPVKSSAIKDIQIRKETELAKAAGKLADCQKTIASLSSQLKSLADFDEFLPETETSGADSADAWDGDLKLLHPASYPTQIGCLAVT

SEQ ID NO: 67082 - protein, 314 aa, Zea Mays
MSLDYHFKYEQEAGSSVYSFFGFNGTAGVWRISAIDDAGGWKDRTTVEDMDLAVRAMLQGWKFLYVGDIKVKSELPSTFKAYRFQQHRWSCGPANLFKKMMVEILENKRVSLWSKIHLWYDFFFVGKVAAHTVTFIYYCFAIPVSVLFPEIQIPLWGVVYVPTVITLLKALGTPSSFHLVILWVLFENVMSLHRIKAAVSGLLDAGGRVNEWVVTEKLGDTSKAKPGTNGSDTAVKVIDVKLTEPLVPKLVKRRARFWERYHCSELFVGTCIILCGFYDLLFANKGYYIFLFLQGTAFLVVGFGYVGTLPPCTA

SEQ ID NO: 67083 - protein, 360 aa, Zea Mays
MKHMTRQEFVASLRRKSSGFSRGASIYRGVTRHHQHGRWQARIGRVAGNKDLYLGTFSTQEEAAEAYDIAAIKFRGLNAVTNFDMSRYDVKSILDSSALPIGSAAKRLKEAEAAASAQHHHAGVVSYDVGRIASQLGDGGALAAAYGAHYHGAAWPTIAFQPGAATTGLYHPYAQQPMRGGGWCKQEQDHAVIAAAHSLQDLHHLNLGAAGAHDFFSAGQQAAAAAAMHGLASIDSASLEHSTGSNSVVYNGGVGDSNGASAVGSGGGYMMPMSAAGATTTSAMVSHEQMHARAYDEAKQAAQMGYESYLVNAENNGGGRMSAWGTVVSAAAAAAASSNDNIAADVGHGGAQLFSVWNDT

SEQ ID NO: 67084 - protein, 578 aa, Zea Mays
MESLETELFDNVRASIQRSLGKPDKLSGRPVAASNPPKATANAPRVAARKGVDRMPQSKMRAPVSTSQGAVSRQRPQVTINEPVAARDKNLTGAAEAKISSKPPRALPRVAMMRSSTNTTVTSRASDKRNSTGGAVNRQAVGKTASTSAVLRSGRGTNSSSILKSGFFTSAATSSHCMLMDTKPEAKTKSATLSIKNRPAQRVPVRPSSKSDISKTIPSRSSGNRIPAKGHADRASPSISPSSSMDSMSSVISGASTASTVGKMSHTSDNLNALSPSLRKSNDCHPNPKFRPPIVTEGHSSGTAASRDNLKATAEITNQGKGLKPSGLRRPTPKIGYFDAENYIDQNIGAQVQPQLSNIQCLPTQNMNLNAAPSTYGQQESKLTAAPHEESCVSKSKLMTPLSLMVEVEPFKVAELACTNLTDPVVVRPESVQPQSMEIQCLLPATPNPQPTFHQQVLKPIAAPLEAVQMEVEAFKVDKPEACIHLSSPVVVKPENKSIDQNAGALLQLQLVAEPESCTRKSKTVVAADYSKENIPALNQNIQANGDANSLVELLTQKLSSISLGEAAPNVAPRSCWE

SEQ ID NO: 67085 - protein, 56 aa, Zea Mays
MGMRPLSSSTQILPGELTEGRGRCRAARRPTLPPVQIRQETNGKSATLQTFKASSK

SEQ ID NO: 67086 - protein, 502 aa, Zea Mays
MGSADLVLKMACEGCGNTSDLYGTGCKHTTLCSDCGKSMARSRARCLVCSAPITRLIREYNKNAENKWSLHKEGLQGRQIAENMREKYNKKPWILEDETGQYQYQGQMEGSQSATATYYLLMRHGKEFNAYPAGSWFNFSKIAQYKQLTLEEAEEKMNKRKTSATGYERWMMKAAANGPAAFGSDMKKLEATNGGEKESARPKKGKNNEEGNNSDKGEEDEEEEATRKNRLGLTKKGMDDDEEGGKDLDFDLDDEIEKGDDWEHEETFTDDDEAVDIDPEERADLAPEIPAPPEIKQDDEENEEEGGLSKSGKELKKLLGRAAGLNESDADEDEEDEDQEDDSSPVLAPKQKDQVKDEPVDSSPSKPAPSGHARGTPPASKSKQKRKSGVDDAKTSSGAASKKAKDAKASGLKEEASSLAKPASKTSAASKSGTSVSPVTEDEIRSVLLAVAPVTTQDLVSRFKSRLRGAEDKNAFAEILKKISKIQKTNGHNYVVLRDDKK

SEQ ID NO: 67087 - protein, 89 aa, Zea Mays
MSLLMRQPHHRLGHRIAVVHQQDAGAVYVSLPRRSALRYRRVFGKNLEAGSHHRSHEISNCLDGGELGRYSCLFWISRTVKYISCDNFL

SEQ ID NO: 67088 - protein, 309 aa, Zea Mays
MRAVLKIIKHCEEFAPALVTGQLLGLDVGSVLEVTNCFPFPIREEDDEADADGANYQLEMMRCLREVNVDNNTIGWYQSCLLGSFQTVELIETFMNYQESIRRCVCIVYDPSRSSQGVLALKALKLTDSFMDLYRNNGLTGEKLREKKLSWVDIFEEIPIKVSNSALVSAFMKELEPESPVTQCDLDRLKLSTAPFMERNLEFLIGCMDDLSSEQNKFQYYNRNLSRQQSQQQAWLQKRRQENMARKAAGEEPLPEEDPSNPIFKPIPEPSRLEGYLVTNQISSYCNHINGVAGQNFDRLYLMKALHED

SEQ ID NO: 67089 - protein, 368 aa, Zea Mays
MLGPLLRLLSACGGVWPTSPAPGAAASSSASSGDDSEGRDGLLWWRDLARCHAGDVSVAVAQANQVLEDQCRLDSAPSIGTVVGVFDGHGGPDAARFACDHLVPNLRDAIREAFLATEEGFLALVSSLWEAQPDIATAGTCCLVGVVHNRTLFVANLGDSRAVLGKKAGRAGQIAAEQLSSEHNANQEAVRQELMAQHPDDAQIVALKHGVWRVRGLIQVSRSIGDVYLKHAKYNTDQIKPKFRLPESFSKPLLSADPSIISRDLEPNDCFIIFASDGLWEHLSNQEAVEIVHSHQRAGSARRLIKAALQEAARKREMRYSDLTKIDKKVRRHFHDDITVIVLFINYDLLLKGAPQGQPLSIRCALDY

SEQ ID NO: 67090 - protein, 586 aa, Zea Mays
MLEQQGALGCDVTVARVVFHEITENAIKKALMSPRYIDMDLVNAYLARRSLDYVIGFGISPLLWRKLPGCQSAGRVQSAALALVCDRESEIEQFKPQEYWTVRADFKMQFADLSNGTCIPFHIKHLNSKKLGQLSIPSQEEAQAIEKRIHSSKFEVLGVKRSKIHKNPPMPYITSSLQQDAANKLHFTAGYTMKIAQKLYEGINLSSEETTGLITYIRTDGFHISDGAAEDIRSLVKERYGQKYVLEDTRKYLKKVKNAQEAHEAIRPTSIRRLPSSLVGILDDDSLKLYTLIWKRTMACQMEASRTQMIQVDVGTPEGEMIFHSAASKLDFKGYQSVYEDTEGDSVHEDNFEALSKLMVKDLVSPVNVHLGQHFTKPPSRYSEGALIKKLEELGIGRPSTYASIMKVLQDRKYVTAKSRVLHPEFRGRMVSAFLLHHFSEVADYSFTANMETELDNVSAGLTEWKGLLKGYWERFSKYCADASNLDGRKVERMLEEKFGPILFPNVDTDNRICPSCSEGTLRFKVSRYGEGYFIGCDRHPKCKYIARSLSQQEDETEPTEECQKTFTPRLLGVMPDSDEKDWCCQ

SEQ ID NO: 67091 - protein, 283 aa, Zea Mays
MENGSLQDHLHSPSKHLLPWKNRVQIAIDVANALEYLHFYCDPPLYHGDVKPSNVFLDKNYLAKLAGCGLAHHSSSGNTTPSCTPVNVKAQATPGYVDPEYMVTQELTPKSDVYSYGVLLLELVTGKPVIQDNKSLVEWSRELIGTDYRLHELVDPSVADAFDLDELQVVADVIHWCTHRDGAARPSMKQVLRILYERLDPLSGRFARAVEGEEGYYYCHGGGRVKGKQAGDGVIQFSGDAARSWLPSSSSTSRSHCSRSVLLECNSPEPQSSPAHGNGAFLA

SEQ ID NO: 67092 - protein, 653 aa, Zea Mays
MSPMPTAPYTSATSLLLGSRRLPRFQFQSLRTPTKPPFRRPASSSSTPLPRCRASATPRPLAPVCASALALPVSVAAAPPPQVDGGWVGGTAAAVRRVAVAVACGALAAAWCRRAMAVGAAAAAGAGAGAPGTVEAAAGIGWMALRGGWPRVLQILQLLREHGLILAALLSLSAFFSMAETSITTLWPWKVRELAEKEPENGVFKMLRSDVTRFLTTILIGTTVVNIGATAIVTEAATAMFGEAGVSAATGVMTVAILLLTEITPKSVAVHNATEVARFVVRPVAWLSLILYPVGRIVTFLSMGMLKILGLKGRSEPYVTEDELKLMLRGAELSGAIAEDEQDMIENVLEIKDTHVREVMTPLVDVVAIDAIATLIDFKNLWETHQYSRVPVFEERIDNIVGIAYAMDMLEYVEEVEKLNAITVKEIAHMPTYFVPDSMSVWNLLREFRIRQVHMAVVLNEYGGTIGEEIQKKTGYIVRRGDGTFDVDANTSIDHLSEELGIKIPEGHQYETVSGFVCASFGYIPEEGGKMLVILEKNFREENGEYQEEGPDRQDDREKTQAYELEIVEANARKVGKVLFKPISSECVDVDNKGVNRLISKKIIKRKKKGSDDSSNDDECPDVTENGCPAELLSYSDDNSALLEDASSSSAKR

SEQ ID NO: 67093 - protein, 1500 aa, Zea Mays
MDVEMLPYGIISTFHCLSVRTSPLNMALLPCVYMQMDGVTLRHLLRPFAAQEAAAAGRVAAAPEQLFASHSTLQSGPPPRVGPSNELLTQVPGNYCTFDLAPDLTRANASNAAGTIDFTRAGPSSSAATLPKYPRHGLPASSSNEQSSFGALFPNRSANGMGIFTCQSSANEGIANVGVQFQDSSVHGLQKLPFKSMTHQHPTLPGDRIRVTCGEFFVGEAGLFGVICLCHRLRMSVAKFCEHAGGIPEKAGEIVCLENGMSIAQWFKFCIGVGGSIANTRWDWPEWAHMKSSPEEHILKSLASRNSGTGKMGLLSRYGKITGHMNKPAYSNDLSVEGGGHTNVEKLVNRTDETYYRKSVDVHETFTKNSALLQNSAVVNLGPAKNHPVHAFDLNPLTTPSGSPHFEASMGRHYNGNHLAHSHGIHLEKNFDASFCNPMPRFTGVMNHDSRACRPNFSNKTFQDTLSNASNTELKLGQSSYHQSMTTLSPLGQSTMIEFQKPQTHRPPINQNPSPKQATKISKSLSEHNEPSISTGNKKQPLEVVNGMKRSEGDELTDDTSKNSFISLFLSHLERNNTPEPIDDILNSNEHYLPKALDVACGSDHPESATRQIETRVPNDKHSKLASAIVHTKRRSEGISLSVASSGYNPQDASHANSQEHLIHGDSLSHLLPSQPNTGISKISARVSCHANCMSCIHVGNKSHQVAHGEIGVPCFYDKMARGHGTFERVDDCTHRSLRAFTKISCDNGKSCCSSRELLPSFCQNDQPTLGKSICGCCCKIQEDASKLGFIPGHMCRTHFSSDVGPVLANKPTIEGLDEFCACSCSTFTQRSSLCSREYVLQSSCDSCPINGLHCRSCMGHAADSLTKHSLFDPLNTKERGSCCNGRCCYSVVPKCLSSCDFTKHCDVIIDQIGHAAPKDNHQLQMPTRCCTLGENEKLICQCLSNKIAVRNLPQTSHCKDVSEKVMNQPSIAITERLENVSEPSVADDSSSKAVAEKKDAYRDSAVSKGQPNFGFSSGSSSIIVTKFQKSPEFNNVSSTAKHSKHKNLCDEGSRIEKSSASSYVPTSTGCEEPLNSSAKSELGPSRVKRKCNQISEGRRLEETDNEEHCSELLKKTRTLRCSVKGSESDDCTRASSQSSQKGVYQPQNEVNSFSCRVLRTKRKHPIMHLNKHVKQLHRQTKFFEGDEQPDAKGNFLGGLDSYDRKRQVEDMSTLDKTRHHQEGSRAFVRKLPKYVSLNCIVNEPNTNSEGACSGSGGIDSSLIATGITNDNRKSPKIVPLNLVLKKAKRCNAVKLRKTESTHLYEEKSSDCSVNSSDYSIEKYSVDDENCSPQAEYELQDSKRSRYSSNDLRSHVALHKRTSGVIGEDDSLGLTDVEINCLSISSSSNGTKNRRTSVSLARIKKFGSKSVCYSGSDKDNAVLAHEVNARRYSGRLSSNSPCCVCGISDLEPCNRLIECSKCYIKVFHTTLYMCPTITAYLQWPVFCVGAPSLLWCTKSS

SEQ ID NO: 67094 - protein, 1855 aa, Zea Mays
MGDGGVACAVRSVESFRAGALVRRGGAGEAMPDKGERAHGHRHQHQHWKNQQSATAADLEEGELLNGEAGTNGLPERSMPPKKWRKVLAASAAAVEVEPGEIVSTKQAVPLKKERRNGDVEKVELLPERQRKEKSSGKSTRKSIKDDVEPGEIALPGKRRDAKSQLAHDNSRRPSSSAQKGSLRDSDEEPGEIKPESGISGSVRKNRPTEPHSSNHKHHTDTSDQSGSKHRRKGEGKSSSAARHLSGRIREVSPPTRDRRDKHERSPGILGRFPHDRFRHDRYDRSPSRLERSPHRTRHYDSRDRSPYISPRHRARPPQFRDNTPSRVDNSPRGRVQHEDIRDRSPFRHDRSPSERCRPTDTHEASKKSRSSNNSEKSHHKSKSAKQSSKIKSGSNGKNEEKISKEKHTESSQYTELPPPPPLPLPPPPPPPPPPPPLPPAVPPPLPPSPEPEPPGVLAEDMIEDMDICDTPPHTSAVPEPTEPICDIGRWFYLDHFGIEQGPSKLAELKKLVQDGYLLSDHLIKHADSNRWVTVENAASPLVPSDFPSLYSDTSTQLVNPPEAPGNLLDEALEEASNLASGAEDKQMEETSAEDSEEFCIDDRVEALMDGSILVHGQELEIIGELLGADFQPADWQRWSRREDFTRLNVHTEVNNEINGGTENRATDAYGLVSVEKNFHHNAESSEWFSGRWSCKGGDWRRNDELSQDTPFRKKLVLNEGYPLCQMPKGSCEDPRRPCKDELYYPVRAKKYELPLWAFSLTEEDIDSVNDTTKSGVVPGRPGQTRQPSRGVKGMMLSVVRINSRVVKDQSSVEPHTKPRGTDRPLSRSSRSHSIGAERSSVHEGSSHFRKHHDHDSQSSHKSKPVPNIPKDRVCTVDELSVYRGDWYYLDGTGHEHGPFSYSELQELVKNGTIIEQSSVFRKIDNTWFPVLKDLKPGSSVPSAARSSSFTAALMLPDQYNFGVNQGSGSFNQLHPQFVGYTRGKLHELVMKYFKSRELTLAINEVLDPWISAKQPKKEFEAYFSHNSASRNLLPDGGSAKKAKLLPDQSDEDIHLSQDILASRKEDICFDELCDAEPSVDNDSLNPGAGNETWGLLNGHVLARIFHFMRADVKALISSAATCRSWNAAVKYYRNMCRFIDLSSVGPLCTDSVFCDIMAGYEKQNIRTLILAGCSNLSSHALGRVLEQLPQISYVDIHGCGHLGDLKNKFQHVKWIRSSLNPEESYRKIKTLKQIGDGNNYASKVARNFTNHLDGSDELDGYFADISNRENANLSFGQGFYKRSKLLDARKSSAVLSRDAEMRRLMQRQAETSYRKMEEFIINRLREIMRSNRFDFFIPKVSKIEGRLKNGYYARHGFRTIKHDIRTMCQDALRYKDGNDSGDIKQIVVSFIQLAKRLGNPRYISDRYGAGAQDSLDINQYSFDTKLKKKQNKIRGANSLAAGADNSSRAFDLEIKRSLSKLKKKDVYSGSETSDDDDGYSEVDETESETTVSDTESDLDVNSGAWDLKGNSLKLIEPGESVTDDRILGARMTKASLVPPVTRKYEVIEEYLIVADLEEVQRKMRVALPDDYSEKLLSQKNGTENLELPEVKDYQPRKVAGDEILEQEVYGIDPYTHNLLSDIMPADLELSPTDKHIFIEELLLNTLNKQVRHFTGSGNTPMTYNLRPVIEEIQRSAEDNGDRRTSKMCLGMLKTMRNRSEQNFVAYRKGLGVVCNKKGGFGVDDFVVEFFGEVYPSWRWYEKQDGIKHIQNNSEDQAPEFYNIMLERPKGDGDGYDLVFVDAMHKANYASRICHSCNPNCEAKVTAVNGKYQIGVYTLRPIAEGEEITFDYNSVTESMKHQSASVEVKYAVAAI

SEQ ID NO: 67095 - protein, 761 aa, Zea Mays
MALDTGTAAGIDEAYEFSAPRFFDFVVEETEEAVRAAESWFEAARSHAPSPFNPRIKESRAEVKLAVLCDFAQAEEPAPEVNKQKEPADEMSGPPAAQEERDESPPSLEFLSATDLSVKSADGGSTSTLKMQTRYPAPPTNVAPASSTCDSSSVNTDARTPKMQVNMCRAGPTAASTNVKRSVMIKGGRDLVGTGKAATAGAEIAQENQAVKRQKLDDGRARQILNVKTKVLPHKARADLAGSEMRRSHEDMRSAKEADPYVSAAELVKKFESGTRELSITHSRCRSHEDAASQRSLRRPKLMLTRPKEPDFQTSQRVRTVKVKSSAEIEEEMLAKIPKFRARPFNKTIAEAPSFPPLPRRTPQIPEFNEFHLKTMERASRYADTCSEVSCADTIQSQNKTLKSRQAKPPQLHTAMRARPPSVKSFQELELEELEKAPKFKAKPLNKRILESKGDIGVFFHPKSQVTAPKKFHFSTDVRLGPPSVADLFDKLSLHSECSSNSNRQDVPRRTIPNPFNLQTEERGHLKERQLEAHLLQKKMEEEKARVHKANPYPYTTDYPTMPPKPEPKPCTRPEGFQLESSVRHELEQRRLMEEKQRMESEEAQRRIFKAQPVMKEDPFPLPEKERKPLTEVEQFVLHVDERAVQRSEFDTLIKEKEKTYKRLREENEFAHKIEEEKALKQLRRTMVPHARPLPKFDRPFRPQKSPDDQYEPPKGKFCRGKQQPLNLLSIPSTNLYHLLPYNVKLQYQQQDVKGKTFTTQ

SEQ ID NO: 67096 - protein, 188 aa, Zea Mays
MAAEGKRKGVPALGWWLMLVGSLRLASVWFGFFDIWALRVAVFSQTEMTDVHGRTFGVWTLLTCTLCFLCALNLENRPLYLATFLSFIYALGHFLTEYLIYHTMAAANLSTVGFFAVEFSWEPPGFLCWEAVMTDARVVRLMWSGPARGRRMVEESSLESRLMMALRHLYFSFQLFIMLFRCMRRSSD

SEQ ID NO: 67097 - protein, 61 aa, Zea Mays
MSCYRCLIRGHVVIFSLALFLFICIHMHNAFHSGTLINRVMRKTSQVDPKRGLIRRMKLMN

SEQ ID NO: 67098 - protein, 375 aa, Zea Mays
MDSTPAPEAAPGASSSSPAAAAAAEGLAGGVAAMTLDERFEMLRGIGEECIQEDELRRLLENKPVPICYDGFEPSGRMHIAQGVVKTINVNKMVNAGCKVKIWIADWFAQLNNKMGGDLKKIQTVGRYMIEIWKAAGMNLDGVEFLWSSEEINKRAHEYWPIVMDIARKNNVKRIMRCCQIMGRSDQDDLTAAQIFYPCMQCADIFFLKADICQLGMDQRKVNVLAREYCDDIKRKNKPIILSHQGQEKMSKSDPSSAIFMEDDEAQVNVKIKQAFCPPKIVEGNPCLEYIKYIVFPWFGRFEVIRKESNGGNKTFTCMNELISDYETGALHPADVKPALAKAINEILQPVRDHFNNNNEAKVLLNTVKKYRVTN

SEQ ID NO: 67099 - protein, 330 aa, Zea Mays
MDPVADPSPSRRSLKRRPPARSPELSPKSGPGAGEAAAEGLIRRVEELEAAAARLRGEKEAAEDAARGLRQELDAERASAETAASEAMLMIERLQREKAAAQMEARQFKRYAESREDREREVQEELASLSDLAASYHSRLQSHGIDPDSFTDDDDDESYSYEEVGAEDVEQIGMAALQVERNVRDSGSGMEVKAMVVGNDRGEDEEDADADADDAEEPSSPVEKEFEYTVDVTCASTTKPATSVVAQYVGDGNSGGLYARVEALEADRAALRREIFALRAERAQLVMAREMARRLCWEMVAEQRAIVKKALVPASSFSVIRICKCPEIAA

SEQ ID NO: 67100 - protein, 1304 aa, Zea Mays
MDIIRMVITCQAGAYLHFEEIIDVAKLLGLRSEEEVADVEEAIAREAVVNGDLQLALDICLNLTKKSHGAVWDLCAAIARGPPLDNLDTGTREKLLGFALSHCDDDSVGELLNAWKELHAQGTFEKLMITTATNPPNFLIDGSSITPLPVQSVQDILDLRDDNGHDRRSDLVGIVKDMLSKVCLDFSNGDTHNWESMLEENRKLLCFGALVLPWLLKLFSNEACDGEIMDHLTRRCRFSTKVKAATSIIYWLVINGLAPNDNIIMILAKSIMEPPIDEEFDVLGCSVLLNLMDPFNGVKIIEEELKRRESYQEISSIMSVGMLYSSLNNSKKECSTPEQRRNLLLHKFHEKFTSADTDDLDQVDMANTTFWREWKSKLEEDKQLADQARMLKQILPDIDTSRFLSGDVNYIKIVVYSFVNSVKMEKKHILKEAVRIAEAYGLQRTEVLLRFLACSLVSEYWDNNDILNEISEFREDIVSSAKGVIDMIYSDVYLEIDGYNKQRLSYIYGILSACHSYLKRTNEIELRYPVHVHTHKLEPFQYYKVLEEECKKVCFIDGLNFKNIAGLDNLNFEHFNDEVCKNIHASTVTAIADMVQSLVSMYVDVLAKGLISQQGVYKHYVLGLLASLEGRSEAQSNNTDYEKLQASLCEFELNYDSCREYIQALPATDISYIVRRYCTLCFPSNLARSHPQEPSWRKPLATLLEFWSKVVDDIPGDSIDACSYGRTDYLNSNRLSLCMRAFRQLLIIDEIALHQGWDAISMYVKDCLRNGKMMETPCFCRAMILSGCSFESVVEVYFGGQGQLGSENADPSNYLDLLELYNAATEKCLSDLSEESCEYRILLHNLLSSLSRSTGKHAGALEMVRSGVWGKLIRYSEDMQLESQLRVYALQLMQCITGRNLKSLPNEMVCQVEPWESWYEHGAGAAIADESINSSSSITGTLVALRSTQMVAAVLPDANITPENLATLDSAVSCFLKLSERASGVSVAVFEAVLEEWEQLFSPKEEHVAPHESPKETSDWSDGWDDGWEALPEELESPKNKQEGVLLSVHPLHSCWMEIIRKRVELGELHKVLELLDRASLKHSVFLEEEEAHSLVELVSALDCFMALKTVLLLPYESLRLQCLQMVEVKMREGIVSTSSNADDQELLALVLSSGTMQKIITEEAYSKFFSYICHLVGHLARSFQTDLLVQWNEATSKINRSLLFARVLFPCFVSELVLGGQYLLAGFVISRWMHTHPSLGLMDITETSVRCFLQGQVAQLDEVGGSDAALTDGEVCVRHTISTLQPKLVSLLQSALALSNKEL

SEQ ID NO: 67101 - protein, 213 aa, Zea Mays
MAIIALFISKAADYLVEKQEVLFFKALHMNMKGSEAKMLGAMETNRIKYKFYTVALLLAMVIVAGTVFLWKVEKLSLVDSFYCVCATITTLGYGDKSFSSKLGRVFAVFWITTSTLIMAQFFMYLAELYTERRQKILTKWVINRRITTMDLEAADIDDDRQVGAAEFVLYKLKELGKISQEEISCFLEEFDKLDVDQSGTLSTYDLTLGQTIQ

SEQ ID NO: 67102 - protein, 759 aa, Zea Mays
MAPAFSVPDAEDLPARRSDASDVAGNVWDLATLPTPPAGGGREIYIYRNTFNLVPRSIGGRARGLRSLKFFGNDVEVLPADSGDELDGLESLQVKVSAPRVSGAPLRRMQALKELELSMVPPRPSSCSILAEVARLKCLTKLTICHFSIRYLPPEIGSLKKLQELDLSFNKLKNFPNCIIELSALKFLKVTNNKLVDVPSGISSLRCLESLDLSNNRLTSLGSVKLISMLTLQYLNLQFNRLSHSYVIPSWICCDMRGNVENTMKGCKLKYTGVATMNSLAEPSTSSHACDSALLCVQSESSPNLKHHAPHKIKKGWRRRDCLQQRARQERLESSRSKLNEKYIDEMAVNMAEDECPSSLHDMENKLGIRTIDEETSVQDSLKETSSISEDLFSIVDDDLDGLTKDCGTMVQDHYDEEKPGFNMRGYNDDNSCISGEPACFSRSRVCSVEKELDDTASSVHDVGEIARDNSSVTPKFALKSKRHPDMDSNPKPSKCPRPIDERSKLSYKYSVESFCSIDDHLPDGFYDAGRDMPFMSLEEYERSLGLYAREVILLDREQDEELDTIASSAQLLLSSLTRPSSCEMEEDAGHDLLRASVLALFVSDCFGGCDRSASLGRTRRAIVSLRKEQPFVCTCSAGNLGDNNEAKQTNILSGHFDFAGLCNRSIHLIKERRNSGIVPIGSLQLGVCRHRAVLMKYLCDRADPPIPCELVRGHLDYTPHAWNIVPVKKRNGWVRMIVDACYPTNIKEETDPEYFCRN

SEQ ID NO: 67103 - protein, 430 aa, Zea Mays
MDWSLLRTSSFSFNSYTLEIMNASQPNGLVVPDATVHPVNSTSDVIELMRIGHANRAVGSTMLNERSSRSHSIVTIHIRGVDLKTGATLCGALHLVDLAGSERVDRSSVTGNRLKEAQHINKSLSALGDVIFSLPQKNAHVPYRNSKLTQVLQSSLGGHAKTLMFVQINPDVSSYSETLSTLKFAERVSGVELGASKANKEGKDIREFMEQLSLLKHKMAKKDDEINRLQQLKTQTPRVRTAKRADSPLKHSSSSPGISNLGSKIQHRRTVSSGKAMSIASRAGSDTFSDTSDRHSESGSMQSVDDILPRRGIMGLPKLSIGEMGQNSADPELVCFDYADSEERLSDISDSGLSMGTETDVSVSSIVELTRFQEQENIPSTLKEQESARKIPNDQLSKVATRVQKTTVPKLAQTSLWPKLRDPPALRSPV

SEQ ID NO: 67104 - protein, 464 aa, Zea Mays
MQIDWEKKQCSHNAVILYACKCCHEILSQEIFHGLLIWGQLLSLEQCGFRDDLRTALCNVGPNERARPCPLPPGGAGIPLPPGGGGGPPGIPGGIGGDGGGGGAGAPPRNPAGGGGGGVPPSPPKGGGGGGTPPIPPYGSGGGAPMYPPGGGGGDGAPTYPPGGGGGGGAPTLALGCGRANAHSPGGGGGGGAPTYPPGGGGGGGAPTLALGCGRANAHSPGGGGGGGDSTCPPGGGGGGGAPTLALGCGRANAHSPGGGGGGGDSTCPPGGGGGGGAPTLALGCGRANAHSPGGGGGGGDSTCPPGGGGGGGAPTLALGCGRANAHSPGGGGGGGDSTCPPGGGGGGGAPTLALGCGRANAHSPGGGGGNSTCPPGDGGGGVKGGGGGMAPDPLGVDSGTSPCPPGSGGGGGGGGNGIFTIPPQRVDNGDLLCTLGGRGGGGGISLVTSRREAGSADCPPSRG

SEQ ID NO: 67105 - protein, 414 aa, Zea Mays
MWYLPDFEHGSIKDDYCGGSSGYNSELLKIMETNQSPPCKRPRRDRNREKAPSSNKIEVMEQEIWRDFPEDLFETVIARLPVAAIFRFRTVCRRWSSLLGSDSFSRQYSEAPHGLPWFYTITHENSNNNVAMYDPLLKKWHHQSVPLNHTKIVIPVASVGGLVCLLDLSHRNFYICNPLTQSLKEIPPRSVHGWSRVVVGMVLNGRSSSDGYKVMWLDIDGTCEVYDSTKNVWSCPGTFPPSIKLPLALNLRSQPVAVGSMIYFMCAEPDGVLSYDVSTGIWRQFAIPLPLHLTDHTLAEFQGRVMLVGLLCKNAATCICIWELQKMTLLWKEVDRMPNLWCLEFYGKHMKMKCLGNSGLLMLSLKAKHMNRLVTYNLLKREWQKVPDCMLPWSRKRQWITCGTAFDPVPCALV

SEQ ID NO: 67106 - protein, 131 aa, Zea Mays
MLNMMTDLSCGPSSKAKGGQPAAAPGSGGDRQGRGKIEIKRIENTTNRQVTFCKRRNGLLKKAYELSVLCDAEVALVVFSSRGRLYDVKSTIERYKKANSDTSNSGTVAEVNAQARTSEQEVRAIAQWVLA

SEQ ID NO: 67107 - protein, 340 aa, Zea Mays
MTGGGSSTRRPAAVARSRGRPSEASEPDPGARRAAAAAAQRRGRGNPGPLRLMDVRPRTLAYFVVASFALVSVTFVVYTGGWWEEVEGEGAATLRKVMRSVTPLPAPRMMDLPQFQNNHKESLYWGTYRPNVYLGIRARTPLSLIAGLMWIGLKNGQYFLRHVCQDSDELRTFGWTAHNGRDYGRQVLVDHGLFLTTSFLKEKGESSGYGGDWAVRLDANNERSGLSDAEESTTHLFFYIADETGNPITMGSYEPSSRGSVLLASGLHEEIGGWELYLRSEDNLEIHRAGFKSMSMHNLSDLVQQAVATNAMQSGNLNLPDITEDSSNIMVYQGPPQSLQ

SEQ ID NO: 67108 - protein, 118 aa, Zea Mays
MFDGQIVVYKFIQDLHFFVTGGEEENELILASVLQGFSDAVERLLKNMVDKRTALENLDMILLCLDEIVDGGIVLETEGREIAEKVSGHGLEGASSAEQTLVNALTQAREHFAKSLLM

SEQ ID NO: 67109 - protein, 732 aa, Zea Mays
MGYDEKMMTKGILEKMKLENFQLGKTKVFLRAGQIAILDMRRAEILDNAARHIQGRFRTFITRKEFVKTREASISIQAYCRGCLARKMFANRRETAAAVIVQKYVRRWLLRRAHLQACLAALLIQSYIRGFIARRYFSVIREHKAATVIQSTWRRRKFVILFQNYRQATVAIQCSWRQKLARKELRKLKMAANEAGALREAKNKLEKKMDDLALRLTLERRLRASSEESKSVEILKRDKIIESLSAECAAAKSAAQNEHAKKLLLQKQLDDSLREITMLQSKKIMSAEAAEENSNLKNLVESLSTKNSILENELIVTRKSSDDTMEKLKEVEGKCNHLQQNLDKLQEKLTNLENENHVLRQKAFNMPTMNNLSVAPKTLSEKFSASIGLPNSEPKHIYESPTPTKYLASLPQTLSTSRRSRLPVERHEQNHEILLRCIKENLGYKDGKPVAACIIYKCLLHWRAFESERTAIFDHVIEAINDVLKGNEADGRLPYWLSNTSALLCLLQRNLRSNGLFTTPSRRSGGALGKIAQTLRSPSKFIGRSDTLPHVDARYPAILFKQQLTACVEKIFGQLRDNLKKEISPLLNVCIQAPKSTRGQSGKASKSSGVGAHPASNSNWDNIVNFLDLLMDTLRENYVPSFFIRKLITQLFSFINIQLFNSLLLRRECCTFSNGEYVKAGLSLLEKWITDVTDEFAGTSWHELNYIRQAVGFLVIDSASCPSFCFCSLFVF

SEQ ID NO: 67110 - protein, 156 aa, Zea Mays
MGLLFLERLEGEGVFRCRRCRVDAASKDAIISRDFYGRSGRAYLFDHVVNICLGPNEDRYLVTGLHTVNDIYCSCCQQILGWRYVSTNIIGLSCDNELSYFHWIMLGSRHSSEITFLLKRKKNSLQQFVEMRTKLKKYLSFLQKALNIKWAAMHNK

SEQ ID NO: 67111 - protein, 328 aa, Zea Mays
MFPIQIPTPAAAGLVRTLTTPPSAFQSTTHAPFLSGVINSAAARSCRKRRYADAHEGASSPRRRRRRRFLLVPNSFLAGRSFALRTLASALHKRRHDAATSSARPSSRRLRLLSPVLFPALRPLSPRVSLATAPRSHRKIHVDDARRAVSTPCRRRRRSSLLPRVRHFRPFALRFLLTPGALSPHRRRKPAEVDMGNLISQLLWKSTRDGVSEAHTKRLDGSPEVVDLTVEPELENNDAVGRMFGDRSVPALGSSKSPEKKATFYEEPHGRRLQESGFKKLKLAELPDPLDNTSKEDLSELFTPLSDKDEREVNALLCSSDDSDTYAF

SEQ ID NO: 67112 - protein, 190 aa, Zea Mays
MASPVVVAATLLVVALAAFCGTDPLRTDNMVDFPGFESHLVDLPDPAEMPTHADEWERLCGADVRFCGEVQGPESIAFDQQGHTRASPTAGSSSGTVSEAPRRAEGLAAGVSPSEHICNSPLGLCFDKTGDLYIADAYFGLLKVRPEGGLATLLATEAEGVRFNFTNDLDLDDEGNIYFTDSSIHYQRRY

SEQ ID NO: 67113 - protein, 686 aa, Zea Mays
MAADALSIIPGAVLRNLSDKLYEKRKNAALEIEGIVKQLAMAGEHERISAVISLLTNDFTYSPQTNHRKGGLIGLAAVTVGLTSEAAQHLEQIVPPVLNSFLDQDSRVRYYACEALYNIAKVVRGDFIIYFNKIFDALCKLSADSDANVQSAAHLLDRLVKDIVTESDQFSIEEFIPLLRERMNVLNPYVRQFLVGWITVLDSVPDIDMLGFLPDFLDGLFNMLSDSSHEIRQQADAALSEFLQEIKNSPNVDYGRMAEILVRRAGSTDEFTRLTSITWINEFVKLGGEQLVPYYADILGAILPCISDEEEKIRVVARETNEELRAIKADPTEGFDIGAILSIAKRELNSEHEATRTEALHWFFTLLDQYRAEFLAYLNDIFDPLLNALSDPSDVVVLLVLEVHARIAEESHHFHHLVSYLICTFHNNHFLLEKRGALIVRRLCVLLGAEKVYREFSTILESEVDLDFASVMVQALNLILLTSTELGELRSLLKKSLVDSCGKDLFQSLYASWRHSPMATISLCLLAQAYSHASCVIQSLGEEDINVKFLVQLDKLIRLLETPVFAYLRLQLLEPGKHTWLLKTLYGLLMLLPQQSAAFKILRTRLKTVPFSENIKRTSSANPYSQILQVTEDGNRNQDTQNYSAINFPSLLQQFEHMQLQHRNHLKDQLQSRKSASALTLSQELC

SEQ ID NO: 67114 - protein, 69 aa, Zea Mays
MVNINLNTFLLIIVWYKCVIYLVVLACHVCLCVVRASFACRTQRFHVARFSCVVNPPRLESLILINLLI

SEQ ID NO: 67115 - protein, 146 aa, Zea Mays
MHKRRATGGKQKAWRKKRKYELGRQPANTKLSSNKTVRRVRVRGGNVKWRALRLDTGNYSWGSEAVTRKTRILDVVYNASNNELVRTQTLVKSAIVQVDAAPFKQWYLTHYGVDIGRKKKTPAAKKDNAEFYMKKLQRKKGKSAVA

SEQ ID NO: 67116 - protein, 400 aa, Zea Mays
MAVEKSSSGTSTPSTTSTMDRFQKIVLSWDYLRLIAESKGGKQAKVLQHVKNTYVSVAEYLGVFEPLLFEEVKAQIIQGRSNDEEESGMDWRRGAVGSCTESEGFHKLSVAVEDNFQDNVSENDLLLISKEKFEEGSTPNAYAFALVEQRGGGIHISLRTFVAGEIQNLNVAKPVKSTRLQHFASIIASQNSLLWILKVCSLSTIMREFTAMHSVASLPFKDLILSATEAHKDGDDQSRAWNVPEPLMDYLKVNLNDSQLEAVNAGLSRRSFVLIQGPPGTGKTQTILGLLSAVLHSAPARMQIKGGFDVLKHGPELDIDGKRAHWIKASPWLLGANPRDLIMPVDGDDGFYPTGNELVLGLFTPYMEKKKIFIETRNRKFQSQVSGSCVGVCSIQLSTR

SEQ ID NO: 67117 - protein, 723 aa, Zea Mays
MIFKRSQRSEILAPRRCNAADSGGEDEGGGGPRPRKRRRGDEFFPVDLLGDVPASSIPYAAFGLRWSEAPEAPPEAAQPPPAARPPVVRSSRGRTLVLPSRFNDSVLTDPWKKEKPARPPPPVKTEHLARRNELLHKKGANFDSSVALSEVDDDDEEEAMVERYRARRSFGASRKHLASWSTLTSVHDEPYSNHHRKEVKLRHYYEEDEEEEEEKEDIFHCTEELVYGDIVWAKLGKRQPMWPGVVVDPTQQAAADAMPPQPRGVAVLCVMLFGWRTEFSGEKKYVWVRQGLIFPFSDYMNRFQGQTELSSCKPADFRRAVEEAFLADQGFSEVVVHCSTKGQSVVCHSFPDDLHEVTGSNELEYQPQIKQCRRVLQCESCGNCFPNKDTNKMVYVMEQLACRLCARILALKKYCGICLKNLQHKYGGRRVCCHGCESWVHAECDENCSNLKDLQDKKYHCPYCRVKMNSTLPGKNTKISDVRKDSSAQKGSKPDKVALVCFDMEGTYEPDLELISCHCGPCKGQKFLFNEWERHAGCRSKNWRSSIKLKGSLMPFGKWIDRHQPGVCPTNPPKRSSQKMKKQKLIDLLNDPYDPVNVKWTTERCAVCRWVEDWDYNKIVICNRCQIAVHQECYGVRGKQDFTSWVCRACEKPEQKRECCLCPVKGGALKPTNVDNLWVHVTCAWFQSQVAFASDELMEPAIGILNIQPLLFMKSMLYAHLSL

SEQ ID NO: 67118 - protein, 265 aa, Zea Mays
MSDLNEVIFGQEHLSRDDLSFIFSLKVSDNAPLYGVCLHVQEIVQKAPGILGAVSPLNPTSYKPSRFLVSAPRCYCLLTKVPFFELHYEMLNSIIAQERLDRITQFASEITLAEPVPRPIKEQDGVDGDFDSSNGIPYIDWTEYAVPVNSISGLISSSSIPSERDMSSYLFRSWEPNSSQSISGSEISDSSYVREVEEARHSFQHYEDCIVENLEPRCDSFGRASYMYDNGHTSPDLLSMHSPASSRLERAQSVESLESQRCNIR

SEQ ID NO: 67119 - protein, 557 aa, Zea Mays
MSSSRPTRSSISPFRSRRSAPAVSAAGPPPPARTSSGGRPSTPSSTASGRPTTPSSSGGRPATPSAAFARPATPSSSSARPATPSSTASARPTTPSSISSRVAVRAPLVDAANAKENIMVTVRFRPLSPREINKGDEVAWYADGDNMVRNEYNLSIAYAFDKVFGPATTTRHVYDIAAQHIVSGAMQGINGTVFAYGVTSSGKTHTMHGEQKSPGIIPLAVKDVFSIIQDTPGREFLLRVSYLEIYNEVINDLLDPTGQNLRIREDAQGTYVEGIKEEVVLSPAHALSLIASGEEHRHVGSNNFNLVSSRSHTIFTLTIESSPSGENEAEEVKLSQLNLIDLAGSESSKTETTGLRRKEGSYINKSLLTLGTVIAKLTDGKATHIPYRDSKLTRLLQSSLSGHGRISLICTVTPASSNSEETHNTLKFAHRSKHIEIKASQNKIIDEKSLIKKYQKEISSLKEELQQLRRGMMGNGGILPTDQEDLVNLKLQLEAGQVKLQSRLEQEEEAKAALMGRIQRLTKLILVSTKSSISSNVSGKTNFRRRHSFGEDEGNLI

SEQ ID NO: 67120 - protein, 218 aa, Zea Mays
MDSEHWISRLAAAKRYYAAQLGRVDDVPGMGTEEVEMEVEDDGDMEMELEMALELGDATWPEVACPYCYEDHDVASLCIHLEEDHPYEPHAAPCPICSQRITRDMLNHITMQHGYLFKALLGGGHGHRSNNAVTTNISSDPLLSSFGLSFSASDAPEPSKSASSIPDGTAIRKETPVQPWESSIDSSLTSEEREQKRKQATGRATFVQGLVMSTLFGD

SEQ ID NO: 67121 - protein, 429 aa, Zea Mays
MDISINKRLLISCNFQVKKKAEALKDNRDYSFLLSDDADLSSSPKEKPAARSSLTQRADREVTQSTVKRKAPTSQPARLSNGYGPKNTMSTQRHAEGKVNSMRREDFSNTERVVSRDNERMYERVVSRDNERMHSIARNGSNQASTSKTTIQKHPSRGPIANKQPSKDSNDATLRKSSVASKHHPLEIDRPKSSQSQRMQSAGQRPQHSSHGQTPHQSMQHRTQQSLQSRRPQQMTQGQKPQQSLQSQRTQQSLQNRRPQQSSHIQKSQSSQAHRPQSLSNRSQALQGQRPLSSQGQYPEQRRVHASDRVKQAERQIRPPSKSMPSRPVSSNGIRDDHAKRKQVAKRRFDEDDEDPLAMIRNMFGYDPSRYAGRDEDVSDMEADFATIEMEEKRSARIARQEDEEQLRLIEEEERREQERKRRKMARGR

SEQ ID NO: 67122 - protein, 500 aa, Zea Mays
MDALHKTFMTRKKRHINIVPFKFDTPSPDDMVTTGLKSSRNFRKVDTEVLVKDSVGVTGKEMMNNDILLTEKNTSMDPSALVQLDDGGTSSNVPSSSQNITLALDHELQHLSLESKLKNSKTNVKKTASVSHYKPEPWMLQSENQEIRNQLSLAIVGHVDSGKSTLCGRLRHALGLISKKQMHKYEKEAKEKGKGSFAYAWAMDESSDERERGITMTVAVAYFNSEKYRVVLLDSPGHKDFVPNMISGATQADAAILVVDASIGSFEAGMGVNGIGQTKEHSQLVRSFGVENLIVAVNKMDGVEYSKERFQSVKSQLGVFLRSCGYKDSSVTWVPLSAMANENLVTACSDTRLLSWYNGGCLLQAIDSLPPPRRDVSSPLRLPICDVIASHTLGQVAVCGKVESGGIRTGCKVLVMPSGDIATVKTMERDSSTCSLARAGDNVAVGLHGVDPGHIAAGGVLCHPDFPVRVACHLELKILVLEITVPILVGLEVSGKQHDE

SEQ ID NO: 67123 - protein, 62 aa, Zea Mays
MIIYHKNLTSQGYRAFIYSGDHDMCVPYTGTEAWTASLGYAVVDPWRQWIVDEQVAGYVSGF

SEQ ID NO: 67124 - protein, 211 aa, Zea Mays
MSTGLSQLSGGVGGDRGSSSSAGPHHQHSHHPPPPPPPKILLAKPPLPHASSSGADDDGGTGVAGGRARQAPQPGSLSLVSDAWEAHTDKILPYLTENNDFMVIGVIGPPGVGKSTIMNELYGYDASSPGMLPPFPTQTEETRLMGKHCTTGIDIRISNERVILLDAQPVYSPSVLIDMMRPDGSSTIPVLNGEPLSADLAHELMGIQELL

SEQ ID NO: 67125 - protein, 158 aa, Zea Mays
MSSSSSFPTSRFPFAAGARAPGSRRGAGGGGSSVRPWGSTGGTSVSSSGKRIQKELLDLNASDCSAGPKGDNLYHWLSTIFGPQGSPYERGIFFLDIVFPRDYPFKPPMVTFKTRIYHCNIDSTGKVHLDILKDGWSPAFTISKVLLAIKDIINNPDP

SEQ ID NO: 67126 - protein, 124 aa, Zea Mays
MAAEGKRKGVPALGWWLMLVGSLRLASVWFGFFDIWALRVAVFSQTEMTDVHGRTFGVWTLLTCTLCFLCALNLENRPLYLATFLSFIYALGHFLTEYLIYHTMAAANLSTVGFFAGLSFKPFQ

SEQ ID NO: 67127 - protein, 829 aa, Zea Mays
MALSTLVTPTVSSLSHLSKSSNFNLQLWSLHALLLTIEAAGLSYVSQVQGTLFLAMEILLLEENGYVDLRQGIGHLINAIVAVIGPELAPDSTFFSRCKSVIAEISSSNEMATLLESVRFSQQLVLFAPQAVPVHLHVQGLIPMLYSRQPSLRYLAVSTLHHLIERDPAAMIDENIEENLFSMLDEETDSETAMLVRATIIRLLYTSCPVCPSRWLAVLRNIVLATSIRRNTGEVLSCFGHNPPDSTSENDVYYGEDEDNMISSSKQQQIRCAGSISSQFPPRNKHLRYRTRVFAAECVSHVPIAVGAEPAHFDLLLARSAISQGTYLSNDWLVLKLQELVSLSYQISTGQFEGMQPIGVKLLCLIMDKFGKAVDPEFPGHILLEQFQAQLVSAVRMAISTASGPLLLEAGLELATRVMTSSIIGGDRLALSRLFSLITRPLSDIEGLLYPSFADWVVCKIKVRLLTAHAAVKCNTYQFLRMRENAPNEYQQLAPSLVNSSTLLGKYWIRALKDYVSISFGLHSKINYKPFLDGIQSLLVLSKVQRYLDEVWLLILKATALDAAPLDFDENNPKNLLEQTFISGHCMVKLDRTEFQFLWGLSILVLFHSCQSMKNNSLKINLDFKQDKNFGEFIVHGLDDKRPCDQVLRVLSSLTTEVFFSNNFISVDICQQLLQALTYADCSSAPIIHLFTQIIRFCPDNFFEVEAFVFSAIELLSQYLGLILQCRDGSSQNNSSNTLISELSIASETMAYRIKGEYLWKLVMLVVSTSHQSFQQVSTNLCFSNIICFLQNIFPFMRKIFRASGCAYRLFKVHFVVPTYRCTCWVCKY

SEQ ID NO: 67128 - protein, 55 aa, Zea Mays
MLLVLHQTYRRPLDGLSPWGSTEHVLLKHSLPAIGMRSYLQTIFLSMLVRKIKPE

SEQ ID NO: 67129 - protein, 517 aa, Zea Mays
MSLKELRSQVITVAHALDAIFEKGDPIAIDTPMTCNAVIIYLAIILGGFVVVSIADSFAPQEIGSRMGVSKAKAIFTQDFIVRGGKKVPLYSRVIQGTSSKAVVIPAIGDSLGIMLRDGDMSWKDFLSHAAGRSSSYSPVYQSVDALTNILFSSGTTGEPKAIPWTQLSPIRCASDTWAHLDVRPCDIGCWPTNLGWVMGPIIIYSCFLTGATLALYHGSPLGRDFCKFVQDAGVTVLGSVPSLVKSWKAGNCAEGLDWTKIRVLGTTGEASDIDDNLWLTSRASYKPIVECCGGTELASSYIQGSLLRPQAFGAFSGASMSTGFVILDEQGTPYPDDIPCSGEVGLFPLYFGATDRLLNADHDKVYFDGMPIYKGRQLRRHGDIIQRTVGGYYIVQGRADDTMNLGGIKTSSVEIERVCNRADECLLETAAVSIKPSGGGPEHLAILAVLKDRSAQYDVNLLKRKFQTAIQKNLNPLFKVSYVKVVAEFPRTASNKLLRRVLRDQLAQELSNRSKL

SEQ ID NO: 67130 - protein, 722 aa, Zea Mays
MASDSRPPKRSPSARRVAPRHAHHHHSQSSGGSTSRAGAGGGGGGAAATESVSKAVAQYNLDARLHAVFEQSGASGRSFDYSQSLRAPPTPSSEQQIAAYLSRIQRGGHIQPLGCTLAVADDSSFRLLAFSENAADLLDLSPHHSVPSLDSVALPPVSLGADARLYFSPSSAVLLERAFAAREISLLNPLWIHSRASSKPFYAILHRIDVGVVIDLEPARTEDPALSIAGAVQSQKLAVRAISRLQALPGGDVKLLCDTVVEHVRELTGYDRVMVYKFHEDEHGEVVAESRRDNLEPYLGLHYPATDIPQASRFLFQQNRVRMIADCHAIPVRVIQDPGLSQQLCLVGSTLRAPHGCHAQYMANMGSIASLVMAVIISSGGDDERTGRGAISSSMKLWGLVVCHHTSPRCIPFPLRYACEFLMQAFGLQLNMELQLAHQLSEKHILRTQTLLCDMLLRDSPAGIITQSPSVMDLVKCDGAALYYRGKYYPLGVTPTESQIKDIIEWLTVCHGDSTGLSTDSLADAGYLGAVALGDAVCGMAVAYITPSDYLFWFRSHTAKEIKWGGAKHHPEDKDDGQRMHPRSSFKAFLEVVKSRSLSWENAEMDAIHSLQLILRDSFRDAAEGTSNSKAIVNGQRQLGELELRGINELSSVAREMVRLIETATVPIFAVDTDGCINGWNAKIAELTGLSVEEAMGKSLVNDLIFKECDDIVEKLLSRALR

SEQ ID NO: 67131 - protein, 211 aa, Zea Mays
MAVSSRFPSQPAARGLLRRTPQRILPVERTPRRLALVVTAVSGGPVPGGSPVPRRPPPPEDAATVAPTSVPSSAASAIDFLTLCHRLKTTKRKGWINHSIKGPESIADHMYRMALMALIAGDLPAVDRERCIKIAIVHDIAEAIVGDITPSDGIPKAEKSRREQAALDEMCQVLGGGPAADEIKELWEEYENNSSIEANLVKDFDKNMAKC

SEQ ID NO: 67132 - protein, 425 aa, Zea Mays
MLLQGGNGIPHLKWYGVEGEYNVMVIDLLGPSLEDLFNSCNRKFSMKTVLMLADQLINRVEYMHSKGFIHRDIKPDNFLIGLGRKANQVYIIDYGLAKKYKDLQTHKHIPYRENKNLTGTARYASVNTHLGIEQSRRDDLESVGYLLLYFLRGSLPWQGLKAGTKKQKYDKISEKKMLTSAEILCKSYPPEFVSYFHYCRSLRFEDRPDYSSMKKLFRDVFIREGYQFDYVFDWTALKYPQMGSNNKLVQQPSARMAGVGPSVERTDKASMGQEIRDRFTGAVEAFARRNPGSGRPADHSSHSRHKSFADSFGTSNEAVADSSEKTRILSRGGSSSKMPAAPSTRPTSSGDCSDQNRRWVSGSSGGSGRPSPAQRLHHSGGAENSRSSPRSPVARNAAGRGGSASRDNTTFRSLERLTITTSRRK

SEQ ID NO: 67133 - protein, 391 aa, Zea Mays
MQRDQNSTSVVQEEAGHVPQPSAKLEKCAPSAMEISSIALMESKDCDDDSATSGDPQSTGTHSAPSYVTYGFAPQSHVNQIEKSESHSQSYHPTTDADERLSPSLATQAAHKYGNIPVVPTQTGQDQEGNDSPVIISSVSASVATPAAGVLSASVAIPQQSVPVFRQPLGVHIPHLPMNYVPYNQYISPFFIPPPTLHPFMGNATFSQPPSTGVMYPTPGTARVLPPVKFPVPSFKPGANIGSQASIGVPGCYGTYGSSPSVYTNNAPVSSGNLAENDNVTSSQFKENNIYFAGLQTDGLTLWVPTPGRDISALQVNSFYGLPPPGHQVTYAPQAGHGPYGGIYHPAHSVAGATVTPLLQPSHTMAGAVEIVGAPGGVYQHPQAHMNWGSY

SEQ ID NO: 67134 - protein, 1231 aa, Zea Mays
MAAAGERRKLCGYLRAVVSIPGGDVAAAASILPLSPCTLSACGAVALAPLPDDVRAQPRWPRSRAPGVVRLLRTLVANRCVEVEGTLLRVVTRRRPGEGEGEGDGAAVEARAVVLLDVYIPVAAWSGWQFPRSRSAAAAVFKHVRCNWDARKALLDFDWASHDNTHCDDQSVWRCTDCHVLDCEDHKIASISNKEKSFDLHEIFKTLPGVRMEKNMQVARITPDERALELGIWSVPDDVLHKVLILLKPRDLVRVAATCHHLRTLAATVMPCMKLKLFPHQEAAVEWMLKREQNVHVLAHPLYKDFCTEDGFPFYINVISAEISTGDAPTINDFCGGLFCDEPGLGKTVTTLSLILKTHGTMAYPPQGVDVSWCMHKPDKKCGYYELSPSFSSNRNSSSVSKKLLGEDVIADCPSPDDSVCSTRSSRKRGRLLSPDPTKVMLHAAIENSPSSSNSKVQPMPAMHILKFTKNSRQVRKNPMDAYSDVSVGNKRKIDTTSEVSETWVQCDACRKWRRVSDGTVLDSTTVWFCTMNPDPTRQKCTAPEESWDFKRKITYLPGFYKKNSLPGNEENVSFFTNILKDYVTMINSETKKALLWLAKLSPTKLLEMEFVGLTRPVLDTRATTGKGAHPYYKIFQAFGLVRKIEKATLIVVPANLIDHWTTQIQRHVSSDTLNVFVWGDHKKPSAHNLAWDYDIVITTFSRLSAEWGPQKRSPLKQIHWFRVILDEGHTLGSSLALTNKLQMAVALVASNRWILTGTPTPNTPTSQVAHLHLMLKFLHDETYGQNYQSWDSGIHRPFEAQMEEGRVRLVQLLQRTMISARKADLKTIPPCIKKITFLDFNEGHAKSYNELVVTIRRNILMADWNDPSHVESLLNPKQWKFRAATLKNVRLSCCVAGHIKVAEAGQDIQETMDELVQQGLDPSSDEYQLIRYSLLNGASCFRCSVWCRLPVITPCRHLLCLDCVALDSEKCTLPGCGYHYEMQSPETRARPENPNPKWPVPKDLIELQPSYKQDDWDPDWQSTSSSKVAYMIEKLRSLREAHMNHGNNITNSVGHSNTLSYQPQAMLDKVIIFSQFLEHIHVIEQQLTIAGIIYSGMYSPMPLASKRSALTKFQEDPTCMALVMDGTAALGLDLSFVTRVFLMEPIWDRSMEEQVISRAHRMGATRPIHVETLAMRGTIEEQMLKLLQDSNACRKIVDKRTGSTDNEGGRSHRSLHDFAESSYLAQLSSV

SEQ ID NO: 67135 - protein, 88 aa, Zea Mays
MDPITRPAAPSFHRPAVATAKHLHQAAATLARRNGVSRRCLLTLLMSTAAIPGGSESRKALLQEYLKKSKENKEKNDKEVTGDSFPVV

SEQ ID NO: 67136 - protein, 313 aa, Zea Mays
MADAARGLGSSSLPVANVQALAESCNDNGADAPVPGRYLIKDPSAEEVVAAGDSACTIPVIDFRKLLDPGSYEEECARLGAACHHWGFFQLINHGVPAEVTGNLMKDVAGFFRQPLEAKKECAQQAGSIEGYGQAFVVSEDQKLDWADMLFLIVRPREARDMRFWPTRPESFRDSVDAYSLEASKLAYRLLEFMARGVGADPASLQGMFQGQVQGMRVNYYPPCRQAADQVLGLSPHSDPNGLTLLLQMSHDVHGLQVSKDGRWFPVQALPGAFVVNDSTSVTRSRYVCTLNCPSSLPSLSKFGALPSDGSTL

SEQ ID NO: 67137 - protein, 728 aa, Zea Mays
MATLVRPPALHVRAVSGGGNKDRVAPQRPWWGGNKPISPRQSGGSGARGGAGGGGVALDQVLGVLRRDGEFVQAAVGAPLRDVFWLRFLEKKQRKQQQPRPKHKPFRQQQEEEEVVVVDESPPAFPPPSYPSGLSCVELMAADFQALKVYAGSARHSLARRFLGSNSKGKSEQQPKPKPQEQQKEQQHILQAPAFPPPSYPPGLSCMELMMADLEALKLYINYYSAILTTPLPQHYDPDLLAQYFASRPHILASRVIQILFTFLSAVVKMRISKRAQLTTDATYSSGNSGNGFDDTQYMVGQLLKETFLNLGPTFIKVGQSLSTRPDIIGSEICEALAELHERVPTFPREDAMKIIEGEFGCPVSHMFSYVSDEPVASASFGQVYQGRTVDGSLVAIKVQRPDLLPSVLRDIYILRLGLAFIRKIAKRRSNISLYGDELGRGFVGELDYNIEAANATKFMEVHSRYPFMLVPKVLKQLTRKRVLTMEWVAGENPKDLLSLSKGVSEKFTQASDNQKLEAKSRLLDLVNKGVEASLVQLLETGLLHADPHPGNLRYTPEGRVGFLDFGLLCMMERKHQRAMLASIVHIVNGDWASVVYDLTEMDVVPPKTNLRRVTMVLGKIWSVAFKYHFRMPPYYTLVLRSLASLEGLAVAADGTFKTFQAAYPYVVRKLLSENSLETRRLLNQAIFNKRKEFQWQKIDAFLKLASARMICMCQLLTVLGKQTDSSL

SEQ ID NO: 67138 - protein, 550 aa, Zea Mays
MVTTIVATDILVYQQSIGAVCGLDWPRPNFLVQVLDDSDDAATSTLIKEEVEKWQREGVRILYRHRLIRDGYKAGNLKSAMNCSYVKDYEFVVIFDADFQPQPDFLKRTVPHFKGNEDVGLVQARWSFVNKDENLLTRLQNINLCFHFEVEQQVNGIFLNFFGFNGTAGVWRIKALEDSGGWMERTTVEDMDIAVRAHLKGWKFLFLNDVECQCELPESYEAYRKQQHRWHSGPMQSDSGRKFNLIFLFFLLRKLILPFYSFTLFCIILPMTMFIPEAELPAWVVCYIPATMSLLNILPAPKSFPFIVPYLLFENTMSVTKFNAMVSGLFQLGSAHEWVVTKKSGRSSEGDLVVEKQPRQQRAGSASNLGSLAKEPSSSLRKDSQRKKHNRIYRKELALSFLLLTAAARSLISVQGIHFYFLLFQGDCAKGNPEKGKKMFCMSASVECLRALFVNARAQITCGSRTVIFQPTCPAVMVERDRVSGELGKGFRNNPSPFTNGASNSERRLCLENSYSRSCSQGGDRCVNRCRYGCCFRSANIFIRRLGLHL

SEQ ID NO: 67139 - protein, 538 aa, Zea Mays
MDPEQTFLRVHARLSGTLSQLLTPRIRLVLEYLYLAGAVALFCLLVVMHTNFVQQPGCSSEFSGIEFGEAQLVQIKIISGGLWSSRGASYIMDLQNLGRSAEKILEVNGDKFNILASKFWSTWVGPGARRSLPDLKAAGEGSVHHPLSAKESFKAAVTFLFRKWYLRAVSFWKNIKQLSENTLQLMVRSNWNDFLHIIKDLQLPSMDHLISTIVQWFERRSKAFEPTYLYGVEKGYFLLSEGAKTRHGVRTINITISARNPCFGNRWQQLLINSIVGYDTILTNSLVNSPGHGYLYNFQTKELYDLSYGHEPPEGPTRFGDYFVTKCGVLLMSLFVFFTTTMSVSFTLRETQSRMLRFTGFSYLAFSATAAFMQHLILYFWNRFEVPALQRFMRSRAHIHQQTGVHITSSTIYTSTLHIARVNVRDPGTINDGLGAAREADALLVQDESTRSQQEGQQNGISEPAANNALQYQEQNPQRAGSTPAGSGSLNPFGSLLLWLLGGGASDGIVSFFSMFRDVRDHGQDYTDPPRNGNDQVT

SEQ ID NO: 67140 - protein, 1269 aa, Zea Mays
MAEGSSSHRRSAFSPGLAVLLSGDEAKISSQKSHLVSYHDEIGHQAVERTIEHIFDLPHKSVVRPPGPVDTGFVHSVVRNQARKFDLDWENCIRGYHRSVFIVDKGAGQRKVVLDDSSICGSFRNVRGPSLVESSAPFSSARANACVWKGKWMYEVTLETSGVQQLGWATLSCPFTDQKGVGDADDSYSFDGRRVTKWNNDPKPYGQPWAVGDVIGCCINLDAGEISFYRNGTSLGVAFDGIRSVEPKKGYYAAVSLSEGERCHLNFGSHPFRYPVDGFDPLEAPPRSWSFVTYLLRCLFRLLEVHNLEKSESAYFEKLRRVKKFAPLQELFGPISEGICAEIFSAIEASQGCLEYIAWGSLITLLLDVFRTREPHDFSCLDQVLDLFLRFPGCTSLFQELIVALSCMCKVAPLVLTECPYSGSYPFLALVCHLLRHKDVMCLWWKAEDFVFSFEGFLTRKIPNKQDLQCLVPSVWWPGSSEDEVSMTLTMTTLSDAIKKIEEMHRELCSLVICFIPPMSTPQPPGSVFRSFVQSLVLKARGGDHRMVVNGTFNNTVLVSLYTVILHLLSEGFSMDSAGSASSSKANFGNGVGFLHKGGKRKFPTQLFFRNDAYHSVIPRIGGPPSILMHHQFDAVENEVQWDEGCMNDEETRVTHTTAQKPCCCSVTDVAVGLRYKETAKYVPSTSKGSCKPMPERSPHVAAECNGRGLSDEIEDKPSTSAQSEIEYGYQSLHSLENMPMATQSSSETLKEEELLDVMLLLYHLGISPNFRQAFYFMSQQSQSISLLEETDRQIREKSCSEQVRRLKEARNSYHEDLVDCVRHCVWYRATLFSQWKQRGMYATCMWVVELLLVLSNSNSMFHYVPEFYVESLVDCFHALRRSDPPFVSPALFLMQGLASFVTLVVKHFDDTRIVNPDLKDLLLQSISVLVQYKEFMLVFENNREAINKMPRSLLSAFDNRSWIPVTNILSRFCKGSGFASYKNGESASSATFQVLLRETCIHEQELFFSFLNRLFNTLSWTMTEFSMSIREMQDKNQVADLQQRKCSVIFDISCSLARILEFCTREIPCAFLMGPDMNLRRLTELVVFILNHIISVADAEFFDMTLRRPGQHQEKTNRTMILAPLVGIILSLMECSSTSERRELNDVIAVFASMDCPATIHFGLQYLLSYNWSNVLRGDSSLAKLAQLKEFSHYFRRITASVDGEEEDHSLNAGDEDDDHTCCICYNCDSDATFQPCHHRSCFGCISRHLLNNQRCFFCNAVVTSVTR

SEQ ID NO: 67141 - protein, 291 aa, Zea Mays
MLLQPIPTATLAARPRSSEASFPFRCHRRRRVLLPVRADLTPISLSASAPSRPAKPAVCTADELHYASVDGAGWRLALWRYRPPRNAPVRNHPLMLLSGVGTNAVGFDLSPGASFARHMSSQGFDTWIVEVRGAGLSMREYDDSTPSGSVTFEDVSSGIQPLNSTFEATSIQSSGGYASDCDDLGIVALDEPPLLAELSNFFDRISKLMEEAVVNGNFHEITEKVSVLSEMVESSTIIGPVREESLRLLKNFQDQLDSWERFVATQMDLTSEYNWDFDHYLEEDIPAAVGL

SEQ ID NO: 67142 - protein, 154 aa, Zea Mays
MYTVLVIYSHRLCYHSWRVWWLLGRCWGSWATSASHHGGYCAWAFHGHRHILQCPGRDNGWPADLAAALSHSCKTNANQGVCRRGCRWRAHRLVSAAAPCRAHQPAEVSGASIIARVLGVALPYPAVQEAIQKQEVRHTALKCGNIDIFFFCTL

SEQ ID NO: 67143 - protein, 147 aa, Zea Mays
MVRGLMLTLKYFFDRNVTINYPFEKGPLSPRFRGEHALRRYESGEERCIACKLCEAICPAQAITIEAEEREDGSRRTTRYDIDMTKCIYCGFCQEACPVDAIVEGPNFEFATETHEELLYDKEKLLENGDRWETEIAENLRSESLYR

SEQ ID NO: 67144 - protein, 535 aa, Zea Mays
MAASPSSPLTAPPEPVTPPSPWTITDGAISGTLPAAEAFAVHYPGYPSSPARAARTLGGLPGLAKVRSSDPGARLELRFRPEDPYCHPAFGQSRASTGLLLRLSKRKGAAAPCAHVVARVRTAYYFEGMADFQHVVPVHAAQTRKRKHSDSQNDNENFGSDKTGHDEADGDVMMLVPPLFSVKDRPTKIALVPSSNAISKTMHRGVVQERWEMNVGPTLALPFNTQVVPEKINWEDHIRKNSVEWGWQMAVCKLFDERPVWPRQSLYERFLDDNVHVSQNQFKRLLFRAGYYFSTGPFGKFWIRRGYDPRKDSESQMSRKWADMCKLETMPSQSFIYLQLYELKDDFIQAEIRKPSYQSVCSRSTGWFSKPMIKTLRLQVSIRLLSLLHNEEAKNLLRNAHELIERSKKQEALSRSELSIEYNDADQVSAAHTGTEDQVGPNNSDSEDVDDEEEEEELEGYDSPPMADDIHEFTLGDSYAFGEGFSNGYLEEVLRSLPLQEDGQKKLCDAPINADASDGEFEIYEQPSDDEDSDG

SEQ ID NO: 67145 - protein, 81 aa, Zea Mays
MLSGSTVGIFPSTYDLWDSLLYVNYLSILPFLNPKEKWSLIAYGLLEKFMNTPVTEFEVIFQNNHIRSLFGITIICQFFYS

SEQ ID NO: 67146 - protein, 258 aa, Zea Mays
MHGFFLLHASHTHDKKHSADARAFSFIKILNLMQDMSYPPQMLFVENVVGFEVSDTHDQLLEVLSSLNFNTQEFILSPLQFGVPYSRPRYFCLAKREPVRFRHAFVNNKLLQTPMCLSLTLSSTSQGSDHQTEEELEPVCKPIKDFLVKEADGGTPDETVLQDYMVPVNLIERWGNAMDIVYPEFKRCCCFTKSYYRYVKGTGSLLATSKNLNVPEEKLQISSLKELGLRFFTPREVANFHSFPSNFCFPDHISLRQQ

SEQ ID NO: 67147 - protein, 1296 aa, Zea Mays
MLGGAVSLKGAAVPAPRLISSQELEFFRPHIEIKRDRQTGEVFEVLDGLMFKDGFLYKKVALSSLIYWGIQPTETELLKFSSSPSNRASADDLDWLSGMYGSKKRNLPEKRDMESSSSKIRSSKASDLKASTSTENYDENDEFNLHDLVLYGRKDFGVIVAVEKDGFRILKGGPEGSAVKVRKQDIKKGCVDKMFTAVDHQKKTISINDTVNVVEGPFQGKQGVVKHLYLGILFIYNESESENCGFFCAQSGSCEKIRKGLGSSTTESSDFTTPMFPEPAYEQNGHRDTERPYRSTREQLFSIGQMLRIRKGPLKGYLCRVVRIFRNDVTVKLDSLLKIVTVQADLLSVPANRGDNLSGAPASKFGSQDTSFFGSEAGKTSWDNGLPSFGSDSWQPFSSSTLSVQNAGGESEADPWSKKTSAKDDSDPWGKKTDGDSDRWGKKTDGDSDPWGKEAVSAADGDSNPWGKETVPSAAGDSDPWGKKVVSSADGDSDSWGKKATSSAVDTEKEGSGGTAWDKQAGVGGSDAAGSSWDRAVVNESEKSDNWGEACRVMDMGTGAEADTDPWGSKVKAVDMEGPNNWEKATVPPNNKLEDVSQGWGQPKGNSTEDQAIDNVSKDVDNNRACDSSLPVTEDGTWGKSKDNSCGGAGGAGGWDVSVGNWNKSSVVADAQDEGWGKGNWSSAESEETNNQSGNWNKTGASDQAGYNNWDKPKSFGGNGWNKGDDQNSSWNRPENFGGGRGFGRGQGRGRGQQSGYFNGRNDQGSWKKSWGSDNAERPSWRSDNQVDNEAGESGGYRGRGRGGRGQYGGRGKDNGWRNDDRSNSGFGRENNSGDGPKWGGGGNWNATNPPSSSVGTKSYGQNQPFTWNNSEDNKPSVGEQGDPWASKVSSTEDTEQQNDSWSSKMISGGAEDTSGGWDTKVKDSSCNDGGEGLQNDPWANKIGSNEGKEQETDPWASKMSSTVCADDKKGSWNTTAKGIPSKEKADDPWNSKGGNDDSKKTDTWGAGSSGGDQELSWSKPNFSLGDQESTWNNPRFSDDDNANNRGGFGRGNRGRGRGRNFGDGGGSSWNGGNRNDESGGGRSGEPWNRRDFDGGGGRGRGRFGRGDRNQGNNFGSGDGGSWGSGRGNGGRGGYRNWNDNNERSFGEGGGWSQSQSSDWNANKGNGEGNQAFSKSKPSWEAQNTSGRDGQAGKGDANNSWSKNRSSPSSAWGAPSGGAGGRGSWGKSNEDGWNSAGGSAKEKPAWGGGSEASTKKEDKGGEGNGSQGGGGVSSWDKGADDAWNGNTGSDIGSGGW

SEQ ID NO: 67148 - protein, 53 aa, Zea Mays
MKQIFSGAFVASRKLYLLNIAYSDTRTVSQELFWTKHSILLIMYSLYFLWQKI

SEQ ID NO: 67149 - protein, 1459 aa, Zea Mays
MAAPGRRTADVSSSSPAPSPSPSTGRRLLRTQTVGNLGESIFDSEVVPSSLVEIAPILRVANEVEATNPRVAYLCRFYAFEKAHRLDPTSSGRGVRQFKTALLQRLERENDPTLKGRVHQSDAREMQRFYREYYKKYIQALQHAADKADRALLTKAYQTAAVLFEVLRAVNVSQSVEVDQAILDTHNKVEEKKKLYVPYNILPLDPESTGQAIMRYPEIQAAVYALRNTRGLPWPKDQDKKPGEKNTGKDLLDWLQAMFGFQKDNVSNQREHLVLLLANVHIMKVPKVDQQPKLDDKALDAVMKKLFKNYKKWCKYLGRKSSLWLPTIQQEVQQRKLLYMGLYLLIWGEAANLRFMPECICYIYHHMAFELYGMLAGNVSPMTGENVKPAYGGDEEAFLIKVVTPIYKVIEKEAERSKTMKSKHSHWRNYDDLNEYFWSVDCFRLGWPMRADADFFKTPKDAYLNLLNGENRSAGNTHWMGKVNFVEIRSFWHIFRSFDRMWIFLILSLQAMIIIAWNGGTPSDIFDAGVFKKVLSIFITAAILKLGQAILDLIFGWKARRNMSFAVKLRYILKLICAAAWVVILPVTYAYTWENPTGLARTIKSWLGDGQNQPSLYILAIVIYMAPNIVASMLFLFPFMRRFLESSNVKVITIIMWWSQPRLFVGRGMHEGAFSLFKYTMFWVLLLATKLTVSFYIEIRTLGMLRSRFESLPEAFNERLIPSDANKSKGLRAAFSSRPKASGDERQKEKRAARFAQMWNVIITSFREEDLIDNREMDLLLVPYCKDRELDIFQWPPFLLASKIPIALDMAADSGGKDRDLTKRIKSDPYFSFAIRECYASFKNIINTLVFGQREKDVLAQIFAVVDQHIEDETLIKDLNMRNLPALSKKFVELLELLQKNKEEDLGQVVILFQDMLEVVTRDIMEEQDQLGTLLESAHGANSRKHEGITPLDQQDQLFAKAIKFPVDESIAWTEKIKRLHLLLTVKESAMDVPTNLDARRRISFFANSLFMDMPNAPKVRNMLAFSILTPYYKEDVLFSLQNLEEPNEDGVSILFYLQKIYPDEWKNFLERVGCKNEEGLREDEELEEKLRLWASYRGQTLTRTVRGMMYYRKALELQAFLDMAEDDDLMEGYRATEVMPEDSQLMTQCKAIADMKFTYVVSCQQYGIQKRSNEPCAHDILRLMTEYPSLRVAYIDEVEAPSQDRNKKIEKVYYSVLVKASVTKPDEPGQSLDQVIYKIKLPGNAILGEGKPENQNHAIIFTRGECLQTIDMNQEHYMEEALKMRNLLQEFEKKHGVRYPSILGVREHIFTGSVSSLAWFMSNQETSFVTIGQRVLANPLRVRFHYGHPDIFDRLFHITRGGVSKASKIINLSEDIFAGFNSTLREGNVTHHEYMQVGKGRDVGLNQISLFEAKIANGNGEQTLSRDIYRLGHRFDFFRMLSCYYTTIGFYFSTMVFW

SEQ ID NO: 67150 - protein, 617 aa, Zea Mays
MGAIQLWSRITPVSPATTWGPLIIIFIVSASKEAWDDYNRYLSDKKANERKIWLVKDGVRIQIKAQEVHVGDLVWLHENDEIPCDLVLIGTSDRQGICYVETAALDGETDLKTRTIPPISANLSVEQLGKVKGVIECPNPDNDIRRFDANMRLFLPIIDNEKSPLTINNTLLQSCYLRYTEWACGVAVYTGNETKSGISRGAAEPKFTAADVIIDKLTIAIFMFQVVVVLVLGYFGNTWKDTQGLKQWYLMYPMEVEGPWYDFLIIPLRFELLCSIMIPISIKVTLDLAKGLYAKFIDWDEQMFDWETNTPAHSANTAISEDLGQIEYILSDKTGTLTENKMIFKQCCISDTLYGNDNGDALNDVRLVNAVSSNDPDVIKFLLVMALCNTVVPIKSNDGTVSYKAQSQDEEALVNAAAKLNMMLISKDTITAEICFNGSKFWYELLDILEFTSDRKRMSVVVKEGETGKILLLSKGADEALLPRACPGQQIQRYLEAVEMYSQLGLRTLCLGWRDLKENEYKEWSKNFQKASCSLDNREFKIAEVCNSLEQDLQILGVTAIEDRLQDGVPETIKLLRNAGINVWMLTGDKQNTAIQIGLLCNLITSGSCICFGWLGT

SEQ ID NO: 67151 - protein, 90 aa, Zea Mays
MALPAPAKRPSSRSPGGCTPQRLSTQIRTIPANRRTPYLPCNFSSSPASRLGTAFSLHFTSVSRPPHHNSSSASRRRLRSRLKIILAHKF

SEQ ID NO: 67152 - protein, 670 aa, Zea Mays
MVYFTSVQSDTYLETQYFSCSVEEKTAGMPTLLSLEVTGDAIEGTTMFASKRYWGGEEGDTMFRWILTNSDGTEKEIEGATSSSYTLKCNDIGFYISVLCKPVRNDGVDGSLVSTEAIGPIIPGPPTCQSLELAGSMVEGGRLTFHAVYTGGLRGSCIQEWFRLHDDGHKDKLTADDLDLADIDCRIELMYTPVREDGVHGLPRSVTSDTILPGEPKGVNLILPECFEDNEISPIKTYFGGKEGTGKYTWFRNKEKLDNLEFDLVAESSEVVGETLKYKPSLNDVSSYLILYWVPTRRDGKVGDPLMAISDDPVMADGISGEEKLSEPSDVILPELLKIETLNFKGNQVERETLTAAEQIPYSEIQQHIWKNYKKEMKYQWFISNESGGDQSFEPLATQCSRSYKVRFEDIGRCLKCECFVTDVFGRSSELVSAVTAPILPGRPKIEKLEIEGRGFHTDLYAVQGTYSGGKEGKSKIQWLRSMVGSPDLISIPGETGRTYEANVDDVGYRLVAIYTPVREDGVEGQPVSVSTEQIAVEPELYREVKQKLDDGSVKFEVLCDKDRTPKKAQVMGHLERRVLEVNRKRIKVVKPGSKTSFPSTEVRGTYAPPFHVELYRNDQHRFKIVVDGDTEVDLMVQTRHMRDRIILTIRGLAQKFNSTSLNTLLRIES

SEQ ID NO: 67153 - protein, 158 aa, Zea Mays
MAYEISEIKKIGIGLVGFGILFSFLGVILFFDRGLLALGNIFFLTGVGLLLGWQSMWQLFTKKANLKGSVPFFIGLFLLFVRWPVAGIIMELYGSFVLFSGYGPPIQAFLYQIPIIGWILQYPFQVSLYFTEDFSRVFKTVTALPQHQLSINVFKLSD

SEQ ID NO: 67154 - protein, 194 aa, Zea Mays
MAADDVRELLLSTTADASDPSTPLSAPDLRLLIDRLRFCSDRLNASALSFAASNRGVLANALLRAASAADSSASLESSLDSALAPLASWPDLSDLRALADRLLAARRELAERQEHLAAASMIASLSSRLREARAAASPLDAAAAIAELKTLLIDLERSGSGQDDPVVFRLLRSDWEQLVDELQVRLSKNVEECV

SEQ ID NO: 67155 - protein, 516 aa, Zea Mays
MAVKVWVFAVALMMCAGVGLGADDDGGSRLISRCRLSSPNYRGALAKAILFFEGQRSGRLPANQRVRWRGDSALTDGQPENVNLTGGYYDAGDNVKFGFPMAFSVTLLSWSAVEYRDEVAAAGQLRHLRSAIQWGADFLLRAHTTPTTLYTQVGDGNADHQCWERPEDMDTPRTLYKITRSSPGSEAAGEAAAALAAAYLVFRDDRDKTLATQLLAASRSVRRRHLFDFANDYRGSYQLSCPFYCSYSGYQDELQWASAWLYRATKDSKYLDFLQNNQGGSATEFSWDNKYPGAQLLATQEYLAGRTELEGYKRGLDSFVCAVMPNSGNTQIRTTPGGLLFTRDSVNLQYTTTATLLLSIYAKALLASAAGAVQCSAATFSPDQISSFATSQVDYILGDNPRSASYMVGFSSKFPRRIHHRGSSIPSIKVLPRKVTCSEGFSSWFPTANPNPNVHVGAIVGGPDGNDQFGDNREDSTHSEPATYINAAFVGACAAALGRSQQVPVDETASAHSDVM

SEQ ID NO: 67156 - protein, 564 aa, Zea Mays
MHWPLHSDMQVNGIYVRVVNRQPTQKLGANGRDDGPLLTDYLKEGPNKISLSRNDTRTFCLGIRIAKRRSLEQVLNLVPKEQDGENFDDALARVRRCVGGGAEANNADSDSDIEVVADFVSVNLRCPMTASRIQIAGRFKSCAHMGCFDLEAFIEINQRSRKWQCPICLKNYSLENIIIDPYFNRITSLIKSCGDDTSEIDVKPDGSWRVKGRPKLKDLTQWHLPDGTLSLSTDTAAKPGMCIVKHEVKEEPLSEEVGCHLKLGLRKKSNGQWEISKRVDADLVPSSGNDHDHSGHDENKNCITHSSNIDDTNIADEGYNLEPATNGYPMTHVHDLDSSSADENGPPASTGQDIVVLSDSDDDAIMVLSPGAVNCGSMHNTGNLFPPNTPENLGVCSGETGGCPKETSFLALKEDFGDPGLSFWESHGSPRDASTSQIPDASTKAVDNPGEVDNYPANDQSKQGQVSGADFGVAANPVPLEDGHDSALQPCSMSERDSAMGLASLGADTQSCVDVHSDNWTSVSISGRDEVLTAAKIASRKRSNPGDRIEDLDDDFESAPIVPT

SEQ ID NO: 67157 - protein, 158 aa, Zea Mays
MQKQTGKSGGTGGGTPAKRGRPFGSTTGGGAAAAAAAAAVVDPGAPAALVGPSLQVLSALSDQNNKRIVLALQSGLKSEILWALNALTVLSFKEKDDLRRDATPLAKVPGLLDALLQVIDEWSDISMPKDHTKPPRLRTLGANTTLSGFGQENMEKYL

SEQ ID NO: 67158 - protein, 92 aa, Zea Mays
MESPRTLEALTNDLVVEIFLRIGSPADLVRASAACVAFCRLIANPSFLRRTEFTSRFGASSNPFCWCGVELGDGTGPHVDVAHLQHCPMLSS

SEQ ID NO: 67159 - protein, 361 aa, Zea Mays
MARARGGAAWWVLAAAWVLWAAAAAAEAEARSPSARRVHRHLKRLNKPAVKSIESPDGDIIDCVHISHQPAFDHPLLKNHTIQFRPAYHPEGLYDDTKSSIGSNNAGERPMLQMWHRNGRCPEGTVPIRRTKKDDLLRASSVRRYGRKRHTAPNPLSVDPNMLSEGGHQVSPDLYGDNNTRLFTYWTSDAYQATGCYNMLCSGFIQINSEVAMGASIFPISNYAGSQYDISILIWKDPKEGNWWMQFGKEYVLGYWPSFLFSYLADSASMIEWGGEVVNSEPDGTHTSTQMGSGHFPEEGFSKASYFKNVQVVDSSNQLSAPKGVGTFTEQSNCYDVQNGNNGDWGTYFYYGGPGKNSNCP

SEQ ID NO: 67160 - protein, 876 aa, Zea Mays
MGKSSKKAAAVAAAPAAVPKGKKREAEDEIEMAVSAKKQKAAPPAKAVPTSKKDAKEDAKSKKQPPPKKAENSSSDSEEDPESEEENFYNLIESGRADGDEEFDEDEEDGFEFGDADEAMQCVVMAESSTTAAALRAHTQDYEALAAHKRKALAEEQPQREEGPKRPRPDQLSEAEAATMFDQLMEGFGLRRKRRSKDGKRRGRKKGTKNKGSAEVIKKLGDATLLFAEEKFNEAIPILHEIVRIAPNLSDSYYLLGSIYSEIGELDKAINFLMLAAYVSPKDASLWKKLIPLANEALKQIKRAQLHLGSQQKLPVQLQAKEVICHAYCGDMKHAEIFLRDVRLEPSKENIDVLKELASNLEKMGRYEYAVKFYLLIENVATQNDGGLCFDHKEMGSWYVKAAQCYMILGDKKNAIPYFYKALQSMKDNIGIRLTLSSLLIDDDKTDEAATLLSPPKIPELQSANTPDQQKPWWCDGKVKMALAKLYYNKGNLEDFVDTIFHPILETLNVEYANRKVKSMRKLPNIVLHERVKVLGEQRPDSVFQGLRPIASPDELQKANRAKKLIEKRTAANEELKHDYLPRTKQVPPVPGLLTNVEHHQLVLNLCRTLALLQRYWDALQIINRTLKLGNDALTGDKKEELRSLGAQIAYRAPDPSHGFKYVRYVVQQHPYSLAAWNSYYKVVSRIEDRFPHHFKYLLRTREANPDCVPPIIISGHRFTAISQHQSAARDYLEAYKLDPENPLINLCVGTALISLALGFRLQNKNQCIVQAFAFLYRYLRLCDNSQEASYNIARAYHHIGLNTLAAVYYDKALSTEEKDHPIPKLPYEAGSRAPEDLRPGYCDVRREAAFNLHLIYMKSGATDLARRILKTYCTV

SEQ ID NO: 67161 - protein, 730 aa, Zea Mays
MDHTDVVVRKLLDAMALMEKRLTAALAGSHGEQTARGCTAFFDDGRIDELDVWDEDATSVDADDSVSASMVDRELRFDEFTFNDKSAQYHLSSTHEALFSDGANPFFDEACYALTVFDQMPSPCFDGEPIFDEVPNDSITEYELSFMEVPHFALRCEKIQQHVDVAALRGEEHLVSLETMKSKVEAGNTMAAMAAAASPLPSLLAVGNLTPSSIAQPHPQAGAVGSSESELAAPSSVHDDSVALIAVSGRCDYARANEMTSAQIDAMAQDETDEIANTVEQLTGLGVEKVVATALPPIGCTPWLSRSNNYGSCSTLDTLFQVVAVYKFRDPKTSDQEMLESICGVLMPLKLQAKVSRPMDIIINSLYNNKDIFVWESISNVSDALERIRILSLTDKEVLVEGDTEKLEIQLDKEKKMLSMQDKSIGMTIIANGVQVRPLPWPSFYYYAAWVRWMKSLVMALCWDLFGAGTETTLVTTEWAPSLLLNHPEALKKAQAELDALVGSSHLITTDDMCYLGYLHCIINETLHMYSAAMLLLPHESMVDCKVDGYDGTLSKDDGLVDGLRKCEQWKWQDIFASKETKTSSWFHEFIGRAKKPEMGCPPFGCGCGWDVVPYKQPWPPPMQFMLLGDGVQVRPMAWPSFYCYATLVRWIKSLVVANILTKHPWLAIDRGSLFKVDCSYSTTGASLQYALQLFLLLGIFRANAWNCTCPLVTTLKDHNASAMPLTLLI

SEQ ID NO: 67162 - protein, 290 aa, Zea Mays
MAAAVPNGHTAAAGDDDAPPAASSSLVFLGTGCSSAVPNARCLIQPPDPPCPVCSQSLSVPPELNPNYRCNTSLLIDYCQDERAHKYIIIDVGKTFREQVLRWFVRHKIPCVDSILLTHEHADAILGLDDVRVVQPFSPTNDIDPTPIYLSQFAMDSICQKFPYLVKKKLKEGEEVRRVAQLEWKIIESDIQKPFTTSGLEFVPLPVIHGEDYICLGFLFGRKSKVAYISDVSRFPPSTEYAISKSGGGQLDLLILDCLYRGLRRTQSTSKDLPYRGVDPRATRGGRQLS

SEQ ID NO: 67163 - protein, 931 aa, Zea Mays
MERGRGGSGGRGGGRTFQRNNAGEEWPNLVGVVLSWSLADVMNKDLFKDKVKQIPSTFPNLKSYLECYTSPLLEELRAEMSSSLESLSTVPSVRISRIEEKRDKHEIYLASDCQVAKPHNRPECYTPSVGDVILLSDVKPGHISDTTRNGRPYRVAFVTDADGGDEYDDSPPAKYGIVASGKIDAADDERQDGKSTSLFAACLLNIVTYIRIWRCLDYEALRTNRGLIEKMVNYQPISSTSENSTEDAGPTDSVEIWTKLSAMELNTSQNDAVLNCISKMHSKSSTFTLIWGPPGTGKTKTISVLLWLMREMKHGTLVCAPTNLAIKQVASRFLKLVQEHSGDTRCLGDVLLIGNKERMCVDGDLKQIYLYDRVRRLFGCFAPLTGWKHHLSSLSDFLENGYSQYLQHLQDSQEGDTPSFFSYARKRFAVIYMELRRCFNDLLLHVPKSSILEVNYNSILLLLEMLEEFNHMIQCRYFGDEIRKVFLYSNDEPDQTNSSVVTLGKMRIKCLEELSTLLSCLKLPLTSSKPTIRDFCIKSASIVFCTVSSSTKITANKKVEFLVVDEAAQLKECETLIPLRLWTLKHAVLIGDECQLPATVKSKVCTDALFGRSLFERLSSLGHEKHLLNMQYRMHPSISIFPNTSFYEGRISDATNVMEKEHRRMYLPGSMFGPYSFINIEDGREERDELGHSKRNFVEAAVIEEILYRLRRACFKTKRKVTVGVICPYNAQVVAIQGKIEKMRFDPLQVKTNSVDGFQGGEEDIIILSTVRSNSVGKVGFLSNAQRANVCLTRARHCLWILGNATTLASSGSIWSDLVRDAKDRRCFFNASSDYVISHVIAKQRRDLDRVNVEKSIHISSSKNCRVWRPSNKNEDVEDITVIPNKENDKDINAMPVIPDKGNVVDGNHILAIPCAMLSNLARWCIRSFRS

SEQ ID NO: 67164 - protein, 86 aa, Zea Mays
MRSAMNVVMALSSESPSVPGPSSPRHGLASSAEEGKKKCPLGLYSTTVAPWSWPGALRTRPPPPVWGHSFRGPRRWLYSRRRHDSD

SEQ ID NO: 67165 - protein, 574 aa, Zea Mays
MEAGSDFAPRGNDKEGHCGNNCEGCCTGAETFFPLRNYGINVCGEGGEYETLTLDCPLFRNARIILDDSEVILHSADSIASVGILHPRAFHLEQKPDSSDRIGDGSAVQESSSCVYEVDEVTTHDDVGEKQALSPAVDAYTNVDLCISKTGNNLRSMSCWIQDPSRASEGLKADLIAVLSRIENQLKEEGLGWVNVLYVHLYISSMKEFGLANEVYVSFITEKKCYLGVPSRSTIELPLVQAGLGKAYVEVLVSNEVVKRVLHVQSISCWAPSCIGPYSQLGLDPPTMKLCLGGPRAELELALQNSEAVANAFSCSIYISAIHFLVYCSAQLTSSEKEEIEQTLKSSYITRLDRSKGGSYPTVLYVFASDLPKGARVEVKPILYVPSTDDWVAAEETETGVPLPAPSKTWTDCTAPYSALRDSCCQVHTTGGRICSAVVSITDDIASKICSAAGQLHHGEENLKIMARFCAFQIAKTLADNRFSWDSVTMLRLYYSVDLAVAADAVSGAFSEALAELAQDNPSMRTDVPFYNVVPVAGAGRSACANDIMACELLASNVSSAKSIPAEPFAVTPA

SEQ ID NO: 67166 - protein, 778 aa, Zea Mays
MLTNSERAPEFMEFINKKSSSAHCNLGSKSFGNSSMPGNDSHGIDESYTKSSSLVQPCGSENLLDFLTGDFDMSESHITQNTFGAGEQTNFLDDGFDVNPFAPALEVPVPVAKVNKEVEECGSTQLYIKFFESLSGYNKGKGLDFEQTMKLEIKRLRLGLSAAERDQALLSIGVIPATLDPNRLIDYSYLLKLSSLADNLALLGHTVLEDRANASIGLEKGSEHAIDFWNISENDEFCYGGACEVRALSSLQALASRENQSVFMECFQCEKTVCKACCAGKGAFLLLNTYRELKIYGGSQSGGYSALTDSFVCKSCCSEIIKRALYVDYVRVLHSLRRKDRSEKAALSAVNQVCQLEYKKASDLSQSIQFGQRQLKQILDGEESLAEFPYANFLQMVETANDSEPLLSLLAPFGTGEYTSYWKAPQGITSVEFSIVLGGLSDIAGVSIIVSSCGYSASDCPIVEIWASNKIHREDRTFIGKWDVQDIISSSPQLRGPEKSSRLSEEPRHIKFHFPNPIRCRIISIKMTLSHRGSHSTKFSEEFDLLSLNDSSSYESKPTNLHNSFIHAKRIVVFGSLLRKEMEPDTSGGIMRMKSYLDRSPALGRFRIPVEAERLRDNDLVLEQYLLANSPGIAGFRLDSFSVIRPRVTHSPSSSELDMREFSLTRMEDRFINPAILYIQVTVVKESGKLVVEEYRLPEVKANTPLYFDFPDLQQDARCVIFRLLGDVTAFVDDISELENLNLRNLPLASGLSLSNKIKLYYYADTYEMGKIGSLSAV

SEQ ID NO: 67167 - protein, 68 aa, Zea Mays
MHSCLRSLRQGQVHVGPITWEVLPQIWIITVTSCKCPRMRSFVLGSWCRAKTSSSRICVPPKDRSSRS

SEQ ID NO: 67168 - protein, 171 aa, Zea Mays
MTVLDAESRFHVLAVDDSIIDRKLIEMLLKSSSYQVTTVDSGNKALELLGLRDNGAEDASPPSSSSSSSSSSSPDHQEIDVSLIITDYCMPGMTGYDLLKRVKGSSSLKDIPVVIMSSENVPARISSILRRISRPVPVEVPDGAVLLFLPAWLPVSSQLEGLGLLREQMEY

SEQ ID NO: 67169 - protein, 357 aa, Zea Mays
MSEEERKGGGGGGDDGAAAAARAAEQARELQDAAAALLTRTRAEEEALRRRAAALQGELRRLREAAAAHADSEKVEEDLDRATCLITEGDVASLLPSKTQGTFLRMFLGPVNLRAPRKEVQLKVKEEYNSYRDRTALLFLGFPVILLFLRQWLWNRCFPALPVQLYQAWLLFLYTSLALRENILRVNGSDIRPCLTWEIKGQPNCARKQRGVELFLCWAIMQGFVMMLQNRYQRQRLYTRIALGKAKRMDVVWGETAGVEGQLLLLCPLLFLLQGFEGYVGFLLLRTAHTGVVPEWQVVVCGILLISMAIGNFANTLDTLMAKSRFKAKMKKSKGKRDLDTCPSPTGSSPTDSATRA

SEQ ID NO: 67170 - protein, 385 aa, Zea Mays
MIRVSPLLLARPLRVHCPTPSRLSRPPLHHPNPHPRSGEGGLGCVQAKGTRRRCRASLSVPIAAQMDPSSEPLYAQVEPYDSGFLKVSDVHTIYYEQSGNPQGHAAVFLHGGPGAGTSPGNRRFFDPQFYRIVLFDQRGAGRSTPHACLEQNTTWDLVADIEKLREHLGIPEWQVFGGSWGSTLALAYSQEHPDKVTGLVLRGIFLLRKKEFDWFYEGGAAAIFPDAWEPFRDFIPEDERNCFVDAYNKRLTSSDPIVQVEAAKRWTMWEMMTAQLIQNNDNIKRGEDDEFSLAFARIENHYFVNKGFLPSDSFLLDNVDKIRHIKGFIVQGRYDVCCPMMSAWDLHKAWPEAEFKECRWLAVELGYRPHDILLRWLQTINLLVD

SEQ ID NO: 67171 - protein, 59 aa, Zea Mays
MFFTLCMLLIRVRRYLFICHTWKTLLNHVFEDLQKTKAHNRTITIKNKFKIKVDICPTY

SEQ ID NO: 67172 - protein, 432 aa, Zea Mays
MQPSGREMQGGGGGGGQDDFLDQMLSTLPPAWPDLGYGKSSPWELPAGPDAAAAAAAAFDETALLASRLRHHQIGGVDEKPLMLHLSDLHGVAAGGGDDAGFMPLPLFTDRAAFKSPNAAGADQALYNGFGAAGMHAAAVHQPPFGQSGGSMPAAQSFGGGADAGGGAPAPAAGAASGGGGAAPPRQQRPRAKRGQATDPHSIAERLRRERIAERMKALQELVPNANKTDKASMLDEIIDYVKFLQLQVKVLSMSRLGGAAAVGPLVASMASEGDDRAGNGTSDDGGDGATNGDNGGGGSSLRVTEQQVARLMEEDMGTAMQYLQGKGLCLMPISLASAISSSTSSSPPPSLLPRPSVGSVEGARGPLHDDSGGAGGDDGSRTINFSSLLNLSRSCRVCSLLGEEESKLLVQRDHIHITYQPEYTFYGMRLG

SEQ ID NO: 67173 - protein, 90 aa, Zea Mays
MKAKRGAQLLEKQKSDEAKIPGCNSKWSQQEGGEVWCDTGYPRLVRRPGDIALTGQVSQRCACFQENELDKAGLVVYEGCDYLSQSCKVN

SEQ ID NO: 67174 - protein, 141 aa, Zea Mays
MSLGPHLSMLGPNRTSSSPPPLRLGHRKSLGLLRGSRSCPTSRAASSAPCSTTPSTSVLASSPSGTHHTFSHHPSIAKELLSIPNARHAPPPTMNGCFRFTKTMARLRQGASDSLPSETCSYWPDEGRRPLSDPRPPLGYC

SEQ ID NO: 67175 - protein, 678 aa, Zea Mays
MALRHLVTGQNNCAPDGASSSNPLNALANAFLGQSSKAQSIKELPGSVSVPSTSGFSAPAPLSNIPGSENEFKQDQRPFVQGSDFIHGGPANDWIKSFRPPGVPELGGIEAHFPDFEQIYNNAGTTFQPPLDGPPQRVLSGVLHSFLTSGPAGVPFQPLPVPAALGLSESDKQCIRDRSCIMARHIFSDQPEEYIQAQVNTLLHSLDIDNRMRGPMHGQYPELQEYWNQSQSSMGPALMHNTADKWITEFGKQNNNPENWAKSFEQQYGPNGWASEFEQHQSQMAMGQMGGVNMANLAAMEQSRMLAQTLASNNDPKFQLSQGADKWVSEFSSQHNQGALNESWVDEFSKLNVTDEWAEEFSGGGFGESSADPWVDEFQEHLSSFKQSSGASRGVYVYSENNPYVGHPNPMQEGQELFRKGLLSEAVLALEAEVLKNPDNAEGWRLLGITHAENDDDQQAIAAMMRALEANPTNLEVLLALGVSHTNELEQGEALRYLYRWLQNHPKYGGLVPPQSTDSPYGPDVVRLFNDAAQMSPEDADVHVVLGVLYNLSREYDKAITSFKTAVQLKPQDYSLWNKLGATQANSIQSADAILAYQQALDLKPNYVRAWANMGISYANQGLYEDSIRYYVRAVTMNPKADNAWQYLRISLGNASRADMIAACDARNLDALQKEFPL

SEQ ID NO: 67176 - protein, 155 aa, Zea Mays
MHGRVRPVLLKYWGNKDDDMRIYSRLPHRITRKRNYVQHMKSSKYCICPMGYEVNSPRIVEAIYYECVPVIIADHFVLPFDAALNWSTFSVVVPESDVPKLKQILLAIPESRYITLQANVKRVQKHFMWHPNPVKYDIFHMILHSVWFSRVNQIR

SEQ ID NO: 67177 - protein, 505 aa, Zea Mays
MGSTTMSPPSFPVVLLLLLLATIAAAAGSNMDEEVVDDLQYLIDNSDDIPTNDPDGWPEGDYDDDDLLFQDQDQDLTGHQPEIDETHVVVLAAANFSSFLASSHHVMVEFYAPWCGHCQELAPDYAAAAAHLAAHHHQAHLALAKVDATEETDLAQKYDVQGFPTILFFIDGVPRGYNGARTKEAIVDWINKKLGPAVQNVTSVDEAQSILTGDDKAVLAFLDTLSGAHSDELAAASRLEDSINFYQTSTPDVAKLFHIDAAAKRPSVVLLKKEEEKLTFYDGEFKASAIAGFVSANKLPLVTTLTQETSPSIFGNPIKKQILLFAVASESTKFLPIFKEAAKPFKGKLLFVFVERDSEEVGEPVADYFGITGQETTVLAYTGNEDARKFFLDGEVSLEAIKDFAEGFLEDKLTPFYKSEPVPESNDGDVKIVVGKNLDLIVFDETKDVLLEIYAPWCGHCQSLEPTYNNLAKHLRSVDSLVVAKMDGTTNEHPRAKVCITTFEV

SEQ ID NO: 67178 - protein, 397 aa, Zea Mays
MLLFHFSFSVLVCLLLEWNLPTASETVCLYPSSAPPPNNLSAHVGLFQYFLSVQPIYYFFFVTYGVETQNRPIPSINGPAPVQPAPRDGPNSRWLLRTGTGPAPAPPVQFPNSRIRSAGASCGPERERNPTRRTGSASFSSPRFASAPSSFPTPHMATAVPAACLRAPCSSPAAVARRLGAGGPSLRKRHCAVAPVAAACGPAPPRLLDNEEAVCSVRRRVLVAGAAAFLSRPNPAAFAAEAKKGFLPVVDKKAGYSFLYPFGWEEVAVQGQDKVYKDVIEPLESVSVNSIPTSKEDIRDLGPPDKVAEALIKKVLAPSTQKTKLIEAKENDVDGRAYYTFEFTAQAPNYTRHALGAIVIANGKFYTLTTGANERRWEKMKDRLHTVVDSFKIENRI

SEQ ID NO: 67179 - protein, 372 aa, Zea Mays
MSSLATALQDEYSGLISPRFIEDFTAYADVCFSNFGDRVKYWSTVNEPNVETIGGYDQGILPPRRCSFPFGFGCEEGNSTTEPYVAAHHLLLAHASAVSLYRDRYQAAQGGRIGLTLLGWWYEPGTQTPDDVAAAARMNDFHIGWFMHPMVFGDYPPVMRRNVGSRLPTFTDEEAARVRGSFDFVGFNHYIVVYVKADLGRLDDQVRDYMGDAAVKYDMPFLKSRNQFPFGALTSDFMTSTPWALKKMLRHLRVTYKNPAVMIHENGAAGQPDPSGVNSYDDEFRSQFLQDYIEATLQSIRNGSNVQGYFVWSFLDVFEYLFGYRLRFGVYGVEFNSTARTRYQRHSAKWYASFLRGGELRPVALPDGAYSQ

SEQ ID NO: 67180 - protein, 131 aa, Zea Mays
MIGKPLVFTLWPDKLSFFQRQVAKRREKLLNYMLFLRVTPTLPNTFINLASPIVDVPYHIFLLGTLIGLIPAAYVTVRAGIALGELTSLSDLYDTQSIALLFLIGVVSVTPALLGKDEAQEKPPEMAVGAS

SEQ ID NO: 67181 - protein, 325 aa, Zea Mays
MRPPPPEMHITRRRYRWVKEWVPQDLVVTGGPCTLYKWVRATKDVGRHFFDVGALKKHAHVHGERQYICHYENCGKKFLDSSKLKRHFLIHTGEKNFVCPHEGCGRAFSLDFNLKAHMKTHSADNYHVCQYPECGRRFTQESKLRAHIRAQHEKAVGLQNPGASSMNHSAIGGPHQPPRPAKVSAAPPAPSAERPYVCPYDGCDKAYIHEYKLNLHLKKEHPNHYQDGGPNGAAAPSKRSISKSSHRSKLDITSRMPPANIPKHRGYATPLPAVVSLPEEQQLLRKVVYEDDSEETEEEGDNNGEDRWNYKRAASSDDEETEDEE

SEQ ID NO: 67182 - protein, 166 aa, Zea Mays
MLVASHVGHHPCCCLKVDPRWSFSSQLLSIPFLWHRLPQLKKVFSVNGLNKYYIHQIACLLPSLVDVLPNDISANHPGYACVLANVLEAATWILSDAKLASDSAADIIAVCTSLLDTLPAVTTPTERADDDDEMPMDVNIKINLDVDLERQITAAIDSKLLQHLVV

SEQ ID NO: 67183 - protein, 66 aa, Zea Mays
MHQRAGTLQTTTLEEPHGAQTPENSTATHAQGDTRGQGARPAVCSRAHAAAMGGRTARHRPTGELG

SEQ ID NO: 67184 - protein, 80 aa, Zea Mays
MPFVSSPFSILFLFSMANTAERSALKSAFAVDETRKALVVAAMNTQGDGANGREEEEQRQGQEGKSIDPNGDQAVPKPNL

SEQ ID NO: 67185 - protein, 1052 aa, Zea Mays
MPAVPVPGGGGSSDAEELFRTKRIPEIRAVEGATRREISAKEEELRQLVGRSYRDLLDSADSILLIKQSSDAIFYNLARISDSLSSLSPPPEPSLAVSAVSPSPSAGGRARLYALAARAKYLVDTPEHIWGRLDEGLLLEAAGRYLRAQVVYGRLSRDAAAAARFPLLAHQAQLVEAFRPQIAQRARERLADRRLPVAAHADALAAVAAIDAPSLAPAPALLLFLTSRRAWISQDLAGLASDLSSYTSVLCDIARIVRITLGHVGQLFVPALSDMPLFFKTVTEKTPPEQLFGGIPDPDDEARLWKEHMNQLEAIMVLLKPDVVAAACTDWLKECCSEIFGVIAGEQKLVDAIGSGELLGSVQRLVRDALDGRDGLERSLEQWLKSVFGSDTESPWDQIRGLILKDDKDIFEDWMEEAFVRRMKDIVHSEFDILGSSVNVKESIHAIGANADPKDAGDFLAYLRKSSKGGGFWFSESKIKKGGVLAHLKPIADENDFRSCLTSYFGPEVSRIRSAIDSKCKNILEDLLSFVESHNSTTRLKELVPYLQEKCYKTISGVLKELEAELRKLSALLGTKKEGNDIPAASIIAERSLFIGRLLFALRYHSSHVPLILGSPREWVKEVGGAAFARLSSPTARHLRASFTPRRHTFDSPKSPGRQFSDSPRRQTIAAAVSLFGANDRSNPRLDELNKTLQSLCIMAHNVWIAWVSTELSHILSYDLNKDDSLSSATPLRGWEVTVIKQEETTEGPLEMQIALPSMPSLYIISFLYQACLEIHKVGGHILDRIILHNFAWELLQKVINIYENFLSSVESGNSPVSEKGILQILLDLRFIGDVLSGGTSSSTNTTEMQTKQDSLPSTISKTSFRRKQSQLHADSAVIEPINKYEPYLWENEKQSYKRHVVLFGFLVQLNHMYTGTMQKLPTKSNTDSNIMRCSQVPRFKYLPISAPAISSRSHKPSLQSLSSESTSKNPWKSYSNGDRSTTPEFDDNASLVGAAPLLKSFVTQVGTKFGENTSRWGSMLSDGQVGKLSDILPGPAAGFFSSFTSGARYDS

SEQ ID NO: 67186 - protein, 512 aa, Zea Mays
MDETDEILQTGPTHSKYLNERSSMVSLDDVEDLDQKRHPGHRDQVRRRSEMVSSKKVCVVGAGVSGLACARELLREGHDVTVMEQSGGVGGQWLYDPRADGGDPLGAAGAHSSMYASVRLISPRELTGFSDFPFFPRDDGTGDSRRYPGHAEFLRYIRDFCDAFGLMDVVRLNTKVLRVGLAAPRAADDGDGIKRWTVSWSRHRGCDGEVVTTEEEVFDAVVVAVGQYTQPRLPTIRGMDKWSRRQLHSHSYRVPDSFHGEVVVIVGFRHSGVDIALELSKLAREVHVSVKSMEALTPAVSKAVARHSDLHLHLQIECLREDGQVTFADGSRVAADSIIYCTGYDCSFPFLDTGGLVTVDDSRVGPLYEHTFPPALAPSLSFVGLPRMVLVPRFYEAQARWVAQALSGWRPLPPSEEMARSAEEYHRAREAAGVPRRLSHALFFDMDYCDEFGAKHCGFPPVEGWKRDLLSLSLASASDGAVESYRDSYHDSDLVREGLRSEGWWPWLPDPQ

SEQ ID NO: 67187 - protein, 369 aa, Zea Mays
MEAGGAGSGLNGAVQAKGTGADDGSAKRLPPCCVKARAAAPESEARCHATVVSGWFTEPRSRCGKASKVQYYNNPMWPGEANSLKVEKILYQGKSLYQEVLVFESSTYGKVLVLDGIVQLTDKDECAYQEMITHLPLCSIPSPKKVLVIGGGDGGVLREVSRHSSVESIDICEIDQLVIDVCKDFFPHLSVGFQDPRVQLHVGDAVEFLRNAPEGTYDAIIVDSSDPIGPAQELVEKPFFDTIARALRPGGVLCNQAESMWLHTHLIQDMLSICRETFKGSVRYAWTSVPTYPSGVIGFLLCAKEGPLVNFLTPINPIEKLEGATKAGREIRFYNSEMHRAAFVLPTFARRELEAYCVSTETNLCAMSQ

SEQ ID NO: 67188 - protein, 541 aa, Zea Mays
MGSLSKLSSLYMQNNQLSGTVDVISNISLATLDIASNNFSGMIPQEFSSIPNLIVAGNSFVNMPASPPQALTPPPNPRGRPDDRRGPTSAPTVPETPIDPDDKKMQTGPLVGIAVGSIAAASCVLFALVLCLHNARKKPDDGSSEAKASSREVMDSSHDNAAVATSDLQLIQPAGKMTPDDRAHGPNGCTAKRPKQQVTVTTVSSYTVAALQVATNSFCQDSLLGEGSLGRVYKAVFPNGKVLAVKKIDSASLSLYEEDNFLAVVSNVSRLRHPNIVPLAGYCVEHGQRLLAYEYVGNGTLHDMLHFSDDDGMTMPGKTTRLAWNTRARIALGTARALEYLHEVCLPPVVHRAFKSSNILLDDEYSPRLSDCGLAALSPNPETEREAFAGVVGSFGYSAPEFAMSGTYTAKSDVYSFGVVMLELLTGRKPLDSSRERSEQSLVRWATPQLHDIDLLAKMVDPALDGLYPAKSLSRFADIIAICVQSEPEFRPPMSEVVQQLVRLMQRASIVRRQSDDQLGYSYRVPERDGGGTVGGDVVVA

SEQ ID NO: 67189 - protein, 1029 aa, Zea Mays
MRKDADAKIPSYPNLSSKLICILRSVTMLADPDTDEVYARMTLQPVSNVTHCDKETLLATELALKQTRPQTEFFCKTLTASDTSTHGGFSVPRRAAERIFPHLDFSVQPPAQELQARDLHDAIWTFRHIYRGQPKRHLLTTGWSLFVSGKRLLAGDSVLFIRDGRQQLLLGIRRANRQPVNLSSSVLSSDSMHIGILAAAAHAAANNSQFTVFYNPRASPSEFVIPFAKYQKAVYSNQLSLGMRFRMMFETEESATRRYMGTITGISDMDPLRWKNSQWRNIQVAWDEAAPSERRTRVSLWEVEPVIAPFFIYPSPLFTAKRPRQPGVTDDDSSEMDNLFKRTMPWFGEEVGKRDLSTQNGLVPGLSLVQWMNMQHNPSLANTVMQPELLNSLAGKPVQTLAAADLSRQISFQPQFLQQNNIQFNTSLLPPQNQQTEQLANVIATPNQLGSVIVPQKAVQNSSSEQKQNLVTQPLQVSQPMVSVAQPQLVHTQLQQPQVVLQAQPQQPQVIVQAQLQQQQPLVQNHTTIQSGLQQIQLLQQQQVQQSVQEQQQIKIQPFQVPNDANMVTQLSDQMKIQLLKALQPQQPLVMEQQKMIFDLQQQAVNSQSTAQQCSQVATQVVGLHSSSTNQYPTQQKTQPLKTFQDFPGNAVSIVKPEIVTSVGARSLHVPGGVQSMKMDEVPSSSTSPSTNNNPVILRSTPSSSKNQCLPTAAKAPQSSVVLGSTLEQGMKPCDSTQHPMVIPKLAEERPATGQDYMNSTQLDYLDTSSSATSVCLSQADGSLQQSFPPSSFNQHQPLREAVPDSEFEVTDAGNNFLFGANIDGHMEPLNEDDLLGTAFEADKYMEQMPGNGISNYISSKDSQQELSSSMISHPFGVADIAFNSIDSSINDIQFLNRNSRAPGPVQQRMRTYTKVHKRGAVGRSIDINRYSGYDELKHDVARMFGIEGQLSDQNRVGWKLVYEDHEKDVLLVGDDPWEDFVNCVRCIRILSPQEERQMRLASDYGDSFLGNQACSSSDGGRPWRVTGD

SEQ ID NO: 67190 - protein, 184 aa, Zea Mays
MADPAEHRPAEEDEEAAAAGEDEDTGAQVAPIVKLEEVAVTTGEEDEDVLVDMKAKLYRFDKEANQWKERGTGTVKLLKHKETAKEHAGSDKSCVWHALDFADGELKEEMFAIRFGSVENCKKFKDTVEEIAEEQGKTEVKENEEVSIAAADLVQKLTVTEASKEGDAEEEEAPASDHKKDAKG

SEQ ID NO: 67191 - protein, 365 aa, Zea Mays
MGNMTRSNSPVSRRIVLSFLDFLNSVELAPGVDPEALEVAKDCLESIFSVNSTATGDAIQPGLLFELFASLEANERDQSDSQVEDTFELGDELFAKFYAALDEINFFKTSPAGAEDPGLLSKATQYFDDALLAMQKLGKKRASLVDIAESFKSRGNEFMRSNQHLKAVELYTCAIALNQQNAIYYCNRAAAYTLLNMNNKAIEDCLKSIEIDPHYSKAYSRLGSAYFAMGNYHDALYKGYLKAAELDPSNENVRQNIEVTKKKLAEQRVPPEEQNTHAGQAQGPHPIFTSGGVPFNLFPPGNEGTQARQASNGLEGEHGEPGIHRDDDVHINLAGPEQAAEALRAVMQMLGPQMGQHEGAPRGPG

SEQ ID NO: 67192 - protein, 345 aa, Zea Mays
MGKTPLSEPKSYQKIYDWQYIFCLELWTSVVCGCSSEEEFRPLAYPLTQIIHGVACLVPSARYFPVRFRCVRMLNCIAEATGTFIPVSSLLLDMLEMKELRGRPDGVGKAVNLFSVKQVDKKTVKTRAFQEACIYSVVDELAKHLTQWSYSIAFFEMSFIPLVRLRSFCKTIKADRFRKEMKDLIYQIEANVEFIKSKRVGIAFSPNDPAVESFLQTEKEERCSPLSKFVATLHQRAQDRMDALDETSVIVGAESSTFSRRLSEAQKQQDEQDDDEGTIAFSKNWLSENKKPKYVLAYLFFFPITWRGKHNHTVVRCAEPQRRIKSDPGRMMMSRLRRIGLRIWS

SEQ ID NO: 67193 - protein, 409 aa, Zea Mays
MDWDAKMLPAWDLGTVVGPSSSGGGALDLKLGAPTSSRAVLTAAAGAAPALPSANPPPPPPPPSSSAPAKRPRPGLARQAVPACSVQGCDADLSRCRDYHRRHKVCEAHSKTPVVTVAGQQQRFCQQCSRFHLLGEFDEVKRSCRKRLDGHNRRRRKPQPDPLNPAGLFGNHHGVTRFTSYPQLFAASMEQPKWSVVKTEADVFQDQYYPAVHLNGAGGGAIGSHFHGKEQKHFPFLTSHSNGGGGGDVATAAALGCQPFTITTTASSESDSKQSNGNCALSLLSDNPTSAQTAMIPTTAQSLAAAMQYGGRLPGSVSVSGGGGGDVSLTGMSYMRVGDSRQASILTASSPGHAAVASPVPATTAAATPPPPPQLLQYHHGYGYYHVSGGEQGNNPDGAAVHALPFSSW

SEQ ID NO: 67194 - protein, 514 aa, Zea Mays
MAAAKSGVDVETRDGGGGGSFSEERFVDKLNKLNNTTASIQTLSHWCIFHRKRARRIVDTWEKHFSTATNDKKISFLFLSNDILQNSKRKGGDYVHEFWRVLPRLLKHFYENGGEEAKKLVARLKLAVGGMPEKIVTAYQSVFDQHFDEDTALNKCKSTVSVLENLKKDIDLASTEGDPPASTMISDLQEQETILKHCIAQLGSVDAARISLINQLKEALTEQESKSEVLRSQLQVARAEAEHAIQLRQRFGGAVVANGTGSSSSPLLMSPQLQSLNPAPSLAPPIGAAGDEPKRTAAAMADKLASLSAPVQVLSSIFSSFVATHGASLSSMNSGSPPRDQLSGAPPGFQVEKRPRLERTVLASDMGAPPFSMQAPRLQQPVGSMPTQAATQMNQAPGLFAPPPPPPLPPLLPPLLQQFGQSAGGMMGMGPFGMMAGSMPPPPPMSSIMPAGFPAPSGPPPPPLPPAQTQPQQQQQSPPQPPAPQQSAGFFQTSAGMGYFPAVQVQQSPSAQRQ

SEQ ID NO: 67195 - protein, 56 aa, Zea Mays
MVMEMWQGVWWGSGGHEERQEASPSRSHGPRRHAMVEAHDQEPRVRCPGIGNRHAS

SEQ ID NO: 67196 - protein, 414 aa, Zea Mays
MFFYIKAGWIGHDPLTVVIGESDPYVSIGGREINHLHAASVLMTVIMILAFLTSIAIARRIMKATSVLKVAAKVVGEVQALIIFPVVPYLILAIFYTFWFSAALHLFSAGQVIQNDCNTDCCSYDLKLGKVNCDRCCGYTIHYTPHIGIAILFHLFGCYWATQFFIGCSSTIIAGSVASYYWARGEISHDIPFHTVVSSLKRLLRYSLGSVALGSLIVSIVEWVRFILESLRRRLKFVDSARGSRFGKTVSSSSQCCLGCIDWTLKSVNRNAYVMIAITGKGFCKASVLATGLIMNNVLRVGKVNVIGDVILLLGKLCVSLLCALFAFLMLDEHKYRSGHNKISSPLVPVLLSWALGYIVAKLFFAVVEVSIDTMVLSFCQDSEEHQGNARYAPPLLMETLDEESELRRLTQGP

SEQ ID NO: 67197 - protein, 399 aa, Zea Mays
MWVFYLISLPLTLGMVVVTLRYFAGPAVPRYVVATVGYAWFCSLSIIILVPADIWQTLTASAKGGIGFFWSWSYWSTFILTWAVVPTIQGYEDAGDFTVKERLKTSIHMNLLFYSIVGAIGLIGVILLLIMHRAWDGGIVGFAMACSNTFGLVTGAFLLGFGLSEIPRNIWKNAYWSHRQKVLSHRVAKMAVKLDNAHQEYSNAIVVAQATSNQMSKRDILRPYMDIIDNMLSQMLREDPSFKPSGGRFGENDMDYDTDDKSMATLRRQLRRAHEEYYRGKSEYMTCVMEALKLEDTIKNYERRDASGWKYVSSFRDRRSGTLGPILDTIEFIWQCILRKQLQKAFAVILGCMSAAILLAEATLLPSVDLSLFSILIKVVGKQEVLVQNGCKICTSYLL

SEQ ID NO: 67198 - protein, 127 aa, Zea Mays
MRWLPRLLSHSIEVGRASAAGRSNPSLVKAGSHGFASGGWDGSPAVPREWLRKLWVDVLKKQKEDARRWGIGASPGNAGSGAEPSLCAFANSVEAAGATREAPSRSYQYEYRGLAGYSEQDGHLLQK

SEQ ID NO: 67199 - protein, 335 aa, Zea Mays
MQATSAPRKRLPADIKSFSHELNSKGVCPFPFWKPRGIYNLKEVIKVIQMRFEKAKEEVNSDLAVFAGDLVSVMEKYADSHPEWKETLEDMLILARTCCVMTPGEFWLQCEVIVQDLDDHRQELSMGVLKKLYTRMLFILTRCTRLLQFHKESGFAEDEVVIHQRDKIIQSADRQVLTQPGADGTISRASKSEARKSYSQEQHNLKWKRSQEIKPVKLLPPLDTDVKKDAVSPSKERISSWKPFPSPNTKVPKESIPTKSESPNKKTDAHSTVSSHVELSSQVESLPQQQLPDKHQHKTSWGHWSDQPNISEEGSIMCRICEEYVPTHYVEDHSK

SEQ ID NO: 67200 - protein, 63 aa, Zea Mays
MGDRAGSPARRDCNRGRLRARKAMARTTFSLIAQHPRGAVGHPPQDDFFYRCSVMITSLNSIS

SEQ ID NO: 67201 - protein, 406 aa, Zea Mays
MWHAMPVSTPSHHLHHGPKQLMGRSFPPFILRALPQLSHCRRRCYAYATVTVIPMASTATTRRRPRRGSKGPNADLSRTLTDCTRRGDAAAAMAAFDAAVDADADAVPRLSAHQYNQLLHLLAATDRSSFPSPPAAAARRVFAHMLQAAAPPSEATITSLARVIAADPASAADEAFELVATMKDKYGLSPRLRSYGPVLAAFRRAGEAAKAYAVEAHMTASGVSPEEPELAALLDVSSRAGDADKVYEYMHKLRQAVHCVSEETAGVVEAWFRSDEAATAGKPQWDAAQVKDAIVANGGGCPPPWVAWNPALDRAAGKSGDADQCGGCRFHLACIDIDMERHRGLLIPLLGLALERETKTNFSRFQEWLEANKDYQAIVDGANIALYQQNFAEGGFSLTQSSWMAL

SEQ ID NO: 67202 - protein, 898 aa, Zea Mays
MDIGGSGGIILSPGSEDDKFARRRSRRVSFADTTAVHVFDRDEDFETPPEEREPDSTPAPPSPRRSSVGREVEDDTEEDFNRPPVIFLHDVDSSYPDSAAESIASADGSQVAAFFNWIMSDENFFGPVSASFIQTGRPSDSGMSEDDNHDITMDSRTFSLHFRNIAPPDDCTAYSAGSLMTPNTASEGPLKELTASNPARASINGRDTLTDMSLLSGNPRTYGYDKLSPTLNSMMKKIKGSKQTNSPKLGISDVTSDCVLTLSTSEEESREENLCIDNGVSSDELVMVNTIAEHISMRNPVSTSTDLIQDDNEMIIDVQENSKNCNHDHMDDDPGANNTAEPPAKISPAYKSFMINGDVQSHLVDQSSSKDRPSGSNCTASVSSMCNVDMETHLLDQLPGKDNTYAAQSSSEATAILLMDAEQLRQKNEVMDTETVLHTPRTAGLQLQVPRGSISSLRSKRHKLFTNTVSNSKVARQEGCSSGTEFVHHDKRLSSLKHQELAAASQLQLVEKNELGHRASDMFSNTEDHDSTLSVSSHSVPKLKKTNESFVLGTPRRHGLNESTKVLDTLCHAFTLDSQPSRECNSHVDLNGVGRKRTAEENGYAVQECPEKTTKTARSPRKSRKEIPCVSQPSMIEEKQNGAHDNGKSVDIDWSKVVCTITNATEQVLPASISKYNLQQLDMLSDRLDEIHMARKYKRLSTAVKKAQLCQDGIQECCFLKSKILGAGHMEDSSLPAATTVSAGDRQEELDIISEKRLELKIIQRKVEKLRSSLECFHNIEGGIGSDSVVRYAEEQLMMRNQHRIIHWQAGLCKLNDIVKRGNKCDIILNYHNLLFQRIILNISDTSSIFVNNSLNGNQIGKTFPNLDASLAFNFVFEAEENQRVSDLQSLQKKTMLL

SEQ ID NO: 67203 - protein, 402 aa, Zea Mays
MFREWLRSMLREHGGPFFDAFRSKHPERTGAYTCFNQKIGAEEYNYGSRIDHILISGSCLHRCDSVEDHSIFCCHVEECEIMNHFKRGNSENLSKWKGGRSSKLEGSDHIPVYILLKEIPELPVHNIPPSAARYLPEIRGRQQSIVSFLDKGKIYELQNAANLIQSEDTVLDSYCSDGLENTILAKKGLATGITEFAKGGNLPSLMCKGTDLNQWINEGLMGISHVSQKKSLSSTKFVPQKKIKRNLSSQPTIKSFFQRPGSKTVNASTSTLVTPAETLDLTNQACVSNGDTLPENMQCTTSAAKVQDNTDASSCSLSTDKSNAAALEWQRIQKKMKMTLPRCKGHSEPCIPRSVKKGPNIGRLFYVCARAQGPASNPEANCGHFQWAPGKSKEKSSKEKRL

SEQ ID NO: 67204 - protein, 179 aa, Zea Mays
MHRDRGVSAAAIPGDRKRIGEPMDRSSPSTSWGFSGGREKERIGVGKQPEMPRSGGGSTAMSKSKLSDESETDSEESDVSGSDGEDTSWISWFCSLKGNEFFCEVDDDYIQDDFNLCGLSNQVPYYDYALDLILDVESSHGDMLTEEQNELIESAAEMLYGLIHVRYIITSKGLSAMER

SEQ ID NO: 67205 - protein, 411 aa, Zea Mays
MALEFAEYQVCVDVFLTTQSYVDIASISVVPQTTGGRVYYYYPFSALSDPAKLFNDLRWNISRPQGFEAVMRVRCSQGLQVQDYYGNFCKRVPTDIDLPAIDSDKTVMVTFKHDDKLPENVECGFQCALLYTTVYGQRRIRVINLSLSCTNLLANLFRYADLETQFSCFLKQAANGIPTSPLPRIRDEATNTCINILQSYRKHCASVTSSGQLILPEALKLLPLYTLALVKSLGLRTDGRLDDRSYWISVASSVSVVLAVPLVFPRLIPIHDLTSRDDDDSLIPSPLMLNSENVQEDGVYLLENGEDGLIYVGNMVNPATLEQIFGVSSLAALPAQLALEQFDNELSRKVNEVVNEIRRQRCSYLRLRQCRRGEPSGDFFRSFLVEDKAPGVFSYVEFLVHVHRQIQSKMT

SEQ ID NO: 67206 - protein, 579 aa, Zea Mays
MPTRLPLRLLLLVLAIAGAAHGRRGISFSDDDRSLLLAGSSDEVAAATSVLRLPSAAGEDPAPEACEMTYGFLPCTDTAPGNLFLVLAYGLLMFKAATYLSAGSELLLEVLGPGVVGGLFLPILGALPDAMLILVSGLAGTKEVAQSQVLIGMGLLAGSTVMLLTLLWGSCVVVGKCDMSENSTATDSQDTKGFSLFGSGVSTDVQTSYAARIMAISVLPFIIVQIPQIFRLHSGHRLTVLLGLIAAALLVLAYCLYQVFQPWVQRRRLEYAGLKHVMSGLLRHAQTHIFGRLLREDGTPNIPVIEKLFCKIDLDNDGKLERGELQAFILGVKFEDVDLDSDLAVDQVMADFDTSHNSVIEKGEFIDGILRWLEEAKRSVATSGSDSRKFLQDFHTRTRDERSQLLGKDDEDGEAIENPTWTSFKAILLLLLGTAMAAAFADPLVDAVHGFSNATSIPSFFISFIAMPLATNSSEAVSAIIFASRKKQRTLSLTFSEVYGAVTMNNTLCLAVFLGLVYVRGLTWDFSSEVLIIFSVCTIMGLFTSFRTDFPLWTCVVAYLLYPLSLVVVYVLDFKFGWS

SEQ ID NO: 67207 - protein, 120 aa, Zea Mays
MRGAEGSAGERPFRRRGFGQGTPGGDSSKPSARARRPRPRRHGRSHSGPGGAGPMGGSGAARRAQASALGRAVRSASTRECIPAARGYGSTGAAHAQAHRPGNGNDNGFARSKLKESSAI

SEQ ID NO: 67208 - protein, 196 aa, Zea Mays
MGHKEDRMRFENTDDNTDEPGANVSKRLRLTPLADASNPIMAQVAFLSAIVGSDVASAAAQAAISAQSRVDLNDGEIETSINSIKQEESSHTNGLSANVLLKEAAANARAQLEKERNSIEQSLSNIVDVQMKEIQDKICRFEQKEMLMEKERQQLHFLRDLLFTDQLAVMQHQQRSPAVATECKGDEKPKPVASMS

SEQ ID NO: 67209 - protein, 753 aa, Zea Mays
MAEYRLGLQLHGHTDDVRGICVCGDAGIATSSRDRTVKFWTRNPEKESEYVLSKTLAGHSSFVGPLAWIPPSDRFPEGGIVSGGMDTFVFLWDLQKGEVAETMKGHSSQVTGLAVDTNGDIISSSMDCTVRRWRNGNAIEVWEAHKVAVQTVLKLPTGELFTGSSDSTIKLWKGRTCLQTFSGHADTVRFLASMPGLGILSASHDSTVKLWALSGQPLLDMIGHSSLVYSVDAHSSGLIASGSEDRSLKIWKDGVCVQSIEHPGCIWDAKFLGNGDIVTACSDGTTRIWTADSNRFCSDEEIAAYTDLISQYTLSRKTVGGLKLMDLPGVEALQVPGNSDGQTLIVREGDNGVAYSWNSAELKWDKIGEVVDGPGEAAQGQVHDGVRYDFVFNVDIGDGEPIRKLPYNRSDDPYTVADKWLLKENLPLTYRQQVVEFILQNSGQNNFVPDPSFRDPYTGANAYVPGQPSSSSNGNTPEPIFKHIPKSGMLSFETAQFDGILKKVAEFNSKLSSDSKQLSLSETEMSRLPAIVNVLKETSFYHTSKLADADMTLLVKILKSWPPQMMFPVIDFLRMFVLHPDGASLLLKTIETGNDILLETFRKAVASPVQPANLLTVLKAVTNLFGNSCLHQWLRTHCAEIIDSVSNCKSSFSKNAHLAYATLLLNYAVLSIESKEEQSQAQILSAALEIAEDDTQDFDSKYRALVAIGSLMLKGLVKSLALDLDVKSVASSAKSSMDQKIAEVGGDIESLTR

SEQ ID NO: 67210 - protein, 161 aa, Zea Mays
MDNRTELDQIVVENVLAFDAGFWVRLAARIDLCKSDDDKKDYEELAENVMNIVDRLVHKTNQKIEQSTDVLKAIISPAMHEGDVKWPPRDPDTLKLMEKEITRREQEGQLDEGFLSEVSAQLRLNKTEISQGFRLCCKRCCSYMLLNLSKNVVMHTKGGKL

SEQ ID NO: 67211 - protein, 188 aa, Zea Mays
MKFRIFVARDVLLVFLAVQLTIAIIGAIAYFLDRDGSFRNSFSDGWDRFLSKHPIPFYYCIGVVVFFVLLGFFGLIVHCSSFNDNQDPCLAGCRNCCYGWGILDCLPASLEACFALVLVFVVVFAILGIAYGFLAATMAVQRIWQRHYHILTKRELTKEYVVEDLHGNYTAPKLDPEHEERLKMLKLL

SEQ ID NO: 67212 - protein, 785 aa, Zea Mays
MAPKAGRGKGRGGKGDKRKKEEKVVPSVVDVTVVTPDESQVTLKGISTDRVLDVRKLLGSNVETCHLTNYSLSHVARGHRLEDGAEVVALKPCALRIVEEEYATAEQAEAHVRRLLDILACTTAFARPRDGAAKHRASRHGRPATPPSSPTPASTGAHGVASGEAAPPISEAHDMAAIRPPPKLGEFYDFFSFAHLTPPVHFIRRKEANGASQEGDHFEIEVKVCNGKLLHVVASVKGFYLSGKPHNVSHSLVDLLQQLSNAFANAYEALMKAFVDHNKFGNLPYGFRANTWLIPPIYVDSATRCPALPVEDENWGGNGGGCGRDGKYDRRRWSKEFSVLARMPCKTEEERVIRDRKAFLLHNLFVDTAIFRAASTIRRLIDQSMNSVGSHSGTHGSNVFEERIGDMNITVKKDGADASLKVEDKVDGVAFCQTGAMDIAQRNLLKGLTSDENVVAKDSSTLGVVIVKHCGYTATVKVSGRAKDSNDVKQTNDISGKFDGMLTIDVHDHPDGGSNALNVNSLRIPLPRVIHPETVVGNQHHSPKSHASNPAKKLARKILKDSLVKLDSMPSINSRIIRWELGSSWLQQLQKKDTPASENGKGNAMKTDKEPAVRGLGKHFEQLRKLKKKECNNEGSSSEKEECSNNYSSMNGTQVSDMIAADEANNGADISKLMSEDAFLSLKSLGAGLHEKSLEELTKMAHNFYDDTALPKLVADFASLELSPVDGRTMTDFMHARGLNMSSLGRVVELAEKLPHIQSICIHEMDLPDLKMVLTRMPILTIICD

SEQ ID NO: 67213 - protein, 556 aa, Zea Mays
MALARLRLLDRYGLLSPALSATALRSLGDLRALCTLSTTLRSGAGEDEIERIRREFDDAKRNYLSIPAAIKDMPKMNPQGIYVNKNVKLDDLQVYGFDYDYTLSHYSEHLQCLIYDLAKRHLVNELKYPESCLQYEYDRTFPIRGLYYDRLKGCLLKLDFFGSIEPDGCFFGRQRLSLSEIKELYGTRHIGRDQARHLVGLMDVFCFSEACLIADIVQHFIDAKLEFDPSYIYEDVNQSIQHVHRSGLIHRQILSEPEKFLIKKSQVFRFLKMLKEKGKKLFLLTNSPFYFVDGGMRYLLEVLFLNLNLLVCFVHIVEHPKDQHFDGNSWRELFDVVIAQANKPTFYNSDHPFRVYDTQKDTLTFTAVDKFLPDQVYYHGCLKSFLQITKWKGSEVIYFGDHLLSDLRGPSKAGWRTAAVIRELEDEIEIQNGDSYRFQQAKLSIIHDLLGKVHAAVVSTEKGQVYKALLNELNAERRQCRSGMRDLFNTSFGATFLTDTGRESSFSYHIHQYADIYTSKLENFLSYAPESWLHPPHDIKIMPHNAKVPASLFSTS

SEQ ID NO: 67214 - protein, 192 aa, Zea Mays
MAAPTAAVDTAAPPPPPSAEAAAAPVLDQKVSPAAAPQPDAPAPAPAPKKRKLEEAGFHTSEYYKIRAVVADLRVRFVQVHEATDFRNTDAAREIMREINVVMDLSKKMRLKLGATSEPVKPPEKPSAGPVKDEPMKPSEKPSAEPVKNEPSEPALAGENNRAPRVSQTTSSPNNAGIDAPVVKHDNSEARK

SEQ ID NO: 67215 - protein, 111 aa, Zea Mays
MFTEEQNELVESAAEMLYGLIHARYILTSKGLAAMLEKYKNYDFGRCPRVYCCGQPCLPVGQSDIHRSSTVKIYCPKCEDIYYPRSKYQGSILTILLSDCLNAYMFQTSTS

SEQ ID NO: 67216 - protein, 480 aa, Zea Mays
MGGVCSRKRSQLVDEGDALQTSPRFSKTSSLKWLLLTLPRSSSDVSGKGQGNEPGRCPSLMELCVARVCQDIDRYSTFAMLPRDLSQQIFNELVNSNRLTEASLQVFRDCALQDIGLGEYPGVKDAWMEVVASQKQSLLSVDISCSEVADSGIDLLRDCSSMQSLACNYCDQISESGLGVLSGLSNLSSLSFKRSNAVTAEGMRAFANLVNLLNLDLEGCLKIHGGLIHLKDLTKLESLNMRYCNYIADSDIKYLTDLTNLKDLQLSCCKITDLGVSYIRGLQKLTHLNLEGCPVTAACLEAISGLSSLVLLNLNRCGIYDDGCENFEGLKRLKVLNLGFNYITDACLVHLKELISLESLNLDSCKIGDDGLSHLKGLVLLQSLELSDTEVGNNGLQHLSGLRNLQSINLSFTLVTDIGVKKISVLNSLKSVNLDNRQITDVGLAALISLTRLTHLDLFGACITDNGTNCFRFGGWHTGH

SEQ ID NO: 67217 - protein, 65 aa, Zea Mays
MDAGAQVDGHGVALQAGISGCTVAVAMAAGVWGRQAEWGRHRGYGGSAKERCCSPIARSTTACTF

SEQ ID NO: 67218 - protein, 90 aa, Zea Mays
MLLLFRCNVTRADYLSGRTSLHFATHDGFVRCIRLLVADFVPSVALEDIASSVVDGGDCQTNSGSSPNSSSGQKFNESLRSRRWLWTEDG

SEQ ID NO: 67219 - protein, 320 aa, Zea Mays
MRVPRQAVPLSARKTSGGNSEGIAHFLQLPHFTEATVKKIARKKIRAFQELCDMSVEGRAALLTQVAGLSEEQVRDVELVLEMIPCIEVDIKCETEGEEGIQEGDVVTMYAWVSLRRRNGLTAALPHCPNFPFHKEENFWLLLADAASNDVWLSQKVSFMDEATAITAASKAIQDTQEALGASAKEIGNAVKEAVDRVKKGSRLVMGKFQAPAEGTHNLTSFCLCDAWIGCDIKTSFKLKVLKRSRAGTRGHVPEEGSAAAVEDGIEDEEEEDEEEYDDYESEYSDDEEDEKNKGKGQGKVVNGSAHQGAESDIDSGSDE

SEQ ID NO: 67220 - protein, 90 aa, Zea Mays
MAGLAGRPGSWGGLVLRVGQALFAAACIGVMGSSLGFASYTAFCYLIASMGLQMLWSFGLACLDGYAIRANKDLTSPILLSLFVVGDWQH

SEQ ID NO: 67221 - protein, 303 aa, Zea Mays
MDTAEKMRWPFSDGSVTDLLDARSLHGSPDIKKKAQFHSSLVQKLALEKEMEGHVGCVNAIAWNSSGSLLVSGSDDTRINLWNYNNRELVHDIDTGHSANIFCTKFVPETCDEVVVSGAGDAEVRVFNMSRLSGRRPREISMEPTMVYQCHSKRVKKLAVELGNPNVVWSASEDGTLRQHDFRECSSCPRAGSANQECHNVLLDLRCGAKKSLADLPKHPLALKSCDISSVCPHQIIVGGSDAFARLYDRRMLPPLSSCQTKTKPPPCVKMFCPLHLANKDIFAPYTCCIQPKWEGGSFKLQW

SEQ ID NO: 67222 - protein, 520 aa, Zea Mays
MARTAAPAAGYGEDGVYHSATGQSLTFAAFRSAVLTTAVALSSRAGVRRGDVVLFFAPNCFLYPVCFFAVTALGAVATTANPLYTPREVAKQATDSRAKLAITVSELLPKIVDLGFPTILLDGGGDGDAASAAASKPQGASVTLYSDLVSGARETEYRRPPTKQSDTTALMYSSGTTGASKGVILTHRNFISAAAMMTADQDALGEGPNVFLCFLPMFHIFGLSVITFAQMQRGNSVVVMSRFDMDSVMAAVQRHRVTHLFCVPPVMIALAKLGSVGKYDLSSLRFIGSGAAPLGKDVMEGVAKNFPEAVIAQGYGMTETCGIISLEYPEKGQIRQFGSTGALVSGVEAKIVDVETLICLPPNQLGEICVRGPNIMQGYFNNVQATEFTIKQGWLHTGDIGYFDEGGQLFVVDRLKELIKYKGFQIAPAELEGLLLSHPEILDAVVIPFPDAEAGEVPIAYVVRSSESSLTEVDVQKFIEKQVAYYKKLRRVTFVDSVPKSASGKILRRELISKVRSSKL

SEQ ID NO: 67223 - protein, 53 aa, Zea Mays
MMANLARDATEYLYSGNQKRPGMRCRISMLLRPFLKWLLSQKPTCKYTSNTNE

SEQ ID NO: 67224 - protein, 136 aa, Zea Mays
MAAGPPSSVRAERVLRAACAAMAAAGALLLGFSAQTKTVLFIQKKAVPKDVQALWDARTWCSRRRWRRCRRASWGCSASTPCSGASSATSTPASASRRPPAWSAACWPPPAWPSSPRSRLGTSSAAPAPRSIDEFQ

SEQ ID NO: 67225 - protein, 270 aa, Zea Mays
MAGALLSSPHYLWSPTSQPSLRPRSRGPLGTGAVRVLPPRRRARVLASCSREPAAMNRGLEVERRRLLMSGLVSSFTIVLPISGAYAVMETNEDVKMNTQVDEINAYSFLYPVELPGKKFSFKWVESRKPERYSSAAPLSPDARQRIVSERVDMIHNVVISVSKVTTGQRMTESSVLDAHATEVDGEPYWYYEYLVRKSPTKSASEPNLFRHNVTCTAERDGYLYSLNASTLSKQWESMGPFLQQTVASFRLLPPTENYVPPYKDPWRFW

SEQ ID NO: 67226 - protein, 553 aa, Zea Mays
MAAAPAGAQNRCVFVGNIPYDATEEQLVQICEEVGPVVSFRLVIDKETGKPKGYGFCEYKDEETALSARRNLQGYEINGRQLRVDFAESGRNTDRNREKVDNPQNYCRRAFPTTLEFSVNMRSCIVFVPVNNNSCAFSDHPVSPVAISYKHVCGRGGPGMASNVDSQKRLAGTSVVGETNFHQPVGLPPAIHAASVMAGVLGGAQTANVQNGLPVQYGLGNDPLTHYLARMSRHQLHEVMAELKFLTTQNKEHSKTLLQGIPQLPKALFQAQIMLGMVTPQMMQMAKSQQPLGSLAQSSSHLNEPYPQPEPDAMVPVVSRPSSLPTNVLPNPVILQEQTAAIHSFPQHQHASQPQVKMFPHGQPSGITAQSPMLHQPLGGSSSVPIQSLVTSVGLTSQVQPPFVPEHPGPPVMPTSVQQLPLTHPHLALVAAAPETLPNEIRVADQASHLTEFTHPSKLRKLEDGTSVPGMVNSSHAIYTAPLQAVGPSGPSGSYSAGAGSLQQPGNEGQITPDVESALLQQVLQLTPEQLSSLPPEQQQQVIELQKMLSAGK

SEQ ID NO: 67227 - protein, 276 aa, Zea Mays
MEGVKAKQSHDALHLEVCSLQRNLQHASTLMDLCNQKLIHLEDKLRGWSERLRRLSEDGMQQSISLGISQTKLTGMHGEAPKLGQALNVLQAKVGSNRLEVAELLIELETERWFIHTFAFYSGNWFLNTWSNKFSFSSRFSKKRLDDDLDLMSSKASSLREKADNSQVLQKLLHEAKEYRGILKCGICHDRQKEVVIAKCYHLFCNQCIQKSLGSRQKRRLAPVSHTPELPGALLIPGICAASQRLRYQKVLRSTEKHSQFSSRSQLPETFSNKQR

SEQ ID NO: 67228 - protein, 175 aa, Zea Mays
MATSPLSCFSARPRPRSPGTAVWLLPAAVLLLLLNRWSHMASYPSVSPRGSGSVQVGRAELYSKMARDLDERGAAFLKGGETSQSLTLSDLFDTADDGAVVPRLKAADPPVRANVLYMDPKFAAVISKAVKDVFLPYFDQAIWFQNTSMYHFSMFHASHHLEPIVATEDEPKWRQ

SEQ ID NO: 67229 - protein, 82 aa, Zea Mays
MHLAPHIGPRDDDRASDVVPTTRCSRWTTQGRMDLTSGCSPSEYLPSKHSLSVKLKASPGFMHNRYICYFTALNVCRLVLCT

SEQ ID NO: 67230 - protein, 345 aa, Zea Mays
MAFAARRSIATRLSHHLTRRLHPCVPHSRTSDSLDEQASRPSPPLPLPLPPLHVQLKQRSREVQILGFLPFSLRLAGPTRRTFSSSAPAPNLEAAPAAEVDAAGVLADAAEAAASVPAPFPGEVAAAAADSFPPVAALQHIIDAIHTFTGLNWWVCIALTTFIIRIATVPLLVNQLKATTKLRAINPEMEVIKDQMNSMDPKSVQEGQAKMKALFKKHGVSPLTPMKGLLIQGPIFMSFFFAISNMVEKVPSFKGGGTLWFTDLTTPDSLYILPMLTGLTFLATVELNLQEGMEGNPMAGKMKYFSRGVAVLTVPFTMNFATFSVTGPHQTYSPCYMVLLSGDQL

SEQ ID NO: 67231 - protein, 523 aa, Zea Mays
MISAISGIMEDVVRIGSFDLDAVSGAYPTTLPSPRMVAAGRELQLIHSPRQPSSGFRESLNPIYTDHDTTTTTTTTATTDSSPLAAAANHAATAAAAAARADGGGSSVPARRHTASAAGNGRWEAIRVAEPPLSLGHFRLLRRLGYGDIGSVYLVELRGGRGALFAMKVMDKGSLAGRNKLPRAHTEREILGLLDHPFLPTLYSHFETDKFCCLLMEYCCGGNLHALRQKQPNKRFTEDAARFYASEVLLALEYLHMLGVVYRDLKPENVLVREEGHIMLSDFDLSLRCSVSPALVRSPSGRVSGGGGLAHGCMLPRILQVKKKKKGDKANKANKLDNETVTSKKPSSLEFTAEPTSARSMSFVGTHEYLAPEIIRGEGHGSAVDWWTFGIFLYELLHGATPFKGSGNRATLFNVVAQPLRFPDAPVVSAAARDLVRGLLAKEPHNRLASRRGAAEVKQHPFFEGVNWALVRSAQPPYIPDAAVDHCSHFACDGAAQGATPKSSARKTGSRRTDSSHVDIEYF

SEQ ID NO: 67232 - protein, 345 aa, Zea Mays
MAMAAQQHRHHKRRRIALSPSPSPSLAPIPGAPTPPLDSLADELLFLVLDRVAQADPRALKSFALASRACHAAESRHRRTLRPLRADLLPAALARYPSATRLDLTLCARVPDAALASAAVSGSSALRAVDLSRSRGFGAAGVAALAAACPDLADLDLSNGVHLGDAAAAEVARARALRRLSLVRWKPLTDMGLGCVAVGCTELKDLSLKWCLGLTDLGIQLLALKCRKLTSLDLSYTMITKDSLPSIMKLPNLQELTLVGCIGIDDGALVSLERECSKSLQVLDMSQCQNITDVGVSSILKSVPNLLELDLSYCCPVTPSMVRNFQKLPKLQALKLEGCKSWPMD

SEQ ID NO: 67233 - protein, 727 aa, Zea Mays
MAHLFLLDSSSEPSELKEFQQRFSVGQAVKGRVISVNQEKRLLRLKALDNQCTQPNIDETQEPKSSVFGQTKQGDIIGGRVQKILPGVGGLVVQIGPHLHGRVHYTEIVDSWVSEPLSGFHEGQFVKCKVLSVSRSSEGSLRVDLSLRSSNLIRDSNNSRLDDLETCTSRIEKIKDLLPGTEIKGYVKNVNSKGCFIMLSRMVDARITLSNLSDEYVENPQKDFPVGMLVHGRILSTDPSSGRVEASLRKTTGSKLEKLDDISYSDLHVGDIVDGQVKRVESFGLFVTIRRSELVGLCHVSELSDEPVVDINSCYKAGDMVKAKILKIDETRHRVSLGMKKSYFDSDLTADTNDDESALMDISVAPQMVEYHNRNLVHRKAEPRASVLPLQVSLDESEGSDLEDNISNTCLEIANGTEANAKKSDKQLKKEARKQRELEISAMEERALQEDIPQTPDDFEKLVRSSPNSSFIWIKYMATLLDLADVEKARAVAERALKTIIPREEEEKLNVWVAYFNLENEYGSPREDAVKKVFQRALQYCDPKKLHLALLAMYERTEQYELADELLDRMTKRFKTSCKIWLCRIQFALKQGKDVEYIKAIVNRALLSLPHRKRIKFLSQTAILEFKCGVPEEGRSRFELILREYPKRTDLWSVYLDQEIRLGDVEVIRALFERVTCLTLPPKKMQFLFKKYLNFEKSLGKDNERIQLVQQKAIEYVQSSLPSQDNS

SEQ ID NO: 67234 - protein, 198 aa, Zea Mays
MMSYRIVPHVSHINAEKCQYQQCHLGSTFVPELRGYFLATENFYFTSKFFGLKKSSSLSDFMFAGEQFCNQDLSTLRKKHPNRSDEDFSRYCFSMAYIVALLHDSLGVSLDDKRIEYSNQVGDIQVEWALGAFITLIQNASLKPLHTAVESTHSNRPLFAVLGMFLLCGVLFVSRWRKHKTKVIYDLEKGRYIITHIS

SEQ ID NO: 67235 - protein, 151 aa, Zea Mays
MERGSSWRLPAVVVGILVCAALFSPPAAALNIGIQSAGDGVACSRTCESDHCTTPPFLRYGKYCGILYSGCPGEPPCDALDACCMHHDNCVQAKMDYLSTACNEALLDCLARLREGTSTFNGNKCMIDEVIDVISLVIEAAVVAGRVLHKP

SEQ ID NO: 67236 - protein, 72 aa, Zea Mays
MSLAPAQVRARVVASVVRAGKMMPSVRPSRRVWMLVRRAPLAICGAWRRVAGLGRWPTRLAAAVESFCARRG

SEQ ID NO: 67237 - protein, 1063 aa, Zea Mays
MAASEREAALLTRVAANHLFLAQFEPLRAVLLSLRRRDPVLCADFLRAVAAAGGRVPGVLWSAPPACPSPSHLAWLAVLELAALPSTPNPEALRLKAEFLVLLQPIADDPAIGAEAREILTKLLDLGVTRLKLEVEGGGDAGASAEEASVKDLRGLWEVFLDNAFVFDALCIGVSRQIALDRGFGVDVLLWLRRNVQLAHLDAVKTLVTEGDLDAAPGHLRFLCLDHGLEKDEYKVVIAELLRKGWAKTSNYGGTWSELQNRITKLYGAALQSTSPELVQLVQLILDNILSEEIEDHDVSDANGMPLPFEKFLETLLLERDTDSDDKVLLDAAITSCKKDLYHYCRLSGKHMLEVVLETALSSIKREQLLEAVDVVSLFPLLHPLVAVLGWDILKGKTGLRRKLMQLFWTSKSQGLRLQEYSHYRSPTDETSCEEYLCDLLCFHLDLARFVSSVNSGCLWNLRNSLLFTQQEQGSDVNNAEILDPFVENLILERLAVQSPMRVLFDVVPGIKFQDAIELVGMQPLPSTTAAWKRMHDIELMHMRYSLQSVALALGEMEKCTGDENECYYHKALSYLREMQNFMEAIKSSPRKIFMVSIILSLLHMDDCAKLSQSVPSECYVSHECHDINIESEGKNVVVYFVGLLLDILRHNLESKGSDTDHLSSTGLSPAGRQALEWRLKHAKHSIEDLDWRLSVLKRLPPLSERQWSWKEALVLLRAAPSKLLNLCMQRENYDIGEEAVQRFSLPAEDKASLELAEWVAGAYKRALVEDAVNRVTDNTNAAHELDILSLRTQLGSLTTILLCVDVAATSAKSVHMCRFLLDEATSMLSEIFPGRSPKVGPTYWDQIQELATISVIKRILQRLHDILDLDTLPSLQVFFTEMSISSSTECSRVGQKQRPLGLLHQMIDDAFKGKRQFLSGKLHNVARAIVDEDFDTVYSKEGVNLEKKDILSSEKGILLGHGLRILKQASRSDLASSNVVDSGPEHKGSANRYLGPLSTKPSTYLSNFIIYTATIGDIVDGTDTTHDFNYFSLVYEWPKDNNACPLKSLSLKFKATARGLQR

SEQ ID NO: 67238 - protein, 243 aa, Zea Mays
MARYLLAPTSTSSSTFLPKDGVKNSPTSRPLRLRALGSRTSKARHIMAVASEQAAPPARYPKVAAPTTGPIPAAELLGVIEAAAKAGADVIMEAVNKPRNIHYKGVADLVTDTDKLSESVILEVVTKNFKDHLILGEEGGLVGDSLSEYLWCIDPLDGTTNFAHGYPSFSVSISVLFRGKPAASTVVEFCGGPMCWSTRTISASAEELTVMGKRFMSVRQTRWNNHFSSQVLDMNTMMPGRPI

SEQ ID NO: 67239 - protein, 328 aa, Zea Mays
MGSSSNTNTSGGASDKEEKKKEDKIKGKDSSGPSFKENERVLAYHGPLLYEAKVQRIENHEDEWRYFVHYLGWNKNWDEWVANDRLLELTEENVRKQQELDKNQVVDKTMKSGRSTQHKPKVSNADAKADKDDTKSLISVKGKKRKSQLGTEIQDKEKRSSHSLLVLQFPLPLKKQLVDDWEFVTQMGKLVKLPRSPTVDDILKKYLEHRAKKDGKINDSYAEILKGLRCYFDKALPAMLLYKKERDQYAEEVKGDVSPSTVYGAEHLLRLFVKLPELLASVNMEEDALNKLQLKLLDVLKRIRSPSLPLRTMVLVKVQMRIKPNDCM

SEQ ID NO: 67240 - protein, 486 aa, Zea Mays
MQEVSDPPETVRKAETKNITSIGKDVIFEQDPCSSYQLWGSMKFEEDGHLLSQAKRDLSHLDYRAQSADTKYVTELGSHACLKDPLPMGRDYHRQKLQFSTSDCSFEKASALEAASSSPDALGTMRTKIKSSTLSASPDYLSSYPTAAPCMRKCPGAVELDHGLGHSEHSNRRSDQFTLFSSRNGRSVEKCKEMVQYARGFHHADEINHVPFQWCFEDEGPSVSRGLQYGDEIPSLSRKKYNVAPSRSSQWHYGPQTALSSRRPDYGDEIPSLSLHYGYRDRTHLRSGNWCHDAEARIPSRYQQGTSHGNGHSRNCFSRINTNEQAKVITSKHTFAKPRMINRNCSDQHRINMKGNRWRNSEDLMDQVRGPRANKLNNASVSSTVKDITSPLIRRNQYNRSDFSVQYNQAKFFMIKSYSEDDIHKGIKYNVWASTPNGNNKLDAAYHEAQNLMDSGERCPVFLFFSLIFLEDYFNLILDQTVLPLE

SEQ ID NO: 67241 - protein, 136 aa, Zea Mays
MTLMKRQARAMSPQERGFSVILSDMCPPVSGITTKDGAISCELGMRALSLAVGKIKLKDSNYSDTLEKYLSSTEPESDEDGVLRRGGNLVVKFLENEDISGFGKFCKVKFKKVSLLRPKATRPSSREIYMICEGLR

SEQ ID NO: 67242 - protein, 55 aa, Zea Mays
MRGYIEDRREMFELLLHRLRTKSIMEAMDALPSIFGACRLKNRPHCKSTSMSLVF

SEQ ID NO: 67243 - protein, 346 aa, Zea Mays
MALNMKTLTQALAKASAVIEKTVSTTVQEVTGPRPLQDYELLDQAGSGGPGLAWRIYTARPRDGAPSAPYPVVSVWVLDKRALAEARARAGMSKAAEDAFLDLVRADAARLVRLRHPGVLHVVQALDETKAAMAMATEPVFASVANALGCLDNVGKVPKEVKGMEMGLLEIKHGLLQVAETLDFLHNNAHLAHRAISPETVFITSNGSWKLGGFGFALSVDQAAVGLSLTSSQLFHYSDYDVEDTALPLQPSLNYTAPELVQSRDSKVGSACDMFSFGCLAYNLVARRPLLDCHNNVKMVLLSSGMIRGCALFVSLTICLYVFIIPLDKLKGCNLLFLYQSFFFAV

SEQ ID NO: 67244 - protein, 204 aa, Zea Mays
MDMEEDPAGGEDLSSTAASGHSCSGDDGEESGWTSYIDYFMETQQRRRRKQGDVSRAAAGDGPSTDDDAGRRRSSTAECSSGAGVGASSSCLAPPVLVDPPVVVVSRRLSLREGWRRKKVLHDESLEDTATSPISSPKRKNSTGGDVNNGANTRTDTAAVKEDSAAYSNDDEAEEEISRPNLVGPAYACFSCIADGDANKFIGC

SEQ ID NO: 67245 - protein, 485 aa, Zea Mays
MAAALASSPLVHLSTSRLRLPRPRASSSSAPGCSIGVCLGWRLKVGWRALRRCDRLRCFSTDGDGVEEGEKRGEEEASATAAPAPDPAPAETQVGAAEELASERSRSGSFSSSSSSGNPGVSSEPPLLSFSVDNIDTVKLLELLGPEKVDPVDVMAIKEKLFGYTTFWLTKEEPFGDLGEGVLFIGNLRGKREEIFAKLQRQLRELAGEKYNLFMVEEPNSEGDDPRGGPRVSFGLLRKEVSEPGPTTLWQYVISLSLFLLTMFSCVELGIASKISSLPPEIVSYFTDPNSTGPPPDMQLLLPFVESALPVAYGVLAIQLFHEIGHFLAAFPKNVKLGIPFFIPNFTLGTFGAITQFKSILPDRKTMFDISMAGPVAGAALSFSMFFVGLLLSSNPVGASDLVEVPSQLFQGSLLLGLISRATLGYRAMHAATVSIHPLVIAGWCGLTTTAFNMLPVGCLDGGRALQKTGLYSASHDDGATTFCF

SEQ ID NO: 67246 - protein, 482 aa, Zea Mays
MNCSSCCAAATPSSPALLARPRGGLAASCSTTTANQKVLFLGSKQFPRITYSRASSRLSRREVIAFAGQQPWDIGRFVKTLYFFNGPPNLLKIVESIISSFTGPASSEVPKKMETSDVVLVTGATGGVGRRVVDVLQKKGVPVRVLARNVDKARSMLGPDVPLIIGDVTKEDTLDPKLFKGIKKVVNAVSVIVGPKEGDTPDRQKYKQGIKFFEPEIKGPSPEMVEYIGMQNLINAIKSSVGLSEGKLLFGFKGNLSGEIVWGALDDVVMGGVSESTFQILPTGSESSGPTGLFKGTVSTSNNGGFTSIRTKNFTVPEDLSAYDGIELRVNGDGRRYKLIIRTSYEWDTVGYTASFNTTKGGWQSVKVPFSSLKPVFRARTVTDAPPFDASNITSLQLMFSKFEYDGILNPTFTEGPFELPFSSIRAYINEPITPRFVHVSSAGVTRPERPGLDLSKQPPAVRLNKELGSILTFKLKACSFY

SEQ ID NO: 67247 - protein, 52 aa, Zea Mays
MTTTSPCMHMYSGLHTRCCSGSPHILGHRTAHNSRNTLQFIRRAGVPRPHNY

SEQ ID NO: 67248 - protein, 681 aa, Zea Mays
MFCIPFNAYFGGIMNFIVYLANCSTCIPIRFLGNNSLTGGLPSSIGPSIKYLDFSYNYLSGNLPSWASHNLQFVLPAGLECLQRNTSCFLGSPQSSSFTVDCGSSRSVFASDNSMYQPDDANLGVASYYISSPPRWGVSNVGRFMDTSNGSYIVNSSRRFQNTLDSKLFQTARMSASTLRYYGFGLENGDYTVTLQFGEFDFEDLQTWKSVGRRVFDIYLQGERKEQNFNIKKAAKEAGEASTSYTAVKKQYTVPVTKNILEIHLFWAGKGTCCIPNQGDYGPTISALSATLNTKKKGNKIGVIIGVVIGATVLGLAILATLCVWRHKRRKVSLEQQELYNIVRIPNVFCYTYGELRTATENFSSANLLGEGGYGSVYKGKLVDGSVVAIKQLSETSRQGKKEFVAEIETISRVQHRNLVKLFGFCLEGNKPLLVYEYMESGSLDKALFGNGRLNLNWSTRYKICLGIARGLAYLHEESSIRIVHRDIKASNVLLDATLNPKISDFGLAKLYDDKKTHVSTKVAGTFGYLSPEYAMRGHMTEKVDIFAFGVVMLEIIAGRPNYDGKLDQDMAYLLEWVWQLYEEDHPLDIADPKLTEFDSVELLRAIRIALLCIQSSPRQRPSMSRVVSMLTGDSEAPEAVSKPSYVAEWQSNTEGTSSSVSTAEAVSVAPFLNPVVDDGR

SEQ ID NO: 67249 - protein, 235 aa, Zea Mays
MKETGVTVVLRGKDSENLGSCHSEASQQPLHLYLTSMHLKNLEAAKVLAENLLDTVAAEFGASRISSSKVYGAVPPPQQLLAGVDTSGTKSDVHYIVGPNVLSGATHSFASTGVIAPVVAPAVTVQSGAPTYSGVPLPSNMAYPIPPANGGAFYSGYGDIYPQATPLQQLAFTLKHASSSATQAVPVTSTPTSMATKGNSILDAEMDKRSRRKFQELPVSKGPATESQVQFFFLV

SEQ ID NO: 67250 - protein, 110 aa, Zea Mays
MDLLSSGTSFEEAVKPRKWLNPTDWGRRAWCRSRLGPHEVNSEARMATTMTPTTSSPWTPKLKIMLAVEPLIPSEGPKIGEHISVTRNGKCAYMVLIAVRLASSKLGDLP

SEQ ID NO: 67251 - protein, 660 aa, Zea Mays
MEPRRRERRVIAIAGAAALVAVGLNIAFSAVVAHRRRKRRELPGFTAQVNLSAAAIKRTTDRIISKSRETYDSVAAVPLDKVSFANVIAPLAELDALQFPLVQACVLPRMVSPSEDVRKASAEAEKLLDSHFVLCRQREDVYRVIKAFTVKGERIGPEATRFLQFLVQNSFATYKFDREDELAGMPFEFLKDLEKADGKFKVPLTSYHVTPVLEHCKVGSTRKQIAVAYGQKGGKDNVAILENLVQLRHKFAKLLGYTNYADFAIEPRMPKTSRKILEFLEEMSEQLSDVANRELNILKDLKIKEEGNAQFGMEDLLYYIKRAEEFKVDLDVGEIKQYFPVGLVISGMLKIFQDLFALRFDEIKDVDVWHDTVRVFSVWDASSSDLLGYFFLDIFSREGKYAHTCVVTLQNGCLCSNGTRKVPAAVILSQCPKEFDGNSALLRFPEVVRLFHEFSHVVHHVSNRATFSRFSGLRLEGDFAEIPSLLLENWCYESISLKMMSGFHQDITKSISSEACQSLKRRRDLFAGLKMKQEILLCLVDQIIHSSENVDIDDLIKDLHPKVMLGIPLLEGTSPASSFPRIAFGYDAVCYSYIWSEVFAADLFVSKFKDDLLNQHAGLRFRNKVLAPGGSKDPLEIITDYLGREPSLQPFIQSRTRNSL

SEQ ID NO: 67252 - protein, 68 aa, Zea Mays
MNTPQPSTIEDPQGNNQAHTLSHLSNMMPTTTQVADLLCCLLEDIFFLPHNQVWHIGRHHHGDILHIQ

SEQ ID NO: 67253 - protein, 98 aa, Zea Mays
MWRTHVRRDRRPCGGRIAMPWPNGRRQRRRRRQGHPGQVPGTRQLSAPAPGRPRVAEVRLLRVAGEPLSSLECWRKKWATGPRGRQNPGSTRLPPQRG

SEQ ID NO: 67254 - protein, 136 aa, Zea Mays
MGSSGADTPSKEQQPPATSGAAIPPVYPDWSSFQAYPPIPPHGFFPSPVASSPQGHPFMWGAQAMIPPYGTPPPYVMYPPGVYAHPSMPPGAHPFTPYAITSPNGNADATLVILMASPLKAKIKVQQSDPKEVWAA

SEQ ID NO: 67255 - protein, 421 aa, Zea Mays
MAYAAAVTLRRVVLVSAALRLALVVFGEWQDAHLEVRYTDVDYLVFSDAAASLATGGSPFARATYRYSPILAFLLVPNSLLHAAWGKLLFSAADLLVGLFINTILELRGIPEKMRMWSVVAWLFNPFTFTIGRVLQAAFWYGFIVHFRIYPIIYAIPFVIVLGKGYAGPVGRPTLTMWRSKQQLQDDKVSQIEEPTSFLATVWGFLSNFISRNGILFGLLSGSMFFAWTGVFFYLYGWDFLNEALLYHLTRTDPRHNFSIYFYHIYLHHQQGFSSIQRLASFLPQLIVQLALILRFSRDLPFCMFLQTVAFVAFNKVMTAQYFVWFFCLLPLILPWSSMKLKWKGLACAVVWMGSQLHWLMWAYLLEFEGRNVFVQLWVAGLMFLAANTFVMLMVMKHHKYTLLFSTPLKSGNKVATKKEE

SEQ ID NO: 67256 - protein, 208 aa, Zea Mays
MRVKREQEREAARLAVRMMKKTVDIDNSDFLKELENFSKTWQSNPPGKLIVDFIDGDLPPGLGSPLERLGLFMKNDLEDEVEQEVEDSASPSMDVDMRKDLAGHEMQDSISPVKVIGTKDDFQGADINTRKDFQEDAAGHEMQDCISAVKVIGTKDDFQGAVGHEMANSLSPSTFVDTKKYSEGTEHEMVDSISPLMDPNTEEGEISC

SEQ ID NO: 67257 - protein, 389 aa, Zea Mays
MANTSSDTLDSSTVQEKPVVPGHIISEISSHVQKEESAVSKRRSNNEPSLCIAVIGATGELARTKVFPALFALYYSGFLPRNVGIFGYSRKKLTDEGLRSIIEANLTCRVDHHENCDDKLIEFLKKTYYVDAGHDNQEGMVRLNSRMSQIEGIGAANRIFYLAVPQEALLDVALPLADGAQTKQGWNRIIIEKPFGFTGLSSLRVTQSMLSRFEEKQIYRIDHLLGKDLIENLTVLRFSNLVFEPLWSRTYIRNVQVIFSEETSNEIQGRYFGNYGIIRDIVHSHILQTIALFAMEPPVSLDGEDIRDEKVKVLRSIRKVNLDDVVLGQLKDMSGKVDRYTKSMIPTYFAAAMYIDNARWDGVPFFIRTGMGLMTNRSRHKRAGSTRST

SEQ ID NO: 67258 - protein, 616 aa, Zea Mays
MSTHIIQLLQGLCSDGLWRYGVFWSFKSETNGWILTWGDGYVNKMIEDWQMGDLSASPTVRKNQTIPSSWCKKSYPFCPIEAALMRMPSHLYPLGEGIIGKVALTGQHCWISANELCSTAMHKYQEDWQLQFAAGIKTVLLVPVVPHGVLQLGSLDTVFESAVLVALIKDMFHKICDASVSHASLSTGSAYSNNLSLPTATLSINHPDVNLIYSSAQIVNADHHSLTHPFSTSEIPILEDITIGSYRTIPTGWPNGLLGDNGTIGHEYFEGFSLTDMAHWNQENTHGSTIVVNDGAMLSNTSIHSEFHGDVMVMSREEHELFTWRCRLKQEPTSPALPQLNDNSADLYVQLETNNYAELLLDTIIYQTGHTSNIESAPSAESPISCKTQVKKDHSLRVDESPISDIPGRQDLSPISINEGFISCAMTDGRVEINKTIPEECLVENTHRINSAEIKRRCRKVELQRPRPRDRQLIQDRMKGLRELIPNASKCSIDALLDKTIAYMLFLQSVSEKAEKIQNTLEDKESHDETKKQLERCPLRVEELNQPGHLLIEMLCEDYEVFLEMAHVLKGLKVSILKGVLEYRSDKFCARFVIEGSDGFNQMQILCPLMHLLRRR

SEQ ID NO: 67259 - protein, 352 aa, Zea Mays
MAGVPPPPRQLDVRRFAAARASELRSLYAAVSSRLDDAGGRHQPRSARRRTTGHLPSKRRRRGAGEVGPGDDDGLPARKQSRRVRRRRELAANPAEGFSVAGDGARRLRTHLWYAKRFSMERRWTFILPVGAQGRGKGSRSVLKRLKNGTTIHDAGYFIPIELDGPEDALLSVLRMVLRPSPAEKTPDLKHLQDQVMRGVCYENAMLWDVRSMHSQIVGPVTYMWRPFSRADDKSGIEGDQCTSHCIHDESGNSSRRQLWIWIHPAALDDGISAIQFACERQIQDSGGVVKCCSLEGKIGRLEVNGCKAMQSLKKILHPTSSSKINTISTSDISASTDTLLDSWNCGTPGKP

SEQ ID NO: 67260 - protein, 456 aa, Zea Mays
MLKFELMYAPTLENGSELQASSVTSSAAVHEFRIPHRALLGLHSYCPVHFDAFHSVLVDLTLHIVYLKAGATKPSLKVPDQGLGPTSYHIVKALLTSRKLLLEELKKISGAIGKTVEELDVADLNLGRYESFNPSKSGLPNSSKVFPATGKGVGQLTGVLHDFLEKNNDMVNGTDDSMLVNKTKILEYLHDAWAIDRKAEWSIWTVHSKIEIPHRYLRSMNDESSHRHSLLRVSGSRKFHDDPAQNSASRAELHRKSIAQMKNNMSWLFHSIVPARIWLRMLLNKRILLCYLNYKESLWYPKVVLGHHLDLRLVRNQWLLLDPGADCLMSEANEDKTSGDFKEMGSRLAGEVIAFLKKKMDKLSRYGGCKELKLSFVGHSIGNIIIRSALAEPALQPYLKNLYTYMSISGPHLGYCDDQDPHNTYFYKLCKLKTLENFKNIILLSSPQVIPFSHLK

SEQ ID NO: 67261 - protein, 265 aa, Zea Mays
MRFVVTKVCSGGGKARAGALHIAGAGIGIETPALLLSTRKGLPAFLSCDLLASLPLPDSLLLHVCPTHFIEGPPVKTISAIRGLHGMLGLPDHILVAAASDSIESLPSCEATNKFGASFETPSGRRLVKPSDYMELISCMKPNIWASLADEVPAWVTEKRNKVSVDRTLRWLDACIALDVASGTNSFGVIVGGSSLEQRKLCATEVSKRNVSGFWIAGFGFGESIEERCTLLNATTDCLPREKPRLVSRLGLPDTFTNLLWVVSH

SEQ ID NO: 67262 - protein, 389 aa, Zea Mays
MQPSGREMQGGGGAQDDFFDQMLSTLPAAWSDLGSGKSPWELPAAAGAVTEDTAALDEPALLASRLRHHQIGGGEKPLMLHLSDLHGLGAGAGDDAGFMPLPLFTQHLARDDVDAAFKSPNAAGGDRELYNGFGAAGNMHTAAVHQPPPFGQGGSMPAAPQSFGGGGPAPAAGAASGGGAPPRQQRQRAKRGQATDPHSIAERLRRERIAERMKALQELVPNANKTDKASMLDEIIDYVKFLQLQVKVLSMSRLGGATAVGTLVAGIASEGNGSGDGTSDSGKGNAANGENGGGGSLQVTEQQVARLMEEDMGTAMQYLQGKGLCLMPISLASAISSATWPSLLSRPSMGAMGDARGPLHDGGSPASPPLVNCGDDSSTVKDAGAGGKR

SEQ ID NO: 67263 - protein, 63 aa, Zea Mays
MIQVVEVSTSKTGKHGHAKCHFVAIDIFNGKKLEDIVPSSHNCDIPHVNRTEYQLIDISEDGL

SEQ ID NO: 67264 - protein, 1248 aa, Zea Mays
MASSTKSDLVSGSPDGHGYFNAQRGSYAAASLERSGSFREGGDGYAMFSASNSSRSAAVNSINLVQSLALDLRPATVDHKTSRLDLKKSISSIFGTSAEDSTSLPSLGRNLPNAIEEIRRMRSNLNDNSNKARERSRAFGGAMAKIDKLCPNIVRKRSRGDSSSNERSSVLSSGGVTPKNVPQSHLNADDMEAGLQREERTKNAGQNRRIRTSMVEMDARTAGPSRGPGPTDRISDPGKATNGSSAVPEEKIRGLATTIDGWEKPKMKKKRSTIKADMSLAGVLRTVDVDRESKQGMQHKFTNDGRARMTSSSFRSGTVASGTTKADLLSTQNGLVMRPLNRSDQDNGFHPTNKRERQAALDKETPNPRTINKPNEDDSGCNIASLPKANGSARGPRSNSGSILKSYPNIHRSQASSDDWEHPSGTNKLISAGGSGIHKRTKSTHSLSPPIQWGGQRPQKISRSARKSNLVPIITTDSALVPGSLDSPVNEDCAGLPRRASVNSLQQTKRGDHGLSTGPEGNEPVVAEKKLRDKGKRAGELDDGHGSGFQKIAMLGHPSKRNKLPADEDIGDALRRQARVVPGFTLTRPGTPVSIDKLENAPITKQRSVRTVSERTESKSGRPLMKKISERKSNARPRHTSSSVQSDSPVQSEDDHEELLASANAALRSACASTFWRQVEPFFAFLTAEDITYLSQQIHLPDDSSSSRSMEGGECQKYKGGLEYISHPSTPAASNKDDHAALPNGFGLNQLDNDIGVGWEASCIEPILDQLVHGIGVPGWSSVGQRLIQALIDEDRIDSITNNTYISEGYAFDTHEIHFDGGGWKPHSNNYKLEPLANFEASRRGPNGLTMDSDWKYNDVSNRSGNVMDKTKVWPEFQYSEMCFNDRIIIELSEVGVSIEPVSEDEDINAEICKLEGQLRKEVVEKKNLLLKLDGIVATAKESQHREFSRLAMDRLLLRAYEKYMAFCGPNVSSSKNVNRTGKHAALSFVKRVLVRCQNYEEAGTSCFDEPIFKDMFLSATSHRRSLDTASQDNNTTARPVHRAGAPDASRGSSHPTDLSFAKEDPWTNNVKQRELLLDEVVGSITGGALRTSSSVLGISLVSNTKGKRSEREGKGHNRDSLRSGRPSPSNAKGERKNKTKLRQKAANISAPSGGLQLPAKTTPPSSGNGKEESAAAAAAAAARHGGDPAANASNDAEMPDLANLELPGLDADFGGWLNLDDDDALQDLDLMGLEIPMDDINEINLMI

SEQ ID NO: 67265 - protein, 116 aa, Zea Mays
MSSLIGVFSFLEMTHGFLTIPSTWGFQSNGEMELPINHWLNQLPACPGLSPPVQASDHRRWEHIARNVRTSLQSFPHALCSLVGSIKRGSNVLLLQIIDVNSDQVYAFVVYITKGS

SEQ ID NO: 67266 - protein, 479 aa, Zea Mays
MESRRGGSGAAAEDAGGAMPSFGPTQHAIRAGADVNSMQPSRVTDFGALAQSAGFRIEDLANLNANALFNLKPNSHTIDNSPLQFGNYGKSISPHINTTEATTAATRIDPQLSAQQTGAQPILVALPTGNMENWGESAMAGSPMTDTSTDPDTDERNQMFEQGLVAVPTASDSSDKSRDKLDQKTLRRLAQNREAARKSRLRKKAYIQNLESSRLKLTQLEQELQRARQQGIFISTSGDQPQSTSGNGALAFDMEYARWLEEHNKHVNELRAAVNAHAGDNDLRCIVDSIMVHYDEIFKLKGVAAKADVFHVLSGMWKTPAERCFMWLGGFRSSELLKLLAGHLEPLTDQQLVGISNLQQSSQQAEDALSQGMEALQQSLAETLASGSLGPAGPSGNVANYMGQMAMAMGKLGTLENFLRQADNLRLQTLQQMQRILTTRQSARALLAIKLRSSKGITVLRRSSFMNNQESCSSSMYWG

SEQ ID NO: 67267 - protein, 58 aa, Zea Mays
MTTDCGEEGPCCMGTECHDWPRGGSGGAKLPGGCSPWTAEGGRKGSLGEEGKEDACVG

SEQ ID NO: 67268 - protein, 109 aa, Zea Mays
MSKLGYDGVVALLVADISLSIGLDQIEALYQYAQFQFECGNYSGAADYLYQYGALCTNSERNVSALWGKLAAEILMQNWDLALEELNRLKEIIDSKVLECYTDKCTPSY

SEQ ID NO: 67269 - protein, 365 aa, Zea Mays
MAASNSRTKVNNVSPGGSHPLLTPCLEGLGKFSHLIDLDFMGELISCLKKLSGYSDRQDEIPNDNALSVSERLQCCIVVFKVWRSNLEALNVDLQDFFVQLYNLILEYRPDRDHGEVLADALKTLLWEGRQHDMLRAAAFIKRLATFALSFGSAEAIAALVTLKHLLQKNSKCRNMLENDSGGGSLSCLVAKYNPEATDPYLSGALASVLWELSLLEKHYDISVSSMASNILSMANLNPTQNPVPILNVNPLEAYRDLSLERELSKPASKALPLNLKRKRRAKEFVALSPDVLQKADCSVDKDELEEKLQSHFSVLRGISENERLRAELNHTLSSINMYKEYKKQKRKNMKVKTGRKKNSKALAV

SEQ ID NO: 67270 - protein, 72 aa, Zea Mays
MPPRTRKTARKSTRPIGVPRHQLAPRHEDSSSGSNDPIGDLEAQVDQLRTELRRRNNLWVADGERINELRTE

SEQ ID NO: 67271 - protein, 519 aa, Zea Mays
MTRCLMFMPPLFLVSSLISTVGLPVEPPAELLQLGGDVSGGRLSVDASDIAEASRDFGGLSRAEPMAVFQPRAAGDVAGLVRAAFGSARGFRVSARGHGHSISGQAQAPGGVVVDMGHGGAVARALPVHSPALGGHYVDVWGGELWVDVLNWTLSHGGLAPRSWTDYLYLSVGGTLSNAGISGQAFHHGPQISNVYELDVVTGKGEVVTCSETENPDLFFGVLGGLGQFGIITRARIALERAPQRVRWIRALYSNFTEFTADQERLISLGSRRFDYVEGFVVAAEGLINNWRSSFFSPQNPVKLSSLKHHSGVLYCLEDVDALLGELNFIPGTVFTTDLPYVDFLDRVHKAELKLRAKGMWEVPHPWLNLFVPASRIADFDRGVFRGVLGGGTAGAGGPILIYPMNKHRWDPRSSVVTPDEDVFYLVAFLRSALPGAPESLEALARQNRRVLDFCAEAGIGAKQYLPNHKAPGEWAEHFGAARWERFARLKAQFDPRAILAAGQGIFRPPGSPPLVADS

SEQ ID NO: 67272 - protein, 110 aa, Zea Mays
MWDHRYTHLTHARDTQCTQEVPSNYLTVSFKLYDMDSTGFIERKEVKQMLIALLGESEMRLSDDIIETILDKTFSDADANQDGKIDRTEWENFVTRNPSLMKIMTLPYLN

SEQ ID NO: 67273 - protein, 690 aa, Zea Mays
MAGTHKKRMEDRFGSFFSFDEDSESEDISLDELEEELKEHKNCDVLVTILTNGEKQRGMATLVEGDLGHTEEALIQDYIEDNDSLVLLHDQIHDCDVILSQIGLILSGFQTHICSISSEIRSLQEKSWDISLKLKNRKLVETKLAGFVEEIVAPPGLVNILVNGEVNEGYARSLEILSRKLKFVQVDPLINASKALNDIKQELERLRQKALSKISSHIMEIFFAMRNPGTNIQILQQNLLQKHRYLVLFLKEHGSETYGDLCASYVDTMNKVLSTYFHVYVEALEKLKLEIGVPSDFNGHDTSIIDIIIRGREHLRNHGFMFSLGERANILKEIHQPGLVPHISQGNSRTYPYEVIFRSLQKLLMDTASSEYLFMESFFGEESLFYQVFEGPFAVIDQHLDITLPNCHDAVCLMLIICITRKHQLVMCNRQLSCLDNYFDKALMYLWPRFKVVFDMYIQSLYQCDAKTLWIDGTHPHHIARCYVEFTASLVQLNAECGDGQLDMNLERLQSAIEFLLVRLAQTFTTTKLQHLFLLNNYDMAISVLKETGDEAKKLQKYFEEKLESNMMAFVDDLLMEHFSDLLRFVRSHVSEDLVSYTENTNIADVEPVVKNFAMKWRIALELMHNEVITSCTNLLSGMAILKAAMTQLLNDYNRLSECVKKITGGSTLNRHMVSITSISYEIRKYSRTL

SEQ ID NO: 67274 - protein, 312 aa, Zea Mays
MACGSLEKHLFRRVCLNMPWSTRMKIALGAARGLEYLHGAERSIIYRDFKTSNILLDADYNAKLSDFGLARTGPSGDQTHVSTRVMGTYGYAAPEYVMTGHLTARSDVYGFGVVLLEMIIGRRAVDKSRPSREHNLVDWARPLLVHNRKLFRIIDPRMEGQYSTKAATEVASLAYRCLSQNPKGRPTMSQVVETFEAVQNMPECQDILLQNSITGAVTLYEVPKEPADRVELEKAKQEPAVKSAAMPPMNGKPVPQSRRTRPGNGRSKSEPSLECKMYIPSPDSDGHQLGLEAVASPDGSIRDPPDEDLYKI

SEQ ID NO: 67275 - protein, 479 aa, Zea Mays
MNVLNCRSGKGEYRWLNTCGKDGVLTSAIKTRVKMEVAAWEANVPLKSKKMDKDYDSNDRECFSCFYDLHLSAVSCQCTPDRFACLNHTNLLCSCGMDRKITFFRYSMEELNTLVAALEGDLAAVCCWVQDHLGLVCQSGSLKHSKMDSCKSTEFSGLAIDANHVSVFGGIQNQCHDLQKPAGFQQEKGIQDNCLNLNIEDPPCSSRIKEEHGKDRMFLDHRPLQKTDSPFRMSSECSSSLSLYCSGNLVSPSRNQASNSGLACNTTKKLFGVDIGNLAKHSNGQVGQMVMASGQSDASSRPMSGHQVEPLDYGMVMIDKRWFNNQAIFPKGFRSRVTFYNIQDPTAWCFYVSEVLDAGPLGPLFKVTLEQVPDVSFTHTSPMSCWDSVRDKVNEEIENLQGIGKCGVPNFLPPDSVNGLEMFGFLSPQIVQEIEALDPHHQCLDYWLSKSAVVPASMRTLEKLPKKAKLPDGQKLSSI

SEQ ID NO: 67276 - protein, 184 aa, Zea Mays
MLLSGSTAEIKQPEHRYFGGHGGQGRDKTNIVMAWVYGQAPIDLASNLFALASNLLLTCTETLALPSTLLASRPGNGSTVHLCLHCTVLLQMKSGCSLKNGLENEFWTSMRVCRPRKIWWEKSCRRREGISGAWRRKKKTKAGILMYSAWNIWKYCNRPRTFKGSTRANTGPDLGLIKKELGSL

SEQ ID NO: 67277 - protein, 856 aa, Zea Mays
MCKVAPLVLTECPYSGSYPFLALVCHLLRHKDVMCLWWKAEDFVFSFEGFLTRKIPNKQDLQCLVPSVWWPGSSEDEVSMTLTMTTLSDAIKKIEEMHRELCSLVICFIPPMSTPQPPGSVFRSFVQSLVLKARGGDHRMVVNGTFNNTVLVSLYTVILHLLSEGFSMDSAGSASSSKANFGNGVGFLHKGGKRKFPTQLFFRNDAYHSVIPRIGGPPSILMHHQFDAVENEVQWDEGCMNDEETRVTHTTAQKPCCCSVTDVAVGLRYKETAKYVPSTSKGSCKPMPERSPHVAAECNGRGLSDEIEDKPSTSAQSEIEYGYQSLHSLENMPMATQSSSETLKEEELLDVMLLLYHLGISPNFRQAFYFMSQQSQSISLLEETDRQIREKSCSEQVRRLKEARNSYHEDLVDCVRHCVWYRATLFSQWKQRGMYATCMWVVELLLVLSNSNSMFHYVPEFYVESLVDCFHALRRSDPPFVSPALFLMQGLASFHFDDTRIVNPDLKDLLLQSISVLVQYKEFMLVFENNREAINKMPRSLLSAFDNRSWIPVTNILSRFCKGSGFASYKNGESASSATFQVLLRETCIHEQELFFSFLNRLFNTLSWTMTEFSMSIREMQDKNQVADLQQRKCSVIFDISCSLARILEFCTREIPCAFLMGPDMNLRRLTELVVFILNHIISVADAEFFDMTLRRPGQHQEKTNRTMILAPLVGIILSLMECSSTSERRELNDVIAVFASMDCPATIHFGLQYLLSYNWSNVLRGDSSLAKLAQLKEFSHYFRRITASVDGEEEDHSLNAGDEDDDHTCCICYNCDSDATFQPCHHRSCFGCISRHLLNNQRCFFCNAVVTSVTR

SEQ ID NO: 67278 - protein, 375 aa, Zea Mays
MFRKAPLNVINSRAFEIMLEAVGQYGPGYVKPSYHDVRVPLLEKAKSVDEIKTTHELAWTEFGCTLMSDGWTDRRGRHLINFLVNSPTGTFFLESVNASSETADAQMLAALLEKRIDAIGRDKDIGKIGEFKKCISHARQVTTFIYRHSKLLDATREKIGGDLVRPAVTRFATSFLTLQSIYKHKQALRCLFVSDDWTRSKLSSTEAGKKVTEILLSTNFWNSVQDCIRASQPLLIVLRIVDGDEKPAMPEVADAMDMAKAKITSGFEVREGDDLAWAHVDDAIGASSSLQGRNFPRRARYESVYSRRCQAAATQEERVMEEEEQSNKGNEQDDEEYMPNDDEVDDFGESPHDSPTQAGADCEENAMDDLDLGDI

SEQ ID NO: 67279 - protein, 308 aa, Zea Mays
MESAFKQMKGEFVGLLIRREVMQGRFSSFLLFWVEPRGVIPLELSGCISQVWSPWFKGDPCVGAATDGTSIYADKMNPGIKCDCSDHNNTICHITELKMNKLDVVGPIPEELRNLSHLTTLNLQQNYLTGPLPSFLGELTALQQMSLSGNALSGTIPKELGNLVNLIILSLGTNNLTGSLPSELGNLVKLEHMYIDSAGLSGPIPSSFSKLTRLKTLCASDNDFTGKIPDYIGSWSNLTDLRFQGNSFQGPLPSTLANLVQLTSLRIGDIVTGSSSLAFISNMTSLNLLYSQLIIHFMNQTAPSFAPL

SEQ ID NO: 67280 - protein, 341 aa, Zea Mays
MNSLLRPPLPGPTPSLSARRMVSPPPAPVRVSSAALAGSGRRCRLGLAVAASAAPSWMEEAGVAVLEEGGRRNPSVSDSYRPAGLPRPNATVLEAQARVCTGPAQTRPLGEEQAMRVLDTILRSAMGELKEEPVSSAQLGAFFAGMTIRSNSFPEATQWSEGERRAMSIFWPRLVQILPPEVKFIADPEGTIMGANGLTGPRYVGQGTGEMRLVGALREVLAGGHLGYEEVQCVLKDILPIGPSSDLTVTSEALLAAFLIGQRMNRETDRELKAYCLAFDDELGPPLVADVKSLTHYGEPYDGNTRFFRSTLFVAAVRACYSESCLLHGVQWMPPKVFRVE

SEQ ID NO: 67281 - protein, 268 aa, Zea Mays
MHILQNLKGLMTMQRPPRCSHCSICNNCVERFDHHCPWVGQCIGLRNYRFFYMFVFSTTLLCLYVFGFCWVFVVKIRNAEQITIWKAMTKTPASVALIIYTFIAVWFVGGLSVFHLYLMSTNQTTYENFRYRYDQRANPYNRGIMVNIKQILFTTIPPSKNNFCGRVQQEHGLRPRPTNGFMSPNMGRAVGDIEMGRKPVAWDEPRMAAEIGDLGAGLSNLLEDKDGRFRSASPDLSRDALAVGGGLEEEGSSAMNAGRSSWGVEAGR

SEQ ID NO: 67282 - protein, 994 aa, Zea Mays
MAEPTPKSKRTKKAKKPSAREGDGEDMDTLKSDVATFASSLGLLPGAGDSNGGFDDSDFRKSGPMYKSSKFPSKQPHQKPDNTANPHLNPRPTKKPHPLELRDSYAATKPGAVNTNYPLMKAAALSGQWYTDADELEARVLGGRKQVPPAVGLQEMQGIVERKRELAEKLMLQYAREYDAVRRGHGDLKLLDISAKSGTSADKVSAFTCLVEDNPIANMKALDSLLGMITSKVGKRYAFTGFDAIKELFLMRLLPDRKLKSLIQRPLDILPETKDGYSLLLFWHWEDCLKQRYERFVMALEDAVKDMLPNLKDKAMKTVFMLLKSKSEQERRLLTALVNKLGDPERRAASSAAYLLTCLLAAHPNMKMVVIDEVDSFLFRPHVGLRAKYQAVNFLSQILLTNKGDGPKIAKRLVDVYIALFKVLMSSGDTKGDTYSKDSKKKVGKIEGGNNKMDSRSKGNNEVGSTAGSDLELDSRILSALLTGVNRALPYVASSEVDDIVEVQTPILFRLALMLLFQISIKNNIASDRLYRALYSKLLSPSAVTSSKPELFLGLLVKAMKNDVMLKRVAAFSKRLLQVALQRPPQYACGCLFILSEVLKAKPPLWGIVLQNESVDDGDEHFEDILEIPEDSSVASAVLHKHNEKVAAHEKHNLDAADGIDSVKQVNLVDENNASTDSSRQHAFYDPRHREPSYCNADRVSWWELTVLASHVHPSVSTMARTLLSGNNIVYSGDPLTDLSLPAFLDKFMEKKPKGNRIAEGRWHGGSQIAPAKKLNLNHHLIGEELLELAENEVPPEDIVFHRFYLNKTGTVKRKTKQKDSVLDEDAGELLADNDADEASDESGDEILDLGDGLADDGEYDYDDLDSNAFEEEKDLLRDDSDVEFDDVSDDTASGDEGSENDDDIPILAGDSDGNLSDDEMVDAGKGGVSYTKKRRAGKKSGLSPFASLDDYEHLMVGDADATTAKRKHMATGRAGGEKKPKLRPRKKRSRSSE

SEQ ID NO: 67283 - protein, 270 aa, Zea Mays
MAEEQIEEASMAAAAATPFQLQFDKPIPFQIKMAEWNPEKDLLAMVTDDSKVLLHRFNWQRLWTISPGKCITSICWSPDGKIIALGTEDGLILLHDVENGKMLRTTKSHDVAIVSLNWAEDDPLSKSDKDEFLSYEDRTTRFFPPPPVMPRIGGLRSGDTGLADENEEAIPEFSSASCQRFNILCSGGKDGCVCFSVFGIFPVGKIVSKYSNSLVHNLNSTKNSLSCMLSPASAFPVIGSGDLSTLTAPLEICSTQKYFVKLICSFKQSK

SEQ ID NO: 67284 - protein, 735 aa, Zea Mays
MLLKNNREQLKQSKVYIYERLSFGRSSGKYMPYSKVDSFLKICQILGLAGIDLFTPSDVVEKRNVRKVCICIRSVSKKSLILHLNVPDFDVVTYTISMPNYVVGGIRRNLEQTQYSSSSSSGYSPCARSKVLQQQIIFGGQNDQHEDTHYDSDEAESKLSLLEPEDSVNEDNFAAVLSQFNDAHAPNKESEGYGESGRGKHGEKSLAESVGSLNIGIIDSEFMDSSPLIHDKESCFPLEPEGSVNEDNFTAVLSQFNDAPNKESEGYGESGCGKHGEKSLVESVGSLNIGIVDSEFMDSSPLIHDKESCSPLEPEDSVNEDNFTAVLSQFNDAPNKESEAYGESGCGKHGENSLDESVGSLNIGVIDSEFMDSSPLIHDKESCSPLEPEDSVNEDNFAAVLSQYSDGPNEGNEGYGESGHYKHEEKSLDESVGSLTIGIIDSEFMDSSRPIHDKESCSTGSAADQCSRTIPAKYELSSEESDSTGSHLVFDSGKNYLELNNHSVTDLERIYNGHATSVDQYVRGNGETLADHPKKEEAGLQKDTGTIAQHRDTLACDGESVCSSCEEPRRGLNGEPSDFSSESHSRLTPTHNTGGKLSMVSEHPVHNMESDMTGMASDSTNPELNPEASTRNEMDGSRSTDNPVEPENVAQDSATRGRPEGDAPRSGKGVLRSVAGGITLVGAVFFMFHLRRSKGGSFATVIPSLSGKSARSNARARNMGRENVPDAYPGGRLKA

SEQ ID NO: 67285 - protein, 55 aa, Zea Mays
MALGENNAFRMQLHVQSINPRCHACPSRYISPKQKQEPRTQMPARYEYSTLFAAM

SEQ ID NO: 67286 - protein, 189 aa, Zea Mays
MCGLEKEEPTPERSEQLVDIGCQWVILGHSERRHIIGENDEFIGKKAAYALSQNVKVIACIGELLEEREAGKTFEVCFEQMKAFADSISNWADVVIAYEPVWAIGTGKVATPEQAQEVHAAVRDWLTTNISPDVASSTRIIYGGSVNAANCAELAKKEDIDGFLVGGASLKAPDFATIINSVTAKKVAA

SEQ ID NO: 67287 - protein, 206 aa, Zea Mays
MMHRGLSKLLWWPEGINDSQRWEIICKLSIGIVKGLDHLHTASQKPIIHGNLKTNNIMLDADFQPRISDFGLYLLLNPAAAQEMLETSAMQGYKAPELIKIRDGTRESDIYSLGVIMLEMLAQKEAANDESPNARDIHLPVSFRDLVLERKISEAFSSELIIQSKNSGKEGNLNAYFELATACCNPSSSLRPDTKKILKRLEDIAR

SEQ ID NO: 67288 - protein, 369 aa, Zea Mays
MEHDLAGLAASPEIKFTEPQVKCYMHQLLSGLEHCHDRGVLHRDIKGSNLLLDNNGMLKIADFGLASFFDPDRKQPMTSRVVTLWYRPPELLLGATDYGVGVDLWSAGCILAELLAGRPIMPGRTEVEQLHKIFKLCGSPTEEYWKKSKLPHATIFKPQQPYRKRIRETFKDFPQSALQLIETLLAIDPADRLTASSALRSDFFTTEPFACEPSSLPKYPPSKEIDVKRRDEEARRLRAAGGRANGDGAKKTRTRDRPKAVPAPEANAELQVNIDKRRFITHANAKSKSEKFPPPHQDGAVGVPLDASNHMDPLYEPPDPSSFSTVFTYEKGAVPTWSGPLVDPAAVVNQKGKHKSGRSSKQPATARAR

SEQ ID NO: 67289 - protein, 644 aa, Zea Mays
MAAAAALLLGEDGRGYELARRLEACGAWREWLGDDSAHAALAQHLTSPATWDAFLYPAASPSPPPRPLLLLQLRVRALLFDKASAALLLPPRGAAPVSLHSINANYLRLHGDDIYFSLEDEQEDNTQHQVHSRTAFSPSRDGSMLSQRHNRYEELPDTWYKPYADKFRIWHSKLHSGDKEIPKRTPEGMSDYLKICSVHKRKRAVFMDDPSISAPILENGPSLHSKNAGEFSNSTDELIPEIRFPSDCVPESAIPKTSGISRANKIEVHGVLDNLPAPSSRNTAMLERFGMVPEYYKTGNKYRGKDGSRVEGKSLSQEQALLMTKQLVARYLANSGFESGTVVSIDVLSEIIIKHICKLGRNLKLLTDSYRKQFSSIELLKMFLQTVGYSNIGSLMEITKMGNRVANYPIHQDAQVLQTQNAISIHAQQLPRQFPPQMLQNLTPQQQQQLQNLTPQQQQLLQQQQWLRRNQLCSPRGPLTMADKNQPMVNVKQLLHQQQQQLQQQQLQQQQQQLQQQQHQQQLNQQQQQLQQQQQQLQQQQQQFTQQQQLQQQQQQLQQINQQQHLQQQQQQQLNQQQLQQQQQQMTMSGNQNAQLAQQFKQVSSMSAYGMRMPPVKVEAFHELVSGDSSLKHDNDPNKLTSPK

SEQ ID NO: 67290 - protein, 557 aa, Zea Mays
MLQWKAVIPAYLHPGPGSSAIQKRNQENLSGKNLTGSIPPQVADLPCLAEIGFANNMLTGPIPDLSGSSNLSIIHLENNQLTGTVPSYFGSLPKLSELYLENNRLSGPIPKALLSRSIIFNYSGNVYLGTAGKQKKKHVIIIISALLGASLLLAAALCCYMLTRKAMNSSSSPQAQEQNKLQKYPSTQQLQSIATETAHPYSLCELEEATNKFASRIGSGGFGIVYYGKLSDGKEIAVKVPSNDSYQGKKQFSNEVVLLSRIHHRNLVAFLGYCHEDGRNILVYEFMHNGTLKEQLHRRDKHISWIKRLEIAEDAAKGIEYLHTGCTPSIIHRDIKTSNILLDKHMRAKVSDFGLSKLLAAEGKDSHASTNVRGTMGYLDPQYYVSQQLTEKSDMYSFGIILLELISGCPPISTIAFGDNFRNIGPWAKFYYESGDIEAIIDPSISTAAEYQDVQSVWKIAEAAVRCIDAEPRKRPCMPEVVKEIQDALALERAAAETTTSDRALACPFSPAAASVRSGGTMRSHDMVMDNLLLLDDDDDSTFSGSTVTKLKYPELR

SEQ ID NO: 67291 - protein, 947 aa, Zea Mays
MATGAGWAPGRPVERHGAPRGGNARSKSVVPGPRRPSPSPARSRPAADHSGSADLCRVRVAVRLRPKNSEDLAHGADFDSCVELQPESKRLKLKKNNWSCESYKFDEVFSESASQKRVYEAVAKPVVESVLEGYNGTVMAYGQTGTGKTYTVGRLGKDDPSERGIMVRALEHILSSLSFETDCVAISYLQLYLESVHDLLAPEKTNIPIVEDAKTGEVSLPGAAIVEVKDLEHVFQLLQIGEANRHAANTKMNTESSRSHAILIIHLQRNTRTKEENGSSLYDVRHDTFPDDLPLVLKSKLLIVDLAGSERIDKSGSEGHMIEEAKFINLSLTSLGKCINALAENSSHVPTRDSKLTRILRDSFGGTARTSLVVTIGPSARHYSETSSTIMFGQRAMKVVNTIKLKEEVDYEILYKKMEREVDQLTSEMERQQKVIRSEKMQMDKRLKESERSFHDLRMTFNMQIENLEKENRHLESSVKRLTQDLDKERGQNNLLSKQVTELEKLLDENKQQQLENLSKTKIITDEFKEYEKEMGELVRKLEEERCCSSSMKDRMSLLQQQLCDAQSSAQLQESMARELEKELTKATEEFTIEIQSLKGKISGLISEKESIYDELKSTQEKVQLEMSQRKGLEDQILRFKQSVSDSCAEESKTSCSMVRSGSGLGNTAFVSKSEKLREALSGQRGTISKIFEEVGLPNVLALLKSEDLDVQIHAVKVVANLAAEDVNQERIVEEGGLDALLSLLETSENTTIHRVTAGAVANLAMNGSNQGVIMNKGGARLLANVASETDDPQTLRMVAGAIANLCGNEKLHLMLKQDGGIKALLGMFRSGHADVIAQIARGIANFAKCESRMISQGHRKGRSLLIEDGVLSWMVAHSTMFSASTRRHIELAFCHLAQNEDNTCDIIASGGIKELLRISRESPREDTRNLAKKALDSNPAFLREIQ

SEQ ID NO: 67292 - protein, 705 aa, Zea Mays
MAAASRKEEERNERVVRGLLKLPPNRRCVNCDGLGPQYVCTSFWTFICVSCSGIHREFTHRVKSVSMSTFSTQEVEALQKGGNQRAKESFLKDFDTQKMRLPDSSNSGSLRDFIKAVYVERRYAGGRFSERPPRDKQNQKAHEEEHRRPNSYHSFSQSPPYDYQYEEGRNGKRSAFLSRKPGSDKGHQGKISGFCYSSHSLHQRMSRDGFTGENSVSRTSNCSGSSISDTVRTAPQSPNFPDSGCFSPPVVQDQSNVHSSCGLTSSQRAVSAGDLDSISLKSGKSNLSDLIFENDNVHRTEKSSNSAAPSFIAFSDAISAPNQASFDSKASQEHHVTTIDQSVDLFSNTLTETPSADKVIPTAHSMDNAGWATFDTPPEQKQPALTGLSYVSATSIDKQALNHDLFSSESNDELTWFRSSKDDASVTNHNQSTATSLDTCSSEPWSIFDASSGSTQYTVKGDLSLMTSRLQEPKGTMNENSSQLWHSFDDANGIVCAQPRIDDHSNTASISLSTSNPFVCSIVLKESYDDDSHKVLMGELTPNTLIAASSEPSLGGPSTEQMPLNPFDLPFDTQSGTPDLFMDVSSLQEALPSPDLPTFLDGLPERWFSSSSCAYVPSASASHGGLPCLVERGPNCSLLWHFISWKSFCIEGITVKIICVLDLACSFGLVILELGIFSVRTGTPCKVTRGGGEYDSVPRTHWRNV

SEQ ID NO: 67293 - protein, 88 aa, Zea Mays
MGHRRLFVLSLGLAHLLLIATAHAGGGHARGAATDDAVAHQGMSMVGSRPPSCAGRCWWCGARRCEAVQACMDDGSSSERVLACSVVC

SEQ ID NO: 67294 - protein, 212 aa, Zea Mays
MENLDKLSEEDYVPTKEDVLHARVRTNGVVETQFSPLGESKRGGEVYRLYDVGGQRNERRKWIHLFEGVNAVIFCAAISEYDQMLFEDETKNRMMETKELFDWVLKQRCFEKTSFMLFLNKFDIFERKIQKVPLSVCEWFKDYQPTAPGKQEVEHAYEFVKKKFEELYFQSSKPDRVDRVFKIYRTTALDQKLVKKTFKLIDESMRRSREGT

SEQ ID NO: 67295 - protein, 190 aa, Zea Mays
MALAIWRGATRVDWATTSDGGQLTEQRSSESDKSRGEFDSRPTRERSPAPVACKGSTAAGHAGGSECAHVYRRLGICACGGASLVHEVAPTVEQAHAGINALALSQITINKLRENFIDIDKLCQECQTLIENHDKIKLLSNTRNNLNTTLKDVGGMMSISVEAAAAHDSLSNDQELIHTYELLMVRGVLL

SEQ ID NO: 67296 - protein, 422 aa, Zea Mays
MAKPGGSDESWEYSLRKYLLLLATLVATVTYGAGFNPPGGVWQTADPAVDRIAGDPIIRDTNYARYLSFFYSNATAFASSLVVIVLVLILSVLHDNGGITMLAPLLGVLRAVMVLDLLSLMGAYAAGTFRDTLTAVYSLVLSAGVVAYLVAHLALASRAPAAEDKRGQSAPERLRKVLMLLATFAASVTYVAGLSAPGGFWDHSEDGHRPGDAILKGGPHDARLKAFFVCNTTAFVASLLILVMLLEKKLCFSQKVRSYEIYGFIAVTLISLLGAYAAGSSRQIDTTIYVSALVGAVAVCILIQVVFVLLFQANSTEGQQTRTQGPLTNNGNGSDERQQTQGPQTSMDSNDSSNKPTVCKLVMTMSVTTTSSSNKLRVLKLAMAMAMPAMSMRSNKIQRWRRLALLSCCSLLSQRQSPTKRA

SEQ ID NO: 67297 - protein, 334 aa, Zea Mays
MESLILASSCSASPRLPLLSSAARFRGLPVSVPPPSSASISGAARKGPMRPRLFVAAAAAPRGSGNVFEGLRAKGFASMSSSTGNENMSTGTGTLPPMPPTSSYIGSPVFWIGVGVALSVAFTTVSSMLKRYAMQQAFKSMMTQSAPNSFGSNSPFPFSMPPQASPTAPSTYPYLEPKKDTSPHVSTVDVSANEVEATGTSKEVDVTETPKPSKKFAFVDVSPEELQQKNLQSSPETVDVKHDSTYSESKEDTEEQVPTISTNTESKEDTEEKVPTNGASFKLNEGAAHGPTESNNSASMLSVETIEKMMEDPAVQKMVYPYLPEEMRNPNSFK

SEQ ID NO: 67298 - protein, 219 aa, Zea Mays
MSSLERLQLDRLGIGQLHWSTANYAPLQERALWDGLVEMYEKGLVSAVGVSNYGPKQLLKIHSYLASRGVPLSSAQVQFSLLSMGDDQMELKSVCDSLGIRIIAYSPLGLGMLTGKYGASNLPKGPRSVLFRQILPGLEPLLSCLRRIAEKKGKTMPQVAINWCMCKGTVPIPGVKTVRHVQENLGALGWRLSSAEISELESAAMAAPRKMIQNVFQTA

SEQ ID NO: 67299 - protein, 1189 aa, Zea Mays
MLRVTTELIPSKMMMRAKANRMMRRPALKNIKRSLIKRFPSAGATKTLKDANYLRTLDSSIKRNTTVIKKLKTINDEQKDVIMDELKSVNLSKFVSEAVSYICEAKLRSADIQAAVQVCSLLHQRYKDFSPCLIEGLLKIFFPGKSGDDLDADKNSRAMKKRSTLKLLIELYFVGIVEDASIFVNIIKDLTSAEHLKDREGTQTNLSLLSTFARQGKFFVGLQPHGQEAYDEFFKDLNVTAEQKKFFKKALNSYYDAVAELLQSEHASLRLMEAENAKVLSAKGELSDENTSSYEKLRKSFDQLLRGVSSLAESLDMQPPVMPDDGNTTRVTTGTDALPSSGKESSALEPIWDDEDTKAFYESLPDLRAFVPAVLLGEVEPKSNEQHVKGRELSGESTSEQETELHDNVPTSATERQLEVKVDDLVKESEDRDKEKGKDGEKEKSKEKDLDKKNEREKEKGRVLDGASLDNLLQRLPGCVSRDLIDQLTVEFCYLNSKANRKKLVRALFNVNRTSLELLPYYSRLVATLSTCMKDVPSMLLSMLEEEFNFLINKKDQINIETKIKNIRFIGELCKFKMAPPALVFSCLKACLDDFSHHNIDVACNLLETCGRFLYRSPETTIRMANMLEILMRLKNVKNLDSRHSTLVENAYYLCKPPERSARISKVRPPLHQYIRKLLFSDLDKSSVEHVLRQLRKLPWAECQQYLLKCFLKVHKGKYSQVHLIALLTASLSRYHDDFAVSVVDEVLEEIRVGLELNDYGMQQRRLAHMRFLGELYSYKHIDSSVVFDTLYLIIVFGHGTPEQDVLDPPEDCFRIRLIITLLQTCGHYFSKGSSKRKLDKFLLHFQRYIISKGPLPLDIEFDIQDLFGELRPTMSRYSSIEELVAALVEFEENERSAPVEKVENERHSDNESQKRHSRDAGPSVNGESAANGTEENGKAHEVADSESYSDTGSIDGREEEEDILSEDKSNDGSDNEGDDEDDGIPVVSDEDENVEVRQKVMNVDPKEQEDFDRELKALLQESLESRKSEARSRLPLNMMVPMNVLEGSKDSRATESESGEETVDEEGGNAGGSSKVRVKVLMKKGHKQQTRQMLIPADSSIVQSTKQQEAAELEEKQSIKRRILEYNEREEELNGASQMGNWGQGATSTSSIRSGGRGSWDGSARGGGRQRHHITGSGGFYHSYGRRR

SEQ ID NO: 67300 - protein, 136 aa, Zea Mays
MHPRPVSLKPPASPPETPTHPALPRRRARAPPRQPPCALSPPCLRLLPRPPENHQVSLPYTARSTINAPFPGKPQPSTFLATSDLPSLALSSEQHLLPMAAPRPQSRPRIRSPVSDAPILLDVAHGVDGDLPHPAL

SEQ ID NO: 67301 - protein, 208 aa, Zea Mays
MDGFGGSLVEYMVRETEKLHAQVGRYKSPDEHPFFPEDLPEPRLPPMQYPRVLHPIADSININKEIWKMYFDELLPRLVKKGSDGNAGSSALCDTTCLQALSKRIHYGKFVAEAKFQESPEAYMPAIIAQDRDQLMHLLTYETVERAIEHRVEAKAKIFGQEVNIGVEDNGSPPVYKIVPSLVAELYSYRIMPLTKEVQIAYLLRRLD

SEQ ID NO: 67302 - protein, 394 aa, Zea Mays
MALALRLRRVLAAASTAAPLLRPSTSVARPCPLVPLASPAAAARGGTDYGTDDSKISPDEILFEGCDYNHWLITMDFPDPKPSREEMIETYLQTLAKVVGSYEEAKKRMYAFSTTTYVGFQAVMTEEMSEKFRGLPGVVFILPDSYLYPETKEYGGDKYDNGVITPRPPPVHYSRPSRTDRNRNYRGNYQDGPPQQGNYQNNRPPPEGGYQNNPPQQGNYQTYRSQQDGRGYAPQQNYAQGGQDGRGFGRNDYTDRSGYNGPPDFRSQTQYQGHVNPAGQGQGYNNPQERSNFSQGQGGGFRPGGPSAPGSYGQPSAPGSYGQPNTLGNYGQVPPSVNPGGNRVPGVNPSYGGDGRQGAGPAYGGDNWQRGSGQYPSPGEGQGNWQAVRADVFH

SEQ ID NO: 67303 - protein, 654 aa, Zea Mays
MTRRVRRRTCREREGKVVRGASRVVSAGPEGEEDAAAVEVDWRALPDDTVLQLFARLNYRDRASMASACRAWRALGSSPCLWRTLDLRAHRYDREVASSLASRCGSLRRIRLRGHEAAEAVLGLRARGLREVVADGCRGLTDATLAVLAARHEDLQSLQIGPDPLERISSDALRHVALCCSQLCRLRLSGLREVDAEAVGALARCCPLLEDVAFLDCGTVDEAALAGIHSVRFLSVAGCRNLKWATASTCWTQLPSLIALDVSRTDVPPSAVSRLISHAKTLKLICTLNCISVEEEQLHNPAVFSNSKGKVVLTINSDIFKSFETMFPVVDVKEHEFFNQCNWSHKDKIPGDTMTWLEWILSQSLLRIAESNPQGMDGFWLQKGTTLLLRLLKSLQEDVQERAATSLATFVVMDDESANVDPARSEAVMQNGGIRMLLDLARCSRESAQSEAAKAIANLSVNTKVAKAVADEGGITILINLAKSMNRLVAEEAAGGLWNLSVGEDHKAAIAVSGGIKALVDLIFRWPAGTDGVLERAAGALANLAADDKCSLEVAKAGGVHALVTLARSCKLDGVLEQAARGLANLAAHGDNNDNNAAVGQEAGALEALVQLTSSQNEGVRQEAAGALWNLSFDDRNREAIAAVGGVEALCNNV

SEQ ID NO: 67304 - protein, 51 aa, Zea Mays
MRQITYLSRVVSIKLWLDVVPRYKLFSSFQRDVLPSFFPSRVPSCLGEQYL

SEQ ID NO: 67305 - protein, 528 aa, Zea Mays
MPTAVPTPKAVVHQRFGAKARYTVEEVREDVGGCPGLAPQTRNVYRCALDLPGLSVATPGTFLRKKDAEQAAAQIALDKLGIHPTANSPTTPQEAWAELIARISGFFIDENFLSSTHPLIGHLCVSLRRTGDLIGRLPLSAIAACDVKVNTLCKLIDHRAEFDPLLVLSLLYNAAKQSPGVSVSDSNFWIQSEKPYSPEAVDSALERWSGTTDPVEVEAVLVPHMLEDELKTVRINLRDNEHYMSYVAAELSAIDSSHVLVSRTIGKTSSEIRLYFAAANIHAVSDMSKHALDSLGDGDINWQVNKRASYICGQTIYGDALLANIGYTRRDSELHTEDVNLCSYYRILLGKLPDGNCKMSRDSILAAELPSAYSRFSWKGLSPRDLLCSFCRLQRLPEPHFAVSRVSCDTLMSAVSSEERGAPAGSAENQYTNDVRINKEKPDLFKCEVNIRSRKQEVLLEYSAADTWSKESDAIQNSSLKVLIWFNNYFKKLTSKTGKLYLSESTAGVKLDHFLWIHKRSTLKALQS

SEQ ID NO: 67306 - protein, 59 aa, Zea Mays
MLVASQHACDGFVALWSGQAELAPRFRAKENATARSAPRTPPTTAGGCRLAQRASSATA

SEQ ID NO: 67307 - protein, 85 aa, Zea Mays
MPCLSTPGGSSEVLLSSGIMSVVWPNRGSACWRGNFLSEQVRRRCSAILRQRPCPCCHPRYDPPLRTSHDSRIGFGTSVFVLGVG

SEQ ID NO: 67308 - protein, 536 aa, Zea Mays
MLKLKGSLMLANADEVAAIQAMRLKSSEKNKMTRDHNGFRKLLVVLTKAGKVMALHTGDGRVIWSKLVPSLRASRCGGVPSALRIYQWQVPHHSVMRENPSVLVVGKFGAEPSIPGVFSILDSYSGEELNSMKLDHSVVQIIPLTLKDSSEQQLHLFVDSDSNAHLYPKSPDALNVFLHEMSNLYFYSVDIQANVIKGYSLQKSCNLNVGDEYCFSTKELWFIIFPSDSERITISETRKMNEVVHTQAKISGDHDVMYKYLSKNLVFVATLSPKAAVDIGSALPEEASLVAYLIDAVTGRILHRVTHHGAQGPVHAVLSENWVVYHYFNLRAHRFEMAVIEIYDQSRAGNKDVTKLILGKHNLLAPITSYARPEVAVKSQSYFFTHSVKAMAVTQTAKGITSKQLLLGTIGDQVLALDKRYLDPRRSVNPTQQEKEEGIIPLTDSLPIIPQSFVTHSHQVEALRAIVSIPAKLESTIVFTYGVDLFYTQLAPSRTYDSLTDEFSYALLLITIAVLVAAIIGTWIWSEKKELRDKWR

SEQ ID NO: 67309 - protein, 59 aa, Zea Mays
MPPAHQNRTKNTGYLDTIAGGDGSPWEKVGTPRAGFVEHDIVISGNNPSHRFSLSLALF

SEQ ID NO: 67310 - protein, 1567 aa, Zea Mays
MEALNELCDLVAAHPDLLLADKLAWLSSRCAAAPGAAAPQRASRAHLHSLLALARLLPAGGAGAGAEGDAAPPAPLLFFLASHAFLSPAFWPQSFAPAPFLARLLPLLAAAPSSPALSSALSAALLAALDVADPTSAPLARAFLSAAAAAAPLPLLPADAAPIAARLLLEFLGSEEEPIRAKGKGEDTLGEENGGAKEVVRRFEEEEVDELERKEVAFRLTVHMLGGEGGLETEQIGKVRNAAARQVRSLTDFLKIRKRDWREQGTQLRARINTKLMCCQAAVGVLVRSVSTMDTDIKSSKDMLQQTLAWFIEATKSCILSSWRKLKICEELFCTLLNGISQITVSRGGQLLPVLLIPLKPLVVSTCSQADMAGSSPGALFEAVVKLSCEIIEFGWTKDRALVDTFVMRLAAYVRERNDYEEEDGKGKEAVPVIRLNVIRLLAELCVCLKKWEVVDMILPLFIEHLEEGDASSPSSLRLRLLDAISRVACLGFEKSYRESIVLMTRSYLDKVKALGASENNTVPSEATTERTETLPAGFLLVASNLTSTKLRSDYRHRLLSLCSDVGLVAESKSGRSGADLMGPLLPAVADICSDFDPVSTVEPSLLKLFRNLWFYVVLFGLAPPIQNNEAPTKPVSTSLGTAESSSAIALQAVAGPYMWNSQWSVAVQRIAQGTPPLVVSSVKWLEDELELNTLHNPGSRGGNGNENSAVGQRAALSAALGGRVEVAAMNTISGVKATYLLAVAFLEILRFSCNGGILSATSTLNRSNSAFSCVFEYLLTPNLTPAVTQCLTAVAHRAFETVLSWLDDRISDIGEGADVRESVLSVHACFLIKSMSQRDEHVRDVSVKLLTQLKEKFPQVLWNSSCLDLLLISVHNELTSGPVSDPAWVATVRSLYQKIAREWLTSALSYAPCTTQGLIQENFCKPSGVQRTQHTADVVSLLSEIRICSGKNDWNGIRTANVPAVMDSAAAASGAKKEAPDFTLEVLSTAVVSATVKCNHAGEIAGMRRLFSTMGGINMGMSPPGTQSLHPHQSFDEVFVSKFVSLLQNFVVAAEKQPIDNSQFRETCSQATALLLDHMVSDSRANLEGFSQLIRLLCWCPAYISTPDAMETGIYIWTWLVSAAPSLGPLVLAELVDAWLWTIDTKRGLFASDMNYCGPDAKLRPHLIAGEPEAPPEKDPVEAIIAHRLWLGFFIDRFEVVRHDSIEQLLLLGRMLQGTMKSPAHFSHHPAATGTFFTAMLLGLKFCSCQSQSNLQKCNMGLQLLEDRVYRAALGWFSYAPEWYESPNKTYAQREAQSVSVFVHFLQNERTSGPVDSVSKLQGREGEPSMADHIHPVWGCVDNYTNAREKRKQLLLTLSQNEADRLEVWAQPIHTKDTTTFRGKISSDKWIDHVRTAFAVDPRIALSMPLRFPTNATMQSEITQLVQTRLLELRTIPEALPFFITPKAVDENSVLLQQLPHWAPCSVTQALEFLTPPYKGHPRVMAYVLRVLETYPPETVTFFMPQLVQSLRYDEGKLVEGYLLGATRRSNIFAHILIWHLQGEYVDESEKDAAALKCIPVLAPSC

SEQ ID NO: 67311 - protein, 52 aa, Zea Mays
MAKHGATPIITQPAATVVAICMSIFVGYRFSRNRSTAQFTPLEQIQFAEERH

SEQ ID NO: 67312 - protein, 420 aa, Zea Mays
MEAGAPPRGWRCGVLWLVSVEIVLVLVCTRGAGADSGESKGSFLQDSEAGEKDVYLSHSCIHDEILHQRRRAGRKEYSVMPQVYHESREDAERVRGRHLLGMSSWRAPHENARKPIRIYLNYDAVGHSPDRDCKNVGDIVKLGEPPVSSAPGTPICDPHGDPPLVGDCWYNCTLEDIAGKDKRQRLRKALGQTVEWFRKALAVEPVKGNLRLSGYSACGQDGGVQLPHAYVEDGVANADLVLLVTTRPTTGNTLAWAVACERDQWGRAIAGHVNVAPRHLTAEAETLLSATLIHEVMHVLGFDPHAFTHFRDERKRRRGQVTAQSLDKKLGRMVTRVVLPRVVMHARHHYGAFSQNFTGLELEDGGGRGTSGSHWEKRLLMNEIMTGLGSESGNRVCYISLQLMERGIPLQYNSIIRMHI

SEQ ID NO: 67313 - protein, 270 aa, Zea Mays
MATEEAGRALATKAKLVAAVLVLELLVAGFHVVSRAALDMGVSKMAFLVYRNAAALLVVAPVAYFLDKKDRPPFTLRLLMDFFLLAAVGVTFTQGLYILGLYYLSPTYVSVIQNSVPAITFVMAASLRIEQVNVRSRYGLAKMLGTVVTIAGATVITLYKGTPLLTETAHAEGTTHTLEGTHTLGGWVAGCLIMFANCICLSAWMVLQVPVLKKYPAKLSSFTITLALGFVQLAVVAPFFESDVERWKISSGGELFTILALWCLESPGIS

SEQ ID NO: 67314 - protein, 378 aa, Zea Mays
MPTGPDAPDEHIILDENVKAEGHDYYSIGAFKVSPNNKLVAYAEDTKGDEIYTVYVIDTESGEYVGQPLKGITSDIEWAGDDHLVYITMDSILRPDKVWLHKLGSDQSSDACLYHEKDDTFSLGLQASESKRYLFVESGSKNTSFIFYLDIPKQNKELAVLTPRVYGIDTTASHRGNHFFIKRRSDEFYNSELVACPLDNVAETTILLPHRESVKIQDFQLFDNHIAVYERENGLPKVIVYRLPAIGESIGQLQGGRAIDFIDPTYAVDPEESQFHSSVLRFHYSSMRTPPSVYDYDMDSGVSVLKKIHTILGGFNASNYVTERKWAAAADGTQVPMSILYRNDLVKLDGSDPMLLYGYGSYEVRSVCLFSFLLFGKL

SEQ ID NO: 67315 - protein, 1017 aa, Zea Mays
MGALLPFVRRVTRAVRLSPLQRSAEDRFATRMGAKVERESYMPGYYATGDLNLEPNGRWSPYYEEMTSNDQLCNGFTTKPTNDYSEFDKEILKHQILEHEAVFRQQVYELHRVYKIQKDMMKQHQSKEVYSYPTLAVASHTNSPSQVPQNGAKMMWQMPVPPMSTTYRKAIGEHNDTNQSSMKFLREGSVQSSPNGFISSDVGPRSRQGTFDLQLPADHYIDDDGTSDNKPIDFLGLASDTKPRNDAELTLVSAEGLGKFSDNSSSSGLQTTNNLGPRQVTDLNESNTGFHMGRANGSVSRGLPRTLENSWNQPILRANTTNFSFSKKHSKEKHTDEGTSSNFFDTSVKTIHDDKPSINKGKQVSSVTFLAPRYNDADPPKYFKAVDGRPATASYNHFVYQGQNSSVGWIAQSPLEPSVINNFARVDRPHHLNMGTFTAPVSIPQIDNPSIVSPMGSCTADPRSSVINNPALIPRFNGFSTVNSYTSLSAVTQSIGTSIPKLINVDNVDKRYRGFPLDSFSVSHSRHQVAVSSNLEQKNSQKLEDSDQQSHGKGMKNFNLNETLSDCQEDGLVEQDGRCASSFQHDKDGGSVLGISWLKKKLMSADPTAVEKPGKIFGHSLGTAIELKNTKDQNEPAVTIRNLSDSASTSVGCAIKKDRPSDNIVTGTLPVCNKAQEGATCLPLSCQKHVPKDGQAAEGATKKSGAPIRNFIDLNDDVPNDDNSEESVVSHECHVEPSRNNHPKRAFVIDLEVPACEEDASWDIDQECAQPKPDAYQEVDDGSDTSALAAAENIVALSRNTPTAAEASDDTLQWFADLAVLNINDLAEQAELQACTNDSSNYESDSFESLTLKLEETKIDDLWSRPLEPETATDEQTVSAAHLLTKPRRGQQRRRRQKRDFQRDVLPGLSSLSRPEITEDVQLLEGLVQASGGSWESSLTRRGRCGGRARGRKPRKTVVTVIVEEEEEEEVEVSPPPKPAGTGELEADGRGMIGWGRTTRRCRRARCPSGNSMATAS

SEQ ID NO: 67316 - protein, 404 aa, Zea Mays
MVQRDHEQKSQIVERRIRDDAALEEAKRKEQAVKEEKLRQERAQQEAEARQKEAAKLAAEARKTAFEAAKKEAAEKEAAEKEAAKLRDAAASQPSPNSQNNTAGIKVFGDKYALEAESRRHALVQNQVPENIHHSKEFSKYDRQIAKSISKLMPTTDSVRTRASELVKALNGQDCPRPISCCLFANKIISIVKSRNTKDKTFGNLAFACGYVMLLVTNQVPDAMDYLLAEFNRVCIYTVPKHMHALNAQARNRDYYRLIGYQEENGQLESTESYLTYVVAYVKLYAAMIQTEIKGVRHPHGLAEGWKWLAMFLNSLPATTATACALHAFLKMAGFALHKKYGSQFMKILDVISRCFLPALKEQGNKMQAEAVNNLQNYLNDKIYLEEPEGQYLVQQLLSKELFM

SEQ ID NO: 67317 - protein, 574 aa, Zea Mays
MFWHVPGFSAASPVDTILDKENFKLEDLLDEDEIIQECKALNTRLINFLRDKVQVEQLLRYIVEEAPEDAEKKRIFRFPFIACEIFTCDVDVIMKTLVEDEDLMNLLFSFLKPDHPHGTLLAGYFAKVVICLAMRKTLQLVHYVQGHPEIVSQLVDLIGITSIMEVLIRLIGADETMYSSHADSMQWLDDIQVLEMIVDKFSTSDSAEVHANAAEILCAVTRYAPPALAAKISSPSFVGRLFQHAFEDSRPKSVLVHSLSVCISLLDPKRLVSASYQAFRSQLSHGTLVTASPETVNGMLDSLGDLLKLLDVSSAENVLPTTYGSLQPPLGKHRLKIVEFISVLLSIGSEVAETRLIQLGAIQHAIDLFFEYPFNNFLHHHVENIIGSCLESKQDHLIGHVLDECKLVTRILEAEKNSALSSDLTKHTLSTEGRCPPRIGIVGHMTRIANKLLQLANTNIMVQSYLQQNSDWIEWHTSTLTKRNALENVYQWACGRPTSLQDRGRDSDDEDFRDRDYDVAALASNLSQAFKYGIYSNDDIDEAQASLERDDEDVYFDDESAEWLALYKFQLVCI

SEQ ID NO: 67318 - protein, 261 aa, Zea Mays
MQGRMRGARRSARGESSRKAAGREVEPFTLCGEMSHLTRATSEPCRRARGAAFARRARPFSAYELVSAREAGRAGGAGFSAADRAYLGRQHIPTKGPWGVDDVESEAYVSQFSADGSLLIAGFRGSRIRVYDAEKGWKIHKDISCRSVHWTVSDIALSPDQRFLAYASLTPIVHIVNVQNAGKESHANITEIHEGLDLTGGDEDEDFGIFSVKFSKDGKEVVVGNNEKSIYVYDLSANKVSARIRAHKAAPACTNIQSHRP

SEQ ID NO: 67319 - protein, 341 aa, Zea Mays
MRIFSKALEGSVLRYLNISDNALGEKGRKLRKLYLSLFLQLKLKVLHFHNNMTGDEGAMYIAEMVKRSPNVESFRCSATRIGSNGGVALSEALGTCTRLKKLDLRDNLFGVDAGLALSKTLPKLPDLVELYLSDLNLENKGTIAIAKALEQSAPQLEILLKMLPKYYNHVRAYDNTLITKKFGVHRITLKGGRKVRFVVMGNMFCTELRIPRKYDLKGSTQGRSTKKQNINENATLKDLDLSYVFHVDKPWRDTLFRNDHSGLMIIVSSNVLLSHKRSIPLEKDLKEQQVVHGEVENTLGPGFINLALENPIPKDWRTIHMIGAESNLLDIVSNSVATSIT

SEQ ID NO: 67320 - protein, 60 aa, Zea Mays
MRRGSADAAVGITSLRTQPLGFGRAMKDVRPPVLLPMESGSWVSLLGWQSMVGILREAAP

SEQ ID NO: 67321 - protein, 441 aa, Zea Mays
MDAGECSTSKPPQPSAASPPCGGEEVAWCEIRRNAGDASSATIRNLSSDAIIVDGRIVEQECVDIKPGSEIVSGPQKEGHLIYTFEITEAEDHEKKNVKIVLDIENAKCSICLNLWHDVVTVAPCLHNFCNGCFSEWLRRSSSNSRDKSQSAACPQCRTTVQSVGRNHFLHNIEEAILQAFSSLQRSDEEIALLESYASVKSNMVLGQQKNQSRKRRFSRSSDDTDNSDLPCPQCRNEFGGFRCSPGSVHLQCSGCGGMMPARSNISIPQKCLGCDKAFCGAYWYSQGVSSSHCNLICNQDTLKSIYQRHISALPDTIHGGNPYEKDITERCIQQSGKTLQVVISEWISKFDNMEIDRSRLQLNNVDAITSRTYICNHCYSKFVDFLLYWFRVSLPQNLLPRDAAERESCWYGFMCRTQHHRPDHAKKLNHVCRPTRGNQP

SEQ ID NO: 67322 - protein, 65 aa, Zea Mays
MACTTSFNMNSLERSTFSARFVVSLTGSPSGSVNVEAFLVGSIVTPSITPQARLTLLVQTCALPP

SEQ ID NO: 67323 - protein, 192 aa, Zea Mays
MLVVEMEKYMLLLWVLISVFMVGMSHLFWVHWMTTVTSLASSRDGLLLVSGSEDGNVRVWDTRCQQVTRKFKHSQGPVTNVLIVTPQRVNLPPLQPLRKVRSANGEAERQAVLLHRPENDVPIPGNKTFIFMERYLDELQKHGGSSRLFDFGPNAQNGTPNQQGTEWRDRYLELQDLFVHEVLHQMPSSRNP

SEQ ID NO: 67324 - protein, 404 aa, Zea Mays
MTPLGSPGMPVPKNTSYPDVVKFMRNGFALGFTVSIPDPNIRECFAEFMRFVLMPLAVFIFLVYKYWKTRITVDAVEKFLQMQQMLVPMRYAYTNIIAITGHFRDKLGQGGYGSVYKGVLQPGEVHVAIKMLGNSNCNGDEFISEVATIGKIHHVNIVRLIGFCSEENSRALIYEFMPHGSLDKYIFSSEKSFSWDKLNEIALGIARGLNYLHHGCDMQIVHFDIKPHNILLDNNFVPKVADFGLAKLFPKDDNFVPLSAMRGTIGYIAPEMVSRSFGVISSKSDVYSFGMLLLEMTGGRRNADPHAGSSSQAYYPSLVYSQLSQGDANEISEGVDMHELEKKLCIIGLWCIQMKPQDRPTMSEVIEMFEAGVDGIQMPPRPFFCDDEGDSSYSAISKLDTIEE

SEQ ID NO: 67325 - protein, 58 aa, Zea Mays
MTHGSKMHACMHEESWTYGSWIVLDLARCMRGGDRPRAAAPAFPAPAGKEILGDPALT

SEQ ID NO: 67326 - protein, 89 aa, Zea Mays
MPGCPTSSASPSSTAPTQPSCHIWKVKNPNDFFTGSLDQSSTHGALHPRPPTHALLLLLLLVIAQDVAWCQCVRCAVTDDSKMDCMLFK

SEQ ID NO: 67327 - protein, 445 aa, Zea Mays
MFGQLTTGLESAWNKLRGVGVLTKENIAEPMRDIRRALLEADIVHDELVQLMGGEVSDIVFAKSGPTVILLAGLQGVGKTTVCAKLAFYLKKLGKSCMLVAADIYRPAAIDQLTILGKQVGVPVYSEGTEAKPTQITKNAMEEAKSKNIDAIVVDTAGRLQIDRSMMDELKEVKKAVNPTEVLLVVDAMTGQEAAALVTTFNIEIGITGAILTKLDGDSRGGAALSVKEVSGRPIKFVGRGERLEDLELFYPDRMAQRVLGMGDVLSFVEKTQEVMRQEEAIELQKKIMSAKFDFNDFLKQSQNVAKMGSMSRIIGMMPGMNKITPAQIREAEKRLAFVESMINAMTAEEREKPELLAESRERRIRVAEESGKTEQEVSQLVAQLFQMRAQMQKLMGMVQGQEAIAGMGDLMDSLKSEEKAPPGTARRKRRNNTSKQRDLDAVLS

SEQ ID NO: 67328 - protein, 156 aa, Zea Mays
MLRKSLNFKATPMPSFYKEPTPAKVELKKIPPTRAKSPKLGRSKNKSISETEENTTTDQPARLSLDEKVSQNGVKKPTPSSSAKKPQRKSLPRLPSEETCPLDATSRQLKNNKLDEVNAQETGSATGQVQGSETETDSVQSATQAGANPDEQSVAQ

SEQ ID NO: 67329 - protein, 148 aa, Zea Mays
MIAAAKDIGAAKLNGEDPRDFLAGLASNIGLDKFRAATLVCASVATRTRTCFLQCWALEIQGKRPEALDELVKICRIHYIFPPEDNSAEMEMVAAGLEKNLHVAERVHLLYLYRSVCTAGNLKTAAQALGLSLPNENTEGFAMPIRQP

SEQ ID NO: 67330 - protein, 108 aa, Zea Mays
MPPSCSQSQALIDGGQKQYTDLVLLVRVFNVFLLVLYHVLLLEHKYCRVILIRILLILIEIQCTLPPKSSMFCSTRLAEEHLLPQPHPTPHPTPARFFFIYFHFLVHI

SEQ ID NO: 67331 - protein, 81 aa, Zea Mays
MAPGRASSLHRGTASKPHSGEGFSFPPGPTSSSGEPRTGPNDYTVTTGSRGEARATAAISGVLRRRFLLPHSPRLRQRLDF

SEQ ID NO: 67332 - protein, 326 aa, Zea Mays
MASCHEEMKSIYVGQRVLPVRLGRPAFGPESLAFDHRGDGPFTGVSNGRILRWRGAQRGWTEFAHNHKHETVAMCAAKKRLVVPESACGRPLGLQFHRASGDLYYGDAYLGLMRVGRRGGLAEAVATEAGGAPLNFVNAVEVDQETGLVYFTDSSATYQRSDYIMIILTGEATGRLLRYDPATGSAAVLASGLSFPNGVALSADGTHVVVAETTRCRLLRHWLRGPAAGTTEPFADLPGYPDNVRRAGDGGYYWVALNRDKSWLEQGDHSPGPWLPSGSTLRRASSSRALRGLGNATVSEVLERPGGALWLGSVDTPYVGLFKIGL

SEQ ID NO: 67333 - protein, 70 aa, Zea Mays
MPGWRRRRHGEGHSAGVVVRGPRHHPVVLLQARHRGCLPRQTRRRSARAPLPHRPRPPLPSRPPFPTISS

SEQ ID NO: 67334 - protein, 278 aa, Zea Mays
MPEGNLQDHLRLRGCLILAHSNIKPTGCVLDQILTVFLFFFFYFRLGVQFLLMCLDTCTHRPLTWQQRLQIALDAAQGLEYLHVACKPALIHRDVKSRNILLTTGLGAKIADFGLTKAFSDSETHITTEPAGTMGYLDPEYVSGQSPVVPVDDSVSVHVGEWVQQSLDRGGGVESVVDPSMGRCERGDYDVNSVWKVADLALRCRREASRERPTMTDVVAQIRESVELEAARRSSASGAAAAGGGGGLRSCAGERDAFEVVEGSVGETAGAAPGPAMI

SEQ ID NO: 67335 - protein, 260 aa, Zea Mays
MVEFLVLVNQIICKFKSSASAILEEIFPTIASRLSAILSQDAFSAGPASNTEEMRELQELQRTLYTFLHAMATHDLSAVLLTPSSREYLETIMQLLLFTSYKHRDILLRKACVQIFVNLVKDWCSNSEDKVPGFRVFMIEKFATNCCLYSVLDKSFDLRDANSLVLFGEIVLAQKIMYERFGGDFIVNFIAKGLSGVHCPPDLAEQYYQKLKGNDIKAFRLVVPSMYIELPFLRSEDVLLRHYLYQVWQPWLCPYSLYSI

SEQ ID NO: 67336 - protein, 541 aa, Zea Mays
MTALHHLLCRSHFSLEARKINPRVSASNPRPMPDANELEAARRVATFTLAELSISSSTLPPRSNLPALFRRCLQLLPLLNAGDPKLAARCCRGLLASVGAILSRDLSPSLLPAIEVFTESVVSSDHLRSCLIIANCAAREGSRMFAEADPYEDEHIMLELVCRHFISSLLDEGAFEVFLSALSWSGRALQRTPEISFQGAFVLVQRTYLSLPAVVQAHLLLLMSRCTSGQNLNSHMLAFRYAMNLYVRYLPALRVFNITRSAIPPLNYLGKKRSFSCIKDSTDQKLRSQIYRLLSFCELHCGDDLPVNESDIGCIIEMNQHMFLEKFRQECIVFVKGILSSILCCAKQKEVSEPDTEVSDEIICLAAATRVMGSSILYILHNKNYEANCKEYNVICEIISLLGQYGTDELHRYDLLAIIGESVESESASMLMLAHFASLSTCCLRRRLGFLWKGCIIMMMIATNLIAEEQSWGTFHLPMDVSKYSPVFCNTEKGIVEVSARTKEIILRYKSIHKSHNKGRRFYDDGIRCNSSGLEVAVQNS

SEQ ID NO: 67337 - protein, 95 aa, Zea Mays
MHLGAFSILNAPTCNNTSSTPRPPVCASSCPPATRLPVPAPPSPPPPPSATLSPTAAERLPVPAPSRASLSPRRRAPLCQRASMSLALGVIATAV

SEQ ID NO: 67338 - protein, 1408 aa, Zea Mays
MRTIAEEDAIAAESMRDAALKDGALLRHLLNAFFFPAGERRDVSRQLVALWADSYQPALDLLSRILPPGLVAYLHTRSDEDSRSQYDEAPLSRRQRRILQQRRVHGTKTMAVQEQGIPPNGVEDGEPFRHISAGTYGGADVHQRHVGLYSSTHSPSPGINIDPSHTVSVPHGSVPEALSENNQQIEAPQLDSHVYSVDSNANGNLVSSLHSDFSVPAQVVVENTPVGSGRLLCNWYGFWRAFSLDHNRADLIWNERTRGELRAALQAEVHNLDVEKERTDDIVLGSSVTEDAAGSDNLPRISWNYAEFSVSYPSLFKEVCVGQYYLRLLLESGSNYRAQDFPLRDPVAFFRALYHRFLCDADIGLTVDGAVPDELGSSDDWCDMGRLDGFGGGGGSSVRELCSRAMAIVYEQHYKVIGPFDGTAHITVLLDRTDDRVLRHRLLLLLKALMNDLSNVEACVLVGGCVLAVDLLTVAHETSERTAIPLQSNLIAATAFMEPSKEWMYIDKDGTQVGPLEKDAIRRLWSKKSIDWTIKCWASGMSDWKRLRDIRELRWALSVRVPVLTPTQIGDTALSILHSMASARSDLDDAGEIVTPTPRVKHILSSPRCLPHVAQAMLTGEPSIVEAAASLLKAIVTRNPKAMIRLYSTGAFYFALAYPGSNLLSIAQLFSATHTHQAFHGGEEAALSSSLPLAKRSVLGGLLPESLLYVLERSGPSAFAGAMVSDSDTPEIIWTHKMRAENLIRQVLQHLGDFPQKLAQHCHSLYDYAPMPPVTYPNLKDEMWCHRYYLRNLCDEIRFPNWPIVEHVEFLQSLLVMWREELTRRPMDLSEEEACKILEISLDDLVLVENGSSKRPSDLSSANSGNKTENIDEEKLKRQYRKLAIKYHPDKNPEGREKFVAVQKAYERLQASMQGLQGPQVWRLLLLLKAQCILYKRYGDVLEPFKYAGYPMLLNAVTVDKDDSNFLSSDRAPLLIAASELIWLTCASSSLNGEELIRDGGIPLLATLLSRCMCIVQPTTPANEPAARIVTNIMHTFSVLSQFESGRVEVLKFGGLVEDIVHCTELEFVPSAVDAALLTAANVSVSSELQNALLRAGFLWYVLPLLLQYDSTAEENEICEAHGVGARVQIAKNLHAVHATQALSKLSGLSSDDILYPDNKPAYNALKALLTPKLADMLRNHPPKELLSNLNSNLESPEIIWNSSTRGELLKFVDQQRASQGPDGSYDLTESQSFTYEALSKELIVGNVYLRVYNNQPDFEISDQEEFCIALLKFIAELVQQWNSVNLEETIHQHGSVIEASISENDQVSDSTIEGKMDNSSGKQSTDGDSEVIINLQCGLTSLQRKSLCSKELLLHLYWANLLDNQCMAPGWQSPLPGSCLMVWFLPLKMDLVKLLFLLLNRQRKLLN

SEQ ID NO: 67339 - protein, 380 aa, Zea Mays
MAAPTTSRRGPGGARNMDDENLTFETSPGVEVVSSFDQMGIKDDLLRGIYGYGFEKPSAIQQRAVLPIINGRDVIAQAQSGTGKTSMISLTVCQIVDTAVREVQALILSPTRELASQTERVMLAIGDHLNVQVHACIGGKSIGEDIRRLENGVHVVSGTPGRVCDMIKRRTLRTRAIKLLVLVVLISATLPHEILEMTSKFMTEPVRILVKRDELTLEGIKQFFVAVEKEEWKFDTLCDLYDTLTITQAVIFCNTKRKVDWLTEKMRSNNFTVSAMHGDMPQQERDAIMGEFRSGATRVLITTDVWARGLDVQQVSLVINYDLPNNRELYIHRIGRSGRFGRKGVAINFVRKDDIRILRDIEQYYSTQIDEMPMNVADLI

SEQ ID NO: 67340 - protein, 399 aa, Zea Mays
MDRKPAGKNSFRQQEKQKKNERLDWNDLVLAGPFVLHSHSQTAPSLYTAVSSRARGVRVPPLGGAGQKSLLDGWLRKPDASQVRRLIFTWVPMVRFHSANHLPAFSQYSLLEPMEVQLATEQPGDPFLPLRWESTGDQWWYATPIDWAAANGHYDLVRELLRLDPNLLVKLTSLRRIRRLESVWDDDARLDAAARNRAAVARRLLLDCEPDNDKQPPSRGGGGDAANRLLRAGYGGWLLYTAAAAGDERFARELLAAQPLLVFGEGEYGVTDILYAGARSGRPEVFRLLFDAVLSAAPACPVGGDDGEFRREMMNRAVHAAARGGSLAVLRDLLRGCSDAAAYRDAQGSTILHAAAAKGQVEVCLAVFFLVSFILSRWMDVVIRSTMQCMSRLFNIFSA

SEQ ID NO: 67341 - protein, 254 aa, Zea Mays
MTHATGPSLWGCQGCRRTGPPKIEGPVATDMSRLTTTETVVLPVELSELGKKMSEAAVRVIGLWPSPFVIRVLIALKLKGVEFEFVEEVVGRKSELLLRSNPVHKKIPVLLHHGKPISESLIIVQYIDELPWAIRILKGTDDGGMEQAAGQLSAALQLLEEAFAQLSQGKRYFGGDSVGYLDIALVSHVGWVKAVEKIAGVTLLDKAKVPNLVAWADRLCAHPAVVDAIPDADKFVEFSVTYGSFSKPINAPAK

SEQ ID NO: 67342 - protein, 493 aa, Zea Mays
MEVEALEKKGHAAFAKAMKSFGSSERYKRSTRYFEDMYATDALRSSDKTIVLPMPEVVKAKVKCDITKEAQPGRGAQSTLRKEILQLEKHLKDQQAVRGALEKALGPNAGPVSLSPENPMPQAANELIREIATLELEVKNMEQYLLTLYRKAFEQQQAPAFSPPDRREASKPSVSSRSGQLRETPMATKSSCKSRGDAALRSSYPPAHKKLNDPLADCCTSARFDRVVDSDVLRCQSALSYRGVCSSRILPSEDDSLARALRSCHSQPFSFVEEGDTGASGMISLAEYLGTNVADHIPETPNNLSEEMVRCMAGIYCRLADPPLVHHGSSSSPSSSFSSTSAISPQYVGDMWSPKYRREATLDSRLINPFHVDGLKEFSGPYNTMVEVPMISRDSRRLKEAEDLLQTYKLILYRLEAVDLRRMTDEEKIAFWVNIHNALLMHAYLKNGVPQNNLKKTSLLVKAACKIAGRNINAAVIQSIVLGCNTHCPGQAC

SEQ ID NO: 67343 - protein, 54 aa, Zea Mays
MSPFPGPYRRRAPTTPFFSVPAVRHTNPSCIGWAVKWTKLQIPLNCFVASRSSS

SEQ ID NO: 67344 - protein, 82 aa, Zea Mays
MTVLPRGTFAAAMTAGPSSALLATTFRAPMAAFCLALRRSAACMWPARRPSRSRSALRSPSPSLASSETERERDGAIGERRM

SEQ ID NO: 67345 - protein, 227 aa, Zea Mays
MTTPGSCPATTAATHPPMCAASAAGGSQKMVRPRLVLFGDSITEQSFRPGGWGAALADTYSRKADVVVRGYGGYNTRWALFLVHHIFPLDGLAPPLATTIFFGANDAALLGRTGERQHVPVSEYKNNLKMIVNHLKDCSNSMVIVLITPPPIDEEGRERFARSLYGQNARKLPERTNEMAGVYAGYCVELAREMCIPCVNIWSKMQETEGWQKLYLRHLARTWYHGE

SEQ ID NO: 67346 - protein, 119 aa, Zea Mays
MRGRKRQQVSASSAAALVKGRESTKQKEKEARKEKEAREAGREPAAKERQMRRKAGKEKETETGGEGKEPAKEKEVREEGKENDKHKEKAKTKANVCPQFFKVFFPEQSTERLIPPSVC

SEQ ID NO: 67347 - protein, 1369 aa, Zea Mays
MFKLHRHRSSDRVGERFDFRFSNFRAVQVPAVSDRLFLSIVSVDSGRTIAKSSKVASRSGICQWPDTILEPIWFSKDEVSKEFEDCQYKIIVSLGSTKSGILGEIFLNLSNFLNIVDPTAISLPLKRCNAGTVLQLKVQCLGTKSKLRSLRDMAPRLDDRSPTPTNDEMDNKSDCSDGMFNRSVRSSSENHLVGTYQDESGNRETSFSAPGSHRSSNSGDSTADRTNFSPRDNSSGGLYVGRQDSASSYASYVSAGRGDDGLRSNNSSFSSRASGPNLLQGNTPKIFSNGLSQLSMGASDSSKDLLEAAEETIEELRDEAKMWERHSRKLKADLEMLKKECSEKSKQHAELAGELSAAQAERDSYRHEIEELKSSLQDVNTRQTITGTPKRSDWIDLQKELEGEVKFLRESNADLTIQLNRTQESNIELLSILQELEETIEEQRVEISKISKVKQTADPENGLLVKEDKEWAKKLSMKDDEITVLREKLDRALNIGNAGGAGSNAIYLELEKENEILRAKIQELEKDCSELTDENLELIYKLKENGLTKGQVPRISNNNELQFEKLTSRIRQLEEELRNKEMLRDDSFSESSTSNADELQRKCADLELKLLNFRSQTCELEEKFQKSQEELEQRNLELSELRRKLNGLHSTELEVFESGATWKYQSRTADLEDTEPETDTLKARFELQLQENDDLRSSKVEMENFISEIQAEKSQLEERLSVSLKESSITSKCLDEVRKDILVLSSSIDSHVSANKVLERNIIELESCKAELELHVSELEQENIELSERISGLEAQLTYLTNEKESSELQIHDSRSLIINLKDKVERQQSEMETQRLEFKQKQQESQRRLSETQDDSEVLRRSNSKLQSTVESLIEECSSLQNLTADLKRQKLEMHGHLTQKEQELDESKKRNFEFSKTVEFLEAKLSSLHKDVSSKEQSLLSELESIFQEHMEQEERINRAHFMLNKIEKEKTLEVENLKREVVSLTAQVSSTHEERESATLDAIREVSVLRADKAKLEANLQDVSTQLRHYESQLEDLRKESKNKIKGLVDSLNASKQSEEMLTSDAEHMKKLMEAARSNEDTLRKTSNELELKLKSSDYEKQQMLEEISGLKLQVQKIMNLQDEVFKLQSSLDEAKFGKGKLEEILRSVTEECEELKAQKAMLTDKVSDMQETLRNGEEEKRNRIAMQAKLVRLESDLSASEASHVHEAELKNELSRIKRSNSEYQRKIQSLEQENEDLTRRVQTMEKGFEQMSHVKENLGKQELGGDNQAAIQSKIELLETKLAEALEENKMYRAQQKSPMPEGQPSAGAGDGKEGNTDRILQLEGELRDMKERLLNMSLQYAEVEAQRERLVMELKAMKKGRWF

SEQ ID NO: 67348 - protein, 76 aa, Zea Mays
MPWIWDRVSLNPAIPYMKRQSRTGSGEMARVARTLLAKDRLKGVVCSRVALTCSCSGGSVGMVDICKSYEKHMSCG

SEQ ID NO: 67349 - protein, 963 aa, Zea Mays
MDLDPEGIFRDDSDEDEDSVQEREANKEMVVYLVDASPKMFTPATTQDNEKQETHFHTIVNCITESLKTQIIGRSYDEVAICFFNTKEKKNLQDSAGVYVYNVGDREQLDRPTAKLIKDFSLIEDSFMSTIGSRYGITAGSRENTLYNALWVAQALLRKGSVKTVSKRILIFTNEDDPFGTITGAVKTDMIRTTLQRAKDAQDLGLSIELLPLSPPDDQFNMSLFYADLIGLDGDEMTEYLPSAGDKLEDMTNQLRKRIMKKRRIKTLSFAITNDVCIEVNTYALVRPTTTGTITWLDSLSNLPLKVERSFICNDTGALLQDAQTRFQMYNDTIVKFSVRELSEVKRVASHHLRLIGFKPLDCLKDYHNLRPSTFIYPSDERIFGSTCVFVALHSSMLRLGRFALAFYGNPTRPQLIALVAQEEVTSSGRQFEPPGMHMIYLPYSDDIRYPEEVHVTSDDAPRATDEQIKKASNIFKRIDLINFSACQFANPEIYLQSQGQLPGVANAIEEFKTSVYGENYDQEEAEAAAGKASRGNASKKRKEVTDAAAQISAAYDWAELADNGKLKEMTTVELRSYLTAHDLPVSGKKDVLISRILTHLGFMLRVLLHAAKWLWLQMSLETGEADEVMCWAILVIYRVTSWALGTRFRFQPARPQPALEAAQPRLRPQTARPHSASAGDLLSAQPRLRQCDRPPAPSGEKGMDIDCHTVEFDDVRYHIQFSMRNPKVMVLSVALPLPPPEAILYDGLPLGAIEAIKAAYGPVVQILDPPKDGFDLTMKINLTKLPLDEEQRNTILTQIASIREVVLGAPLKLLLKHLASKTVAPNVNNLVALVHRPNESFFLAPQADKVTIVYPMRFQDSIDIVLATSFLQLEKQRERWVPTALTRHGHDVTVLPKHVRVSEQDRGSNILSGLRRQCKGEAALQRVRCEGDTSWTKQRSVKCVDSVVPDVWTRRRPEEVAQ

SEQ ID NO: 67350 - protein, 234 aa, Zea Mays
MGGTCGSSTSWLSGLAAIRPRKRGTAPLQQQEAVTSPKAGRYLMALDKKPIATKGHHLCCPHPSRGPHLPGNQLPVPLVPIISKGVLEEEVMVSFVATNGEPTTTATSKLVWWNLVEQMTMTPTSCTSAATLPTRTRAPPSRALYKSGSIIVLGKTDFLRPDMDPITRWTATKKSGLISYKKLLFHGLDLWTALSLPQPLGRAALWPPHRTIHQHLQRKCSRFSNELKSGIRIL

SEQ ID NO: 67351 - protein, 52 aa, Zea Mays
MNISMPSSPKRGSQRALHLQRRRPRRRGPATMRPLSCCALVRLHNLCRPKTK

SEQ ID NO: 67352 - protein, 367 aa, Zea Mays
MPNIFKFWSVCWNLRDALSSECHGLMTETLKNALSLYKLGGAAGGSDFDPKGKSDNEIMRFCQSFMDELYRYLGPDQDFPAEDIGVGPREMGYLFGQYRRLSGHFQGNFTGPKIFWSGSSFRTEATGYGLVFFARLLLAEMNKELKGLRCVISGSGKIAMHVLEKLLPCGAIPITVSDSKGYLLDEDGFDYMKYSLLRDIKAQQKSLKEYLKSYPHAKYIDDAKPWSQRCDVAFPCASHNEIDQGEAVAISNSGCRVLVECSNMSCTVQAVDILRKAKVIVAPAKATAAGGVALGEIELNPEFNLMQLSVEDFENRIQDAIKQTYERSVKAAQDYGIMKESPEFLVHGANICAFLNIAQAMTDQGCV

SEQ ID NO: 67353 - protein, 114 aa, Zea Mays
MSICAITRLEQGVEDNMDILAMGKGQNSVSLTGAMNQTRCNDCGMDQKWTNQIFDCWNGPSSVFLAIPMSLCWTGAWKPCWSAHILLAPQEYFLTACGADQGHLPLVRGYKSQG

SEQ ID NO: 67354 - protein, 64 aa, Zea Mays
MMVTSSPWNFQSVWWQVIRHIVTYSHGGGGGEGELGPERGDKRGTWSLYFVGSNCKPIIVGCNL

SEQ ID NO: 67355 - protein, 487 aa, Zea Mays
MEGGGWAVGGHALGAAQEPRGQQQHREEEKAAGAAAERKGAGAGGGGGMKFRVRARAPHGVGALLLIGGAAVVGAAVLAWRRSRHGNKGGSVDQPDRRLPAKVEGLDGGIVEDGKVQGGSLVQKLSQSNEILSVGNTDIGSGRLDGNASEESHQIHKDGEITADQSESKHDGKIDENSGINPAEVQMHDQESKHEEKNDENSGSNPVEVHKHDLDKEHVEEVDQKSSSNHVEISAHDMCEDNEHVEKIDHVERIDQNSSRDPVKAIMQEMIKVCLVSGSVEKVEEEDSSKKDLEKEIAPKDNKDMEASDGSKLGVNGPETGGAVADTEEDDTVAETEDVVTDTEDTVTDTEDALAETEAEKGERAIADKGELEQDEKKDLVALPELASSPALSSLVKPTVVKKELDFPRPNETGMKTEQDYTNGELREHNDLVSKVQGEGGVATTMESRSSALMIILALIFALATGITIVVRLYSPSRATKLQMDLP

SEQ ID NO: 67356 - protein, 1177 aa, Zea Mays
MTTMSDDGDRTCPLCAEEMDITDQQLKPCKCGYDICVWCWHHIIDMAEKEETEGRCPACRTRYDKDRIVKMAATCDRTVADKNAEKKQKAQRVKPKAAPTATTTSTVESKKHLATVRVIQRNLVYIIGLPAHLCNESVLERREYFGQYGKVLKVSVSRPTGPPSQQASANSSISVYITYAKEEEAIQCIQAVHNFVLEGKVLRACFGTTKYCHAWLRNMTCGNPDCLYLHDVGSQEDSFTKDEIISAYTRTRVPQMASSVSQRRTGNMLPPPGDDFSYSAVVSAKHTFKNATLNTTNQPRPSPPNSSSGRSTLPPAASWGQRDVNARTTATGVTSSQSHTKPKSESQSNPFSSSSVISSTKTPSSWNDDTSTAAKMSEGQQVSEKESKTLQLYKPGISMATQATSSLELSLNIDFSTIPSAWNDDEIVVSDGMSKGSDENQVANENGELTHPASKPLVLSKKDITMKSTSTSKSPPNIVSSLAISKSDVNTSDGDHSLTNISLTSNAVVCQSNHVAGAKILEDIRSRDTDMEKLSVHISSVKLGGNDEIQIMAGNQRPDVMPCTSVDAPMNQNFDRDQSHLNLNEPLLPSENKDTVLSCQYSSDKRLDWSSEMQNGSVTPSNNIVDSTMLTGKLHSILLDVSEQPSYARFPSSLDTSLCNDTESNTAATIDTTISHMQTEFSSINNMYALLNGGQDGLGTVNTHGNVSEQHPGMGNHQCRAMGSVRTEAMGSVRTDSIGSFEKTISINKDESRIISDMLSSEFNPWDDSYSTANNFVRMLRESENNDVHFAVPSWKSGTGNKESRFSFARQDNQGNLLDSSLRNCGTGTEQNFSLLPQNSRGNIYQNGLAFQSLENDFSNSNSLGVLDMLTTGTSRSKISAPPGFSAPARVPPPGFSTALPSQEFPSGISSHDGSIALPRFPWAFSSQISAQELSKPPSRLPSPFSSGFSSLDGPNSSSRFPSAFPSGFSSQNGPNPSSGFPFSSGFSSQDGSNQSYGSTNPENLLRNTVLGGSSNHYQSQFGRHSSDMEFDDPAILAVGKGLMPGIGDSGLEMKNTPAFQAQLQPASSDPRFHLHIQPNVQSHQNMGFADHMQDGLNHMNDNRFLGQNHGPLSPYVQIPQQPRNSQVTNGHWDGWSDSRQGNSTPMSDMSRILYPSEVNKLHMLGSNDIYNRAFGM

SEQ ID NO: 67357 - protein, 142 aa, Zea Mays
MIFWLYPSLGGMEYVLHHTVSLVAIAYTMLSGEGQFYTYMVLISETTTPEINLRWFLDTAGLKKSSAYLVNGILMFVAWLVARIFLFMYVFYHIYLHYGQIMQMHAFGYYLTFVVPSVLFVMNTMWFMKILKGVMKTLAKWP

SEQ ID NO: 67358 - protein, 470 aa, Zea Mays
MASRLFVLRRHTRWWQRQAPRPRSLCPPSHGGDSASSHGTLELLARLRSSPSLLQSCSIQACHCIHTSPSVNSGNQATAEPQQQNPGVPVPVDGSSELKPKRTKLKGRRAVTNFLKSLRWKKKKEFQRMTAEEKILYKLKLARKKEERLVVALKKIEPEDPSEPTHDPEVLTPEEHFYFLKMGQKCKNYVPVGRRGIYQGVILNMHLHWKKHQTLQVIVKTFTPEEVKEIAIELATLSGGIVLDIQDGNTIIMYRGKNYAQPPPEIMSPKVSLSRKKALDKSKYMEKLRALRRYIPRLEQELEDLHAQMKLAGEHQGQNAGKHVASISHNTNSMPVRKEPCGSIRNKTVSDLLSETVEGSKRLEDESSAIEDDSASESLSFTESEDLSDIFETESEEQEEDNKDRPLYLDRLDKFPSGKNDNEPDDFEEHLRRIASLSDKTDSPSKELKVSELDEIDKIFLRASSLLKKR

SEQ ID NO: 67359 - protein, 460 aa, Zea Mays
MKTLLLWNFCFSLVVIYSFRAQGLEPKFPIYKGYGAMTLHHHGTPHPNINLQMNYWPALPCNLSECQEPLFDFIGSLSINGAKTAKVNYEASGWVSHQVTDLWAKTSPDAGDPVWALWPMGGPWLATHLWEHYCFTLDKHFLEKTAYPLLEGSARFLLDWLIEGHRGYLETNPSTSPEHYFIAPDGKEACVSYSTTMDISIIREVFSALILSADILGKSDTNVVQRIKKALPNLPPMKVARDGTIMEWAQDFQDPEIHHRHVSHLFGLYPGHTMSLEETPDLCRAVANSLYKRGDEGPGWSTSWKMVLWARLHNSDHAYKMILQLITLVDPEHEVSREGGLYSNLFTAHPPFQIDANFGFPAALSEMLVQSTGTDLYLLPALPRNKWPQGYVKGLKARGGVTVNISWKEGSLHEALLWSSGGQNTLSRLHYGDQIATVSLSSGQVYRFSMDLKCLKTWPL

SEQ ID NO: 67360 - protein, 170 aa, Zea Mays
MEVEDDDNTAAPSAWPSSSRRRHLLQFLLHASMRLDLRPIVKYAALTFFAGRFLPALPRKMGFCGARSGRIVRSWLLEPLRDSNLELFALVAVWIASKIHDQKPMSVKSLKALGDRIIADQHFMCRDFASAELVFLEVVEHNIGFSSICFIYLEELLMHFRFFGFLTTFL

SEQ ID NO: 67361 - protein, 534 aa, Zea Mays
MWHAMPVSTPSHHLHHGPKQLMGRSFPPFILRALPQLSHCRRRCYAYATVTVIPMASTATTRRRPRRGSKGPNADLSRTLTDCTRRGDAAAAMAAFDAAVDADADAVPRLSAHQYNQLLHLLAATDRSSFPSPPAAAARRVFAHMLQAAAPPSEATITSLARVIAADPASAADEAFELVATMKDKYGLSPRLRSYGPVLAAFRRAGEAAKAYAVEAHMTASGVSPEEPELAALLDVSSRAGDADKVYEYMHKLRQAVHCVSEETAGVVEAWFRSDEAATAGKPQWDAAQVKDAIVANGGGCPPPWVAWNPALDRAAGKSGDADQCGGCRFHLACIDIDMERHRGLLIPLLGLALERETKTNFSRFQEWLEANKDYQAIVDGANIALYQQNFAEGGFSLTQLDGVITELRDRYHGKWPLVILHNKRISKLMENSSNRHLIETWRTNGALYTSPSGSNDDWYWLYAAIKLNCLLVTNDEMRDHIFELLGPSFFPKWKQRHRVKYTFNKGKAVLVMPPPYSSELQVRVGDGILAHSN

SEQ ID NO: 67362 - protein, 473 aa, Zea Mays
MKGDSSRQNSLEDNSQILSAFPREPKLEFLKNITKDFSSERVIGHGVFGVVYKGILQNGQLVAVKKLVQTSGVHDRRFQNEAGNLQFLEHRNIVKLLGSCYQVEKKLVERNNKHFLSDVPEKFLCYEYLSNGSLDNYIYDESSGIDWTMRFKIILGICNGLHFLHEERSEAIVHLNLKPSNIMLGDDMVPKIADFGLSRLFGEEQTRTLTKNVVGWIGYIAPEYHYRGEISVKSDIFSLGVLILEIVTGLKRDLNIQDISSELLIDNVSKNWTEMSHIESKYPSLEEQHLLQVKRCIELGLNCVESDPKKRPTVGSIIGKLKEISHEASIHKFMEKKLQLITEFPREPKLHFIEVITGDFANEREIGKGSFGVVYKGVLQNGEVVAVKRLLVVAKTNLDKQYLNEVSSLIDLNHRNIVKLFGYCNEIQRKLVESHGTYVFADTEERILCYEYLPRGSLDKYLYGSQNRGCDWD

SEQ ID NO: 67363 - protein, 2091 aa, Zea Mays
MSGRRGPAATGGGRGGGGGGGGNWRRSGSAKAKEQRLRLGAEELLESRLGFAPYTDGERRLGWLLTFSPSSWEDEDTGKIYSCVDLYFVSQDGSTFKVKYKFRPYFYAATKDKMELEVEAYIRRRYEGEISDIEIIEKEDLDLKNHLSGLKRKYLKLQFDTVQQLMRVRNDLLHVVEKNEEKIDAVEAFESIHGVKRVERPQDYINYIIDLREYDVPYHVRFAIDNDVRSGQWYNVNVSGSDVLLQRREDLLQRAEVHVCAFDIETTKLPLKFPDAEYDNVMMISYMIDGQGYLIINRECVGEDIDDLEYTPKPEFEGYFRVKNVQTEEIGFQCDNNQGECRAKFSCHLDCFAWVKRDSYLPQGSQGLKAVTKAKLGYDPLEVNPEDMVRFAMEQPQTMASYSVSDAVATYYLYMTYVHPFIFSLATIIPMSPDEVLRKGSGTLCEMLLMVQAFKASVICPNKHQADLEKFYNNRLLESETYIGGHVECLETGVFRSDLPTKFQLEPLAYEQLIGNLDRDLHYVIAVEGKLDIDSVTNYDEVKDAIEQKLVALRDHPIREERPLIYHLDVAAMYPNIILTNRLQPPSIVTDVDCTACDFNRPGKNCLRKLEWVWRGETYMAKKNDYYHIKRQIESELIQSGGIASSKPFLDLSKPEHLLKLKDRLKKYCQKAHKRVVDKPITEVREAGICMRENSFYVDTVRSFRDRRYEYKGLNKTWKGKLAEAKASGNSMKIQEAQDMVVLYDSLQLAHKAGKKLTISYPCVMLNADVARNNTNDQYQTLKDPVNKTYTTHSECSIEFEVDGPYKAMILPASKEEGILIKKRYAVFNEDGTLAELKGFEIKRRGELKLIKVFQAEVFDKFLHGSTLEECYSAVASVANRWLDLLDNQGIDIADSELLDFISESSTMSKSLVDYGEQKSCAVTTAKRLAEFLGDSMVKDKGLHCQYIVAREPQGTPVSERAVPVAIFETDPEIAKHYLRKWFRFSSDANIRSIVDWSYYKQRLSSAIQKIITIPAAMQKISNPVPRVLHPDWLHKKVREKDDRFRQRKLRDIFSPLAKEEGLHNLNRTGDMEDLLISNKDLRKNPSHGLDIDKENNPNGASVGSGLNISKKQQNCMTGLNVPCTSQIQNAASYETVDKGTDYQGWLDAKKRKWKYVREQKKRRRLGAAATFDDPNALLSARHANQLPVNSRNRSTFFQKQELALFRSHWQIIQLASSTVPGHFFAWVVAEGIMFKIPINVPRTFYLNSKAPVTEEFPGRRVKKILPHGRPCFNLIEVVTTEEQFRAEGKKLAAHLAEPDVEGIYETKIPPELNAVLQIGCVCKVDKSAKRRSIQDGWDLAELQMKTTAECSYLEQTFSFFYLYHSLSEGRAVYVFYFPTSFRIHAVIVNPFRNKEISPSFLEKQFGDACQALGSVPENLSFHVDYQTSIDAGSKYAQRMLLEYRQQHSGPVVGIIECPKLQAIKVAIRALDDLPCVTIPSNARDNNYQALGWQATAGRTSMQRCAASTQWFNERISLAKYAHVPLGNFELDWLLFTADVFFSRALRDQQQVLWISDDGIPDLGGTYEGETCFADEVIQPALTYPGAYRRVSVELKIHHLAVNALLKSSQVDEMEGGSIGSFGNDVPPGSNATETDFDDASLCIPAFQVLKQLIQRCISDAVSSGNVFADAILQHLYRWLCSPRSKLHDPALHRLLHNVMKKVFALLLAELRKLGANVIFANFSKIIIDTGKVDLSSAHAYCDSLLRTLQTRDLFEWIELEPLHFWHSLLFMDQYNYGGIQAKTQNVDSSDGDNDIDIVSSWNMAEDLPKDTQDHFVLIVSEFLYIPWKFMKEQVAAQATIRDDTSCTPSVTIMAAENLEGQVIEHLRDKISNYFADKLLRTVSDILHHFKGKSKHESDEPAKSDPHTHKGDAALEFIKHICAVLALDQNVQHDILRMRKNLLKLVRVKEFAPEAQFQDPCASFTLPNVICSYCNDCRDLDLCRDSALQGQEWRCAVPQCGQPYHREQMENALLQVVRQRERLYHLQDLVCVRCRQVKAAHLSEQCSCGGSFRCKEEPSYFLSKMRVFLKVAVSQKFPLLQDCVQWILEAR

SEQ ID NO: 67364 - protein, 228 aa, Zea Mays
MTKSGELQYMTTFLNRRKLFEMLTLSGALAEMAWPAILSKRDTFREVFMNFDPQLVAKLNEKKFLAPSSPASSLLSQHRLRIIIENARELLKVIDEFGSFDSYCWSFLSNKPTVGRYRHTREVPLRTAKADAISQDLMRRGFLGVGPTVVYAFMQAVGMANDHLVTCYRFEECCDLESCAAPEGYGGDNCKKPPAAASDQELSMLCGLVQCVALEPSRAATATVISIS

SEQ ID NO: 67365 - protein, 367 aa, Zea Mays
MAYDMKSLTVLIIGRLLCGMGSARAVNRRYISDCVPARIRMQASAGFVSASALGMACGPALAGLLQWKFKVYMVTFNQSTLPGWVMAVAWLLYLIWLWFSFKEPNRATEVNEAPQNPASGQTVDIGRLENGIAQPLLKDSVDKQNEDEDEVDDIEETADDSRKPATSIGSAYRLLTPSVKVQLLIYFMLKYAMEILLSESSVITNHYFSWNTSAVAIFLAILGLTVLPVNAVVGTYISNMFEDRQLLMVSQITLLVGIIFSFKVTSTYYVVQYVVSALVTFVSAEVLEGVNLSLLSSVMSSRLSRGTYNGGLLSTEAGTLARVVADCTITAAGYLGVGKLLNVTLLPSLVICVASIACTFLTYNSLF

SEQ ID NO: 67366 - protein, 149 aa, Zea Mays
MTKVNHCPLNLMEKKTRWQTQKMTSLILVSTGVEKERDQEGGNVMPGVGILIVIAGVASLIVRGTGDAALGKEVQDTQTRRNQGAIHHATGLTTTIRIHLVRKIGIGTIDQGDEDPRSAGLRCMETTTWQCRPDHENLWIIIPLVVVLA

SEQ ID NO: 67367 - protein, 915 aa, Zea Mays
MAFFSNSGSKADSEGYNLNEKADDDGIHESIRDGNDGLNSRQWNLNEKAEDAYHSEAEQYESGQSGLYASRQHVQRGGRSSGGPWGTNFLKDSRSKQTAKEVASNSGRGMDAANSHDDMDGSREDDELNRANGEVPAEEMLSDDYYEQDGEDQIESLHRGGMKQSSCSTSGGAAKSGSRQMKKMSKYNAYDNDEYNDENDDDSDADEDDPADMDFEPDGETDKATDKDKFMDSENSDGDDDDDLELSDDEDDFVENRRQPKRLKIVATKTSKGGQLPMPVQPKRGVSHSDEEYFSGKDSDVPSDSDFKHIPKKPDRLHQKPVGRSDVAPISSHNELRTSGRRRTVKKISYAESEESDDSEEKSNKRQKLIKEEPEEEDGETIEKVLWHQPKGVAEEAIRNHRSAQPTVASLTSDFDQQWDELEFYIKWKGQSYLHCQWKILSELQSVSGFKKVINYTKRVSEEQRYKRALSREEVEVERIFADRVSKADGDDLVPEYLVKWQGLPYAESTWEKDTDIDFAQDAIDEYKAREAASAILGKTVDFQRKKSKASLRRLDGQPEWLKAGKLRDYQLEGLNFLVNGWRNDTNVILADEMGLGKTIQSVSMLGFLHNAQEINGPFLVVVPLSTLSNWAKEFRKWLPNMNVVVYVGNRASREMCQQHEFFSDKKGGRHVKFHTLITTYEVILKDKAVLSKIKWNYLMVDEAHRLKNCEASLYTTLLEFSTKNKLLITGTPLQNSVEELWALLHFLDPVKFNSKDSFVERYKNLSSFNETELANLHKELRPHILRRVIKDVEKSLPPKIERILRVEMSPLQKQYYKWILERNFQNLNKGVRGNQDLDWNNVTILSHLLLLGQAVPHLLLLAQEVSHLAVHYLSNWSMGKATRNAATIHSCLKVPIMVMVEIASVIGIKLNVLL

SEQ ID NO: 67368 - protein, 312 aa, Zea Mays
MRRGAALLLVAVFAVVAVAKPGLGKLEQHEQANPNKEHVTHQEGGVSNDIGDNNKKDNSTEVTNIRRDGSIQQPKHKDSIMTKSSQPLDFLEDSLIKECDPSHRCIIENKKFIACLKVSGEDSLALSLLMDNRGINPLDVSIMAPDYVTLAEDSIHVEANGHNETQVRVSVNDDANSTTIVIKVAEKSCNISIHSAITRETAGSGRVIRMPLTPTYTLLPVFLLLVAVAVCIVVRRWRNQDGDPAYQKLDMSDLPVSVGGKKEHDDRSDKWDDNWGDDWDDEEAPVTPSKPLPNPSSKGLAPRRSAKDGWKD

SEQ ID NO: 67369 - protein, 675 aa, Zea Mays
MSHLLEREADTAFLPHLDQRDGVEAWLILRRCTPASFNVASTDPNNEVSSAVTADALAKAAPALFASRAPRPSLKYLELLLQAEIDFDHIDLPTAAAAEHIVAQVTGNNAVSVVEDQLRCTLFLTRNFLSSHHQAVSKEWDMVAVVHPVCNVGEKKVDAICTGQIEHLLLHHLKRSPTSIGAKAVFDEMQQSTNSATTTPASSALTTTTTTTMAAPATWLDAQPAVSTCSSASSAQEDTPIPLLFLRGGLSMMDNVLPANSTFLSTNISLSNMECLREFMLHLKLGTARFTICDESVVNLWSSPVERVVQQQTWLQLELTNSGLDLWPISWQSQQVYFGTHHGFAAWPRSHGTILVFDFSNTLSWNNSMSIVASCSTNTLLAKDDGDSMNRCFSWCWKPPWLHPGVCRSLHMITKFSKQYFVGLFLLITREKFMSGRIMLALLPLLKLFTSGGARIVNASSLASELKRMPNEKLRNDLSNIDIWDEDRIQAVLNTFLEDLRSGRLEEAGWPVMLPAYSLSKMVINLYTRIIARRYPEMRINCVRPGFVTTDISWNLGVLTPKQGARGPVMLALLPDDGPTGWYRDEMGDKMGSLLFFKMVKYSSLVEGFCGVQFSFPNILLCKSWSQELATNTESHLLPEMLEAANGYICHELHLMLTSIGVTHMIDCEDTPSFL

SEQ ID NO: 67370 - protein, 217 aa, Zea Mays
MQKPVASVVSLCPQLWHRHFRRAPLLPRARGLPSSSPILTRRRSVLPRSTSTHLAAVSTAAAAAAAPSATPYPVYDRLLPCPLQDDPPRIEHLVAREDEVAADFIARSLGLPPLYAADLIEFGAVYYALVAPQPPPYASPEHFRLFREVTEPSVLRRRASIKGKTVREAQKTFRVTDPNQRLEAGTYLRVHVHPKRFPSLYFACIRIGNAIADDSPD

SEQ ID NO: 67371 - protein, 288 aa, Zea Mays
MKYLHPDLGVELPERSYGTDCRIYVPDHPKSRFNNVYEIIFDEFVIAHILGWWGKAIMIRNQPLLWVLSIGFELMELTFRHMLPNFNECWWDSIVLDILICNWFGIWAGMKTVQYFDGRTYEWVGLSRQPNIISKVKRMLGQFTPAQWDKDEWQPTLGPWRFIQVLSLCVVFMAVELNTFFLKFCLWIPPRNPLVVYRLVLWWLIAIPTIREYNTYLQDSKPFKKVGSFCWLSLAICIVELLICIKFGHGLFPRSMPSWLVTFWSAVALLLALFVWTWKYRTVKRKRV

SEQ ID NO: 67372 - protein, 119 aa, Zea Mays
MDGLNYSKLRSSLRPRLQAFSGVLFSSLRSLDGLLHMASVAVLQFVHDPHDDPPVLGCVHLTLARVYALDRARSLSLVKDHFTTLGKDLTVIGYCCDDAEPRRRQLQFYVAESMFRVAV

SEQ ID NO: 67373 - protein, 206 aa, Zea Mays
MDAFLHRLKRLDAYPKVNEDFYKRTLSGGIVTLVAAVVMLLLFISETRSYFYSSTETKLVVDTSRGERLRVNFDITFPSIPCTLLSVDTTDISGEQHHDIRHDIEKRRLNSHGNVIEARKEGIGGAKVERPLQKHGGRLDKGEQYCGTCYGAEESDEQCCNSCEEVREAYKKKGWALTNPDLIDQMSVKLLEIFTSPQAKDFMNQT

SEQ ID NO: 67374 - protein, 100 aa, Zea Mays
MWRCRGLTERKQKMTVWENMQKAEAEAAIQNLVIKLEKKRPYSLERIFNTLRSGSRKTQVVRSTSTANQNQHISRTIKTAPNLSKNGQMSSLSGCFRQDL

SEQ ID NO: 67375 - protein, 145 aa, Zea Mays
MAPRGHHLAEVALLASASADLAAAGAGEREGWLDDPAILPSLGPRARSLAVASAAHSVLVIVAVAGGGGGGVTVEPALGPDEGRISAVEWVPFAGEDDAEGEEGVSVVIGTDAGWLLFYSLAGDLLHKQVVRKILSIWISVDTAF

SEQ ID NO: 67376 - protein, 608 aa, Zea Mays
MLNADVARNNTNDQYQTLKDPVNKTYTTHSECSIEFEVDGPYKAMILPASKEEGILIKKRYAVFNEDGTLAELKGFEIKRRGELKLIKVFQAEVFDKFLHGSTLEECYSAVASVANRWLDLLDNQGIDIADSELLDFISESSTMSKSLVDYGEQKSCAVTTAKRLAEFLGDSMVKDKGLHCQYIVAREPQGTPVSERAVPVAIFETDPEIAKHYLRKWFRFSSDANIRSIVDWSYYKQRLSSAIQKIITIPAAMQKISNPVPRVLHPDWLHKKVREKDDRFRQRKLRDIFSPLAKEEGLHNLNRTGDMEDLLISNKDLRKNPSHGLDIDKENNPNGASVGSGLNISKKQQNCMTGLNVPCTSQIQNAASYETVDKGTDYQGWLDAKKRKWKYVREQKKRRRLGAAATFDDPNALLSARHANQLPVNSRNRSTFFQKQELALFRSHWQIIQLASSTVPGHFFAWVVAEGIMFKIPINVPRTFYLNSKAPVTEEFPGRRVKKILPHGRPCFNLIEVVTTEEQFRAEGKKLAAHLAEPDVEGIYETKIPPELNAVLQIGCVCKVDKSAKRRSIQDGWDLAELQMKTTAECSYLEQTFSFFYLYHSDCQSFP

SEQ ID NO: 67377 - protein, 454 aa, Zea Mays
MGAGSSRADAPSRRRARLGLGGCFGTRSSSSPAAAAEAHDGGSFTLAGSSSSSAIEVQSGRPVRALNFQASLAAKDLQISTASSPRLHSSSSTISHHLRFNHLNCHENKEDGLGTENAETSGLESSSRKAVMVRGSFSNEAVNSDMSGEGISFIGSELENIPSTVSTNETGGSAAESGLGPSLMASERIMSDLEGEVSPQGTSSTTAMTSERSDVSQASLTSMFPNSSIASSVIVEPMPDPISTRADVPIFSGPHGEPGGSILHDDMMSIFSNDGLGRSRDSSSSETRRSHRRILWDTFSRRGSRGYPEFDADDLGFYSTWLDLGDDIFEELGESRYFHRRRHGSIRIREHRRAVFDSGNEQGTAACPLGIHQTGRCTCDSFLVAEESSARASISRIVMLTEALFEVLDEIHRQPASLSLSMVSVQAPESVVNSLPCKSYKKLEAPQRSDDMEQ

SEQ ID NO: 67378 - protein, 50 aa, Zea Mays
MAAILHCFLPQDLPLRNKDREKEGHVELKRKRGSRRCSSPSPLEDFLGKP

SEQ ID NO: 67379 - protein, 538 aa, Zea Mays
MLHQENSEPFVRHHSEQLACGNMRGADNGRPNFLPEKCQIAVCPEVCQRGEKVSLFDEGLIHGVDLTNHIAQSQLVPSGVKETPIVDQNKRPASSDMLDIVECKRLKQEGQIVTKEDNHTSAEDFHEYPTYTTCRRSFDSPLSESEDSEDEGVDSPLHFSHAHTYVEDDLWPASFHHALGPFPLRKPVPIGPNHQAELPECRPFCGRTEEGESVKWIRNGVVPMPDTGASSLVLEPVHCKADCECHDEGSIICVKKHVREAREKLKGSVGADTFRELGLNDMGEEVGSRWTEEEEHLFQQVVLSNPASLCRNFWDELPLAFPSKSSKELVSYYFNVFMLRKRAEQNRFDPVNIDSDDDEWQAGDDGEYPITGRTDEYLPTESLTDQDDVACNPVPLERDLYEDSDDEDELDNASGDRHNGAQRAGMLSEGNRVMSVIEHNQQTFKLDAEAQDDSCTSFEAHQVGVEGGTHTDIADDNHYRSDGFGGGAEHGFFGNQCDTKEWDFGLSIGWEKHDFLSTNNVIEEVFGKCCDTADQDLI

SEQ ID NO: 67380 - protein, 341 aa, Zea Mays
MTQQATRHARRVYVGGLPPTANEQTVAIFFNGVMAAIGGNTAGPGDAVLNVYINHDKKFAFVEMRSVEEASNAMVLDGIMFEGAPVKIRRPTDYNPSLAAALGPSQPNPNLNLSAVGLTPGSAGGLEGPDRIFVGGLQYYFTEAQVRELLESFGPLRGFDLVKDRETGNSKGYAFCVYQDLNVTDIACAALNGIKMGDKTLTVRRANQGASQPRPEQESILLQAQQQVQMQKFVYQVGGALPTKVVCLTQVVTEDELRDDEEYDDIVEDMREEGHKYGNLVKVAIPRPDPSGAPVAGVGKMWRAQPKQRQGCMGGNSAGTRWWRCSTLRTSLQLSSTTEKF

SEQ ID NO: 67381 - protein, 131 aa, Zea Mays
MSLVVQQSTIHLTKPLFDNSSYFEVIKFPGGITIIPPQTAFLLQKPHATFNFTLNYPIYKLQDRTNELKDQMEAALLLNPYELFACPAALSRSYRWTSPCSCTSCVRRRKKLMADQIPECSSRVRKIVIRF

SEQ ID NO: 67382 - protein, 368 aa, Zea Mays
MPTPTVSIYATQHRLSWERDSGLCPVPDVGYVAGSLHIHPCNVVYTSSSRGNRSGGTVRNCHRCYFSVVSEGLDRNAWRDIVHLLPGMLMDLLSPLFPSSLIVIMCLGSLSRSFTGVASGATRAALTQHFALANNAADISAKEGSQETLATMLGMGLGMLLAQITRGHALSVWASFLSLTMFHMYANYKAVQSLSLTTLNYERASILLQYFKECGEVLVPRKVSQQEHILPSWSNWRKLNRIKLPHERVHLGAKASMLTHSDMLVIAKTRYHYENANYFLLDKQGIVYVFIHKEATPADVLRSFVHGLVLASSTQNSKPQHLEARRWMDEMYTSFISKTEGYSTERLLSHSILWRAHWLHGQLDEKLK

SEQ ID NO: 67383 - protein, 485 aa, Zea Mays
MESDSADRGEASRHRSKRERPPDPEGDACPDVGRRRVAAGPGVDAGANVPDLGDQKEFEHGEKLQRIPKQKYQPSHNQQPQDDQQWLVTCISQYLGFSGSKPVAALLIYQCLLHWKSFEAMKTGVFDSILHAINSATEVQNDMRTLAYWLSNLSTLTVFLQRSFKTTRTTISTPQRRRFSSERMFGNQTSNAGLAYLSGQSVGSAGLLQVEAKYPALLFKQQLVDLIEKVYGMISDSVKKELNPLLELCIQDPQTSQSSIAKGNLNGMGQQNQLTHWLGIVKILTSYLDVLRENHVPSILVHKLFTQMFSLIDVQLFNRLLLRRECCSFSNGEYIRAGLAELKHWSDNATREFAGSAWEALRHIRQAVDFLVISLKPMRTLREIRTDVCPALSIQQLERIVSMYWDDVNGTNTISAEFTSSLKSAIRDESNMATNFSILLDDDSSIPFSLDDITKTLPVIELADDDFLPFVHENPSFAFLLQRGE

SEQ ID NO: 67384 - protein, 746 aa, Zea Mays
MRYVRLGLLLLDLQVTILFWQNGLSTGRWALTHPSTDLEDEKLKRHMKPDFLDMVPWYSGTSADLFKTAFDLMVSVTLFVGRFDMRMMQAAMKGPTGNTPNDDLLYDHFNEREDLWFDFVADTGDGGNSSYTVARLLAQPSIRTVIGGSMHTLPRGNLLIIGGDLAYPNPSSFTYERRFFRPFEYALQPPPWYRDEHIALDKPELPPGVSKMTEYDGPQCFIIPGNHDWFDGLHTFMRYICHKSWLGGWFLPQKKSYFALHLPKGWWIFGLDLSLHGDVDVYQFKFFADVCQNKVGENDSVIVVTHEPNWLLDWYWNETTGKNVSHLIQEYLKGRCKLRMAGDLHHFMRHSATRSEKNNFVQHLLVNGCGGAFLHPTHVFRNFERFSGTTYECKAAYPSYDESTGIALGNILKFRKKNWQFDIIGGFIYFILVFSMFPQCNLVRILNEETWSGRLKSFSGTIWSALLYIFEHSYVSSVGSLTLLTASYSFVPSKLSRRRRAIIGGLHVLAHLTAALLLMLLLELGIEICIRNHLLATSGYHTLYEWYRSMESEHFPDPTGLRARLEQWTLGLYPACIKYLMAAFDVPEVMAVTRINICKNGMMSLSRSVLIMYYTSVFIYFWIFSTPVVSLIFGSYLYICINWFHIHFDEAFSSLRIANYKSFTRFHVKKDGDLEIFTLAVDKVPKDWKLDPRWESEGRGPHQLSHDRKHPSKWRSASSTDPVRSVRVVDHFTIERTRTPDMEPSS

SEQ ID NO: 67385 - protein, 314 aa, Zea Mays
MEGYIVTGSKQVEIGNKLSDDSQKYGAENTCTSGDTLSKAATYFGKARSQMEKERGNMLNAFGTQVYVPNAGFASPCGRATAGNGNGCAPLEDARHLAQRYDRTRQEAEAQAVEVSRRQNRVRESAGNGDMISKLEAAEYKLEELKSNMVALGKEAISAMSAVETQQQWLTLQRLIALVEAERGYHQRVLEILDQLEKEMVSERQKIEAPLTPAADNYMPPPPPSYDEVNGAFASTSVNESVQSVNFFLGEALDSFKAESEFELTLSAGDIVIVRKISSNGWAEGECKGKAGWFPHAYIERREHVLASKVPHIF

SEQ ID NO: 67386 - protein, 1995 aa, Zea Mays
MVHSTTSSHKCVSQVSATTIGQLTALIRQSRPITRPFTAPGPSVRARMTFTSVVDHRSCAPHLHTTSRPTWLHKHNLTLWTNMQIRRKSMVQCGKALVGFCGASDGHERGEPRGARVLKRTVGHSVANDGPRHPARFSMGDGGVACAVRSVESFRAGALVRRGGAGEAMPDKGERAHGHRHQHQHWKNQQSATAADLEEGELLNGEAGTNGLPERSMPPKKWRKVLAASAAAVEVEPGEIVSTKQAVPLKKERRNGDVEKVELLPERQRKEKSSGKSTRKSIKDDVEPGEIALPGKRRDAKSQLAHDNSRRPSSSAQKGSLRDSDEEPGEIKPESGISGSVRKNRPTEPHSSNHKHHTDTSDQSGSKHRRKGEGKSSSAARHLSGRIREVSPPTRDRRDKHERSPGILGRFPHDRFRHDRYDRSPSRLERSPHRTRHYDSRDRSPYISPRHRARPPQFRDNTPSRVDNSPRGRVQHEDIRDRSPFRHDRSPSERCRPTDTHEASKKSRSSNNSEKSHHKSKSAKQSSKIKSGSNGKNEEKISKEKHTESSQYTELPPPPPLPLPPPPPPPPPPPPLPPAVPPPLPPSPEPEPPGVLAEDMIEDMDICDTPPHTSAVPEPTEPICDIGRWFYLDHFGIEQGPSKLAELKKLVQDGYLLSDHLIKHADSNRWVTVENAASPLVPSDFPSLYSDTSTQLVNPPEAPGNLLDEALEEASNLASGAEDKQMEETSAEDSEEFCIDDRVEALMDGSILVHGQELEIIGELLGADFQPADWQRWSRREDFTRLNVHTEVNNEINGGTENRATDAYGLVSVEKNFHHNAESSEWFSGRWSCKGGDWRRNDELSQDTPFRKKLVLNEGYPLCQMPKGSCEDPRRPCKDELYYPVRAKKYELPLWAFSLTEEDIDSVNDTTKSGVVPGRPGQTRQPSRGVKGMMLSVVRINSRVVKDQSSVEPHTKPRGTDRPLSRSSRSHSIGAERSSVHEGSSHFRKHHDHDSQSSHKSKPVPNIPKDRVCTVDELSVYRGDWYYLDGTGHEHGPFSYSELQELVKNGTIIEQSSVFRKIDNTWFPVLKDLKPGSSVPSAARSSSFTAALMLPDQYNFGVNQGSGSFNQLHPQFVGYTRGKLHELVMKYFKSRELTLAINEVLDPWISAKQPKKEFEAYFSHNSASRNLLPEDGGSAKKAKLLPDQSDEDIHLSQDILASRKEDICFDELCDAEPSVDNDSLNPGAGNETWGLLNGHVLARIFHFMRADVKALISSAATCRSWNAAVKYYRNMCRFIDLSSVGPLCTDSVFCDIMAGYEKQNIRTLILAGCSNLSSHALGRVLEQLPQISYVDIHGCGHLGDLKNKFQHVKWIRSSLNPEESYRKIKTLKQIGDGNNYASKVARNFTNHLDGSDELDGYFADISNRENANLSFGQGFYKRSKLLDARKSSAVLSRDAEMRRLMQRQAETSYRKMEEFIINRLREIMRSNRFDFFIPKVSKIEGRLKNGYYARHGFRTIKHDIRTMCQDALRYKDGNDSGDIKQIVVSFIQLAKRLGNPRYISDRYGAGAQDSLDINQYSFDTKLKKKQNKIRGANSLAAGADNSSRAFDLEIKRSLSKLKKKDVYSGSETSDDDDGYSEVDETESETTVSDTESDLDVNSGAWDLKGNSLKLIEPGESVTDDRILGARMTKASLVPPVTRKYEVIEEYLIVADLEEVQRKMRVALPDDYSEKLLSQKNGTENLELPEVKDYQPRKVAGDEILEQEVYGIDPYTHNLLSDIMPADLELSPTDKHIFIEELLLNTLNKQVRHFTGSGNTPMTYNLRPVIEEIQRSAEDNGDRRTSKMCLGMLKTMRNRSEQNFVAYRKGLGVVCNKKGGFGVDDFVVEFFGEVYPSWRWYEKQDGIKHIQNNSEDQAPEFYNIMLERPKGDGDGYDLVFVDAMHKANYASRICHSCNPNCEAKVTAVNGKYQIGVYTLRPIAEGEEITFDYNSVTEKSMKHQSASVEVKYAVAAI

SEQ ID NO: 67387 - protein, 821 aa, Zea Mays
MPTTAPPVDAEPPECPVCLSPFDAASVVPRVLPCGHSLCGSCIAALPPASAAAGASSLRCPLCSQCVPYARALGPSSLPKNLALLTLLPSPSHALSAATLVTAPLPHPHPLHAAHSRLLSRFRHAVLPESASPLGSEPSPVHLAFGSLGSDLGAPWFCARGRPVSLLPIETQPVPPTKQEAEFYRPSHATRVLAAVDALSDATKEELAGLIASSARLARMVSRLYGVWMSPHAPPLWMVSERHPRTVSQLLEEEIINREETVVRAGFLVMEACEVIMGLHSEGLVLGCLGLDCFCLDRFGHCMLDLNQALALCRGVQAGASSNSVRAFIAPEVAAVLGDTLRTEGRDFDGLVGCTSDIWSLGCVFVALLTRDEQLVPVAGWNSEGLYDDWEKEVVTRLDATLLGTILEPLAAVIASCLRYDPKSRPEIADVWKCIRGLLTKFGDVTLAPDDDVAAQKSFRCLLLGELSSMFVDSGAVESDDKTQLSRGADGNSSNQDHGSNDGFLNNSGNDLSGIDGPQSVGVFKSSTLLAHRDCVTGLAVGGGFLFSSSYDKTINVWSLQDFSHVHCLKGHEHKITAIVVVDNDSHSLCISGDSGSGIFVWRVDSTLKEEPLNKWYEHNDWLYRGVNCLAVSGTGYLYTGSRDKTIKAWSLEDYSLRCTMTGHKSTVSCLAVASGILYSGSWDGTIRLWWLTDHTPLSVLEDDAAGSIAPVLSISAGTNFVASSYENGYFKVWKNDVLVKSEKLQNGAVYAVKLSGKWLYTGGWDKVINIQELLDDESEVELRDVASITCDSIITSILPWDERLIVGLSNREIKVYYKAS

SEQ ID NO: 67388 - protein, 651 aa, Zea Mays
MAAATEKTAEDIRRELQELQRQHREVHLLLCPAHLEASSLRAVCPDPLVVPSQITERLRDPCGLRRGTPGPGPGPGPPRPLRGFVRPVDGSENNEDDTKDADGEGQEAGSGATEGSDRRTFNIGGFRRDGSLWMQRRVDYNSLPEPAPRELPMNEDPSLAEQKVREESERLRQQEREQIAEKRKCDMMLHARVAAKAEEKSMELLYIHWTEHHKRLSNFLSCLSEYAVYISYMNAGCMVISGDSYTVYAHSKIICHQFAMFCPTEVDYTISKKNMTFQIYCCPRTTAELEAHVADTSLVSADAPRVLADTVLDISGGERAFIEADEAKELLSPLTKPGNSYKRICFSNRSFGIGAANVAGPILDSVKNQLTEVDISDFVAGRPEDEALDVMRIFSKALEGSVLRYLNISDNALGEKGRKLRKLYLSLFLQLKLKVLHFHNNMTGDEGAMYIAEMVKRSPNVESFRCSATRIGSNGGVALSEALGTCTRLKKLDLRDNLFGVDAGLALSKTLPKLPDLVELYLSDLNLENKGTIAIAKALEQSAPQLEILLKMLPKYYNHVRAYDNTLITKKFGVHRITLKGGRKVRFVVMGNMFCTELRIPRKYDLKGSTQGRSTKKQNINENATLKDLDLSYVFHVDKPWRDTLFRGAYP

SEQ ID NO: 67389 - protein, 373 aa, Zea Mays
MNETLKQNRLQRDHVEGSCSYVTEDQSNANDCPNKDDASRIIGATDSDSRNRTGPTQKAMSLPSSPHEYRGQDTQKGDDFISKEKMALAWNKVFQSSPFLNKPLLPFEEWNIDFSEITIGTRVGIGFFGEVFRGIWNGTDVAIKVFLEQDLTTENMEDFCNEIYILSRLRHPNVILFLGACITPPHLSMVTEYMEMGSLYYLIHMSGQKKKLSWRRRLKIIRDICRGLMCIHRMKIVHRDLKSANCLVNKHWTVKICDFGLSRVMIDSPMTDNSSAGTPEWMAPELIRNEPFTEKCDIFSLGVIMWELCTLSRPWEGISPVQVVYAVANEGSRLEIPEGPLGRLIADCWAEPENRPSCQEILTRLLDCEYTVS

SEQ ID NO: 67390 - protein, 714 aa, Zea Mays
MGHNGIFRNDTTDVYEEAIPNWREKRPTKSLVVGRPILLALEDIDGSPSFLEKALCFLEKHGIKVEGILRQAADVEEVDRRLQEYEQGRTEFAPEEDAHVIGDCVKHVLRELPSSPVPASCCTALLEAFRLDIKESRIKSMRAAISETFPEPTRRLLQRILKMMHTVASHTAENRMTPSAVAACMAPLLLRPLLSGECELEDDFDMSDDSAAQLIAAANAANSAQGIVTTLLEEYESIFNDEHFRCSLSPDSQTGDSGSEESTDDETVDIKDNGFHDAENDVDQELDDAERILNGKLSETSACVHADLHDYKEVNGNDSDAELFVEDNTFEPNVNLNDTPLSRLIENGKKPSNLASSHETPLSVGEILSSLDAGVPLPGRAAEYSKDRLSSKPNGIQQHVKRTNLWGRSNARKGQRSELVDPSSEEELAIQRLEVMKNDLQVRIAKEARSNAILQASLERRKQALHERRVALEQNVSRLQEQLQAERDLRAALEIGLSMYSSQFSSSHSMDSKTKAELEEIALAEADVARLKQKVAELHLQLNQQRQHQYGSSVDANDCPPHLPNHLSQNTVQTGFDRTVAFCNQEKQRNEESLPCTSHWRSIKQHVLSQDSSRPFSRKHSSDTSLSDSMEASTSVLAEGGPLLVNIARTTEGVEYGRPPTVPSSTLVELTTRLDFFKERRSQLMEQLHSLDLGHGSASHGFPYKSSSPWNNPR

SEQ ID NO: 67391 - protein, 736 aa, Zea Mays
MKACEQSNPNSVDGHLFILSKQVKICLLPLGFAAGTMRHWFDFGNKIICTILDLLKDSLKTLLDAVDDGNLDRYCIRITEYSKNIVLSGCPQVTTAFLYISVLPNDLSVSLKRRIVSSYTQVDHQTFVLYEELEKATKTLSFKNVHMVDISKCPNVHFGAAIDWLKLGFPELRVFRVSHCLSFQFDDLLYLLMRCPWIDEIDMTIDTSTVTPRHSVISSSSEVLSKAKPNQKRYGIHCSAYDRQPNSVFLNISRLTLEGRNDIDDMDLLEISVLKNSLCYINIRNCFLLTDDGISNLLMKCTKIHSMVLSYTSFGNRSIQMLCAANPSGHNSGHAHVMASYMQELHLDGCKGIDSVALSQLVSIISITKFLSLRETSLTDGALCKFVGSSLEYLDVSETVISMVSLAPVIQRNCKLNCLKTAGCCSLLLQCANVEHINGNKYGDFLQELGTTYCLEDVEMGWGFCPIRIEDLVPSFSKVRKMKIGLGTSLAENVLCALPMICPFLESLILRFQVISDRVVRRLLESATNLQVLCLHYCLGSLTSFSFQTKAPALRVLRLHWVTSWLTNDDLTILTENCNLAELSLSGCKLLDSSSQDIISSGWPNLALLHLEECGKVTVEGVSSFFNCKALEDVLLRHTGRGIGRSIIDDAIRELPLLRKLALDLCDACEDGYDSPNDAEGKMIRSVRMSRCKKMAGSCLEVPRQGSSTSRPVHKDTVVLEWSSRMFTTTIVKERV

SEQ ID NO: 67392 - protein, 80 aa, Zea Mays
MTSLTCAQNKEDMGSGRGWKQAAAGEGLCHENRGISRGGSTTSCEEASHGEGESCARSGEEGHMVEQSTMAITWRSWEHV

SEQ ID NO: 67393 - protein, 444 aa, Zea Mays
MAGYMSRGPQNGSVYVCNLPPGTDENMLAEYFGTIGLLKKDKRNGRPKIWIYRDKVSNEPKGDATVTYEDPHAASAAVEWFNNKDFHGSTIQVHIAESKSKDAFDNPTNLNTIAGVSEQDEVDNGAGRGRGRGDGPGKAWQQDGDWMCPNTSCGNVNFAFRGVCNRCGAARPAGAGGTGGGGGGRGRGRGNSDARGSSRAGAGAATGGGPPGLFGPNDWPCPMCGNINWAKRTKCNICNTSKPGTNEGETGSKEVQCHFGPLPIVVCIAIFLHFRGGRGGGYKELDEEELEEVKKRRKEAEEDDGEIYDEFGNLKKKFRSKALHTGSAQTLPGSGRAGWEVEHRGSSEREGRERSRDRGRDDYDEKETRSIDRGDHGRDQRRSQDREREKGRERRDHEYERSRERDRRHRWYENFAWTRLALQPSDFLCCHIQARAATKQALRK

SEQ ID NO: 67394 - protein, 380 aa, Zea Mays
MVAIARSLNVTLIVPELDKTSFWNDPSEFQDIFDVEHFIISLRDEVRILRELPPRVKRRVELGKFYSVPPVSWSDISYYHKKILPAIQKYKVLHLNRTDARLANNGLPLEIQRLRCRVNYSALKFTSQIEVLGRRVIRMLRQNGPFLVIHLRYEMDMLAFSGCTQGCTPKETEELTRMRYAYPWWKEKVINSFVKRKDGLCPLTPEEVAIVLRALDIDKSMQIYIAAGEIYGGKRRMASLTLAYPNVVRKETLLEPSDLMFFQNHSSQMAALDYLVSLESDIFVPTYDGNMAKVVEGHRRYLGFKKTIMLDRKLIVELVDQYTSGSLRWDEFASLIKAVHSNRMGSAATRAAIPDRPKEEDYFYANPQECLQGPNMLQTL

SEQ ID NO: 67395 - protein, 122 aa, Zea Mays
MALDGAVGYLSLSLAPSPLPLLLYKGQSSLLPSSPCPKLSLTSHSHVHADHWSVASSPSAEARRSPPRSRPPRAEPLPQRSSTHAAIPRPSLAPRSPCRSCHLFVARLKITQNNLLIFEITC

SEQ ID NO: 67396 - protein, 691 aa, Zea Mays
MHIIVAILHVFHDFQKMGAGRKIETFFTATPSAQTQNQTNERYGTYPVAARNLREDELGGVIFGCKHNTIGECLSKQLFGLPSSHFSYVKNVKPGMPLFLFNYSDRKMHGIYEAASAGKLNIDQFAWSDGGRIKTQFPAQVLISMKTACLPVPESQFQSVISGNYYKPRHFFFELDHEQTRALIFLFKPAPVHDVSNKCHPSKSIQSPIVEAYVNPDGEYASESRTSTSHLDKEASNWDDVTTKEGTEFVNNDHPHINPPHVEQYGEVAVTQKQQDMFVLRQHEAESSKDTVDSASNKSMPQEAQFDATLPTDPSNSTSVGDVCIKDLTSLGQSRGNAELLHIVKELSKRNQAMEKKLSESDKEILFLRESMKDTGRRIQELEYQYEKLQSNYNSLVPLLGSRHDNMEGPSIILMGGYRGSTCLSSLDSFCPTTDRVVPLCSMSSARAYAAAVALKDHLYIFGGGNGSSWYHTVECYRMGSNKWIACPRLKHAKGSLAGTTLNDKIFAIGGGDGSAVFSEVEMFDPALGRWIDNVSMRQKRFAAAAAVLSGTLYVTGGYDGNTYLQSAERYDPREGFWTLLPSMSARRGSHSVAVMGESLFAVGGYDGNSNISTVEIFDPRANSWRIGRSCSIARGYGCAVTMDGNLYFIGGVNDAGETLGTVEVYNERQGWSISGCKSVGKRAFACAITV

SEQ ID NO: 67397 - protein, 367 aa, Zea Mays
MNARYVFEYNANDVVADAMYYARIQAIKAWYRANADDRPMPNTKVEWSSIYLREEQYLEVSVPWMATRSDGYRALCRWWASPEFRAISERNRGNRGTESFHNYGGDGHVRLAKRMEVKSGRMPTDVEVYMQGHRGFDPQNPDVLCTQTATDRLASYGQEMVQRHGEEYDWRSQPIDPQAAYASAGGQAHGRLGIFDSTIDSRELRRRGRQSTSSSSQSSRSRSAAHEIELAVLRQQAEYHQSVLREQLEYQRQQSEYQRQQAEYQKKRDEYYPSLQAQNQALLSQLSQQAGVPMPTYGMPPPDFALPMPMLAPPPPPPSQFPMGFQTPPASVAAPGDGSGQDDTTHSWVNNLFSTHSPAGGGGDGYE

SEQ ID NO: 67398 - protein, 772 aa, Zea Mays
MDPSFRFDPDSSDDEAAGAPPRGGPVQSPWEFSSYAESVAAEHARRRTTSIDEKISLLRQERGNPVVPDDSGSDVSGSGEDDSDDEEIEGESGDEEDELEESEDEGGVEGGTDDEEIEGSGDEEAIGDREGDEDGGDEKGGGELGEEDDAHEEEDTVDQNDTSGPVDPSNFFSSSDRASFHANSFLELNLSRPLVRACEALGYQKPTPIQAACIPLALTGRDICGSAITGSGKRVPAIRVLILTPTRELAAQIHSMVEKLAQFTDIRCCLIVGGLSTKIQEVALRSMPDIVVATPGRIIDHLRNSLSVGLEDLAVVILDEADRLLELGFSAEIQELIRMCPKRRQTMLFSATMTEEIDELVKLSLNKPVRLEADPSLKRPATLTEEVVRIRRARESNQEAVLLALCLKTFKRSVIIFSGTKQSAHRLKIIFGLSGMKAAELHGNLTQAQRLEALELFKKKEVDFLIATDVAARGIDIVGVQTVINFACPRDVKTYLHRVGRTARAGREGYAVTFVTDDDRCLLKAIAKKAGSQLKSRIVAEKPVAECARLIEQLEGQISIIIREERVEREARKAEMEIAKAENMIAHKDEIYSRPKRTWFATEREKKLLAAAAKESLDHGKSTSGVISAKKAEDLRLKEKRRREHEKNLPRKKRRRLEAQREMLEDEDDEKTKENDRGKQPMKGQSLVDAAYRKAKSLKAASKRAPGARKGKKEKNERQHSEKAPNRHEEMRDLFQNDMSEWKQGRSSKKNNKFAPKKSRNSFKSKARYKRK

SEQ ID NO: 67399 - protein, 60 aa, Zea Mays
MQTFPFVSEEDAVALHIVRTHDHHKIEGICHNSLVITLSRFMLSITNGWSCNITILWYTK

SEQ ID NO: 67400 - protein, 148 aa, Zea Mays
MQGAVPRCSSSCRAASSWLPWLGEHAPAAPSPRSSSVRSAAPPAVSWPPLPSCVAAVAFSSSPCKPERATALADDSPNIGPSPGAVSCTGEHPSDHVSSRSSLLPATQTAWSTGAPSPHACVYSCPASHLSKHREQRRERKTTAHVRC

SEQ ID NO: 67401 - protein, 417 aa, Zea Mays
MPPPQDGVDDSAARVPLLPPPAPRRAAVRLHPLPLLIAATLAASYRLLFLAPAPSYYQSLLLSLGSNDTAAAHLHALTIRPHLAGTGANALAAAHVAATLSSHSFRTRLTSYSVLLSYPAYRSLSLSAPDRDTVLFALKQETYAGDPYEAVSAEAVPTFLAYAASGSVSAEAVYANYGRAEDFAYLAARGIDVTGKVAVARYGEVFRGDIVRNARDAGAAAAVIYSDAKDYAAGKTFPDGPWMPPTGVQVGSTFKGVGDPTTPMWASSEGCERLTIAEAMSSDDMPGIPALPVSWKDGETILQLIGGDVAPENWQGGDGAAAYRFGPGPAVLNLTYTGNETMVTIQNVISVIEGGEEPERYVILGNHRDAWTFGAVDPNSGTASLLELNGCLSCKRRAGDLDGPSSCATGMPKNRIH

SEQ ID NO: 67402 - protein, 224 aa, Zea Mays
MHNLRSVSKPNAKLYLGLPFTPNRQCEALFGPTEGPTRSADVSLTLSTTRPHCSCSLDAVTSRMDGADIPSHSAADGDRPPENADDGGVEDERAAAPPPERCGALASAIAGVLAGALREHEERAAATARSQDEVAAAIDRLNGELDRLLENAPTMVIMHHSARISSIRKRISAMNMLLKSIQRRIDSMDRIISTDHSSPVQKAGNEVGTSTVMAFNITKLVVER

SEQ ID NO: 67403 - protein, 325 aa, Zea Mays
MLCAFFGNAGFCSVMPCHFSKLVPFPDGRGKNDVQCCCLLVLEICSLIRSVFTPELPISVDFGAMTEGDIHGQFVDLLRLFDLGGYPPTSTYIFLGDYVDRGKQSLETICLLLAYKLKYPDNIYLLRGNHEDAKINRVYGFYDECKRRFNVRLWKIFCDCFNCLPMAALIDDKILCMHGGLSPELTSLDQIKDIERPTEIPDYGLLCDLLWSDPSHDTEGWGESDRGVSCTFGADKLVEFLEKNDLDLVCRAHQVVEDGYEFFAERRLVTIFSAPNYCGEFDNAGALLSIDESLMCSFQILKPNETGAPHSRKPLPSKAPKGENV

SEQ ID NO: 67404 - protein, 195 aa, Zea Mays
MAAPIHARLLPLPLHPNPSPSLHASGTRRVPWPPRHRRRCFATPPSRNGSSSSPEIDWCPVPPDQLPVNEYEALAASLPFSWAAGGLRVYCSRLALTGAAVALFVGLPVAAFGGRGGAGGDALHLALGATGSGILAVTLAVVRMYLGWAYVGNRLLSATVEYEETGWYDGQIWVKTPEVLARDRLLGSFSVSCTY

SEQ ID NO: 67405 - protein, 597 aa, Zea Mays
MTLSLFTTLPSTPPSVLCHHHQLRSSSFAFSVMEGTTISIEIDGEAICLDSVGDNEQEAAENGEMHQTIYTDENGEQVAFDNQEQGREEDLAGNGEEDRDHNSIIPSREELTEELRNKVAYSEEEAYRLYCDYGHRMGFSVRKGKQYYFTGTKTIRTKDYYCSKEGLKDDEQLTEANFNKPETRTNCKAMVRFRVDSEGQWRVIQIIPEHNHELVRPEEIHLLRSVRTLSVPKSGVLNAMVNAEIQAMHDNLHINEDGTECHSQLSIRSYTLLEPKECEALVGYFKRRTNEQCMFYWDVEVDQEGRMTNFFWRDGKSRVDYDSFRDVVIFDTSYLTNKYNMICAPFIGLNNHRQNVMFGCAFLLDESLTSYEWLFKSFLESVGGRPPETIFTDQNEFISKAIEVVLPGTRHCLCQQLIEKKLMSHLGSINDSGTLHSLFSKCMRECESEAELDETWAMMHHEYNMQEHPWLTDLYQQRHKWCSALHKDAFDGGIESMDRNESLNNVLSNIDDESASLSTFVLELDKLAGSWRKTESLEDIQCNQAAPECTEMLNKRFCPRQLTRFLLIHQIKINILLQKILHQTNLLVDLSSTRDIP

SEQ ID NO: 67406 - protein, 544 aa, Zea Mays
MAAALASSPLVHLSTSRLRLPRPRASSSSAPGCSIGVCLGWRLKVGWRALRRCDRLRCFSTDGDGVEEGEKRGEEEASATAAPAPDPAPAETQVGAAEELASERSRSGSFSSSSSSGNPGVSSEPPLLSFSVDNIDTVKLLELLGPEKVDPVDVMAIKEKLFGYTTFWLTKEEPFGDLGEGVLFIGNLRGKREEIFAKLQRQLRELAGEKYNLFMVEEPNSEGDDPRGGPRVSFGLLRKEVSEPGPTTLWQYVISLSLFLLTMFSCVELGIASKISSLPPEIVSYFTDPNSTGPPPDMQLLLPFVESALPVAYGVLAIQLFHEIGHFLAAFPKNVKLGIPFFIPNFTLGTFGAITQFKSILPDRKTMFDISMAGPVAGAALSFSMFFVGLLLSSNPVGASDLVEVPSQLFQGSLLLGLISRATLGYRAMHAATVSIHPLVIAGWCGLTTTAFNMLPVGCLDGGRALQGAFGKDALFGFGLTTYSLLGLGVVSCSILCFVFLLQSWTAWFLSFSEVISSICHAHNNSMIRLILEDHCLFLGVCTC

SEQ ID NO: 67407 - protein, 483 aa, Zea Mays
MMSSTPLSQPATAGDDDDDMESLPLAAASDYASVASTFDPLFSSTSATATSPRSPPTRAAAFTLSPTFSSSFVDPPSYADATGAGAGAVSSSPCSASSPSSASPRSARVAASEYSFLAVSDPETEAEPAATSLVPGSAPTYVSYLVTSVRRGDPDQRRHSVRRRFRDFVTLADRLADAFRGHFVPPRPDKNTVESQVMQRDEFVAQRRAALERYLWRLAEHPAIGPSDELRVFLQAEGKMPLPGTTDMASRMLDGAARLPRQLIAGEDTVTAPQEVVQPAKGGRDLLRIFKELKQSVVTDWAGVKPPLVEEDREFLEKKEKLQEWEQQLTSASQQDTLHEHLSIMLSVRTAFSDRASALLTVQTLMSDLASLESRIEKLEAASLKIFGGDKARTRKVEELRETIRATEDAKFCALREYERIKENNRSELQRLDSERKEEFMRMLKGFVASQAAYADKIVDGWETVAEETSGYVGVRGSDSMTS

SEQ ID NO: 67408 - protein, 1859 aa, Zea Mays
MDVEMLPYGIISTFHCLSVRTSPLNMALLPCVYMQMDGVTLRHLLRPFAAQEAAAAGRVAAAPEQLFASHSTLQSGPPPRVGPSNELLTQVPGNYCTFDLAPDLTRANASNAAGTIDFTRAGPSSSAATLPKYPRHGLPASSSNEQSSFGALFPNRSANGMGIFTCQSSANEGIANVGVQFQDSSVHGLQKLPFKSMTHQHPTLPGDRIRVTCMNVGGEFFVGEAGLFGVICLCHRLRMSVAKFCEHAGGIPEKAGEIVCLENGMSIAQWFKFCIGVGGSIANTRWDWPEWAHMKSSPEEHILKSLASRNSGTGKMGLLSRYGKITGHMNKPAYSNDLSVEGGGHTNVEKLVNRTDETYYRKSVDVHETFTKNSALLQNSAVVNLGPAKNHPVHAFDLNPLTTPSGSPHFEASMGRHYNGNHLAHSHGIHLEKNFDASFCNPMPRFTGVMNHDSRACRPNFSNKTFQDTSTMIEFQKPQTHRPPINQNPSPKQATKISKSLSEHNEPSISTGNKKQPLEVVNGMKRSEGDELTDDTSKNSFISLFLSHLERNNTPEPIDDILNSNEHYLPKALDVACGSDHPESATRQIETRVPNDKHSKLASAIVHTKRRSEGISLSVASSGYNPQDASHANSQEHLIHGDSLSHLLPSQPNTGISKISARVSCHANCMSCIHVGNKSHQVAHGEIGVPCFYDKMARGHGTFERVDDCTHRSLRAFTKISCDNGKSCCSSRELLPSFCQNDQPTLGKSICGCCCKIQEDASKLGFIPGHMCRTHFSSDVGPVLANKPTIEGLDEFCACSCSTFTQRSSLCSREYVLQSSCDSCPINGLHCRSCMGHAADSLTKHSLFDPLNTKERGSCCNGRCCYSVVPKCLSSCDFTKHCDVIIDQIGHAAPKDNHQLQMPTRCCTLGENEKLICQCLSNKIAVRNLPQTSHCKDVSEKVMNQPSIAITERLENVSEPSVADDSSSKAVAEKKDAYRDSAVSKGQPNFGFSSGSSSIIVTKFQKSPEFNNVSSTAKHSKHKNLCDEGSRIEKSSASSYVPTSTGCEEPLNSSAKSELGPSRVKRKCNQISEGRRLEETDNEEHCSELLKKTRTLRCSVKGSESDDCTRASSQSSQKGVYQPQNEVNSFSCRVLRTKRKHPIMHLNKHVKQLHRQTKFFEGDEQPDAKGNFLGGLDSYDRKRQVEDMSTLDKTRHHQEGSRAFVRKLPKYVSLNCIVNEPNTNSEGACSGSGGIDSSLIATGITNDNRKSPKIVPLNLVLKKAKRCNAVKLRKTESTHLYEEKSSDCSVNSSDYSIEKYSVDDENCSPQAEYELQDSKRSRYSSNDLRSHVALHKRTSGGTKNRRTSVSLARIKKFGSKSVCYSGSDKDNAVLAHEVNARRYSGRLSSNSPCCVCGISDLEPCNRLIECSKCYIKVHQACYGVLKVPRGQWFCRPCKNNTMDTVCVLCGYGGGAMTRALKTKNILKSLLQGLMNLERSEYYVDSLGNASSECTSLQNPVDSAHGDNIMNAKNITSNSWTSGKYYSSLLGPQPMQWVHMVCGLWTPGTKCPNDTTMSAFDVSGASPAKRNTACSICDRTGGSFVKCRAVNCLVFFHAWCAHQRGLLQSEPEGEHNENIGFYGRCVSHAIVFSSHVNPKKEYFRNNNWTCARTEGFKGRKGEGFSDSSHKKYEEYSGEFGVSQEQINAWLRINGSKPCGRGQKEYIHYKQLKGWKHLVVYKSGIHGLGLYTSVFIPRGSMVVEYVGEIVGQRVADRREIEYQSGKRQQYKSACYFFKIDREHIIDATRKGGIARFVNHSCQPNCVAKIISVRNEKKVMFFAERHINPGEEITYDYHFNREDEGQRILCFCRSRYCRRYLN

SEQ ID NO: 67409 - protein, 574 aa, Zea Mays
MPQIQNTMRQNCTLLAVLCGEFAEKRQTPASLAPDTKRLRLSYPFPELASSGRLEVHTLINPTLEQFREAQQAVHPVFLYLQGQQQENEEEIGTLVWGDTDLSDPQMFVSLITPPFPTMVYLEVPTGEKLAQSLHSKGIPYVVYWRNLFSSYTASHFRHALMSVIQSSCSHTWDAFQLAHASFRLYCVRNNHVQSVKLGPCLLGDAPKTNVIPAGDEVNEEQGCSEGFPDIRIYDEDVSMKFLLCGVPCTLDACLLGALEDGLNALLNIEIRASKLQNRASAHPPLQAEDLPHGVVTMRCDITTCSSAHVSFLVSCSAQTCFDDQLLGSRIKNEIIEKRQLVRALLNNEDNKPSSYEPLPSMCVACGASTFEVWITMPKWAAQVLKHLAPEISYRSLVALGIAWEDFLKDVMQFLLQRGHIRLVPQGGLAEFPDAVLNSKRLDLYNLYKEVVYRGGFYVGNGINWKGQIFSKMHNHTVTNKMTGVGNTLKRHYETYLLEYELAHDDIDGECCLICHSGALGDWVNCGLCGEWAHLGCDRRKGLSTFKDYSKADGMEYICPQCSLAKYKPPLPAP

SEQ ID NO: 67410 - protein, 814 aa, Zea Mays
MEAASCCRVFSTQRCRFPLRRLSAPPWPQPFCTESSGGLVTPSASKRRSRGPVMAAKKAAEGEKQEDGKYKHTVDLPKTTFGLRANSVQREPELQKLWDDNQVLKRVSERNTGTAFVLHDGPPYANGDLHMGHALNKILKDFINRYKLLQNHKVSFVPGWDCHGLPIELKVLKSMDKETLSALTPIKLRQKAAKFAKATVDAQMKSFKRYGVWADWDNPYLTLSPEYEAAQLEVFGQMVMKGYIYRGRKPVHWSPSSRTALAEAELEYSENHISRSIYAAFKITNPSKSGMLDDFFPNVSLVIWTTTPWTIPANAAVAVNPKLIYAVAEVQSVFESESTSGGKQRKVGNILSSEKGKLFVIVASDLITTLESKWGVKLVVHKSFPGSALEHCRYAHPVNSNECSVILGGDYITTESGTGLVHTAPGHGQEDYITGLKYGLPIISPVDDEGNFTAEAGQFGGLSVLGAGNAAVVKYLDEQYSLILEEPYKHKYPYDWRSKEPTIFRATEQWFASVDGFRDAAMDAIRRVTWVPSQAQNRIVAMTSSRSDWCISRQRTWGVPIPVFYHVDSQEPLITEETIEHIKAIVLKKGSDAWWYMTTEELLPDRYRDKASEYRKGTDTMDVWFDSGSSWAAVLAKRDGLNFPADIYLEGSDQHRGWFQSSLLTSIATTGKAPYSSVITHGFVLDEKGFKMSKSIGNVVDPEKIIVGGKNHREEPGYGADVLRLWVSSVDYTTDVLIGPQILRQMSDMYRKLRGTMRFLLSNLHDWKPDNSVPYNDLPKIDKYALFHLETVMTSMKDSYESYQFYKVYQMGFW

SEQ ID NO: 67411 - protein, 588 aa, Zea Mays
MYFVLHAADDYLSSLSIKALPGIGHTVSSKLKSKEIEYCSQLRNVSKDALHKDFGKKTGDLLWNYCRGIDHSIVGSVQETKSVGAEINWGVRFNDNKDAEHFLNNLCKEVSLRLQGCGVQGRTITLKVKTRREGAGEPIKYMGCGDCETTSRSMTIAGATDSFVTLQRIAKQLFSALHLDVKEVRGIGLSLSKLEHADLGRGASQGHMLESWLASPAAKLKKQQSEILGNVNVAGTSGLKDLRSGPSHTAEANLRNDRSTVFHNVELPPLSQLDLEVLKNLPPEIMSEMNEMYKGELQSLVDTLNSDKGKENSSKSLALPAVIRKSVPADAKLQGYRDHRDSMHLEEEHTKGKSDKQLSEAKPANNASCSRVSASIEKTTKSVTQLDLMPDSLSQADLTVLQELPEDVKADLFSALPLHRSGDPACSTSNVSESKSPNVVRAENRSSNDGGTDDLKTPRSFLPPGSSQKWIEQFRVSSCLILNVIAEQHTDSSCQRPLSSVLEPVASFLPLCPNPGSEEWNETHSCLSELLRHYIQLKVEYDIEELYKCFCLLKRFSSASEFFLDLHDSILPFLQDSISQHYGGTLQF

SEQ ID NO: 67412 - protein, 247 aa, Zea Mays
MGAEAAHGHPQQQPPSSLRPGREAAAPPAVVGLQLSALIDHVARVDWSLLDRVPGDRGGSQQVSIDELNHILDEVNAHILPSRNDLTPVTTIAGGSVANTIRGLSAGFGISTGIIGACGDDNQGLLFVNNMSFSGVDLTRLRAKKGHTAQCVCLVDASGNRTMRPCLSSAVKIQANEFRKEDFKGSKVPFFFPFWRTFHFVIYAFLLGETSRAYVFVKGSFGTQEIHRNVAHCEICTTEHGTDCRSY

SEQ ID NO: 67413 - protein, 115 aa, Zea Mays
MGRSMAAAAISSPRTPHPCAYGTKLYTASAGWGVIILVLYRVAAESGQRRSRSGGRSFFRSSRLLRSSLLRLTVEDPTRGALVSNHQCVLVRGGRGLSRESSWRDHRGLSHARCA

SEQ ID NO: 67414 - protein, 726 aa, Zea Mays
MLRHLTNNPLLSRRCHRMFHHNRLCTTATSSAAAGEIAPDPAAYETTVGVEYDLAQELRSHLVRDTCRLLELRDSWSAKLEAQLRHFLRALTPSQVRAVLRAQAQRDARAAFEFFRWADRQWKYRHAPEVFDEMLALLSRTRLHDPARRVVRLMIRRGIRRGTRQFAHLMLSYSRAGKLRSAMRVLQLMQKDGCAPDICICNVAVNVLVVAGRVDKALEFAERMRRVGVDPDVVTYNCLIKGLCGARRIVEALEMIGSMLQNGCPPDKISYFTVMSFLCKEKRVAEVWNLLERMRNDAGIFPDQITYNMLIHGLAKHGHADEALTFLRESEGKRFRVDQVGYSAIVHSFCLNGRMSEAKEIIGEMISKGCRPDVVTYSAVVDGFCRIGELDQARKMMKHMYKNGCKPNTVTHTALLNGLCKVGKSSEAWELLNKSEEEWWTPSGITYSVIMHGFRREGKLVESCDVVMQMLQKGFFPTAVEINLLIHALCKEQKPARAKDFMEQCQSKGCFINVVNFTTVIHGFSRQGDLESALSLLDDMYLTNRHPDVVTYTVVVDALGRKGKMKEATALVEKMLNRGLLPTPVTYRTVIHRYCEKGAVEDLLNLLDKMLTKQGFSSAYNQVIEKLCAFGKLSEAYNLLSKVLRSASKRDAQTCHILMDSFLNRGLPLQSYNVACRMFQRNLIPDLKLCQKVDSQLALVGERHAAGKLITKFLERGILEQEKQDS

SEQ ID NO: 67415 - protein, 87 aa, Zea Mays
MFFSGDPSARRRVDLGGRSSKERDRKVLLEQTREERRRRQGLRLQNTSATKIQREEGFGIGTLRGSEEFLLNFWGALRADRVEQLRN

SEQ ID NO: 67416 - protein, 508 aa, Zea Mays
MAGAERAEAVALEQGLLDPEESNQVVYTGDGSVDFSGNPVVKERTGRWKGMTLLTLSASVPMLMPPSCEGSFCPAASPFQYTVFFLGLYLIALGTGGIKPCVSSFGADQFDDTDPAERIQKGSFFNWFYFSINIGALISSSFLVWVQDNVGWGLGFGIPTVFMGLAIISFFSGTSLYRFQKPGGSPITRVCQVIVASLRKWNVPVPEDSSLLYELPNGVSTIEGSRQIEHTDELRCLDKAATVTEVDVKTADFNNPWRICTVTQVEELKILVRMFPVWATTIVFSAVYAQMSTMFVEQGMVLDPSLGSFKIPPASLSTFDTLSVIICVPMYDYIVVPIARRFTGNERGFTELQRMGIGLVISIMAMSVAAVLEIKRLAVAREAHLVDQNVPVPLSIFWQIPQYFLIGLAEIFTFIGALEFFYDQSPDAMRSLCSALNLLTTAFGNYLSTFILTMVAYFTTRGGNPGWIPDNLNEGHLDYFFLLIAGISFLNLIVYVLCAGKYKSKKAA

SEQ ID NO: 67417 - protein, 293 aa, Zea Mays
MAVPSSDRARRPFPLSPSLSLFLLISAILVLLFLFLDPSPGSLAFLPSRLSASAPSLAPPLTPQQQSRAPRSRSPPHSRPDGSSATEKAEEGTTATASQPVTKADANGSASGPSAKESSGGSGSGGNSGARGVGADGETGTSVVAPVEKGGDDEEEAPVSVRWQTCSRLGRGVSSTDYIPCLDNVRAIKALRSRRHMEHRERHCPLPPRLRCLVPLPAGYRTPVPWPRSRDMIWYNNVPHPKLVEYKKDQNWVTRSGDYLVFPGGGTQFKDGVGRYIQFVEQVENHCWSLIEY

SEQ ID NO: 67418 - protein, 370 aa, Zea Mays
MVKNKGFLPATPSEIPIQRKQIRDIIFSLLPACKDPDIDTGVSFSADAIIANPAAYGHVHVAEALNIPIHIIFTMPWTPTCEFPHPFSHVKQPAGYRLSYQIVDSFVWLGIRDMINDLRKRKLKLRPVTYLSGTHAYSNDIPHAYIWSPYLVPKPKDYEPPETLLRWLGSGDSPIYIGFGSLPIPEPDKLTRIIVQALEISGQRGIINKGWGGLGNLEESKEFVYVLDNVPHDWLFLQCKAVVHHGGAGTTAAGLKAGCPTTIIPFFGDQFFWGSMVHARGLGAPPIPVEQLQLHSLIDAIKFMIDPKVKERAVELAKSIESEDGVDGAVKSFLKHLPQKRDSETTPTAPEPTFVHRLLHPVNRCFGMAS

SEQ ID NO: 67419 - protein, 86 aa, Zea Mays
MPMVCQCSCSVALVDDACPKLPNLRLWLLHPVKRYLLLNGSIVCSTIVWRGELYNSEARPGELCDRETMGAVTFTGNRRPTFRAFG

SEQ ID NO: 67420 - protein, 147 aa, Zea Mays
MLKRRRQWLRIIQVTKWLMSKGQVLTWTTYDTLLLALLMDKRVDEAESVWNTVIQTHTRSVPKRLFSRMILIYDIHQRPDKVLEIFADMEELGVRPDKDTVRRIGKAFVASGQEEKEKHVLEKYLKKWKYIHFNGERVRVRRDGPLA

SEQ ID NO: 67421 - protein, 453 aa, Zea Mays
MEMHADVDGCSVPLAVLLKRELCNQKVERPDILFGEANKSKKGEDFTLLVPRCHRTPGGSGGGENAGDDDTISVFAIFDGHNGSAAAIYTRENLISSVLAAIPPNLTSEEWKAALPRALVAGFVKTDKDFQGKAARSGTTVTFVIIDGWVVTVASVGDSRCILESAEGSIYFLSADHRLDANEEEVERVTASGGEVGRINIAGGAGIGPLRCWPGGLCLSRSIGDIDVGEFIVPVPHVKQVKLSNAGGRLVIASDGVWDALHFQEALNYTRGLPAEAAANRIVKEAVTSKGLRDDTTCIVVDILPPEKLSPPLKRPGKGVIKALFRRRPSDEMSEDQMDRGCLETDVVEEIYEEGSAMLARRLNINYPEGNMFKLHDCAVCQLEMKPGEGTSVHGNMPKHSRVDPWGGPFLCSSCQLKKEAMEGKLHSRRNLGSLPLMCYQKPDLTRRRMIPT

SEQ ID NO: 67422 - protein, 1909 aa, Zea Mays
MAESEDATAAEPGSGPPHEDEDALLARAHTVISRIIDRELDPNPRLLHTLATMCELHEARYLELRSADTMFNSTNTRTAFTIGKLANLLRDNDEFYELVFCKFLSDTSYSVAVRAATARLLLSCHPAWTPPYPHVFEDSIIDNIKKWVTEDPEASNECKWKYLGNNKPTDAEMLRTYGIGLLAMALCSSGQLIEDVLTLGVSAKLMRYLRIRVLGDASSSQRDANHPQDTKHPWGGDDSRGKSRLSQDGSRLDGTRVGYGMLTNPTAEKNNEPCVGMMQAYGARSLDDSFASLDDSDVPEADWTNDRSYSTRVCDTKSKHGERNSVTRLLKDEEVSENGELLKRKLNRAPSRLRVKGKAGDSLPECEMTPLSPTSGLRIGGQATRDRNVARVDDPKEATDVNNRLFNTISKEEYEDRFRDCIIGLKDISDIVLKAVRAAEAEARSANAPDEAVKAAGDAAAELVKFAALEVWKSENNSDAVVVVAEKAASAVVEAALSISVSRSANQVGEERAMEEAVQTSEDQDLENFVISDKAQLLQLRENYSIQCLQILGEYVEALGPVLHEKGVDVCLTLLQRSMKNQEGCDHFAQLLDVLKLVCALAAHRKFAALFVDRGGIQKIVSMPRVTQTYMGLSACLFTFGSLQSTIERVCALSSDTLDSVVELALLLLECPQDLARKNVAIFFAAAFVFKAVLDLFDARNGMQKLLDILCGCASGRSGSNSGGAGSSNVNQGNDRSPAEVLTASEKQVAYHTCVALRQYFRAHLLQLVDSIRPSKSIRSIARNTSSARAGCKPFDISNEAMDAIFCQIQRDRKLGLALVRACWLALDKFVASNGHMTMLELCKAHGDRYLRDLTQYAIGVLHIITLMPQPHVRKSIVQGTLSNNRAGMAVLLDTVKSLDYIDHEFCEKTTQVMVICPALNVLVNLVCPPPSISNKPLSSSNQQPAAAQALASESREKNFEKTISDRNLLTNLGESRERSGDGNPAEKNNTLHQGTPSTPVVPSGVVGDRRIMLGVGGGGPGLAAQLEQGYRQAREVVRANNGIKILLQLLGSRMVTHPVAIDSIRALACRVLLGLARDDTIAHILTKLQVGKKLSELIRDISAQTSGGDSGRWQTELTQVAIELIGVLTNSGKETTLAATDAAAPALRRIERAGIAAAAPISYHSRELMQLIHEHLLGSGFAATAAMLQKEAGLAPLPLTAAVLPAHQVAALEASSVQQQWPSGHVQGFLSDKINTSTYQSAQRSDPKLPSSKKKALAFSSSFSRRARSPHPSNILKSPVPIAADTGDAEMLNKAPLSLPLKRNFVDVKDISFASASKRLAITDQIYQSSAFQTPAPTRKGLSVSVDSPTSSHCGWTNFNNAFTENLDNSQGTPGALTTTALPGVNDQQSGNLERMTLDSLVVQYLKHQHRQCPAPVTTLPPLSLLHPHVCPEPSRSLSAPANIAARVGSREISRQFSGIQIPRRDRHFIYSRFKQCRVCRDEASLLTCLTFLGDAARVVAGNHTGELRIFDCNTANLLETQTCHQHLVTMMESTYTGGIEMILTSSLNEVKIWDAFSVSAGPLHTFDDCKSARFNHYGTSFAALSTDTAQREVQLYDVQTYTLATRLPDNTSSSGSGRGYVQPIIHFSPSDTMLLWNGVLWDTRQPNPVHQFDQFTDYCGGGFHPAGNEVILNSEVWDLRKFKLLRSVPSLDQTVIKFNGTGDVIYATLRRNLDDVTSCINARRVRHPLFPAFSTIDAVTYSDIATVQMDRCVLDLATESNDSLIGVVAMDDHQELFSSARLFEVGRKRITDDDSDPEDAGETDDDSDDDDDDSDDGVLAPVLEGGTDSEDISSSSSDDGDEDGGDDDIPSSDGIEDDRFIDERRREFMMDLFGDGWDDDEAYMMGSFSSGDEEGWIICSWRGRGRS

SEQ ID NO: 67423 - protein, 661 aa, Zea Mays
MDNMLGDLYKPDDGDDFYSKKYRDELENVSFQLLEEITDGFSESRELGRGSFGVVYRGLTKNGDYVAVKKLHANVTDLNHKQFQNELYNLAKLKHENIVRIYGYCYEIKKTFMEHDRRKILVEEPRIALCLEYLHNGSLQDHISDEFSGLDWDTRYRIMEGVCRGLYHIHRNLKKPLYHLDLKPANILLSKTMQPKLADFGLSRIFRNEELTRTTKSPLGTLGYQPPEYIERGEVSEKFDIFSLGVVMIHLVSGRGGFERYACMHSEEFINQVKTNWRKRFKQLQRNSLRKVKVYCHEVETCTRIALNCVEKDTQKRPDIDMVINNLKDRKTHRFKSTWTSSFRQDGRMYGSYMPYSNRYLNKLMSGSICTETKFYRREKLPNVGEEFIIGRKEEKQKIVASLLQSMTQHITILPIYGIGGIGKTTIAKLIYYDTNFNSYSRVWVYVSPKFDLKKVGNTVISQLSSEESQINETQMIHSCLMKLLSGKKVLIVLDDLWEDSLFQLNNLKDMLSYGDSINVIVIVTTRSKHVAENVSTNVEPHKIEPLTDSMCWDIMKQRSNFEAKNHKEHLAHIGMEIAVKCGGVALAAQSLGFMLKPMELCDEWIEVRDSDIWNKSISKDANSPNHICEKYILQLIGLSFIQDTMSPKGALSVGAAVAWK

SEQ ID NO: 67424 - protein, 199 aa, Zea Mays
MYRFLVDGVWRCDETKPFVRDEYGLISNEVLVENNVLPVVQPEPSIRGTNMDKGTILKTMPLEPSSQNPSMQIAVIRHVVSGILLHNTIYDVVPLSSKLTVLDTQLPVKQAFKIMHDVGLALVPFWDDRQGTITGMLTASDFVLILRKLQRNIQVIGNEEPISAWKEAKLQFYGGPDGAVMQRTPLIHVLLHIFADSFI

SEQ ID NO: 67425 - protein, 924 aa, Zea Mays
MSMAGIARGRSRWRQGDGSSNRNAAHSTVPNPDHQGVVSSRKQATYPGMLSDSVFATVDRQSKTRKAIAVPMKILIEEEFSNDVNSRHISPGAVGRLMGLDSLPSSGIHNKHRHTKSHAPKTSPSSFHGRTGLHDIPHRRSVDTINVFEGMEATKTNMHRSPRSKIGSTTSRSDKVVSADIDFIRQKFMDAKRLSIDESLHISEEFNETLDALVSNSDLLLDFLQNFDPAVIRDLHNHGSPSSTANCITILKPSRRNQFIDMDNIYPQEKGTESIFNEQMEGKHSLWKPYSNVPLQSLKEDSCSSRQKLSRSSHQENTGKRGSPTRIVVLKPNLEKPHDIEEALPLHHKISHSDYRRHKECPEVDRWTPNTEDYMCQVPLGDSETLSRMGKGSREIAREITKQMRAARGGSRKHSVKPETRTLASDERSQFQSSVTRPKTPESIHRYSESCDAWASSSLNSLPTYSTETSESKEAKKHLSNRWKKTRQCQHQETDNDSFNTLGDMLALSDQNASNVATHKMTCRKCPKSEVQSDRIQSSYPLGISTNDGWKDTTTSKLTRSKSLPPSFIRGVQKSNNRKRSGSVTYNEFSMLKDVLKDQQVLKMTTTALDNCFLVPNLDDLMPKHEQIEYHQADDYPATYDPHIASDSPEENNHHLGDVSETLCILPDVLESPANSNKDDQQSPMSVLESSMDGEDVYSGDFEKISADLQELRLQLGLLKRETTDTRDGSELSILSDDETARRSLPETGESHAFRNTEERDFSYVFDMLAALGIHAANEDDLLDNCYLLECSAGLDLYDDLEQKYDSLILWPVHERKLLFDITNAVLGDMITSVMNGCSKGLMARCSPGWNREEFAELVWQRVVQLRQEIEFNQEALLLSVEWAGSEDGASLVGRDIGNMLQDDLVQEIIADFLGATKSAKLRG

SEQ ID NO: 67426 - protein, 294 aa, Zea Mays
MDGGGGAGGAEGELTAQETALYDRQIRVWGVDAQKRLSKAHVLVCGMNGTTIEFCKNIVLAGVGSLSLMDDNVVTEEDLNANFLIPPDESIYGGRSRAQVCCESLIDFNPMVRVFVEKGDPSLIDGEFLDKFDIVVLSRASLKTKKKPGGATEQQELTYSSLQEAISVPWNSLPKKTAKLYFAMRVLEDYELSEGRSPGETTLSDIDAVLARRKDMCDKMSLNESRIPTTLVERLLAAGKKEHPPVCAILGGILGQEVIKSISCKGDPVKNFFYFDVADGKGVIEDIPPPPPAK

SEQ ID NO: 67427 - protein, 126 aa, Zea Mays
MFLPLCLCSTCPSTLFSTARSSAPRQPMPPSSRPCGARHPSARPCLSRCIKRISLKKESRVCNTLNLGYKISSLISTKFRCYLFSSLYRFFSLPFSRVLIIYLEMYYDFSRLNPREDMNCCIILSL

SEQ ID NO: 67428 - protein, 69 aa, Zea Mays
MSIVTCNSLTTARLPITLLTCCRDLPPDQRATVPWRPQDEQQILICKKIEELCKGPYRSTHNYKSVIFQ

SEQ ID NO: 67429 - protein, 71 aa, Zea Mays
MTHRPEATIDLPITGSALATDRPWPKSSWGPAGDATTIPPRLQKRTPLPLLQMIPFRRRTKSPKDIAAERH

SEQ ID NO: 67430 - protein, 228 aa, Zea Mays
MSEYDERYQGNGDMPAAEGGYPQAEYAAAAAPAAGGSPPADSKPSGFSDHADGRSSQHQHETQSHDSGSSKSRERDRERDKGKDRERDRDRGREKGRDRDRDKDRERSDRDRDRHHRDHRERSEKREHRDRSDDRDRHRDGRDRHRDDRDSERRRDRDRDGHRRHRSRSPSKSRDRDRRSRSRSRSRSKSKRVSGFDQAPPQHALPIVAAGAIPEGNLGALCHLLPMD

SEQ ID NO: 67431 - protein, 790 aa, Zea Mays
MFVLTATTSTTTATSLLLRCRPLPSPKTVTLATPPAILPFCIRSRFSASASASASSVSPQSRATAAAAAGKSREKKPPTARAKRADAVPAAAAPGMSASGGGSAGKRTVADVLMGNARAAASKAKKAAPSPKKPQAKTDGAEVEPEAAAVAEKPPSPARSKRASSPAKSPKLLPDGSTSSAKSKGPAALAQLDAAKENPPSPKRSKTLAAKSDTQPSGEGVVGLGHTDGKKGSPSPTKAKGQASQSEEKKRAASPKKAKTTDSPKTEKNITLELKKKGSEFDPMAVAYWKPGEPVPFLFLARALDLISNESGRIVITEILSNVFRTVMATTPDDLLATVYLSANRIAPPHEGIELGIGDASVIRALAEAYGRKEEHVKKDLKELGDLGLVAKASRSSQKMMFKPKPLTIARVLSTFRTIAKESGKDSQDKKRNHMKGLLVAATDCEPQYITRLLQSKMRIGLAEKTVQMALGQAAVYADKNPLPPKVQSPFEEAAKIIKQAYSVLPIYDKIVPAILEVGVWKLPETCKFSIGVPVGPMLAKATKSVSEIIDKFQGLEYTCEYKYDGERAQIHCMEDGSVEIYSRNAERNTGKYPDVVDAVSRFRKATVKSFVLDCEIVAYDREKQKILPFQILSTRARKGVTINDIKVSVCTFGFDILYINGKPLLQEQLKIRREHLYNSFEEVPGVFKLATAITSNDLEEIQKFLDTAVNSSCEGLIIKTLDKDATYEPAKRSNNWLKLKKDYMDRLETLWTWYLLLPSTVEENEQVSLDHSSSHAMMSRTKNIKQYAT

SEQ ID NO: 67432 - protein, 222 aa, Zea Mays
MGSFVKLARRAVETDAPVMVKIQELLRGAKDVMSLAQGVVYWQPPESAMAKVEKIIREPTLSKYGSDDGLPELREALFEKLRRENKLTKSSVMVTAGANQAFVNLVLTLCDAGDSVVMFAPYYFNAYMSFQMTGVTDILVGGSDPKTLHPDVDWLEKVLKENDPIPKLVTVVNPGNPSGAFIPRPMLERISDLCKNAGAWLVVDNTYESKLSMEDQKVATTI

SEQ ID NO: 67433 - protein, 96 aa, Zea Mays
MSSLTSRPVSLLRCLRGSLKGDGFCIIGSLACRLYILLNHGFHSRFLKIYLELPPIVQPLQMEEDLEQLKVFENSYRMKVIKVEQNARGVDAPEVH

SEQ ID NO: 67434 - protein, 269 aa, Zea Mays
MGGGSRALSLSSLCATTLAAAKPPQHPVPFAPAHRALPHRLAAAMSSSSSPTPAASVDAGAPAPSASNAIDFLTLCYRLKTTKRAGWVKRGVQAPESVADHMYRMGVMALVAADLPGVNRDRCVKMAIVHDIAEAIVGDITPSDNVPKEEKNRREKEALDHMCELLGGGSRAQEIRELWMEYEENASLEAKVVKDFDKVEMILQALEYEKEQGRDLEEFFQSTADRLGKSMGSGDCIEKKNKVIKRCSFYHVGSKTTCWHSISVELCFY

SEQ ID NO: 67435 - protein, 339 aa, Zea Mays
MQENNAELTREAVDVFIWCLTQNAESYKQWERIYPENTEASVAVLSKIVIDWKDVSPKLSSEALKATVKNLKAKNEAALESATDAGKQASIKKQTSTARLEQGSEQLLGGRPGPALGVLATVAECSVEPAAQTTKGPDSNGSSSPLPPVLPSVCFPPRPRAMAPCASPSALALSASTRVSSFPLTLRPRPRPEARVPRAPGGAQLRPATACSWPRPLLPELAPAFPRAGARSAGRPQPLFRPRAMMTTSQIASCAFTVGTVAVLPFYTLMVVAPNADITKRTVESSAPYVALGLLYAYLLYLSWTPDTLRAMFASKYWLPEEWDALCSCRASSGCSRAR

SEQ ID NO: 67436 - protein, 77 aa, Zea Mays
MPSPTNIRSGPGTTCCCCSRLRSAPDTHDGNPRRTRPYPSSSSAPLPWRRRRRCGRRRSIARELDTRWATWYMRPWM

SEQ ID NO: 67437 - protein, 903 aa, Zea Mays
MARVERQPRNPSRLAPTSHPAPALPTTPAARRPGTPRNAAQGTVCATCVCGSGNNARCHCKQDARSRHNQTHHGNDGTATAGGIAKPDSQDKLKMARFSGGTYSKPDARVKLIPAEDITYLQRRKPCGRTVGSVGSQKRHCRRSVTPPPSSRRVSLLGSRSLAENPIPSVSSHDSCLPHKRLETAENRDPCAGGHISSSVTPCTSLKNLASPSCKSSQPLSTNLNTDATPRNLDRMVGIQTQALARSSSSSILHSQGQNSEKVSASLPKEAVTNPASPSPKQIGAQHPSDNPLVTKAGPSKSVCTHESEKLCSRDINLTATSTTVPVLQAPVVEPALLSSTSVFTERPFEVYPDTRTAAPGMQELSVKHVLLTPIPVRHEPSTECLKVPPKHSLHSIASAQHGALSQERNSGASISHGRSSASGALSILHMKLAKKHYQSQACWKGNFHVTGGLIHTCDGLEAHFPLEISVRVYEASNQMPEILNLEAVPISQLWPKKFKMVPPDIEDIGLWFLSSRQRPHWSFDHLLEKVCSHTGLFTKIGDIELAVFSSKLLTPQDQRKDGKLYFWGVFGKHMRKKSCQPNSHIKNVEISNPSQPNGKSEEVGMKLDMRKGKEKESAKSDEVLDSTGGNDTDRVNGCVAVLEAPDSDPASSCSVPAASSLGGYCHHDSAKNSSSILDSSCQPADGSSVSPDLMLDIPPGISAHIPPGFTKAHCQLQMGTAALSFADRHRSLISDIPPGFTEVHRGLPPAIPPAGPACVSTPGTEKKPFVRFSLNVPRPVGMGAPPGFTPLHAVKKEPGLPDVHETADKHTLHSLAAAAAAVVKPGKGGEMKIADNEVKTEQDENSEERDFPKIRRLSDLYCRPSEDSTEFSQRMPARLPDKFQEQRPEKRLVHPREEVGRR

SEQ ID NO: 67438 - protein, 971 aa, Zea Mays
MAILEPLMQQAFIGIDTLTTVANLYNLPRREQNKTTLLKLLFHIKNRYSDMLTPEQREEMDSRVRKLVFGEKDNVSDPSTSCGTSAINVSAPSGQVSNTGGLPFESGAANLFSSLPRLEVPAKRNSPLLNLHADYDENSLPSPTRDNAPPFPALKPIGFGAFPMVPEKLSFLDRVEPTKNSLYPPLNDPLKAVSSYQQKYGQKSVYPSDDLPSPTPSGDEGKPADKGGDIFSDVSSFPVPKSIVLPSTSQMPASQPSTVSSSSISYASSTSQMAASQPITVSSSGISYASGPPGFAKQIEQSTAGPNHAIKAASKSRDPRLRFLNRDSAGATDVNWRANFSELKDGNLGGVSVGNRKQKAVDDPQVDDNALKRFRGGIANQRDMQPTGNPNQLMNIRAPTHSSSINMKTLQPPQTTAPHVSAAPAVPLPPMLLKDIAVNPALLMHLIQMEHQKKSASESQGGMSSGMTNNGIAGMVFTPGNAPKITEAAQVPSVRPQVPVQTPPLNSQNDGGIVRMKPRDPRRILHNNIAQKSDAMSLEQVKNNGTTQPDSQGTKDQTTPVPSQPALPSSIARPFSSAKHVDPVSNSQLAATAIMAPTQALSSVNKVDPRLAVEQNGQNADATTNGASATTLEATQPVSPWGDVDHLLDGYDDQQKALIQKERARRITEQHKMFSARKLCLVLDLDHTLLNSAKFIEVEPIHEEMLRKKEEQDRTLPERHLYRFHHMNMWTKLRPGIWNFLQKASNLFELHLYTMGNKLYATEMAKVLDPTGTLFAGRVISRGDDGDPFDSDERVPKSKDLDGVLGMESAVVIIDDSVRVWPHNRHNLIVVERYTYFPCSRRQFGLPGPSLLEIDRDERPEDGTLASSLAVIERIHHNFFSHPNLNEADVRSILASEQRRILTGCRIVFSRVFPVGDASPHLHPLWQTAEQFGAVCTNLVDDRVTHIVANSPGTDKVNWALSKGKFVVHPG

SEQ ID NO: 67439 - protein, 350 aa, Zea Mays
MGACVSRPSACVGKPHSPRSGDASGRSGGGGGTRRRRSRRVGKGRRTAPSRAASMETIQEAEVPGSPSAAAAAADHRTYSNPAFQVSGSIEEDWYDSLAMSESDAEDDFHSVQDDAFSLNGFENEAALSMKDGNGGSFNGAAQSGEQHHKKPKSSELSKGSSENGVRTSISHEDAVSVSGADTTHGGGRILDNCGLLPNNCLPCIASAVGVNEKKRTPSSPTHSMKMPSLKLSFKKKSGEAHPSSTLLSTKDFLERPLAGSQVQLCLLETNTLNSWSRIDPGTFRVRGANYFRDKKKELAPNYAAYYPFGVDVYLSPQKLNHISRFVQLPDIQLSSKLPPLLVVNVQTLV

SEQ ID NO: 67440 - protein, 171 aa, Zea Mays
MPTVLSTRRAASPETISLPSSRSSHSRTASPLHPVSRGNRALRLLAALRSPSAPRPRLRRRPGLPPARAGLAAAAAMPAPETKARILVAGGGIGGLVFALAARRKGFEVLVLERDVSAVRGEGRYRGPIQLQSNALAALEAVDAAAADEVMDAGCVTGDRVNGIVDGVSGS

SEQ ID NO: 67441 - protein, 857 aa, Zea Mays
MSNPEIHDLKDVMVGNQEKEQKITQTPKLKTFEGPRAACRLDSLKDVFFWGDAFGSILECGDTSKPLPMLVDSTNMLDVQSIACGETHAAIITKQGEVYSWGNESSGRIGNQVNIKVSRPKVVQSLASLHVKDVAYGSKHTCAVTVSGELIEWGEGPYMGQLDSYARNQWFPHKLFSPLDGISVVKIACGPWHTAIITSSGQLYTYGDGTFGVLGHGDTQGTTRPKEVESLKGSRVKCVACGPWHTAAIVEVISDFKSNSPRSKLFTWGDADRGKLGHADKKMKLIPTCVDSLTDYDFIQVSCGTALTVALSVTGVVFTSGSSMHGQLGNPHADGKTVSAVEGLLKSEFVRHISSGSSHVAVVTTNGKVFTWGKGKEGQLGLGDFLNRSTPTLVDALEGRHVESLSCGYNYTAAVCLHKVISRKDLSVCSGCKMAFGFTRKKHNCYHCGSMFCNSCSSNKVAKAALAPDKSRRYRVCDGCFSQLLKVVDSGKVKSELNTSKGAEIIRSYTPKLSRIFRDVNLPVEKEKVALVQRSNQRNEVLYTPVQAKSQRWGQVECPAQFLSAEDSSHYQSISKNHMYSASVSERMHDPTVLKSGRSLQQPNDDQRKDLNSIEETLLTEEVKQLRSQMTLLMEQYHQKALQVELYKQKLDETWLIVRNEAAKCKAAKDIIKVLTDQCKALSEKLLVGQQYENLETKSNISQGQTFSADLQHHPSEKFATGKFGQLDNTKNHQTSSQGDEEYTPSSSSDVQVEGLCGHLNGSRTFDSNGRITEGNSIVARVTSNGVIEQIERGVYVTFAVSPCGKKDIKRVRFSRKHFGEKEAQHWWEENKGSVYAKYSTEKAQHQLEVTIKSVQE

SEQ ID NO: 67442 - protein, 513 aa, Zea Mays
MTSLSRTLSRGGPMQSPGARRIQRTQTAVNFGEPMFDSEVVPSSLVEIAPILRVANEVEMANPRVAYLCRFYAFEKAHRLDPTSSGRGVRQFKTALLQRLERENEPTLMGRGQKSDAREIQTFYHSYYKKYIQALQNASDQLDRAQLTKAYQTAAILFEVLKAVTQQHAVEVDHEILEAADKVKEKTKIYLPFNILPLDPDSGNQAIMKFPETDSVSNQREHLILLLANIHIRRNPKTDQQSKLDDNALNDVMKRLFKNYKKWCKYLGRKSSLWLPTIQQEMQQRKLLYMGLYLLIWGEAANLRFMPECICYIYHHMAFEMYGMLAGNVSALTGEYVKPAYGGEKEAFLKKVVTPIYHTIAKEAERSKREKGNHSEWRNYDDLNEYFWSADCFRLGWPMRADADFFCQPDERNESTRISKQKGKVNFVELRSFWHIFRSFDRLWSFFILALQVMIILAWDGGSLASIFDYAVFKKVLSIFITSAILNLGQATLDIIFNWKARRTMEFAVKLRY

SEQ ID NO: 67443 - protein, 127 aa, Zea Mays
MDLDQDVEAAERELEDHNERLDELALFGIGTATSSNVDPVDVDAAPVTASSSPTATGGSIARDNRPRKRLATSRVWADFEEVTGIDDKGCLRSDDDDLQQIWLRSYLVLRIGSWQISICRILWRRRP

SEQ ID NO: 67444 - protein, 244 aa, Zea Mays
MAHPSAAAAAVSSTAPAANPSSGAREEGGARSPPSPSPSQRGRAKVVIVMGATGAGKSRLAVDLAAHFAGVEVVSADSMQLYRGLDVLTNKAPLHEQNGVPHHLLSVIDPSVEFTCRDFRDRAVPIIQEIVDRGGLPVVVGGTNFYIQALVSPFLLDDMAEEMQGCTLRDHIDDGLTDEDEGNGFERLKEIDPVAAQRIHPNDHRKIKRYLELYATTGALPSDLFQGEAAKVRNFSLHLSALLV

SEQ ID NO: 67445 - protein, 307 aa, Zea Mays
MAECRIQDWKRASTPESVSRHETSIPRTKQRNIFSLLAQRELSPRTKNQAKNLWTKPPRLDACPIESKFWGTYAQHDLLSWAEAEFLHWWIPKYCPLTPSSKATIAAAFSTDGRVLASTHGDHTVKIIDWQTGKCLNVLLGHHRTPWVVRFHPQRSDILASGSLDCEVRLWDAKTSRCTAELVFYRPVASIAFHATGELLAVASGHKLFLWDCNKRWETLELPIILETRRSLRAVQFHPHGAPYLLTGEVHNLDSEDSTMTPALLSNYSFRDTPLLGGSGVDNLISELQYMQNFEQCWEAPSGYSCC

SEQ ID NO: 67446 - protein, 136 aa, Zea Mays
MAFFRGLTAVSRLRSRMDRLKKLKSEHGKVQLGNITVDMVLGGMRGIIGMLWETSLVDPEEGIRFRGLSIPECRKVLPTAVEGGEPLPEGLLWLLLTGKVPTKDQVDALSKELLARSTVPGILITPLATCVIVLTN

SEQ ID NO: 67447 - protein, 70 aa, Zea Mays
MSSGAMRLAVVRSGAQRGVMRPATWLDRRRGCVADTCEHGHCRHLLDQGLLLPISRGTPPLVASQPHQRG

SEQ ID NO: 67448 - protein, 342 aa, Zea Mays
MSGMSARIKEMVRVATARLGGEQAGGGGASSSGFARRESTARLGGGGTSLRRQPQPMAPSVRTVCCNDREANAPVGYKGNSVSTTKYNILTFLPKGLFEQFRRVANLYFLMISIMSTTPISPVHPVTNVVPLSLVLLVSLIKEAFEDWKRFQNDMSINNAHVDVLQGQCWESTPWKRLQVGDIVRIKQDGYFPADLLFLSSTNPDGVCYIETANLDGETNLKIRKALEKTWDYVIPEKASEFKGEVQCEQPNNSLYTFTGNLIMDKQTIPLSPNQLLLRGCSLRNTEYIVGVVIFTGHETKVMMNSMNVPSKRSTLEKKLDKLILALFATLFTMCVIGAIGR

SEQ ID NO: 67449 - protein, 557 aa, Zea Mays
MLLREAMADPLLEKYKVIVLDEAHERTLATDVLFGLLKEVLKNRPDLKLVVMSATLEAEKFQGYFSDAPLMKVPGRLHPVEIFYTQEPERDYLEAAIRTVVQIHMCEPAGDILVFLTGEEEIEDACRKINKEINNMGDQVGPVKVVPLYSTLPPAMQQKIFEPAPAPLKERGPPGRKIVVSTNIAETSLTIDGIVYVIDPGFSKQKVYNPRIRVESLLVSPISKASAHQRAGRAGRTQPGKCFRLYTEKSFNEDLQPQTYPEILRSNLANTVLTLKKLGIDDLVHFDFMDPPAPETLMRALEVLNYLAALDDEGNLTQLGEMMSEFPLDPQMSKMLVISPKYNCSNEILSISAMLSAPNCFLRPREAQKAADEAKARFGHIDGDHLTLLNVYHAYKQNNEDPQWCYENFINSRALKSADNVRQQLVRIMTRFNLKMCSTDFNSREYYVNIRKTLLAGYFMQVAHLERTGHYLTVKDNQVVHLHPSNCMDHKPEWVIYNEYVLTTRNFIRTVTDIRGEWLIDIAPHYYDLSNFPSCEAKRVLERLYNKRERERAANRG

SEQ ID NO: 67450 - protein, 183 aa, Zea Mays
MSAPSAPPRTVICVGDVHGYITKLESLWSNLQAALPADAFATALVIFLGDYNDRGPHTRRVLDFLLALPTRYPAQRHVFLCGNHDLAFAAFVGALPPPPDGSPFSATWDEYIHNEEHEGWFRGPGFEGMHVQGRRWGGVIKERWNPKKGLPYKGSIYDAQPTFESYGVAHGSSGGIRVVVAHR

SEQ ID NO: 67451 - protein, 687 aa, Zea Mays
MSSDRVNAYGGSRRDVYGFIPMQKLRRNNSTWRFGNILIVLAMNMDSTALQYENQKLVQQLEVQKSEMHALERKFKELSDDQCSYDKTLISLNKLWNQLIDDLVLLGVRAGGDLDNLQALDHEELSEESLESCPSEEIFLLRLLKTNNIRDNSDTSLLKFVEEALAFRSSATVTLMKSLQETISSQQARSESLSLALNGQKSNEDVIVALRNHNDCLKEVAENASQAISIINEKHKRYLDEIEAFKSNHSRELQEIKRISGELEESIAELEESQRKLVVLQLQRHGSVMDASGANAVNGGISTHKSSDKSMSWQDLKDAVDAAKTLAGNRLLELHQTQEDNLILSKELGDLEGQLKDEKYVLVSKPYMILNDKLQHLNAEIERYRGLVEVLQNDKDQLMQREKEISAKAESLDSVKQTIITYEKKIEELETQIQILFSEKNDLETKVEETLQDSGKKDFKNEIHVMAAALSNELGMMENQLSRSKDAASEALALREQAESLRSLVAKKIEEHKKISDKYNSQVIEIKSLKALEKQELEFIADMYVKESSESRTIADIEESETRARNQAEYLRSNLEEHSLELRVKAANEAEAACQQRLSFAEVELEELRTKVDASERDVVELKEAIRIKEAEGDAYISDIETVGQAYEDMQTQNQHLLQQLTDRDDFNIKVFICSLLFHFHVKAANS

SEQ ID NO: 67452 - protein, 845 aa, Zea Mays
MTSSAAAAAAAAQVAGGGGGGEGDAAAAARGGGGTEDGMYTELWNLCAGPLVTVPRVGDKVYYFPQGHIEQVEASTNQVAEQHMQFYDLPWKILCEVMNVELKAEPDNDEVYAQLTLLPESKPEENGSSEEMPASPPAALARPRVHSFCKTLTASDTSTHGGFSVLRRHADECLPPLDMTRQPPTQELVAKDLHGVEWRFRHIFRGQPRRHLLQSGWSVFVSAKRLVAGDAFIFLRGDSGELRVGVRRAMRQQANVPSSVISSHSMHLGVLATAWHAVNTGTMFTVYYKPRTSPAEFVVPCDRYMESLKRNYPIGMRFKMRFEGEEAPEQRFTGTIVGNVDPDQAGWAESKWRYLKVRWDEASSIPRPERVSPWQIEPAVSPPPINPLPVHRPKRPRSNAVASLPESSAPTKEAAPKVTLETQQHALQRPLQTQDNVAPKSVFGDNSELDSAHKSSLRPSGFDLDKSTIGMQRKLGSDIWMRMNRPDGYSEMLSGYQPPNEGARNSQGFCSLPDQIAAGRPNFWHTVNAHYQDQQGNHNLFPGSWSMMPSSTGFGMNRQSYPMIQEVGGMSQSCTNTKFGNGVYAALPGRGIDRYPSGWFGHTTPGGRVDDAQPRVIKPQPLVLAHGEALKMKGNSCKLFGIHLDSPAKSEPLKSPPSVATPAAEKWMADGIDADKSPEPHKTPKQLGATQVDPVPERCPQASRGTQCKSQGGSTRSCKKVHKQGMALGRSVDLTKFNGYTELVAELDEMFDFNGELKGCSKEWMVVYTDYEGDMMLVGDDPWNMVHKIFVYTREEVQRMNPGALNSRPEDSGLANSTERGSASTAAAREAPGYQSASSLNSDNC

SEQ ID NO: 67453 - protein, 365 aa, Zea Mays
MARNNEGHLELPEMDQIQPKNIPHNESLPLGQKLLLHHGSDAPLRIGHSSHGNMGLRINDLPSSSRTVQTLGYRVGNPGTSHAPFVHFHAGSSGSHLPDPAVNYPHRSEEGFAPVGSHMDNRRAAMKRKGPSVHPAGISATGYYVGSSSSTQPSNSVQPNAAPLAEPFLRQIPLSIDQSGWDIQHLIHQEGFQRNVRARHSSIPLVPRSASTYPLNINSVHVPSFGSTASASSSAPVEMNQVPVSLPTRTLPSGAPGMTSRVPTGRAYYPVVGSSSSSSSVGAVPTIHGSSGAAMFANEPCPTRWSFRVIQLLLPQQHLHPCGPPNHHYLPEPQRLPDMQGMCQQGLPTTEGTEGPGALTTGFIH

SEQ ID NO: 67454 - protein, 353 aa, Zea Mays
MSMEVAGAEAPVKGKFLGILVCWLLGNGSLFAWNSILTIEDYYSHLFPDYHPTRVLTLVYQPFAFGITLIMTYYEAKMNTRLRNLAGFSLFFLGSFALIILDVATKGHGGLGVFVGVCIISAIFGTADANCQGALVGDLSLMCPEFIQSFMAGLAASGVLTSALRLVTKAAFESSKDGLRIGAILFFSITCLFELVCLLLYTFVFGKLPIVKYYRAKAAAEGSKTVASDLAAAGIISEQQGQMEEDPEKYKRLTTKELLMQNIDYALDIYLIYVLTLSIFPGFLSEDTGAHNLGTWYALVLIAMYNVWDLIGRYVPLIPCLKLTSRKGTLAAVLARFLFIPAFYFTAKYGDQG

SEQ ID NO: 67455 - protein, 132 aa, Zea Mays
MSTSRPLELLHMYLFGPTTYASAGGNLYCLVIVDDFSRYTWVFFLHDKSEIASIFKKFAKKAQNEFDCKIKKIRSDNGKKFDNTNIHEYCDEIGIKHEVSATYQPQQNGVVERKNMTLITLARTMIDEYNTP

SEQ ID NO: 67456 - protein, 80 aa, Zea Mays
MGRAPCCDKASVKKGPWSPEEDAKLKAYIEEHGTGGNWIALPQKIVGLKRCGKSCRLRWLNYLRRNIKHGDFTEEEEHII

SEQ ID NO: 67457 - protein, 193 aa, Zea Mays
MRGLLFPGTPTDTVAGAAPPPAADTSTTTTTITTAPPPANSVNNGQFHLPHSLNHPHHQSLLVDEISSAANPSLQLQLEQHGGLGGLILGGSRNTAAPPPPQPPAAGKGAKEPSPRANPAVNRPPEKRQRVPSAYNRFIKWVPCMPAVSCYYIFHAVRYSVQVVWLAGGSLIGHGNACRPPRWQQEEGRGRRP

SEQ ID NO: 67458 - protein, 192 aa, Zea Mays
MPPNTTLTHPIDQLITTTTHTPHGRSILLYACMEGSSSQLLETCLPASLYAVTPPPCAHPHPLLAPLPNQQHMLLQMPFVKEQAANNHGLMLSSDHHHHSGLLYPLLLPGIPFCPSVAAACEKTTTTGSGALDAGEAGTSSAAAKATGEIASTAATACNSPSSCNWYVRMTIMASHHNSLVASCALGSCWEQ

SEQ ID NO: 67459 - protein, 638 aa, Zea Mays
MADAHHFNNISLGGRGGGHPGQFKLYSGGLAWKKQGGGKIIEVDKGDITNVAWMRIPKSYQLSVGTKEGLCYRFFGFREQDVSNLTNFIEKSTGITPEEKQLSVSGQNWGGIQINGNMLCFNVGSKEAFEVSLADVAQTQMQGKTDVVLEFHVDDTTGANEKDSLMDLSFHVPTSNTQFIGDEHRTSAQMLWQAISVEIDGGGSSEMAVVTFDGIAILTPRGRYSVELHQSFLRLQGQANDFKIQYSSILRLFVLPKSHNPHTFVVITLDPPIRKGQTLYPHIVIQFETEAVVERELTLSGEILAEKYKDRLESSYRGLIHEVFSKVLRGLSSAKVTRPSTFRSCLDGYAVKSSLKAEDGLLYPLEKGFFFLPKPPTLIPHEEIEYVEFERHGAGGASISSHYFDLLVKLTNDQELLFRNIQRNEYHNLFNFISGKHLKILNLGDGQGRTSGVTAVLQSTDDDSVDPHLERIKNQAGNEESDEEDEDFVADKDDSGSPTDDSDAEGSDASMSGGEKEKPSKKEASSSKPPVKKKQKSGPDEGSQKKKPKKKKDPNAPKRAIAPFMYFSKAERANIKSSNPELATTEIAKKLGERWQKMTAEERQPYVEQSQVDKQRYAEESAAYRGAAAQQGSGAGSE

SEQ ID NO: 67460 - protein, 357 aa, Zea Mays
MGAKHICEFAKRCSKLKMLLHVSTAYVAGEQEGVVLEKPFRLGETLREGTHLDIESELNLIKETRRELKASRCSEKAERRSMKELGLKRAREFGWPNTYVFTKAMGEMLLGAHLRGDVPVVIVRPSIITSILKEPLPGWMEGIRTIDSFIIGYAKQALSIFLVDLDLIMDVIPGDMVVNAMMVAMAAHSEERGQQTSIYHLTSSVRHPAPYAVLAECGRRYFLHNPLRSGGKNSEPVRPSRMRFFRTLPGFRAYMAIKFRLPLEILRLLNIVLCGALSRRHDELSRKYRYVMHIAELYAPYSLFKGCFDDSNTERLRAAMANRSSGYDFGFDPLCVDWDDYFYRVHIPGVVKYLCGY

SEQ ID NO: 67461 - protein, 684 aa, Zea Mays
MATPFPLEADEGEARELLYEAYNELHALASELGGAAAAPAVVVVGHQTDGKSALVEALMGFQFNHVGGGTKTRRPVALHLRFNPRCDEPQCRLLSATGDAEEHDEAGVAARPMPLADIQAYIEAENLRLENDPCQFSEKEIIIKVEYKHSPNLTIIDTPGLILPAPGRKNRVLQSQASAVESLVRAKIQHKETIILCLEDCSDWSNATTRRVVMQAILSRELEDIASIEDKLGRSLTTMEKDRIGVGNLRLYLEELLQKRYIKSVPLIIPLLEKQHRNTTSKLREISHELSDLDETKLKEKAQLFHDTFLTKLSLLLKGMVVAPPDKFGETLVNERINGGTFTGSENFQLPNKMMPNGGMRLYGGAQYHRAMAEFRLVVGSTRCPPITRDEIVNACGVEDIHDGTNYSRTACVIAVAKARDTFEPFLDQLGFRLLYILKRLIPISVYLLEKDGEHFSSHEVLIRRVQEAFKRFVESTEQSCRQRCMEDLESTTRYVTWSLHNKNRAGLRHFLDSFVAPEQLSVNTLNERFSGLNDNKQDKAKGDSKSNHSPDTNSSTAMPETRLVDLLDSTLWNRRLVPSSERLVYALVHQIFHGIKEHFLVTTELKFNCFLLMPIVDKLPALLRQDLESAFEEELDSIFDVTQLRQSLGQKKRELEIELKRIKRLKEKFGEINKKLNSLQVRQ

SEQ ID NO: 67462 - protein, 295 aa, Zea Mays
MGSEGRVWNGAGVAAGSGYGGSVEAKATTAAPADVPTSAASVDISLPLPEMSPHIIGLCKELVKGWSSIDSSRFSIETVSGGITNLLLKVSVKGNNGNDSSVTVRLYGPNTDLVIDRKRELQAIPYLSAAGFGARLLGMFENGVVQSFIYARTLSPADMKEPKIAAEIAKELRKFHQVDIPGSKEPQLWNDIFKFLKKAAALKFEDNEQQKRYVKISFTEIQDEVKELKDLLDILHAPVVYAHNDLLSGNLMLNDLEGKIFSFVSVSPFLLLLICKTNHSGGVPVVSSVREAIFY

SEQ ID NO: 67463 - protein, 87 aa, Zea Mays
MLCASSAEDGAAFAMVGRPRYSRSTSLTSLPMPSSFPCDDSACSDRILFRVTRGIDVYAYLLGVVHAEASSWVKQMGEDEDDTLTVG

SEQ ID NO: 67464 - protein, 753 aa, Zea Mays
MPEQFIEEEIKVKPTKRERPQGSFTFFQKSRNALMGAADAVRRVATKGTFVEDNRRTEAVAQAMNGTIWSGCTDGSIIVWDGNGNRLREFHYHSSSVRCIKTLGDKVWVGYASGTIQVVDVEGNLQAGWIGHSCPVIDMAISDSYIFSLAHHGGIRGWPLSSPSSLDDILCYELASRELLYTRLENLKILVGTWNVAQEKASPEALRSWLGGAFFDVGLVVVGLQEVEMGAGVLAMAAAKESVGLEGSANGQWWIDSIGKTLDEGISFHRVGSRQLAGLLIAAWATNDLRPHVGDVDTAAVPCGFGRAIGNKGGVGLRIRVFGRRICFVNNHFAAHQENVSRRNADFDRIYRTMTFTKPQGSAASATAVQLHKAANENQADEGRPDLAEADMVIFLGDLNYRLDGITYDEARDMVSQRSFDWLRERDQLRAEMKAGNVFQGMREGPIRFPPTYKFQRHQSGLSGYDSGEKKRIPAWCDRILYRDSRPVPIAECSLECPVVAAITAYESCMDVTDSDHKPVRCTFSVDIARVDELIRRQEFGKIIESNKKVRSLLRELRSVPDTVVNANNITLENHQEDVILRITNNCETSKAAFEILCEGQTVRKQGGTQSEELLPRASFGFPLWLEVQPSMGLIGPGETAEVVVRHDDFLTQEEYVDGAQRNRWREATRDLEVVLSVTVTGSSSSSAEAVAHRVTVRHCCPAPPAPLPANRRSAAASPRDDVAASDNQSNHLHRSDLASFGSSEVRDLCGGL

SEQ ID NO: 67465 - protein, 1111 aa, Zea Mays
MTCTASTTCITGLPRRGTGCRATLHSPSWRWFASMETFAMLGDKTTVMSPEVLVDSGIPCCRLVQSAGEFVVTFPGAYHSGFSHGFNCGEASNIATPEWLIVAKEAAVRRASINRPPMVSHCQLLYELALSLCLRDPSNDVMEPRSCRLKEKKKSEGDQLIKKIFVQNVIEDNKLLGHFLSDGSPCIILPVNYNDGSPLSTLLSKFQSTTDSRISHGQCSKAEAPKDSRRLPMDGADKNRELSSSNKNSLSAFSGKTVPLPPRICIHECANVTGASHAHNAENDKVDMNSAAGLLDQGLLSCVTCGILSFSCVAVIKPRECAAKWLMAADSSLINDRLASSGEHDIDALQGGRTTGGILRSDSEMNGNSIVSDADAAPLNGHSALDLLALAYGDPSDSDEDVMNIKNQVPNVSNELINHTIESQPYTSCNGDYDGTKVSSSSKEREQGPTSHSSKCIGNSNTLNGPKGVRTRNKDLLKMVLSEGFQPKGICSETHKKVQCEPSSSKKTSMEIPCGTDYHVSHNSGTICMDSSRGSTTTTMVNNLVTSVVKPDKDSSRMHVFCLEHAIEVEKQLQAIGGADIFLLCRPEYPRIEVEAKLLAGEMDFEYDWKDILFKEVTIKDREKIQEVVRDEEAIPTNSDWAVKLGINLYYSANLAKSPLYSKQVPYNRVIYEAFGCGSPNDSPVKLKTYSRRQCRAKKIVLAGRWCGKVWMSNQVHPYLADRIKNHEPKEIDETFPSDQKSHAEPVENSSREAASTRKSSSRTIEGKTSKREKEQLEKANAKKPKFTEEDNSKSLEGTAEASTQKIKGRSVLEKTSKKEKAYTKKLKHTEKVSEALKGPSEASFPAPAGMVVRSSSRIANRKIMLKSKMEEEDNGSADRPKSKVEDDKDNPAGRSRAKPLRQKTKVDAKKKTKETRVEKRKAPSPASQKDEEEQSDDVEGRSTTKQRLSLRKKGAKTEGKQRMEKPRFGGSAPPPSSPKRKEEYVCDIEGCSMSFGTEQALSLHKNDICPEKGCCRKFFSHKYLQQHRKVHADDRPLKCPWEGCGMAFKWPWARTEHVRVHTGDRPYVCLEPGCGQTFRFVSDFSRHKRRTGHGASKKAKAKKQGKAAVT

SEQ ID NO: 67466 - protein, 212 aa, Zea Mays
MALLSPRVPRLPPSTFTSAAGARCFGPAARCQATAAGGVAAAGPPSSELEAIRWGSAKLQGARDEMEDEVLLRPGSLLDGFSFAAVLDGHAGFSAVQFLRDELYKECAAALDGGAVLSTKNLDAITASIQRAFAAVDAKLSTWLEQTDKDDSGATATVMFLRSDVLVVSHIGDSCLVISRGGRSEALTGSHRPYGNNKTSLEEVKRIRAADC

SEQ ID NO: 67467 - protein, 339 aa, Zea Mays
MATPLRATAVLAWGSGEDGQLGMGGNEEKDWPHFVEALGPYAVTAVVAGSRNSLAICDDGRLFTWGWNQRGTLGHPPETKTESSPGPVDALAGFKIVQAAIGGWHCLAVDDKGRAYAWGGNEYGQCGEEPERKEDGTRALRRDIPIPQRCALKLKVRQVAAGGTHSVVLTQEGHVWTWGQPWPPGDIKQISTPVRVQGLEKVRVIAVGAFHNLALTEDVILWAWGNNEYGQLGTGDTQPRSQPIRVEGLSDLSLVDIAAGGWHSTALTIDGEVYAWGRGEHGRLGFGDDKSSHMVPLKVELLAGEDIVQVSCGGTHSVALARDGRMFSSSTYKMKILAT

SEQ ID NO: 67468 - protein, 292 aa, Zea Mays
MAISISQEAFDSMVRENMEDLGMDPDEALADAVEALTLQGADLSGIVKRVPGEATAAEVSPVVRVLDELKASLSASGGSEQDLDGLVSLLDELRNLCCSGEGSENAAIAVRNGVVEALVALCASARVEQERLLASALKSLSSVLRDVASTEKFRRSEGPRIVMDLLQGGSENSDLLDAGFSVVAAGSAGNEVVKESFMDLKVDELILRVMKDKSKSNVQSLYDAIRVLLKPDDNRVVASQVYGYSRRFAEIGVAEVLVNALREQVAPSSLPSACAALKSIAVNESFTMFCCV

SEQ ID NO: 67469 - protein, 651 aa, Zea Mays
MLKYNGGKPRVETKLKSAVQLQDLLDATRQLVPPTRSGRESDSDADDIEHIEKLRQVKAVLEEGGHFSGIYRKVQLKPLKWIKVPKRNGDGEEERPIEALMILKYGGVLTHAGRKQAEELGRFFRNNIYPGEGTGLLRLHSTYRHDLKIYSSDEGRVQMSAAAFAKGLLDLEGQLTPILVSLVSKDSSMLDGLEDASTEMDEAKARLHEIIISSEKAKNTEGPVEFPWMVDGAGLPANASQLLPKMAKLTKEVTSQVKLLAEGEDERLALTSTFSKYDQAKALGKTTIDVARIAAGLPCGSESFLLMFARWRKLERDLYNERKDRFDITQIPDVYDSCKYDLLHNAHLNLKGLEELFKVAQILADGVIPNEYGINPKQKLKIGSKIARRLLGKILIDLRNTREEAISVAEPKFIEDEALFLPTKEAEHQQKVHVRNEDGRRSSSTSEKSLDQEDEDDRETKYRLDPKYANVRTPERHVRTRLYFTSESHIHSLMNVLRYCNLDESLQGEESLVCQSALDRLHRTRELDYMSNIVLRMFENIEVPLEDEKRFRIEMTFSRGADLSPLEDKTSESSSLLQEHTLPIMGPERLQEVGSCLTMDKFEKMVRPFAMPPEDFPPAAPPQALGYFSKGAGVLERLASLWPFHKSANGK

SEQ ID NO: 67470 - protein, 270 aa, Zea Mays
MAPAFPTTLLHQASTSFRFPAGAAGCIRPHCLAPLAAPTTLSLAATPAVPRRLLLPVAAGIWDLISGGAGAAAAASLAVRRGMQLFRQGDVAGSLAEFDKAIEMDPRQKQYLWQRGLSLYYLDRFEEGAEQFRIDVAANPNDTEESIWCFLCEAQLYGTEEARKRFLEVGLDSRPVMREAYALLRSGADPEKVISPEADVYLVAKFSSGTDGEVFYSSLYAGLYYESQKDADMAKSHIVAACKSPYGSRSGDYMASLALVHCQCRNWKVV

SEQ ID NO: 67471 - protein, 109 aa, Zea Mays
MDHRQPPPNKTAELDPVLHSIGFQIEEVSPSQVTGRLPVTPSRSRCSTAACRRWWRRAWPAWARTWRRASAGLPASASPSTTSAAPRWETSSSSAPPRSTSAVRRRCGT

SEQ ID NO: 67472 - protein, 182 aa, Zea Mays
MKEAVHEELNKLEAENQAHLSLIAEIMEELISRGDIQQQWEQKMKKEQERALEVDNNLQHVLHEHANERTDREEELADLLKERAALECQNQELINLRSEIDGMYDRLATENEEVMADQQTLENLMSDMTSKHQAVNEAKSYLEAEKEALTMLRTWVEDEAGRVHERAETLEKALRRWRIPED

SEQ ID NO: 67473 - protein, 56 aa, Zea Mays
MRRCAVVQSVRSEEREKVSHDRCNNVARSGCLTTVRGGFPVRLHVGSSSTMAVMAR

SEQ ID NO: 67474 - protein, 484 aa, Zea Mays
MYGVVVAALGMLSTIATDLAIDAYGPISDNAGSLSLSTATTIGGAPNTVAPCAPAWCGDLAISYPFWLAGTHLPKCGYDQGFKVTCDKAKDDGTCNIDKFVNASFVPSPPFEIEPQQNQELFFVYDCNLRAPQLPRSWTPLRCGNNGSFTWLSGEYRPEDSSMAMPGNCNVAMIPVVAYEGATAADYQWFVEGGFFLSYYLTDTEDDDYYDQCQACSYRAGHGQCRTIVSDNGFQCYCSDGVYSTTACGTKRANWKTTIVERYGNKCGKHDLSNSKTIFVVESKRELNQECSIYIGLRMNEHQERVREEAYTVGTCPSQWRCSGDGGDRHWHGEAAKPTAAEPHLEEEVENLCRYELPNESWEVNLPPEKVSPELPVPTLGINFARDGIQKKEWLSMVAAHSDAWLLSVAFYLGAQFGFNKNYSNSENMRQTDLNRVEMIPSYLYEDFPSKARDNGYLLCDDSKRMRLIDCVAVVAPIEKYYQY

SEQ ID NO: 67475 - protein, 501 aa, Zea Mays
MASPQESNSLCLKRKLVDDCLSKDCKSRRVKSENEPSSDSFAKRCNCCCTRPNLANDCVNFLKSGAPNRVMYYKKGSWHNFPEQIMNSLIDEFKGNKSSVVSVMDDEPILVDFLSMTLVNLKTRKQRSVAWFDDTGKRFFPSLFFDEESDEMPKQDSGNVNNTAQGIMLDKVTSSPPEVVKQVVLESSPPVPQKPSTVDVLRKKITSVERGSEGFLFVQDLFLSGMNPFATPNNILHVHRYSPNDITAQCRFEAFERQMKSTKEARGDANVKYGWLGSRKSDIVRILINGLGTTANPVEKAGLSAGVYLSPENRAFTSVGLCDVDEKGVQYMLLCRMILGNVEAVEPGSQESFPSSEIYDSGVDDCSNPKCYVMWPSHLSTHIRLEYLVSFKLAPKVRNYLLDLKGLWFNPSLKELGTDICTLQPVMCETGEGPTSPWISFRVLFAVIQDNISSVARELIFHHYEELKESIITREEMVKKMIIVVGEKVLLEALKKLHYCA

SEQ ID NO: 67476 - protein, 202 aa, Zea Mays
MLCAHIYHAAFILLKLALRNSCPICRHEMPTDAALRAAASVGVAERAAGEEQAWDAPHARDFHLPPNLIREFTRTRTSSMICWTIPADTNTIILWQEITILELTTFASTEEFDTHDPKENTLLLPYLRKRSKIIEIVAARDIVFALSQLGVCAAFSSGTFAEDKTKPDAGFPLFDSPCQHGNFRTQRLCERPWVPLSEGRHR

SEQ ID NO: 67477 - protein, 193 aa, Zea Mays
MSCLAISAAAHLLACHSRRASAVFWQLDYAGISVMIVASFVPPVYYAFLCHPPARAAYLCAIAALGALVVAALLSPSCSSPRYRRLRAALFLAMGLSGVVPALHALWLNWGHAACYLALGIEVVMGLTYATGAWFYVSRVPEKWRPGVFDVVGHSHQIFHVLVLVGAVTHYVAVAVLIHWREKVAVACGAASA

SEQ ID NO: 67478 - protein, 1599 aa, Zea Mays
MTDLSMDTLKDMDIILDAFSRIAKMVDALCRCGTEIETPLVIVAKSLSIMLPDGDNSEYNKCSFILIKAWVKAVHKDFRDTKVDDAPLLYPFLLKYRSPWPIKLIGLIVEQELLAYGLTEARSIEFCSKMQIRIIDVLLHKIYCTKEHFLERSRVLIRKAGALRASGVENIKNCLESLRDAISLLQKISHDSTRTNTTANNQLAIAYCLYAQCAQEDKLGGEVIFDSAEKALNLWLDMEAFDHSSSDMVLQQPSKTIVPLICFLVDLLSMKGCFELQFKLCKVMIMIWKQEKLPIEKLLSLLFTSGRLSHACCYLPLDERFLSIAKEHLGVCCHDIEFWINCFKGDHPSLCMFLQRTLPSALFIPQSCKHPFGRQFSFVTSVDEVSKVASSLVSGDTSNEQSTFLAGCLYYDLSEKVFSRGQLFQAFSYGNKALHLRKKLLKKKFKINSGISGNMERQHCGQDISLEVCGPTIVEIWPNSSSSVNTKDFFLTPWNVLRCYLESTLQVAMMHELIGNGAEAEVLLQTGKEISNFHGLSVFCIVFTSFLGQLYCKRQLWDEAESELNYARDLVKNDATISCKLCSLTLGISVDMQVGDLSWSLFEKKIHKQITAGLSNTLGMYQSAIDKLNSTNLEYCNGSFDRHTTGYLVCSKDCIPSKYEACNLGAEPLTSNDGLLSPCSVCMVIQVRRKNSGNAEAGPPLDAKARRSSRNSSRLAKGQNVETLAKTRTRSSKRNACMKSEKVLTELNSKNNVTGSKELAADASVCGEAECFPDGIDHSKDDLCNMFGCWSCLFIKSLNSGCIQNILQLRLDYVHRHYLVSLLLKKARALGSHSNGDCEVHSVYWKCISLLFFRSLPQDCCRTYGPYLIGLIMDRSIGDFLPLECAEILFNMSFFLLKSPLSEQSRDICCIFSSVTMADVVPWLLKAFVLSRESPSLVQEVCKLLACIFLLSTTDSSIQLPLGSHKESLSLNHWATYFHQVSVGTNLNCHYFASLQASSEEKVPKDTYKDFRNETDDNVSKFLRLSSRDIKYIEKHMTEFFQKLPDVPVLCISMLGGDYVNALLKFHCHPPFFPAWMLLSRFDSTNEPTTLLLPVDSISAEMQFEDSCTKDLGNPTRVLDKWQCPWGYGITDYVAPVFRNILEENFMSLSSATLTIDDVNADRVRWWSHRMKLNNYLANTLKDIEDSWFGPWKCLLLGHQLSDEHIETASSMIITGLDTEFEFEVNPMLIKAILGGAVSVDEVQECFLQLILYKGYFGRGGCCGKDRLKAFSSCQMDDGSMETLKRIITDASYELPQPADRDPVILVLDVNVQMLPWENLPVLRNQEIYRMPSMGSIFLALSRTNNDYKDHSSPFPVIDPFNTYYLLNPSGDLSSTQEEFVQLFRNYEWKGVAGNSPKADELVLALTNHDLFLYFGHGSGTQYISSKEVEKIDNCAAALLMGCSSGTLHCKGSYAPRGAPLSYLFAGSPAIIANLWDVSDKDIDRFSKALLNSWLHDKSLDGNNCSKCCQLTMELESMSIASKENGKARRQGTRGKKQQHINDSTKCCSCKQRRIASYISEARRACRLPLLIGASPVCYGVPTIIRKKVMTDSTTREMT

SEQ ID NO: 67479 - protein, 828 aa, Zea Mays
MRGGGRGGGGRQPSYAAPDGADAAAIPVASRKMVQSLKGILADRSEGEIYATLCDCGMDPDIAVERLISQDTFHEVRRKRDRKKETKVNHETRPRPFQKYTYRGYKAVSDRSGRADPTGGFKGPVKKEPEMQAPLNSSALDVKTSDTTEIFSATINVAQTDAKNTTSQPLSKVQHGWGGIPGRPSMAEIVKMGRPQAKVGSRSVASSTALPTVGDSVISNTPNLVPEEYNRTVFASEAGHVAADKLPNGAVEVHSLPKDASAFDMLPSAEGTDVEAPSMSANAQGSSTPDANEDDIEKYANLEEGNTESLISPGQVSASGKDIQSEYTEVVSHVDEGSIEKTNDFQLNGLPFEHNQNLNGDVSTATTQFDHLTLHEGPKLSDDNPAVIIPDHLQVSNADCAHLTFGSFVSGTLDSSLTTKPLESHGDAAAVPDDDSIDQSDGRIHDDEGKVTLATDVNEYVTSAANSNEENLDITSVQQSEVTRADFLDVTSNTEYNLTSTPDYATSSAPLQDSASQSLQENRQFQNISPFSSFMQMQNGLLPPAIPPLREFDPAFSLLLTHPPMMHGTMSSSMSNTTVSTQPQENANPVGLPNPQLTQSQQSTSIASGPPLPQHLLHPYAQPTLPLGYASMIGYPSLPPSYAYLPPAAFQQPYMNSGLFHQAAAAVPTSSVKYPLPQYKSNIALASLPQPGSLLSSYVGGFGTASNMPGNFPLNQSTAAATTTLGFDGTVPSHFKDGNQFISLQQNENPAMWMHGASSRGMPPLAASTMYGYQGQSHQAGLRQGQLPSQFGSALGQSQPGLGPEHRNPSDSNLSGAAQANQMWPNTY

SEQ ID NO: 67480 - protein, 57 aa, Zea Mays
MGKLCLGQTNTRKANTQWEWRDGESSVYPPWQEAGRWCICALGWREPGLVLRNPLAS

SEQ ID NO: 67481 - protein, 343 aa, Zea Mays
MYGSPVSKDLNVPVQPPMISSGLLRYRSAPSTVLGDLCEDFLPSASGAASPDNVFSRFLAEHHTRDDKPSPPPPAAVHFPSEADMASQQQQQMMFHSHHHQQQQQMVGAKSGLYRTVSSDIETAAAVGTGGASNLIRQSSSPAGFLDHLNMDNGYGAMLRAGMATADSLAGSGSRLKGQLSFSSRQGSLMSQISEMDSEEVGGSSPEAAGGGRGYIPGYPMGSGSGWEDSSALMSDNLSGLKRPRDSSEPGQFQDAVPCKIRAKRGCATHPRSIAERVRRTKISERIRKLQELVPNMDKQTNTSDMLDLAVDYIKELQKQVKVLKETQANCTCPASKSQQHSC

SEQ ID NO: 67482 - protein, 385 aa, Zea Mays
MASGDGKKQSRRQRRRRQLWAACLPRPGCFTVSAADEGPSAHGAGEGESKPKPTHLVVTVNGIVGSAENWRFAAKHFIKKHPEDVVVHCSGCNSAARTFDGVDVMGRRLADEVASIVDSRPELCKISFVAHSLGGLIARYAIALLYESETQKDSHEKFENHAVDYSSNQHSKGKIVGLEPINFITFATPHLGTISHKQIPLLRGSNKLEKMAYRLSWIAGRSGKHLFLKDMEDEKPPLLLQMVTDYGGLHFMSALRSFKRRVAYSNVCNDFIVGWRTSSIRRQHELPEPRSFINNNRYPHIVYVEGPKVEDVDFLDAMIYEAKTTSEMEEVMLKGLNRVSWERVDVSFKKSRQRIFAHSTIQVKTYFLNSDGADVINHMIDHFVY

SEQ ID NO: 67483 - protein, 446 aa, Zea Mays
MEVEAAGPDKLAPPSPVEGPGENGAATKVQKVYRSYRTRRKLADSAVVVEELWWQALDYARLEHSTVSFFDEPKPETAASRWNRVSLNASKIDPRHRYGHNLHFYYDEWCKSQAGQPFFYWLDIGEGKDLDLPECPRALLKQQCIRYLGPQEREHYEYIISEGKVIHKQSGEPLDTRRPKGTKWIFVMSTAKKLYAGKKQRGVFQHSSFLAGGATIAAGRFTAESGVIKSIWAYSGHYKPSAENLHNFMNFLEENGVDLKEVEVRSSTKEDYNEDPVPVPVLNDTRSSTSATMEEADLPQAAVPVPALNSTEGDEGDSPPEDEGRGRARYQRTLSGGLQSPRATQVPQRAILERMKSKGELSKSYQLGHRLSLKWSTGAGPRIGCVKDYPMELRMQALEMVDLSPRGLSSTPSPSRRLPPPCFSPTKVASPTSPLAPVQASLPQPS

SEQ ID NO: 67484 - protein, 141 aa, Zea Mays
MPKLPGKTASTQKMLHCFLLLVTKNTNNRVLQPYYATNFYILLRAVDRLAANYSRLPGIFDRLKTVAASVASEMGLNGASLSEDLITEMCRFGGAEIHPVAAFVGGVASQEVIKLVTKQFVPLPGTFIFNGIDLKSQVLML

SEQ ID NO: 67485 - protein, 440 aa, Zea Mays
MAAPRKGTATPLGAVFSPEETKRAVARVAESIAGRRAELGHLLGFVADNAALVSLVNRLPVELSHEIMVPFGGAAFFPGRLIHTNELLVLLGEGYYAERSAKQTTDILHRRGQELEAQVEAMKATITDLEAEANFFESTATEASEGLVEIREEYDEDTETKTTRSEASIATGVMFDNDREHAQIMARLVELEREEKEAGNTCEDDDDDGDDDGDAGTSEDGEENKEPGNALSDGNEDHSSGSGALFFGNGGNDRSNGNIKLKSALKKPGGDEMLKDISHTPSADTSHPVFGGQTSITNPDVRVHTKDGTEPEFCFSLGASSAFSVSFEDDKFVVSSSKSPTLLVGSIQSDPGLKSSSDPTPSCDRKIISSGRKAFTGSIVEHDDDDLSTIQPSAGNSLAKPGTSASSRPMSKFKMQKGGRAPSPVRLFGGDTWDVQLDSV

SEQ ID NO: 67486 - protein, 92 aa, Zea Mays
MRRLWRWYQQCLAAHPVRTQVVSSGILWGLGDIGAQTVTYYSASPDRRGHDSSPPDPEDKDNKDNKEFKVDWKRVGITSSFGFAFVGPVGHY

SEQ ID NO: 67487 - protein, 132 aa, Zea Mays
MDASAAATDVEVDEQSPLVEGIGLSSGVNVEDESVFDWASMVLSGLWEEEGRHDVPSETQMYSQLGLIEENEAEENRRDEALRGGTTNFDESDHVDSGDQNTNQPCEDYLPDEKRAKYDKINPSMQPVCFRT

SEQ ID NO: 67488 - protein, 516 aa, Zea Mays
MDAFMGSVLGALLAVLASTLLIGALFFLVWKPYVVTRWFRGQGIGGPSYRFLVGSLPEIKRMKAAGSKITLDVGSHDFVPIVQPQYRRWVSDYGKTFLYWFGAVPTICVAEVGLVKQVLAERTGLFPKDYMNDSMEVLLGKGLVLANGEDWKRHREVVHPAFKPDKLKTMSVVMADLVQRMMQQWRSQIQRASNHEAEIELSSEFSELTSDVIAHTAFGTSYKEGKEVFVAQKELQELTFSTWLDIPAPACLSKSSRRVEELDKKVRSMLMAIIEGRLAARGTSGYGNDLLGLMLQARALEQEGHQMLTTEEIVDECKTFIFAGQDTTSHLLTWTMFLLSRYSEWQHRLREEVLRECGDAVPNPDTVTKLKLVNMVLLESLRLYSPVVFIRRAVGSDILLRSTRVPKGTMLSIPIALLHRDKDVWGQDADEFNPDRFEHGVSNAAAKHPNALLSFSQGPRACIGQNFAMLEARIGIAMILQRFSFELSPNYVHAPKEAVTLMPRFGLPIILRNLHD

SEQ ID NO: 67489 - protein, 60 aa, Zea Mays
MCCPVWSLFFIYGKGLATNCILRVKHLAFVSEFIDLCTCSRIRCRNKLHCGLVLVPSRKL

SEQ ID NO: 67490 - protein, 149 aa, Zea Mays
MAECKDDDSGRRSPSSSMDSSTHPPALSTASSASRRPPERRDQLSPDLQLGLSLSPASSALLVAETNNSIVPSTPRNQALPDWPPIKPFLRSALTASARRRRTLFVKVYMEGVPIGRKLDMLLLDGYSSLLAKLCHMFKASITCKYICN

SEQ ID NO: 67491 - protein, 1679 aa, Zea Mays
MTNFALEILNLNKKEIITMDTISNHDFTEEECKRLRQSMKCGVISRLKVGDILEKAKILQSVKVNDWFENEKQRLGHLRDRASETGRRKEYPIRPYYDVLLNDSEERTRRINEVLEVHVDSHMDPNYESAEETDEKRTVGKSVDRTRPDTTISRRISRYLSTMQNHPQKVSDCSHHPKNLSTESTICGSGARSLENSTANRTMYEAGSFSSSGVTMSNDTEPEKVWHYKDPSGNVQGPFTLLQLSKWTSYFPRDLRVWLTFESEERSLLLTEVLSKQQKDFTQAASHTSSKATLVGTGHTRNNPSVDQTNAFSPAGHSVVSSSGITVQYNKYSVPERESVYSPDDSLSLSTSSVPPKDACTVNSQTHCQNKHSVFIQSPGSAYGHTDLNHDGIQGGCSGESNHHHSSGALWSPTVVQVSCGHGNVESHQSQHVSWSQSQHESKNSSQRPVKDLNSRRDLSKNLPTQRIGKDVSSPLFACAWSPAESRTASSQHDGSCLSSTTNPNFLDELHYSIASAKPKSCAPATPIEDRGSSSPSGMLSHAERVPICSPQSTPLASAFDMCKMEEIMNQQRTLEPDTSNASINQSPESKIFPVSSPDNHDIDREFPSPVPRSENKDIAVDSSGLTPASPENITTNLPGSDTCKMEVMSQQQVTEAVVSNSSDNHSPQSKVSPVSSPNNEDMKHQYPSSTRRSENKIPAVDNLLSTSAARENLTTTSAHDSDTCKMVELVNQPKTPEVDASNAPLCQSPHSHTSQVPSDNQDIERECPGPTPRSDSKEPLVNNSATTSASASDTIKMEEFVNQQKTVEADASNAPLNQSHSHIFPVPSDSQDIEHECPGPTPRSDTKEPLLNNSVLTLAASEILTTTSAASDTCKMEDSVNQQKTLEADALNAPLNHHPHSHVLPVSFDNQDIQHEYPSPTPKSDSKEPLVDNSVLTSVGPEMLATTSVSDTCKTEEFVNQQKAVEADASNASLNQPHISAVPSDKQDIECECSSPTPRSDCKEPLMDNSVLTSAVPEILATSSASDKCKMEEFVNQQRPIEVDASNASLNQYSRCHIFNVSSDNQYVERECSSTTPRSDCEEPLMDNSILTSAVPEILATSSASASDKCKMEEFVNQQRPIEADASNASLNQPHRCHIFTVSSDNQDIECECPSPTSRSDSKESLVDNLVLTSAVPENLPTSFAVASDSCKMEILNKKRTLEADASNASLDQPSHSSVFTSSSNDNQGNACERPSPNPRPEGEQPLMDNSGLTSPVPQNLTSASDICKMGEILNENRTLEANPSNGSITQSHQSKVFLVPSIDILERECSSETPRPQFKEPVVDSSGLTSAAPESLTAKQHVHSPDAFIPPKHGAPTGELGDAKSDFKGEEIIQKEQYCEREPIVATRENLLIDLSCGAESIDVSDVLESLMEERSVTSYVPVSIEDFLAASAVEEPQYSSPIALSPWGEPSYYQGDAGDSALWGIQDSINDMWSLLSPRPMLQASSGIGTEGKETFDINEVAVTHVNSDFFQRGSMLGEENMNQANLSVAADRMLLPEQVPSIPNGMSTSSVDEGTRVIGSQASINQSLDWGTTWRTSQNLSVYSNEIAGPSSKSYWEESRKQEATNSGVSISGEAIRNKRLNPPDNAIRGSHHHRGRYSQISESWLLSSNHSRSSSAKFGSGGSSRSTSKGQTRG

SEQ ID NO: 67492 - protein, 235 aa, Zea Mays
MKYLRPSFFFLQISSCRNDSCGPNFSTPPLSLNPRCLCMRADPERVRELPGPDAAHPVRHLPEKQGPRRAGRQGRGRRRRRGGGGHQEGGRCRGAGRCHDQQGSGRRRRRRQGRQPGVGGQGLFAVWDWEEHPKRGCLSLSVEQIGVGFCGLLRLLLLSSPSLPGGYPKHVVASILILGRCCTLQCSQAVSAKCVFLFHFPPALVLQLRLPAPDFSKKCIKLSEKFIQLRVLCCA

SEQ ID NO: 67493 - protein, 225 aa, Zea Mays
MAAFTVHTSAATSPYSPAGTAILLRSRSRAYPTATIRVSCSKTVVIGVAADSGCGKTTFTRRLASVLGGGAEPPRAGRNPGSNTLVSDTTTVICLDDYHSLDRVGRKAKGVTALDPRFVDFDLMYEQVRAIKEGRAVEKPVYNHVTGLLDPPELITPPNILVIKGLHPMFDERVRDLLDFSIYLDISNEVKLAWKIQRDMGERGGHSLESIKASIESRRSSTRTP

SEQ ID NO: 67494 - protein, 363 aa, Zea Mays
MAHDEPGFAYADYFAAAAGAVATFVPEVDVGGGGEEGLHLYGLQPHHQQPGVEMYGARGHMPPAAMMAAHGGKAALGLDVASPVVGGHFGDDHLRQALQAPLSLSLHDDGTADAAPLALHHHHHHLGGVPQAQQHQPPGAWPQPQQQGAWHLRGSRFLRPTQQLLQEFCTLPVDTVTSTPAKPASVEDGVGSSSSAAAPSQQIIQAMDAAELQRLKAKLYAMLQEVERRYRRYREQMRAVAGSFEAVAGERAAAAYTRLAQRTISRHFRSVRDGVAAQMQAVRRALGEKDADDGGVVPAAAGMMANKGETTPRLRVIDQCLRQHRAYQTGVVLESQPWRPQRGLPERAVSILRAWMFEHFLHP

SEQ ID NO: 67495 - protein, 1323 aa, Zea Mays
MSVQREEQRRKEMERLDRERRKEEERLLRERQREEERFQREQRREHERMEKFLQKQSRRAEKQRQKEELRKEKEAARQKAANERATARRIAREYMELVEDERLESMELAAQNKGLPSMLYLDSDTLQQLDSFRGMLSQFPPTTVRMKLPFSIKPWTGSEDNVGNLLMVWKFLITFTDVLGLCPVTLDEFVQSLHDYAYAWGFNIRSWQRHLNLLTWPEILRQFALSAGFGPQLKKRTVEDSYYRNDNEGHDGENVILTIRNGTAAVNAAAKMKERGYTNRRRSRHRLTPGTVKFAAFHVLSLEGSNGLTILEVAEKIQKSGLRDLTTSKTPEASIAAALSRDTKLFERTAPSTYCVKSPYRKDPADSEAVLSAARERIRAFQNVLSDSEAEKEVDEAERDDDSDCDDGDDDPDGDDVNTEVEDDKDPLLAVKSQDEVPSTTTVIGIKANLDGVGNALNSSSSFTKSAKGAPLPSLGRSNAADTSNDLPLGVSSANHEVVPDDSENTQIDESNQAEPWVRALAEGDYCDLSVEERLNALVALVGVATEGNSIRAVLEERLELANALKKQMWAEAQLDKRRFKEEFTSRVQYNSDMGLKPDIYQENNVTEITSTPACDAYRENDEHVGTINNCEMLDQHNQGNAGSLPYERNGVCQEILATPDTSYVQQYAYADKRRSQLKSYIGHRAEQLYVYRSLPLGQDRRRNRYWQFTTSASPNDPGSGRIFFESKDGYWRVIDSEEAFDSLLAALDTRGTREAQLHSMLQVIEPTFKEAIKRNVSIELSAGRYPKNGATDMIRANYHSEVGSSSSTPSATSDSITAYSDSFKVELGRNDFEKTAISKRADIFLKWMWREFYNQELTCAMKYGKKRCSELLHSCNCCYQIYLAEERHCSSCHKTFKSIYNFSDHTTQCEEKQRTEPFWNMQNTDYSVPIGMVLLKLQLVSIEAYIPSEALQPFWTDVYRKSWSVKLYTTKSIAEIFQLLTVLEGAIRPDCLSSDFETSECLNSQVGSASVLPWVPDTTSAVMLRMLDLDSAILYVQNQKMDRDDGGFMKFPSRYTVAKSKQETTPETAGLDLYDGRWLPGSGRRGRGRGSRGGSRGGRGRSRGGRIPRGVSSSSRIEFKGGIVASDKAPRKNVRRGRGRGRGRRRGRRTVRPRQPSVGRARSIPKENLLGSFSMLSSSKAATIEESPRSSGADEWGLETRTTYTECDENSSGSQSEDNEENGQPMDDDYEDQVPDYSIGYSTGSRHHVMMSMMDHDSDEEDEDAEGDENVEEDADLAVDDADVEMDEDDEIGDDGEDGGVGGEMNADEDPDATSYSSDYSD

SEQ ID NO: 67496 - protein, 976 aa, Zea Mays
MMAGRPRPQTELHSPSASTRRRERWLVVLGVALHAVYMLSIFDIYFKSPIVHGMDPVPPRLSAPPAKRLVLLVADGLRADKFFEPDERGRYRAPFLRGVIEEKGRWGVSHARPPTESRPGHVSLIAGFYEDPSAVTKGWKANPVEFDSVFNQSRHTISFGSPDIVPIFCSNLPHSTWDTYPHEYEDFATDASFLDHWSFDQFQDLVNRSFDDIKLRQLLLQDKLVIFLHLLGCDTNGHAHRPYSSIYLNNVKVVDQIAESVYNLMENYFNDNQTAYVFTADHGMSDKGSHGDGHPSNTDTPLVAWGAGIRSPKFLAYTEKPDDGFRFVDNHKHDTPTPKDWALEGFERVDVNQADIAPLMATLVGLPCPMNSVGSLPTPYLKLRKADEVEAVLANTKQILNQFLRKSQLKESSSLYFKPFKPLANFSLVLSQIEDLISGRDYETAMEQSEELRRLALAGLHYFQTYDWFMLMTTITLGYIGWMVNLIIHVLQSYTSYPVILLKRAQLYPNNTSMKVYICGCFFMGLSSILLLLEKSPLLYHAYVLCTIFLWTRIVQKIDFLKSVWRELANMPFKYIFNLLTSSVVALLVLEFLVMSFFDRKIYTWCFLVLGILGSTYVALFIQASAALAIYIWLACWFLSVFTLMPAEIPENNNLVIFSGGLIILIGLASRWIKSNSSSFWLYLTRANKRDPQSFKLYFVQVILVAISSIMVWLSTSHRSQNRELLSLHQFINWSVAGVAMVLPLFSPPSVLSRLTSIFLGFAPPFLLLSIGYEAVFYSAFAMVLIGWIFVESANLYCSEESGSARRRSLADNSVFGYEERHLRLSDLRIPLLFVILFNVAFFGTGNFASIASFEISSVYRFITVFSPFLMAGLLIFKLFIPFMLVICTFSAITKVVRIPRLGCYFLVILLSDVMTIHFFFLVRNTGSWMEIGNSISHFGIVSAQVVFVLLLFALTNIYTRDILVSSRQLTARKVM

SEQ ID NO: 67497 - protein, 137 aa, Zea Mays
MIGPVDFDRSVDYWQQDKWSGQFPVKWHIIKDVPNNLLRHIILENNDNKPVTNSRDTQEVQLGWHDAGTYDKNIIEWPKCSGANGSLRFKVELKHGANADLVNAMKLIPPSTTSEPHPRSMSAAPSSPFHLSAPIRA

SEQ ID NO: 67498 - protein, 214 aa, Zea Mays
MSRHRVETCDSWRPPRKNHAGAPPLLRAGPRLLAFASLSVRDGGDSAAAVAKAVEEAVVVRSDEVKEAVAGEERKKTKSTERRLPPAAQLVSHPLALLALVPNSAAIFAAGAAAGTVAKTVTAPLDRVKILMQTHSVRVAGESAKKGVGFLEAMADIGKKDGLKGYWKGNLPQVTYPLDVLRLRLAVQSGHSTLSQVTSLVSANFCTFFFWKLA

SEQ ID NO: 67499 - protein, 185 aa, Zea Mays
MAEASGGRRVARTVVVMAEASVGRRAASVERRAESAAVASGVRTAVTAEASAGHTVARTAVTAEASEARTEGCTAGTWAACHGGAWAACCGRRRSRSRVKATSASHCRARPVHSCCSATPASRGAGGGRRRRRGAGGRELRWRLPLRLGSTQRRATGCSVHTAAHASPFIEEERHVRSLRTLTLW

SEQ ID NO: 67500 - protein, 408 aa, Zea Mays
MTLLIMPTIQWGRRTRTVLDVGCGVASFGGYLLDRNAITMSFAPKDEHEAQIQFALERGIPAFLAVIGTQKLPFPDNVFDVVHCARCRVHWYANGGKPLLELNRVLRPGGYFIWSATPVYRQEQRDQDDWNAMVTLTKSICWRTVVKSQDVNGIGVVIYQKPASNSCYAERKTNEPPLCSERDGSRFPWYAPLDSCLFTTAITTSDERYNWPVPWPERLDVSYASVPDDSASNKEKFEADTKYWKQLISEVYFNDFPLNWSSIRNVMDMNAGFGGFAAALIDQPLWVMNAVPIGQPDTLPLIFNRGLIGAYHDWCESFSTYPRTYDLLHMSNLIGNLTNRCDLIDVVVEIDRILRPGRWFVLKDTLEMIKKIRPILKSLHYEIVVVKQQFLVATKSFWRPGKPASTSG

SEQ ID NO: 67501 - protein, 75 aa, Zea Mays
MHASRQRGPCRKMFHSAGGEEVIDRPSLSRNDIIIPVLVPTEMCARWLLASALPPATCPLVVQQMSWLNNPNDQL

SEQ ID NO: 67502 - protein, 262 aa, Zea Mays
MNSPAIVLLGDSYGRKTSEGGGFVLCPLYGRKSKAFMAASGTTNTAIISHMTKTAKLKIGLSLSVDNSQSMKADDFIAKRAMEAVGAAETRHGEWSVTRLRSAARGTANIESLSLGVGPRGGLGEQGDSVSRLLVLTSTSLVERRPENYEAAIVRPLSAVSAFVRFAEEPQMFAFEFNDGCPIHVYASTSRDNLLATVLDILQTQRQCAIPVLPRLTMPGHRIDPPCGVSHLQMPHHSSVDMESATMHIKTSGCSCLRAVAS

SEQ ID NO: 67503 - protein, 155 aa, Zea Mays
MALRLSAPFLTSRFTPSQALAPRRRTRARSFSPSADARAACFKRPYTSVLIIPTGVGAAVGGFAGDALPVARAVAGVADCVISHPNVLNAAMLYWPMPNTLYVEGYALDRFAEGSWALQPVHQNKVWCWILESRKTSGCATCRLQMPLGLLLACL

SEQ ID NO: 67504 - protein, 491 aa, Zea Mays
MVDFVREGFLGSTHEFRNRFQNPIENGQHTNSTSDDVKIMNQRSHILFEQLKGFVQRKSMNVVKNDLPPKKVFVITVKLSQLQRKLYKRFLDVHGFSSSGYSEKSHRSFFAKYQTLSQESNWWEELLDENTYMKADYSGKMTLLLDILSKSSELGDKVLVFSQSLTTLDLVEFYLAKLQINGKEGKHWKRGKDWYRLDGSTPSSDRQNLVEMFNDLENTRVKCTLISTRAGSLGINLHAANRVVLLDGSWNPTHDLQAIYRVWRYGQTKPVYAYRLMAHQTMEEKIYKRQVTKEGLAARVVDRQQVSRTISKEEMLHLFEFGEEELMEQNENGSTMIEKPSTSNTIKTSVPVPVDSLMLSLLSEQTRWISGYHEHEALLQENEEEKLTKEEQDLALSEWESLRKAASDPERKSSMSAVPTYPNPVRPLKPASRSRQLQQPKANSNNQKKCTNLTHLLTLRSHGTKAGCTTTCNECGQEISWETLNRDGRSR

SEQ ID NO: 67505 - protein, 273 aa, Zea Mays
MHAPPLVAFAGGACPASAASSLSPWLASLRPAIVAAPARLLWFRRGALRLEAKAAWRATGGGRGPRVPAKGAVLASYMGAEEVVGPLSLLDEEELILHIRKERDNGKLPADVAINLEELYYNYRNAVLQNGDPNAYEIMLSNMTALFDRVLLDVQNPFTFPPYHKAVREPFDYYMFGQNYIRPLVDFRNSYVGNISLFHDMEEKLHQGHNVVLMSNHQTEADPAIIALLLEKTNPWISENIVYVAGDRVVTDPLCKPFSMGRSFSSPRSFFDV

SEQ ID NO: 67506 - protein, 97 aa, Zea Mays
MPQNSFVIATKTVSAEVYVFDYSKHPSKPPLDGACNPDLRLKGHNSEGYGLSWSIFKEGHLLSGSDDAQICLWDIKANSRNKSLDALQIFKNSVPSL

SEQ ID NO: 67507 - protein, 332 aa, Zea Mays
MHRLCFNSLRNSTQNCKTFSGKKGKQEERRFFSIQDMLLLDLQLFSTEWVLTSVTLLTLGSVFTTFIGERISDLKLGNGTSLLIFTSIISYLPASFGRTVAQAFQDGNYVGLLTIILSFLLLVLGIVYVQEAERKIPLNYASRYSSRTGELQRSAYLPFKVNSSGVMPIIFSTSSLALPGTLARFSGLDFLKKAAIALNPGGALYLPTNVLLIAFFNYYYTFLQLDPDDLSEQLKRQGASIPLVRPGKSTAAYIKTVLSRISVLGSAFLAVLAAGPSLVEQTSHLTAFRGFAGTSVLILVGCATDTARKVQAEIISQKYKNIEFYDVNRFGQ

SEQ ID NO: 67508 - protein, 258 aa, Zea Mays
MAMLVPDLSFSASISSVKLPRYGASKSETFFVKKPPTFRAEARPAESGKYGTNNGRATKMVPTTEFRRTSGGLVRSGTVNGSPNSAVNGSTKVLINGSANAIDNSSTKAVINGTPKVAVNGTSLVKSSKTSLVKTQKQVRPKDDPFQEELKVLPSDEGFSWAKDNYNSVQRSIDIWSFVLSLRVRVLFDNAKWAYPGGFSEEKQKVRRRKTASWLREQVLQLGPTFIKLGQLSSTRSDLFPREFVDELAKLQSTCFFS

SEQ ID NO: 67509 - protein, 159 aa, Zea Mays
MTTSTRPCAGAAAAFLLLVLFSSAAVSLATAAGRESKQGQHAAGASVYVVMVKPPAEGVDSKAYQMGILAAALGRYGTQLFGTAKLSITSSICGRSCVVRALLSADWRICNCKRGESQAGADLQLQGRRQRVRRQAHAGAGRRVAGIQSNPCPVVHPSS

SEQ ID NO: 67510 - protein, 84 aa, Zea Mays
MCEWQRGRSTIHWRRTPSAPSFTTTTGPSFGSSSPSPRPSPSSTSSLTRMTPEPSLPPPRRQCQSINAQTIKWLEGQTKLSTFV

SEQ ID NO: 67511 - protein, 198 aa, Zea Mays
MLSEFVMQIIAKVVETYLPGAIVLQCGADSLARDRLGCFNLSIEGHAECVKFVKKFNIPLLVTGGGGYTKENVARCWAVETGVLLDTELPNEIPKNEYIEYFAPDYTLKVPNLNMDNLNSKTYLSSIKVQVMESLRYIQHAPGVQMQEVPPDFYIPDFDEDELDPDERVDQHTQDKQIHRDDEYYEGDNDNDHDDGTR

SEQ ID NO: 67512 - protein, 295 aa, Zea Mays
MATMSAASHRCCASSLRALTVLFVLAAPVSDVEGRHHRHVCPYFSCGGLSNISYPFRRQGDPSGCGVQSCELVCTDTDATIRIGSGTYKVLSINFTYSYFWVVDANLDIQSSCPLPRWDYHAGTSGNSRLGRIEFSHDFTYFCYPNSKWAFFVNCSQPIENNDIYEPVSCLSSSSFIYMVTDFLYDGYVPADSLQPSCGYLAMTPLGSPGMPVPKNTSYPDVVKFMRNGFALGFTVSIPDPNIRECFAEFMRTFLKDPRSSTGIKELIVDILRVVDIFLACVIYQLQSTNNNGVT

SEQ ID NO: 67513 - protein, 145 aa, Zea Mays
MSVQEYLGKHLLSRKSEEALNTAVRAKAPDPALFIVGHMRREAPTVITRVRARQILDGRSAPAVEVELHTNKAVHRASTASVGALEGAAADAAGASERRKFLARGVAYAVRVINDKVSEALVGMDPQQQAQIDQAIMDLTRRATG

SEQ ID NO: 67514 - protein, 343 aa, Zea Mays
MDWIKFCSDFTASDGKQHALLDNLNQELSQKSVLLGDGFKLSAADNDVFATVHPFVIRVSDSELQKYPHVLRWMDYIQNTVGAGTTLQKINVTKSDFDPPSHPRKADKKDAESSSKKAISVQKTADKSNGSADSKKSTREENPTAAGNSKTSGEKKKVQEKSAGKTTEKAPEKIADKESECDISILNIQVGLIRKAWKHPSADSLLVEEIDLGDGNVRQVVSGLAKYCSPDDLTNRHVVLITNVKPGKLRDVMSAGLVLCASTEDHAAVEPLIPPEGAKIGERISFAGFDGKPEDVLNPKKKQLDKITPHLRTDENGIAMFKGVPFTTSAGPCRSSIHNGNVK

SEQ ID NO: 67515 - protein, 65 aa, Zea Mays
MVFGRSKSTSSTTPSAPSKAAAACSELRTAYHDCFNRWYAEKFAKGQWQRDDCADHWHKYRACLE

SEQ ID NO: 67516 - protein, 261 aa, Zea Mays
MAVEYHCCSAAFFEHIVIIIVLVLFAGLMSGLTLGLMSLSLVDLEVLAKSGTEQDRKHAAKILPVVKNQHLLLCTLLICNAAAMEALPIFLDSLVTAWGAILISVTLILLFGEILPQSICSHYGLAIGASVAPLVRVLVWVCFPIAYPISKLLDYVLGHGQTALFRRAELKTLVTLHGNEAGKGGELTHDETTIIAGALELTEKKAKDAMTPLCQTFAIDINAKLDRNLMQEVLEKGHSRVPVYYEKKTNIIGLILVMFCY

SEQ ID NO: 67517 - protein, 175 aa, Zea Mays
MAATSEEAIKQFSALMEQLEEPLKSTFQNVHQGNLRGTLMRFLKAREWSVPKAYKMLMDCLNWRVQNEIDIVLAKPILPSDIYRVIRDTLLVGLTGYSKQGQPVYAFGVGLSTFDKASVNYYVQSHIQMNEYRDRVVLPAASKKFGRQINTCLKVMDMTGLKLSALSQIKEDTLQ

SEQ ID NO: 67518 - protein, 68 aa, Zea Mays
MNKMVVIMVLVKSEINLVAGLAAAERCRRPLHRRPFELRHPRLISRAYRQLRSVPAAELNTCLRSPWI

SEQ ID NO: 67519 - protein, 342 aa, Zea Mays
MAIPPRITAAGGGGRKTRVPPLPPARTLLTAFAAAVALAILCFLSSSPTATLSGSWRSGARSGDKYLYWGSRVDCPGKHCGSCAGLGHQESSLRCALEEALFLGRIFVMPSRMCLSSLHNTKGIIQNGATTKQRWEESSCAMESLYDIDQISRTVPVILDNSKNWHDIVSRSMKLEVGGVAHVQGISRGELKQNSIYSTALIINRTASPLAWFMECKDRKNRSSVMLSYNFLPSMPAEKLRNAANKMKEILGDYDAIHVRRGDLLKNRKDRFGVERSLHPHLDRDTRPEYIRKRIAQWIPPGRTLFIASNERTPGFFSPLSDREANDARSKDIYQDNARIWE

SEQ ID NO: 67520 - protein, 252 aa, Zea Mays
MLFKVFGVNMQAGFLLFGPPGCGKTLIAKAVAHEAGANFIHIKGPELLNKYVGESESEVRKIFTRARTNSPCILFFDEVDALTTKRGKEGGWVVERLLNQLLIELDGADQRQGVYVIGATNRIDVIDDAVLRPGRFGKKHYVPLPGADERVSILKAHARSKPISTDVDLDALGRRAECNNLTGADLASLVNEAAMAALEERLEFRDKGTSSLSSSSLIEMPHFERALSKIKPSVSEQQIKNYEALSMRYSSN

SEQ ID NO: 67521 - protein, 115 aa, Zea Mays
MAPLARTVVRRRQRALTESSEAREGALVLGIDGGGSSGTDRGEAGANRAPNRWGSTPTNFRKRRRKKGKKYSARGRGVGRDRGEKKGVSACSTCGKESNEAARRGGTHGEILVQA

SEQ ID NO: 67522 - protein, 51 aa, Zea Mays
MPTSPPPRRSSNPASSRRQSHSPILTASPSALLLLGRRAPPRRAPPCTLTS

SEQ ID NO: 67523 - protein, 102 aa, Zea Mays
MREVADLILSFPDETPVVVLSAMGKTTNNLLLAGENAVSCGAPKASEIPKLAVIKDLHLRTVDELGLDKSIVSGFHMHIHRVNPAIVWLPYWAVHLTTFDGC

SEQ ID NO: 67524 - protein, 393 aa, Zea Mays
MAKPSVAVPEVGVPAAQASCTCPGTLLAYPPPRGAGVAAAVRRKCLQVELGAGAGLLGGAGAWGVESMRASSPTHARAAAALAAGGGVDVDVDEERAASWMARHPSALGRFERIVAAAEGKRIVMFLDYDGTLSPIVDDPDAAFMSETMRMAVRSVAKHFPTAIVSGRCRDKHAGVRVREAGRALLRRQPRHGHQGSGGRQGLLFFSARRKGKRSSVPAGQRVPAHDRGGARAPGTDDALHTGGQGGEQQVLRLRPLQTRRRKDVGRAVRVGEGRAAGVPEAAADARADGAGGAAQHQVGQGQGPGVPARVARLRGLQQRAARVHRRRPHRRGRLQGPAAPRPGPGRRHPRVQAPQGDERLLLAPRPRRGDGVLAAACRVEAPLQGQAQAAMR

SEQ ID NO: 67525 - protein, 555 aa, Zea Mays
MSYAAYKMMHLPTGIDHCAAGFITHSPADAAAFSTPAPAPTAAAGPDGDIDSTAARAPRRVGPTPNLVVSAANVLEVYAVRAEVATGAEDAGNSSSTGTILDGISGARLELVCHYRLHGNIESMAVLSDGTENRRDSIAVTFNDAKITCLEFDDSINGLRTSSMHCFEGPEWFHLKRGRESFAWGPIIKGDPQGRCGAVLVYGLQIIILKAAQVGQSLVGEDEPTRVLSSTAVRIESSYVIDLRDLEMNHIKDFTFVHGYIEPVLVILHEREPTWAGRISSKSQTCMLSAFSISMGLKQHPMIWSAAKLPHDAYQLLAVPPPISGILVICANSIHYHSQSTSCSLALNSFSSQPDGSPEILKTSFHVELDVAKATWLSHDIVMFSSKNGEILLLTVVYDGRAVQRLDLMKSKASVLSSGATTLGSSFIFLGSRLADSLLVQFSCGMPTSVLPDLTDEPADIESDLPFSKRLKRIPSDVLQDVTSVEELSFHNKAVPNIVDSAEKISFVVRDALINVGPLKDFAYGLRTNSDPNAAGIAKQSNYELFLKSREAIEK

SEQ ID NO: 67526 - protein, 150 aa, Zea Mays
MERSYADPRKGEIVVRWWRWPMGGSTSPRVWPTRRYSPLRGSAVRSQGEKPCNPMKGETVARWWRRPAVGCKYEHLAKRVFLPMLPLPPAPHARRRAARPRRSLPSHHAPRCGGQHQSTPSIACWSYAQCMSPSTGGGGATVLPQRIHRT

SEQ ID NO: 67527 - protein, 249 aa, Zea Mays
MTTRVLKKSRAVSTLDIWPWKYLVPWMREDLFSRRDARGIDKVHSSKKVNAYDVEDMVMPLHQYINDPVAHEIIHNGATFQITGLTNNSYFDGAHEVRHCARKHPDLGRIVLEVAKNRLDQMLYVGLTEDHEESARLFAHMVGAQVLLQSGTLSLDLKEDLHSETDSHPSMVEPGDEEASEHLNNTHGWQNNEALNSTSDEQGKGNMTVGKLMEAYETCIAKLRKSQSSRRKISLKKVEEANFSKEFCL

SEQ ID NO: 67528 - protein, 349 aa, Zea Mays
MLFRTTLALLDLYGPALVTTKDAGDAITLLQSLAGSTFDSSQLVLTACMGFQSVREMGLQELRKKYRPEILTAMEERSKDRGSWKDKKGLATKLYSFKHDPSYVCSPVKSKEGLDGSKVNGETGPANLETYLSTSSILDNDLDQGVDLQDQVSWLKVELCKLLEEKRSADLRSEELETALMEMVEHDNRRMLSAKVEKLETEAYELRKAFSDKQEQEQVMLQILLRMEQEQKVAEDARIAAERDAAEQKHAAHLLQEKYEAAMTALSQMEKRAVMAETMLEATKQYQVGQVKANQSFTSSSPRADHVPAKINQEPNQTAPIRRIGLLSRGLGWLDKGKGRQNSNETSGA

SEQ ID NO: 67529 - protein, 632 aa, Zea Mays
MPPNAQDVHGSSGGLAMTAPAASKMDCFLTAVCTPLNLQFIDVSYRVKQTERSSKAAPGGRISHSGSGAAAPEERTILKGITGEARPGEVLAVLGPSGSGKSTLLSILGGRLAGHHGGTVLAGGRPPCRAVQRRTGFVAQDDVLHPHLTVRETLAFCAMLRLPRSAPAAAKAAAAEAVIGELGLGACADTIVGNAFVRGVSGGERKRVSIGHELLVNPSLLVLDEPTSGLDSTAAARLVATLSALARKGRSVVLSVHQPSSRVYRMFDSVLLLAEGSCLYFGAGRDAMDYFASVGFAPGFHVNPADFMLDLANGFAQADYNAVTTQQQGGSSVKQSLISSYNKVLAPRVKASVVAAEPPPPPHVQSGGEAAESCSTSWCNQFTVLLRRSLKERRHEAFASLRVFQIMAPALVAGAMWWRSSPLAVQDRLGLLFFASIFWGVFASFNAVFAFPQERPVLARERASGMYALSSYFLARTAGDLPMELALPTAFTVVVYLMAALNPSPVAFALTLAVVLAYVLVAGGLGLAVGALMMDAKRASTLVTVIMLAYLLTGGFYVHSVPRFMVWTKYTSFTYYCYRLLIAVQYSGHLKRLLPPEAVHGEVGPGACVAALVAMFFGYRLLAYVALRRVRK

SEQ ID NO: 67530 - protein, 100 aa, Zea Mays
MTEEYLKHTSIHGRLTTMLLFMILLASSDVVRAQTISGETKEGVTTPRSMRTASNIISTDGEEAAPRGWCFHDIVSGFYYCRKTDKYFRSFCDCLKHCLS

SEQ ID NO: 67531 - protein, 837 aa, Zea Mays
MVKFSKQFEGQLVPEWKHAFLDYCLLKKDLKRMQHARHHAAADRRQAAGLTDTQETAAGHHAERASLSLSQWLLDRLPAGLFGSNAPNRDRHGVIHVHRRKLAGSASRGGGGDVYETELLEPLADDDGDAAAAREFFARLDAQLNKVNQFYRGKEQEFLERGRSLRRQMDILADLRAARAREDPSVASASAASEDEYTRYAMTSASDTDALQLSEQEEQATPLPTDGPGVTAQEDHQQQQDLEGSGTFAVRPPLSGCGRKSLKITIPLTTPSRTISALTDILWDELAISHFSSSSKKCIPDGKQSVSKTKLRHAEKMIKRAFVELYKGLGYLATYRSLNMMAFVKILKKFEKITGKEVLSIYLKVVETSYFNSSDEALKLMDEVEDIFVRHFAGDNRRKAMKYLRPAQRRDSHAATFFTGLMAGCFAALFVGYCVMAHMAGMYYYYSTPAPPSRARGTGGGSVSVSVSVSVYMETAYPVLSMFALLFLHLLLYGCNMVAWRRCRVNYGFIFESSPSPAGGELGPRDVFLVCAASMAAVAGVMFAHLALVLRWGYHASPHVEAIPAFLLLVFLLLLFCPINVVYRSSRFQFLRILRNIVLSPLYKVVMVDFFMADQLCSQVPMLRSLEYLACYYISGSYWTQEYGYCTNTKHIRDLAYAVSFLPYYWRAMQCARRWFDEGDTSHLVNLGKYVSAMLAAGAKVAYEKDRSLASLSLLVAVSSGATVYQLYWDFVKDWGLLQPNSKNPWLRNDLILRRKSIYYLSMGLNLVLRLAWLQTIIHPNFGSLDSRVTSFFLAALEVIRRGHWNFYRLENEHLNNAGKFRAVKTVPLPFHEVDDD

SEQ ID NO: 67532 - protein, 192 aa, Zea Mays
MSERICRLYHLLVRRSSEKLKVIMKNILLIGNTLNQGTPRGQAVGFRLDSLLKLIETRATSGRMTLMHFLCKSLAEKSPEVMDFHEDLVHLEASSKLQLKALAEEQLAVVKGLEKVEQELTASESDGPVSDVFRKTLKEFIDCSSADVCSLSAFYSEVGKSADALALYFGEDPAKFPFEQGNIHAYRPMEMV

SEQ ID NO: 67533 - protein, 624 aa, Zea Mays
MAPEYLDDGVITMKTDIYSLGVIIRHMVKGRNSADTTDEEVLANWLIRLEKDPSQMMRQQTTRLLFETEYKEQIKACMDISWRCTLRKPMDRPTTQHILLTLEETEAKIKSVVGPTPPNAGQLQIAKFGPWGGDGGKTRDIRMTPCHLHSVTISSGTIIDSIGFSFTDHYGQHHTTGPWGGKEGTNKIELGPSEFLTGVSGTSGPFKNLTNVVTSLTFVTNTRSYGPFGKGRGTPFHIQTQNNGRIVGFFGRSGQYLYAIGVYTNQDARVARIGRPLGGDEGVLHGITDLSGQQRSRGGGPSGECGDSDDEPNGDFAKFGPWGGDGGQPQDIGTLPCRLDRIKISSGLIIDSIEFSYAGPDSQYRTAGPWGGHGGDNSSFQLAGSEFLTGVSGSIGTFNGHANVITSLTFVTNARSYGPFGRGRGTSFHIPVQGNGCIVGFFGRSGRYLNAIGVYTAPKPEPKAGGDEAVVARIGPWGGVGNALHDIAERPHRLHRVTIFSGTIVNSLEYLYSDGDGQQHTTGPWGGCGGTGRKIHLAPEEFIVEVTGTFHPCAWDRTIPSVVSSLTLVTSTGKTHGPFGTQLGAAFQVPVQSDSRIVGFFAHGDNYIEAIGAYVKKLTESSNR

SEQ ID NO: 67534 - protein, 227 aa, Zea Mays
MCLGVTAGAYVLTLFATKYRERVLGLMLVSPVCKAPSWSEWLYNKVLLNLLYYYGTRGIVKESLLQRYFSMDVLGNGQDPESEIVQACRSLLDDRQGTNVWRFLQAINRRHDLTESLEKLQCQTLIFVGENSQFHADAVHMTTKLDRRYCALVEVQACGSLVTEEQPHAMVIPMEYFLMGYGLYRPSQQESSPRSTLSPFCISPELLSPESMGVKLKPIKTRISRNV

SEQ ID NO: 67535 - protein, 101 aa, Zea Mays
MKTRSQTSPKPLKTVAMAPRPSSTKRKPRPKPAGKGDPRAPKKPPTAFFYFMEDFRKIYKQEKPSVKSMQEIGKACGEKWNTMTFEFSLNSFHRKRSSIMI

SEQ ID NO: 67536 - protein, 264 aa, Zea Mays
MQTRKKGAAKNAVGYHANPKTSRPSRRATQSTVAEKKVSDLITSSSKKQRPVGVTSKKHSKGGRKLLVSCDTTDAGNDAPQAQHSDGVADDRPNDSIFSPTYHHHKEGGVNNLSKGLEEQTTHVHGSKEASLKSGSNLACNTHDGINDHSGTLKLQSAGQSTLLEVDEYSELGNLSSEVSAIYLAMQQSKLECIDEQSQDSTSTEGYGEAEETEEYDDFDPYSFIKDLPDLSMVVPKFRPVLLPKQTRSCPTMTLVLDLDGMNY

SEQ ID NO: 67537 - protein, 287 aa, Zea Mays
MLEKDRISYFYDGDVGNVYFGPNHPMKPHRLCMTHHLVLSYGLHQKMEIYRPHKAYPIELAQFHSADYVEFLHRITPDSQHLYASELTRYNLGEDCPVFDNLFEFCQIYAGGTLDAARRLNHKICDIAINWAGGLHHAKKCEASGFCYINDLVLGILELLKYHARVLYIDIDVHHGDGVEEAFYFTDRVMTVSFHKYGDLFFPGTGDIKDIGEREGKYYAINIPLKDGIDDTSFTRLFKTIIAKVVETYLPGAIVLQCGADSLARDRLGCFNLSIEGSPVFNRYIHT

SEQ ID NO: 67538 - protein, 361 aa, Zea Mays
MALPPSSSPSSLSAASAQPTPLHLHLPTKAPGRLPLLPFSRAALPPPLRLRIARTSLSPGTPLPRALLPPPSASADAAASDVGGGGAGFGGHDDDGHNHHGGEGGGDDGGHGDDAGHGDDAPGGGDARGEALFVLAQLGRKLDSLPSDLAAAVDSGRIGADIVRRFTELEANGFFRWLLQFQGFRERLLADELFLTKLGIECGIGLVAKTVAEFQKRGDNFFKEIEVVISDVVMAIVADVMLVYLPAPTIGLQPPLARNAGAIANFFYNCPDNTFQIAMAGRSFSLLQRIGAFVRNGIKLLAVGTTASLIGTSVTNAALKAKRAVDKDLEDEVMEIPVVSTSVAYGVYMSISSNLSFILMT

SEQ ID NO: 67539 - protein, 66 aa, Zea Mays
MQGVGKALSISNCQLSIWTVQFIMYSYIYHLKDALLILFLIAFIRSTTYSFMKASPKDVLLIVEYK

SEQ ID NO: 67540 - protein, 1155 aa, Zea Mays
MDSRFRECWFLLLRQFGLQVLAPQSSNINFMEWWHEANEAIQGPFRDGLNSLIVLGAWALWNHRKTHASLMVLLRKLSQFLDPIGGKFLHFRHYSDNSKSPFLYRCRLEGTVSEYEALLLTERQQNEAANAAVAESQARSEALVSKLEDAVKQNDLLHEAAQRFEEATKNLESSLTFEKQRHQANLIELDEAREKIEELQREVGDTDEKSTLLQTSIQSLEERLGEKDALLTTERLESEATKKSLNESEDRNKDLLMKIEVAEKDIAHFQETVQRNEENMAALETSLRSERQQKDAIMKQLAESQGEIGELQRKLEDADARNGLLQDSLQRLEESTADKDSLLATERHENSETKKELAGSQKKIAELLTEVQDTGAYIAELEGSVRRLEGNLTVTEASLLTEKEQNASTLKLLTEAQLRIEELIKKLEGSNRKSDSLLDTITRLEQDVSAKEVLLLTEKQAHEATRKTLTEVQEKSEELLKKIHDNDKHILQLQFTIQRLEETTVANENLLLREREQNDTTTKAHNESQEKYEELLKKFIDVDRKIDLLQGTIERLGENTTAKDSLLLSERHEKAAIKKALTEAEEKNEELLMKVEDANEKIGHLQTKINMLEDNVAAKDVSLEAAIKENDATRKSLTEAQERNGELLKKISDSDYRIHLLQDTVQKLQVDAISRLSSFVMEKQESDIAKRAVTEAHERNEDLLKRNEDLLKRNDDLIKKIEDSSKIVTQLQEALQRLEGKASNLEVENQVLRQHATSTPPSTAKSPASRSKISRIHRSPENGHILNGDIRQTEMKPSTGTSAAITSVVQNDMRTLAYWLSNLSTLTVFLQRSFKTTRTTISTPQRRRFSSERMFGNQTSNAGLAYLSGQSVGSAGLLQVEAKYPALLFKQQLVDLIEKVYGMISDSVKKELNPLLELCIQDPQTSQSSIAKGNLNGMGQQNQLTHWLGIVKILTSYLDVLRENHVPSILVHKLFTQMFSLIDVQLFNRLLLRRECCSFSNGEYIRAGLAELKHWSDNATREFAGSAWEALRHIRQAVDFLVISLKPMRTLREIRTDVCPALSIQQLERIVSMYWDDVNGTNTISAEFTSSLKSAIRDESNMATNFSILLDDDSSIPFSLDDITKTLPVIELADDDFLPFVHENPSFAFLLQRGE

SEQ ID NO: 67541 - protein, 87 aa, Zea Mays
MVRPKSSAPPWRPSSTLIATTTCLPLSQLNQDQPKIIFATLRPPAAQLRVELRREPLQSNYRLEEEGRKQHRHELGTFQIEAGGGSN

SEQ ID NO: 67542 - protein, 210 aa, Zea Mays
MKQTTLSIFTTPLRTYCRRPHLVRFCLPRPRRPHPSHRASSSTSRPSHCRVRPLPHRRNPRGLRPGSRERDPLSSLPQSPLPFMDWDLKTPVSWDLPDLEQAAHLHRTSSSPHHRAPPSPHTSTAPLPQTELKYQEHSKLWHSRQVLFRGIEDNPQVKKIRCISIPRQHGTHQMVTLPEHLPEHEFLMIFNPWDGCIHSQMKIHSYRRRI

SEQ ID NO: 67543 - protein, 410 aa, Zea Mays
MPPYNLNSSLPPAIMSKSHKFAIAFGTAIGCIGLLVLAAGFLFWWRHRRNRQVLFDVDDQHMENVSLGNVKRFQFRELQSATGNFSSKNILGKGGFGYVYRGQFPDGTLVAVKRLKDGNAAGGEAQFQTEVEMISLALHRNLLRLYGFCMTATERLLVYPYMSNGSVASRLKGKPPLDWVTRKRIALGAGRGLLYLHEQCDPKIIHRDVKAANILLDDCCEAIVGDFGLAKLLDHRDSHVTTAVRGTVGHIAPEYLSTGQSSEKTDVFGFGILLLELVTGQTALEFGKTANQKGAMLDWVKKTHQEKKLDVLVDQGLRGGYDKMELEEMVRVALLCTQYLPGHRPKMSEVVRMLEAGEGLAERWEASHSQSQSADSHEFKVPDFTFSRCYSDLTDDSSLLVQAVELSGPR

SEQ ID NO: 67544 - protein, 51 aa, Zea Mays
MPLIKTYNIDSDIYGLKGHSIFKSVCNAEALRRGTFGYLIQTASSEDRFSL

SEQ ID NO: 67545 - protein, 237 aa, Zea Mays
MEHSASRDGSVAWPSPEYISQTLEVIDFLATRYGGHPSLLGIELLNEPSAATVTLDVLVSYYMRGYQIVRNHSSTAYVILCQRIGNADPIELFQAGIGLSNVVVDLHYYNLFNPYFATMNSSQNIDFIYKMRAPQLQDLKGMNGPLVFIGEWVNEWDVQNASQYEYQKFGSAQLDVYANATFGWSYWTLKNDMIHWDFEWNIKNKYLLFSGSSMLKTPSFLLLLALGWGIHLIIMPR

SEQ ID NO: 67546 - protein, 131 aa, Zea Mays
MAASFARGGVAAAAATALVMVAAVLAVSWAGVARADFAQDRAMCADRLMGLATCLTFVQDKATARAPTPDCCAGLKQVVAASKLCMCVLVKDRDEPALGFKINVTRAMDLPSLCSNPATFSDCPSTSRVAS

SEQ ID NO: 67547 - protein, 1060 aa, Zea Mays
MPLPLSSPRDSQVTHAPLHSVHYFHLIATTTSTWNLEERETMACRPPCPCGCFCFYMVFFLGLLLVEAVHGTGRSEVAAAAPTPSLVPAEASVLRRIAARLGVSSWDFTAGAGPCDHGDSGVHCDCSFSNGTVCHVTEIFLKGQNFSGELPPDFADLPYLLQLDLSRSLFHGGVPHQWARMKLQGLSLMANRLSGPFPMVLTKITTLTNLSIEGNEFYGPIPPEIGYLIRMEKLILSTNEFTGPLPAALSLFSNLTDLRISSTNFSGRIPDFWGNLKRLDKLQIEGSFLEGPIPSSLSELKNLSDLRISDLRGSGSSFPDLSGMTYMNKLVLRNCSISGSIPPYIGTWTSLKHLDLSFNKLSGEIPPSFASMGAVDYIYLSGNSLTGNIPGWLLRRNKIADISFNNFTMGSSGPSQCLQGSVNLVESYSAEVNRLNSIHPCLKRNFPCVASNGQYHSSLHINCGDKEATINGTKYEADTTPKGASLLYVSPGLNWAFSSTGNFMDDNINDDNYIATSASKLAVPNSDLYNKARLSPLSLTYYGLCMLSGSYTVNLHFAEIVFTNDSTYYSLGKRRFNVFIQGRMVLEDFDIEQSSGAAAKPVTKTFQTYVTNHTLEIQFYWAGRGTTGIPYRGSYGPLISAISVTPNFQIPLAVDPPKAGSREKRSSRASIALGIGIPIVAIFTALILGIYCIKKQRKSSMHEELRALDLQIGSFTLRQIKAATRNFDAANKIGEGGFGSVYKGLLSDGTIIAVKQLSSRSKQGNREFVNEIGMISALQHPNLVKLYGCCTEGNQLSLVYEYMENNCLARALFVEQYRLRMDWGTRHKICLGIAKGLAYLHEESAIRIVHRDIKASNILLDKDLNAKISDFGLAKLNEDDHTHISTKVAGTIGYMAPEYAMRGYLTDKADVYSFGVVVLEIVSGKSNTNYRPKEDFVYLLDWACVLHERGTLLELVDPDLGSNYSTEEALLMLNVALLCTTAAPTLRPKMSKVVSLLEGSAPLQPLLSDLSLAANSLSSSGVRRNFWQNPGESQSLTAQASCSDTNESSTIDIDGILLVS

SEQ ID NO: 67548 - protein, 531 aa, Zea Mays
MSDFVRSRYDKQEDFQVLLSKKDPGEQPQHKDYLWMAHWTKASSAAEPRNNDSNPLEDTNNGTTTKDSETLPYEFMKSTVAERLMVGVRHGSASMQHVRQFKSSMRGMPRLSNELGPKNSEQVDESFEKSLKNDAMNLRTRQVVSETYSIHKLSELPLDFQNLGSSDDPSPDWSHFPMFEINQKIDSIVNRKRRSPPLDLNVSASHVMALSSQEYMMHSHQTADENMDTCKPAEGFASRVEDHAGFNSDPPGPKLKGQLLDTMSCSCSKDDNNSADCPIDEQHTSHYFANSKHELPSVSNKKKFKFAGNNHNRIVASASHDLKTKRSAVHKQQSAAEAVFCAPVLDSEFQNEPITISNIDKKDGENFHDMYKCLGKAVSCPLLPYEHRHLNTQRTESAENLKVCTLPDHQTANKLTEKSHGELLTYGPKSKEMYTGSCNQRRSYFFEKLTIPSKSQSTYPKNSASSGKSSDFGVCMYGTNIGSQLFRAQNQSSAKTETLHSDTLIGSKSPAGEVYHLYNTVSAKSVFKYCC

SEQ ID NO: 67549 - protein, 201 aa, Zea Mays
MQAQTVVPPDLQCKDKFMVQSVVISDSLSAKDITSQMFAKEGGNVLQEVKLKVAYVMPPEPPSEIAEEHDGLDRVLVPMQRIVDNGKSTSELSSGSVSLRSAEEFGSPVGRIVKSEEFLKAAGPAMETKTYAGPGEQSHQLSAIITKLTEEKNSALEQNRKLQVELELVRCEARKQQSAFSLVLLIAFGLLGIVLGYIVKK

SEQ ID NO: 67550 - protein, 911 aa, Zea Mays
MVQRENGNTLHQEYANSAPYCVPFDFVHKNSRMFYNPFNGNISSQPEPSPPYISGGILADEMGLGKTVELLACIFAHRRPISLDFSVFQNKTEMDQIKRQKVERVECICGAASESSAYTGLWVQCDICDAWQHADCVGYSPKRNILFADTTEDVVSTNKKSTMKSGFRRKKKPRCSIVETEDKYICALCLELIEATQTNILSHATLIVCPAPILAQWHSEITRHTRPGSLKVCIYEGARNLDPSTIQKNDMTEIITADVVLTTYDVLKEDLSHDFDRHDGDRRFLRFQKRYPVIPTVLTRIHWWRLCLDEAQMVESGRTSVTEMALRLNAQHRWCITGTPIQRKLDDLFGLLRFLRTNPFDTYRWWVDIIRDPYERGNKVAMNYAHNFFREIMWRSSKIHVSAELQLPPQEECFSWLIFSSIEEYFYKKQHATCMDHAHQIIRSLRNDTNRRESISDSNALLNVYLSNDDIAKLLVPLLKLRQACCHPQVGSSGLCSLQHNPLSMDEILQVLIGKAKIEGEEELRKIVVALNGLAGLAVIEQRNQEAISLYKEALALAHENINDFRVDPLLNLHINYNLAELLRISSEYLQECPLKNPAFEVAISRKRKEIDTVETNVLSVKRNKICENSVLSLTANGLEISEDKNTIGQTCMTRDVDVENVTGCHSSFECFADDCLRKTCNTITEKYLSTFTSRLVVAQKDFNASFTEVLNITKELQSEYMNWWLYALDCIEENNISADDLIKKIDNSSSKSTTGLGSWGISSRVKSIAGLKYAIQADIDSLQSSRQHLMDRLLEVDKTMANPRDEDIEGQRYCPNCYDGTGSLCIQCELDELFQRYESRLFLVKKSNNGSVIDSVEEAHDLLRRKYELNHFFRNRKSKEGPEPDYDNNNPRSARENIQVCYILPFLHVI

SEQ ID NO: 67551 - protein, 637 aa, Zea Mays
MVRKRLGYSSRGHRIPTMPRVPNSARGKRSTRRKKDENDDMCAMDLLATVAGKLLADQDNSSSVPNTSAAKAKKRKSVKEEHFDEIPPLKNVAMEKDVGSGSVSAFPRQAKNCLAENSSTRNGADTVLESLTVKSNMLAKIPECGSYGIHHAGSSSSAEPEQVHQAEPKVSRRQADGHPVAYGIFNSVDVDGKPPALVSSDSSSCVPLSSHDKEHQTSSLYRGVVQYTADREDDENSSGCTHPSTIESKGCKPQYLGNHRIRKLLASKVRKAARNKICGGIPSKKICGGLSKKGSKLNLCGKKMSTTHQKVQRMIFKKKKLTHRTSFAKEMLTEASGTSFAMEGQNKSCEAENYHVKLRIKSFNIPELFIKVPENATIGSLKRAVMDVVNSIMEGGLRVGVLLQGKDIQDDNKTLCQAGICHDKKLNNIDFTLECEREREPPSGVIIQEQMDFLTTDMVEPLARMKCEEPFPEADVGDDSQQPRAPYRSRSLSDLYSVHCPVQMASQDTTASSQAIVPVSPAPSDVGALAIVPLCKSKGSEVGQRRMRRPFTVGEVEALVGAVEQLGTGRWRAVKTLAFDSIDHRTYVDLKDKWKTLVHTASISPQQRRGQPVPQELLDRVLLAQAYWSQQQQQARL

SEQ ID NO: 67552 - protein, 440 aa, Zea Mays
MDLSRPTSSDLSLGLHSHGHAHAHARRHAVAAPLRLFDDAEEPKPERVGAGEADAERDDEDGGDQHFSLLGHSLCVKRPRRAGNGGGGGETSSCSSTSAALRPAKRQATGEGSGADLETRRAAVRAWGNQSLAEADPDVHSLMEQELDRQVRGIELIASENFVCRAVLDALGSHLTNKYSEGAPGARYYGGNQHIDAIERLCHERALTAFGLDPACWGVNVQPYSCTSANLAVYTGLLQPKDRIMGLEPPSGGHVSHGYYTPSGKKVSGASIFFESMSYKVNPQTGYIDYDKLEERAMDFHPKILICGGSSYPREWDFARMRLIADKCGAVLLCDMAHISGLVAAKECRSPFDYCDVVTSTTHKNLRGPRGGIIFFRKGKNLRKRAGSFSQGDENEYDFEDRINFGVFPSMQGGPHNNHIAGLAITLKQKKMQIGYRWHR

SEQ ID NO: 67553 - protein, 1258 aa, Zea Mays
MKTEQHAHTGGAPVLATNVPNEGLQPRPYPPNFPMPHPQFDSWRAPPGHPPEGMWHRGLVPGGPYRPVGPPGSFPVEPFGYYGQFPPNSEVAARQGPGHGGYQAKNGDVYHPTPPNSYIMNQPVIPVRPVYQGPVPYDGYYGPRAHFNNANVRDPHFVGGPGILNQFPNQNDRFHPGHPQNRPGRHETVPREQLEYDKIHVFHRGNPGSLHDNSDRLGGSREFERNAQPASPLLPHPDGNRTDVNMRTDTRDTFSESERTRVLTKSVPNQRGSVGTEHLSVYDNAHSHHRETGDGTLRKKFKEDGSAALHPVIKKNAALIEKIESLNNKARNVDARNLPESASSKEFNKHKKSTDVSSNDVMGMACKSDPAVSVSCVSPAVQRLPNVPIKGTILGPAHPQLTEFSKAEKLGDSISDHVHRKSDSSRNSYHGPSKDRPANKFGSHGRGESSTTDLRNNIDHGQQPEIASQLQPAIVPDDMPASLDYESQRAKMKELAAERAKKLKAEEEERIKNQKAKALAKLEELNRRSSVLQKKSNDIKVETYDAHDKQHAGLDVTAKLDTSTEPHDVIAPDRLTDLLPPNDPNHTMVHIQAQSTAQSHALDGGKDPDAHATSSLVKNTHSNMEPVVQKSISQLHDITVVKAKQGYRKRHVSEEKISDEKASASITTRNITKNVDVLIDTVTAVVAPHDDPPTQNKKGTRHLRSKKKLDDAPVTSKHPPVVLNEPNTVKVSTEPKTHTGGVIISSSIVPTEGTIVTVGSITVGGISLKPMNQERVKSPDGTNNTESSQPRPQQTRKSGKHQHVLRPVEKPHGNDGILCAPVKPPVPNEHSDGAMPTAAVADLTKPVGKAINDGENVTRTKRAEMERYVPKPMSKELQQQNPSDDKEAVDKPSGAKSHPAAEPKKTSKAHGGKSNPSWRKRNPDESALVAPNSVEQADVSYESKEVQNFTYQKQPVELGKQDTQLKFSVDAAAENSSAPVQTVPLSVGGAKQHSAANRQRRQHVKAQRNEASGYSNESKGSEGKNDVVYQSATPVMDSNSSNHRNVPRSDVKNSGVVSHSRAWKPKTNSHPQDSSDGKIAVDGQVDSHGGRLEMNTSKGSDTITHLVTSSEPTKRSDGKEVSHSKHENLAREDGNQKGETEQEQANPTLRRQGQPNARYHRGGGSHRGRGGYDTGRPNHVTNVERRKGGSHLEYQPVGPQNKAADFQQSLGMEERTEGPPASGQAFRQRGHNRGLRPAGRFVQRNPASTPTTNSHQNE

SEQ ID NO: 67554 - protein, 71 aa, Zea Mays
MSGCVSTKIQNSLDQKLQLPIVVKGLVLRTLDKVSCCYKVLCIPGECLINLGADLLVFFKRYIWLDLCFLC

SEQ ID NO: 67555 - protein, 290 aa, Zea Mays
MVNQYVHLGKIGSGSYGKVVLYRNIKDGKLYAVKVLNKPYMMKVHVVHTKTAMTDVLREVSIMKMLNHPNIVNLVEVIDDPNMDKFYMVLEYVEGKMVCDNGLEEATARFFLRDIISGLLYLHSHNVIHGDIKPDNLLVTSTGNVKIGDFSVSQVFEDDDDMLWRSPGTPVFTAPECCQGSAYHGRASDTWAVGVTLYCMVSGHYPFLGDTLQETYDKIANDPVELPGDVNPQLADLLLRLLCKDPGDRITLRAAAEHPWVAGDEGPVPEFICRCGFGRRKRNDVREEVQ

SEQ ID NO: 67556 - protein, 73 aa, Zea Mays
MPDALRLPEEDRPRSARAAAGVRRAVRAVRLRLHLLRLQPTGGAAGGDEARLPSHRCRPSLSGTVSTLPEIAY

SEQ ID NO: 67557 - protein, 597 aa, Zea Mays
MEDAVSGLRSSNSATSFVAAPVYDDDVFSSSATSQHNASILGRRQHLSRSARLQRRPLQHLTVDPVSAVHGSDDSELSHSEVDRVLATVVLSNPREKVHDGLVGVTEFAHRPLAVYDSYVEHDLYSFIPLLFYTEQAKEEQVPVDTPTRCSMRVLNCRTFPRQGLQGHPSSLVCPLVRRHDGRFHLWFEPSVLVAPHTRGRAEQMTLSYDADAEADDYYNAPDVEIMVSNFGSTSTLSYLEPDLMLPTRYRNILAGMLEKAVYEEGHDLFGVLYESRSLVGTIGSIDFSFEENDELVDRKETVVTSQLQEEMGSKEHTTGQFQTLDKPIADNSSAAVEFSNRNCWVSLIQGSSVYTPYPSNRVEQGLVATLQSDEDGCDQQRDGESLPGSDNLFARAAIVFSHWWSSAAADDFRGQQLSRLVNLAPRVQQSPGCLRCLVLGLMEEPRRPRFFKVLVVDFARRIEIPQGFLCHFPEGRDRKPGTTAVASAKVVLTNAEGSSIWPVALESTDGRVFLTTGWPKFVEDNRLGKGEILIFKYHGRMRFVVSIFGVDAVEKAGRWSARSGAQAAEKVPCNETLKGMNTFHPRAQLVSLTHMK

SEQ ID NO: 67558 - protein, 811 aa, Zea Mays
MASSPQPPPPFAAQNPTAQGSGQGPPGSGVGALPGAFANLQISRGAAPPPGAPRGLTPQQAPPTLAARPGPPPSAARPAFPGSPPAPPFVRAPTPSTSASPPFGGQPGVMSQPPPPFGGPPGASSQPPPPFGVPPGVVSQAPSLFGGPPATASQASSPFVGHSVAASQAAPFGAPPVAGSHPPPFGGPPGAGPQPAPPLRQTFAGQPGPMAAAAAWTQPPPPSFGAPQQPPPPFGSRPAGQPLFATQSAPAAQQLPFMGPPRVNAPAFGPPSWQTQGAGSGAMQPPLRMPGIPGSMQPNTLGPPGTPTIPYSPHAGTQVSTPSKIDPNQIPRPMRESSVIIYETRQGGQATIPPAASSEFIVKDTGNCSPRLMRCTVNQIPCTGDLLTTSGMPLALMVQPFSLPHPSEEHIQLVDFGEMGPIRCSRCKAYINPFMKFVDQGRHFICNLCGFRNDTPRDYMCNLGPDGRRRDADDRPELSRGTVEFVATKEFLVRDPMPAVYFFLIDVSMNAIQTGATAAACSAISQAISDLPEGPRTMVGIATFDSAIHFYSLKRAQQQPLMLIVPDVQDVYTPLQTDLILPVSECRDNLEQLLESIPSMFENNRVADSAFGAAMKAGFLAMKSTGGKLLVFQSVLPSLGIGSLSAREAEGRANITTGDKEAHKLLQPVDNTLKTMALEFAEYQVCVDVFLTTQSYVDIASISVVPQTTGGRVYYYYPFSALSDPAKLFNDLRWNISRPQGFEAVMRVRCSQGLQVQDYYGNFCKRVPTDIDLPAIDSDKTVMVTFKHDDKLPENVECGFQVYLGLCCVPW

SEQ ID NO: 67559 - protein, 652 aa, Zea Mays
MQRQGRHLERSNSKRALDHGGGGDDDDRPSKRPRVPALASVIVEALKVDCLQKLCSSLEPILRRIVSEEVERALAKLGPAGPARIQGRGSPKRIEGPDGRSLQLQFRTRLSLPLFTGGKVEGEQGAAIHVVLLDANTGHVVTSGPESSVKLDILVLEGDFNKEEDEGWTEEDFESHIVKEREGKRPILTGDLQVTLKEGVGTIGELIFTDNSSWIRSRKFRLGLRVSSGFCQGIRVMEAKTEAFTVKDHRGELYKKHYPPALKDEVWRLEKIGKDGSFHKRLNSSGIYTVEHFLQFLVRDQQKLRSILGSNMSNRMWESLIEHAKTCVLSGNHYIYYSSDARNVGAIFNNIYEFTGLIADDQFISAENLTENQRVFADTLVKQAYADWINVLEYDGKALLKFNQKKKYVTTRSETAKASASYPASNGLVNSQKELPGGPVNAEQSSLNNASQDRTRIPSMSMGNQVAREYAGNPQHMTPSITMQCDTRSLIPGGQFSGGSSVQTQTSRSSNMLALRPTQQPQNLDFSGLGQSTQPSGTNPFADWSRLQESSVDEYLMDEIRARSHELLENDEMQHMLRFLSVGGAPTGLNNVDGFLSYPSPAPAFGFDEDDRARSSGKAVVGWLKIKAAMRWGIFVRRKAAERRAQLVELED

SEQ ID NO: 67560 - protein, 690 aa, Zea Mays
MTSTEIQAFFRGRSWLFRCKIPTTAVSSALFKPCNSWRKTRSRSSGHSLQSLRTDQFQMASVAAIVDYYGWKMVTAVYIDDDYGRNGVSSLDDELAKRRLKILYKAAIRPGARKSEMAAVLVKAAMMESRVFVLHARDDSGIDVFSLAYNLSMTSGGYVWIATDWLTACLDSAPRLGTGLLNTMQGVLTLRQHTENTSRKKALVSRWSEVAKEEEEEDGGSLPNTYGLYAYDTVWMLAHGLDAFFNSGGNISFSPDPRLRAVVGGALNLDALSVFDEGTLLLERIRNVSFMGATGPVKLDSDGNLIQPAYDIVNVVGSGLRTIGYWSNYSGLSVVSPETLYKKPFNVSANQELHAAIWPGETVTRPRGWVFPNNGNELRIGVPDRVSYRQFISVDNQTGTVGGFCIDVFAAAINLLQYPVTYRFVPFGNGRENPSYTELIGRILTNEFDAVVGDVAIVTNRTKVVDFTQPYVASGLVILTAVKTQSSDAWAFLQPFTIRMWSVTGVFFLVVGAVIWLLEHRINDDFRGPPAKQVITVFWFSFSTLFFAHREDTRSTLGRVVVIIWLFVVLIIQSSYTASLTSILTVQQLTSPIKGIDSLIASDEPIGFQVGSFAESYLVHELGVSPSRLKALGTPDEYKNALELGPRKGGVVAIVDERPYVEVFLVQHDKFAIVGAEFTKSGWGFVSVPA

SEQ ID NO: 67561 - protein, 415 aa, Zea Mays
MATSFDRWEKDPFFLAAEEVQESADRMESVYRVWVQERSGGDSEAASVTGGPTAAQLRRELHTALGTAKWQLDELARAVRSNDLVMSAGKDTRARHDDFVTAIGYRILEVENYLKESNLADGRGPLSWVHLDEDERDDLAAFLSASPFQQKDKVVTIPSAGDIEVGSNAARMKNDISTDSSKDSAGSTDLISGTAKQDLHRGHRRAASASADIGSWSMSIPNECEGTTEQLSDGSDKLPLHKIVKTCALTSTLQSKTRTKWKNGAVRWAGSNQQDVEEAIPLNTSQLSQGLEECFERNKSCLSTCDEHTYNKKLHGWLGALRRQLQSLTRSAACMVNSLAVKLLLVNLILKHAYEATMVDHFGSQGSKSRIMIWLGPLILPHVQGRLPRPWKNIYRTILAARLLRHTWICSRMVP

SEQ ID NO: 67562 - protein, 244 aa, Zea Mays
MSSSRFDELPDEFDPTGRFPGSFDDGDPQTTNLYVGNLSPKVDENFLLRTFGRFGPIASVKIMWPRTEEERRRQRNCGFVAFMNRTDGQAAKDEMQGVIVYDYELKIGWGKSVALPSQALPAPPPGHMAIRNKEGGTATVILSGPGGPAVASIKPQTSELVLTPNVPDIVVAPPDDGHLRHVIDTMALHVLDGGCAFEQAVMERGRGNPLFDFLFNLKSKEHTYYVWRLYSFAQVLVAVYSTKF

SEQ ID NO: 67563 - protein, 108 aa, Zea Mays
MYTMTWMCSFVPRPRETNIWAVSITKETASLLLHAAISYSLADSVTIKLVTIQWTSNSRGPLIDSYDHVIGVNTTTLTCKDLEGLDGLIPIYEYGRKGGRSRSLQHRA

SEQ ID NO: 67564 - protein, 62 aa, Zea Mays
MCLGFLFSFLKRKISSWSCKHCTIFILSCIDSYLISVCLVLCVGSHVLNKTFILLYCSPNSL

SEQ ID NO: 67565 - protein, 276 aa, Zea Mays
MVLAQLGGSISRALAQMSNATVIDEKVLNDCLNEISRALLQADVQFKMVRDMQANIKRIVNLEALAAGTNKRRIMQQAVFTELCNMLDPGKPSFTPKKGKPSVVMFVGLQGSGKTTTCSKYAYYHQKKGFKPALVCADTFRAGAFDQLKQNATKAKIPFYGSYMESDPVKIAVEGVERFKKENCDLIIVDTSGRHKQEAALFEEMRQVSEATKPDLVIFVMDSSIGQAAFDQAQAFKQSVSVGAVIITKMDGHAKGGGALSANKKSCYIHWNWRAH

SEQ ID NO: 67566 - protein, 60 aa, Zea Mays
MFSSSLRPRRRVVGAVRARGSRIILWGARGSSVGSEFVAGLRQTPRIRRAAWVGASASPY

SEQ ID NO: 67567 - protein, 94 aa, Zea Mays
MDERSFRRCSSCRAALFLVVRHCVLQWMFVESPASRPVLCARKLSVGRARSYLFVVITSSTPSVSVVASRVQLYIRHPLCRRRSTCQQEISSVG

SEQ ID NO: 67568 - protein, 79 aa, Zea Mays
MEAAKPGFKEVEKWSENALWSVSELHVGDEKQTGSNKSDMERVLKGFGACDAFVASRLNAPNGQVGGITFKSSDIALLI

SEQ ID NO: 67569 - protein, 56 aa, Zea Mays
MACTMLQEEELESAISLCCALEVLNVHSCPKINALDFGRLRLVYPSLKRIQSSLIS

SEQ ID NO: 67570 - protein, 266 aa, Zea Mays
MIRYKGLTHFDVDNFVEEVLVKDIDWLPRSPEPMSGSYIFVCSHGSRDKRCGVCGPALIKRFKEEINELGLDDQVAVSACSHVGGHKYAGNVIIFSSDAKGEVTGHWYGYVVPDDVPVLLHKHIGQGEVVDHLWRGQMGLSVEQQKRALELRNMVNGGEESLEETRTDGASFNPAAAGGCCQGNGGFTCCQTDLPKEKQDKSIIAEQNPKSSDKEGGAGSKKGDTKTCPVPIWFETWERADTYAALAVVAAAAAVLVSFRIYKNLN

SEQ ID NO: 67571 - protein, 176 aa, Zea Mays
MTGQKMKILRNSFEDKSKDIIEMETEEAYEMVLNAVLKWVESNMNPRTSRTFFVTMSPTHTRSRDWGDDTDGNCYNQTAPIEDLSYWGPDTSKGLMRVIGEVFSASKSRIPVGVVNITQLSEYRKDAHTQIYKKQWNPLTPEQVADPKSYADCTHWCLPGLQDTWNELLYSKLFFP

SEQ ID NO: 67572 - protein, 351 aa, Zea Mays
MEPPPLSSLQEEGEEGPTVEDSSVFSAAVVPPRPATHHSLHKYAPLDWSAYFDEERRVAIPDTDNVFNAYTTGSEGPVVFCLHGGGYSGLSFALAASQMKDKARVVAMDLRGHGKSTTNDDLDLSIETLTNDVIAVIRTMYGDLPPAIILVGHSMGGSVAIHVAARKEIRNLHGLVVVDVVEGTAMASLVHMQKILANRAQHFPSIEKAIEWSVKGGPLRNIESARVSIPSTLKYDESRECYTYRTPLEQTEKYWKGWYEGLSDKFLSCPVQKILLLAGTDRLDSWFTICRALTIGQMQGKFQMVVIRHTGHAIQEDVPEEFASHILKFISRNKIGPNGVEIPGLIKKWQQ

SEQ ID NO: 67573 - protein, 226 aa, Zea Mays
MQPSGREMQGGGGGGGQDDFLDQMLSTLPPAWPDLGYGKSSPWELPAGPDAAAAAAAAFDETALLASRLRHHQIGGVDEKPLMLHLSDLHGVAAGGGDDAGFMPLPLFTDRAAFKSPNAAGADQALYNGFGAAGMHAAAVHQPPFGQSGGSMPAAQSFGGGADAGGGAPAPAAGAASGGGGAAPPRQQRPRAKRGQATDPHSIAERFHMPCRSRWPRVRCSSGGRG

SEQ ID NO: 67574 - protein, 1255 aa, Zea Mays
MIYFHNNRCTLIYWEHLGRFLHSQGIVYCDLKPSNILLDEFGCMKLCDFGLARRLKDIEKTNPGDVPQPMRGTPCYMAPELFRDGGVHSYASDFWALGCVLYECYTGRPPFVGREFTQLVKSVISDPTPPLPDNPSRSLQNLIDCLLMKDPAERLQWSELCEHNFWRTSILMIPLPPQPAFDNMIELSATPYLAERNGDKPSRQLTPPKHRENIGLRKKDENSTKPSMTPVKNVQSGKKNSAKPKAVGFKGVNILRMSRIAKLNLQRERDKENYRRPPTETTENETEVNIENNDMELDFGENPEGDAPDDTDGSDNPGSAGNENPQSTDANEENYMENQVDMLTDEGSVKPDIMVETEQNSCSDNLDVAASPPSSMRKAHRAKVTPCPATGSEPSNIFEAFWHPTDLAVKPVMPIRKADKAVDMIPTLPFEALTAGDYTKLPKEQMNAFNSQILQSLSGTYQVSQKQNTIRYLEMLSMNSDAANKITNGPIMLLLIKMLRLSKTSVLRVQIASLMGLLIRYSTALDVELASSGIFNALSDGLRDKHDKLRRFCMATLGELLFYISTQSDQDNKEINTQESPLKGNRPATSWQVPSAVIALVSSILRKGEDDLDQLYALRTIDNICSQGTEWTSRFASQDVIGHLCYIYKATGKQESTRLIAGSCLARLSRFSPSCIHLILEKISFRDIASTLIKGNGREQQINLNILNSALVNSHTVTSMNRYILSLSDDKQLVPGLISLIEQGTDVLRGKAFLFVALLCKNSRRWLPHFFCNAKLISAVDRFGKEKEGFIHQCTEAFVQLVASLVPGILETVSSDIQQIMCGKRHGPVTALAGRAHPKSTIHLFPVILRLLGSASFKHRVVTGHVLLQLANLIKILEAPFQARDDFQMTLLRVLEAATEEPSVILDEHTIFTSRIIPSLSVLYNGNKDGDARFLCLKILSDVMIVIFSDSSLTSDEQILTDLKSISQRHFLPLYPSFAEDEDPIPIFAQKLLVMLMEHGYIKVSDILHKATVSQCFDFLLGDLSNANVSNVKLCFALASAPEMNTHILSQLQVVRRIGNLLEFVAAKDMDDFLEPTLEFCRAFIIRGTGSNRSGVALSENPALLVDSAFSMSIAVDQQTCVTDICDFGGNMGTFLELVGNSDPQISNLASDCVVLLSKAAPREATVGLLTNLPKLSTAMDLLKHESSLRLIRLLYGLAFSCRQYLAQGMILSISVSALMRVEALVSVFKGSNDSLLADAASYLSAELQRLPRCG

SEQ ID NO: 67575 - protein, 307 aa, Zea Mays
MALRLHDVALCLSPPLAARRRSGGSFVAVASMTSAAVSTRVENKKPFAPPREVHVQVTHSMPSHKIEIFKSLDDWARDNILTHLKPVEKCWQPQDFLPDPASEGFHDEVKELRERAKEIPDDYFVCLVGDMITEEALPTYQTMLNTLDGVRDETGASPTAWAVWTRAWTAEENRHGDLLNKYMYLTGRVDMRQIEKTIQYLIGSGMDPRTENNPYLGFIYTSFQERATFISHGNTARHAKDFGDLKLAQICGIIASDEKRHETAYTKIVEKLFEIDPDGTVVALADMMKKKISMPAHLMFDGGRWRT

SEQ ID NO: 67576 - protein, 379 aa, Zea Mays
MEPMRREPQTSMAGGTRSRCPVLLLLLLGVTARLASGVVSDGLLPNGNFELGPAKSDLNGTRVMNQNSVPNWEILGFVEYIGSGQKQDDMILPVPEGACAVRLGNDATIRQNLNLIRETTYSITFCAARTCAQAERLKVSVAAESGVLPIQTVYTSNGWDSYSYAFRARHSTAWFSIHNPGHEDDPACGPLIDSVAIKALNPPHLTKDNMLRNGDFEEGPVIFPDTAWGVLVPPMSEDDVSPLPGWMVMSDTKVVKYVDAAHHAVPRGARAVELVAGREAALVQEVRTVPGRHYRLSLAVGDAANGCEGPMAVEAYAARATLRTTYESRGNGGSKRAVVDFTAIANLTRVVLQSYNHHMKPDGTLCGPVVDDVSLVGLR

SEQ ID NO: 67577 - protein, 73 aa, Zea Mays
MLGTKWPARMESWNIDRRGEAAATDVSLGQSGFDMMQINLLYTVFRTCIDCLVNYKIISVFWFGFRVHLCMKY

SEQ ID NO: 67578 - protein, 503 aa, Zea Mays
MEHDAYSMFENLMNGAQGVVAITDFYSLSSAPESSMGLTPVREASSAIYHLLASVDSSLHSHLVELGVEPQYFALRWLRVLFGREFSLDSLLFIWDEIFSSPNHSYCTDIRSRADYQFKVLCSPRGALILSMAVSMMLHLRSSLLGSEHATSCLVRLLNFPEDIDLKSLIEKAKLLQSFALEANLPSSSSRGNSLLSTPNYWEETWKILQPSMDQKGGGVLKMKGRGFLRRSLSSTESNVSRSKAANFENNDMTSTRQSTTDEFHNADVVPAELITSVPHMLIEKQKHHVGKGTAETIGSNSKNGCETGQHDGYCSTSGEIRDPLGAASGYLSRSSSITLSCGTEYDHDTHHLEEPCDPCDDRVVNEPDPLSVHNTGTDEAATTDRTSGIVDTYPVRQRRLCSVDGKLKIKTRNATSAKGDEKETLAICSISNVADKELSRTLRSLGESMVENIQDIELLLKPNSLSTSVEKLEEAIPGSTEQAKAVAALKELRKISDLLRQI

SEQ ID NO: 67579 - protein, 195 aa, Zea Mays
MVVVNYDFPTGVEDYVHRIGRTGRAGATGSAYTFFGDQDSKYASDLVKILEGANQSVPPQLKEMALRGGYGGRSRRWASSDDSYGGQGYGAKRSTDSFNNNNFGNQAGGGSSFHSSSSGGQFGDTTSFHGSVRNNQTGDNASFPPSSSNNQAGDGLSFHERFYGSRGRDQSRTSNDGFRARSRSPPGKPVEVSNW

SEQ ID NO: 67580 - protein, 369 aa, Zea Mays
MLMEIVSAFGPLAAYRFLFNNELGGPCAFLEACAGLNGMMLGGRVLTAVHVFPNPHVEAANEASPFYGIPDNAKLLLKEPTKVLQLKNVFEREEYMLLSKSELEETLEDVRVECTRFGAVKSVNVVEYPAAGVSAAEENIVELKIECTEFSDTENIAKAVSEYSVPIIPSIDVLNHSVASDTKDVDLIPESQDQKDKHLPSNAALCESEAPVADEDAELDETQSRAALPTPQHAEADHTEAAVDENKHTGAGKVTATATDDDAVEKSHGDPRTSETCNPAGPTDKAEKPGRYSEQGAGDVTEDRPEKEAQAVGTSDTGFVFEPGSVLVEFLREEAACMAAHSLHGRRFGNRTVHAGYAPYDLYLQKYPR

SEQ ID NO: 67581 - protein, 75 aa, Zea Mays
MSVTFGNRHLHYLSTCIQIQMDACMVPHSILNDRFPPHDAVDKWEKVNVHPTFYYTPISKHNKDYICTSSSGLYY

SEQ ID NO: 67582 - protein, 319 aa, Zea Mays
MPSLPLTPVVVAVAAAGQQPQATASSSCRCRRRRGPRGIDHHHHGEDSVLRQQGHQEGAMGAGGGQAARRLRPGQRTRQLAHSPQARGAEPVRQELPAAVDQLPAPGHQARALHPRGAQFHPSAPRRSRQQVVHDRGTDAGPDGQRDQELLEHAHEEASCPAARHTAQWETARLEAEARLSLLSSSAATTVTSATASSSSSTVAAEHAAPPDIFLRLWNSEVGDSFRGAAAQQGHGPEASAAGAGVPALLPELGGGGDDSSAASTYEAEAAADDGYQAFLDLAMEEFALLHGRLGAFSAFPQADVFAEAHCCLFAPFEE

SEQ ID NO: 67583 - protein, 234 aa, Zea Mays
MTCFAKKQHIAAVPLCTLEAKRYEPIVKMCGITSAFDAEMALKAGAKLIGMILWPKSKRSIPLSEAKEISRVAKSYGAESVGVFVDDDSSTILTASDSCNLDLIQLHGDSSRELLPLLWKNNRIIYVLNADEDGKLINAPPSEEYVLDWFLVDSAKGGSGKGFNWEKFQMPTVKSKNGWLLAGGLHADNVHEAASALKPNGLDVSSGICFPDGLRKDPKRMCSFMSSVKTLNLL

SEQ ID NO: 67584 - protein, 624 aa, Zea Mays
MMCYLADAEPFVFVTKPLLHINGMQIFSCGSVLHEVHKCKEYFEDVDRTWETFEKTLWSHISNFFKLSKESPQTLVRALRVVEMQEILDQQVAEEAAEAEGAGAMATITNQRRTAKKGAGATVTPRKGTQEKSKVQGKGYKDKCYESIRMAVEARFNKLLTELVFVEDLMEALEEAKAIGDELGDIYDYVAPCFPPRYEIFQLMVNLYTERFIQMLRLLSDRANDIQNINILKVTGWVVQYQENLIGLGVDESLAQVCSESGALDPLMNMYVERMQATTKKWYSNILEADKTQPPKSTEDGKLYTPAAVDLFRILTEQVQIVRDNSTDVMLYRIALAVIQVMLDFQAAERQRLEEPASDVGLESLCALINNNLRCYELSSELSSSTLEALPQNYAEQVNFEDTCKGFLEVAKEAVLQTVSVIFEDPGVQDLLVKLYQKDWLEGMVTEYLVATFADYFGDVKMYIEERSFRRFVEACIEETIVVYVDHLLSQKNYIKEETIERMRLDEEVLMDFFREHINVTKVESRVRILADMRELASAESLDSFTLIYTNILEHQPDCPPEVVEKLVAMREGIPKKEAKEVVQECKEIYENSLVDGNPQKSGFVFGKLKCLTAKKGIWRKLGQ

SEQ ID NO: 67585 - protein, 416 aa, Zea Mays
MPKHDHDEWQKGFGYNSPCFPEEEYKWDIDEENLEMTMWDVLSEMVVAGKDKILSIASFDLGMYGTSMISDFCLEETLKDKAQTLKDVSAGSEHALLETELTKWLPDSASTSCMLCGARFHPIICARHHCRFCGGIFCGGCSKGRSLMPPKFMNSDPQRVCDVCGVRLECIQPYLMNRFSRACQLPTQDLTDLSTLRSWINTPWAVRMEYEIYKAANSIHGYCKVGELKPEKSIPDSILRQAKGLAIITEVKVGVMLTYKIGTGLVVARRGDGSWSPPSAISTCGLGYGVQAGGELADYIIVLRNKDAIKTFSGNAHMSIGAGVSASAGHFGRVAEADFRAGDGGYAACYTYSCSKGAFVGCALNGSVVSTRDSVNARFYGGPIKASEILLGSLPKPPAAATLYKALSVLFDKIEK

SEQ ID NO: 67586 - protein, 645 aa, Zea Mays
MGLSTSAEGQVPGLSTENQENVIVGFIDTGIWPESPSFSDHGMPPVPKRWRGQCQGGDANSPSNFTCNRKVIGGRYYLSGYQTEEGGAIKFVSPRDSSGHGSHTASIAAGRFVRDMSYGGGLGTGGGRGGAPMARIAAYKACWETGCYDVDILAAFDDAIRDGVDIISVSLGPDYPQGDYLSDAISIGSFHATSNGILVVSSAGNAGRQGSATNLAPWMLTVAAGTTDRSFSSYVSLANGTSVMGESLSTYRMETPVRTIAASEVNAGYFTPYQSSLCLDSSLNRTKAKGKILICRRNQGSSESRLSTSMVVKEAGAAGMILIDEMEDHVANRFAVPGVTVGKAMGDKIVSYVKSTRRACTLILPAKTVLGLRDAPRVAAFSSRGPSSLTPEILKPDVAAPGLNILAAWSPAKNGMRFNVLSGTSMACPHVTGIAALVKSVYPSWSPSGIKSAIMTTATVLDTKRKTIARDPNGGAATPFDFGSGFMDPVKALSPGIIFDTHPEDYKSFLCAIISRDDHSVHLITGDNSSCTHRASSSATALNYPSITVPYLKQSYSVTRTMTNVGNPRSTYHAVVSAPPGTSVRVTPEVINFKSYGEKRMFAVSLHVDVPPRGYVFGSLSWHGNGSDARVTMPLVVKLQTSGKA

SEQ ID NO: 67587 - protein, 554 aa, Zea Mays
MLVNLSSISFSDIESHTATPQRAADSGPRTRNQAWGPPLGSQLSVSPSRRRRRRRSGSPSRSTPCSSGLAHPAPTRASGTPGRATPTEASWRRSTRCSSWRRRTLSRSRRPPPRAAAWTAPSAPPRRAWWRSSCASGARERNSSAGTGGVVDASDGSRSRASSSVPHEVAALLDTEVWDDLDLICPAGVSVLHEIALRVVRAGCTEVLFRAFANAPCDVLDSFLSILRVECSQQTTEAVIKRWTTVTEIIGKAMVAMRRQLYAQNPGAFDGFRDEYLLAIAENRILILLDFANGFTSITSHEKLVYMLGMYEALTDAAPSLLLLLSGARKEAISERTQGGVHPLTRDAMTCVELLARHRTTLDLILAGADERGSLAGVVSDLIAGLERNLQRRFAVACADAGGSRHLFLANNISFVLSRVADNDGVASLLGDAWAARRRSRVEQHVASYAASSWGPVVALLDTTACGRGKSAKVLAEFNAAFNRSRDSEMCREVPDPVLRAVLRNAVSEMVVPAYCAFLQKQPKLGKSARYTADDLVELLSELFEGESTDGIKI

SEQ ID NO: 67588 - protein, 317 aa, Zea Mays
MGGVGAGSLALLRLLLLLLLRAEASALHATILPSPAPSPSKAPEARSFGPRISPSHPPSALPPGSPGVDARHHSHKHPHHRESNQGPSPSSAPTPEAGCSSYICTEPLTATPIGSPCGCVEPISVIVDLDLAPYLLFMSIAELEVEVAAGTFLKQSQVKIMAAVASIQDDQKTRVTIYLVPLREQFDTYTASLISDRFMEKKVQINSSIFGDYKVINISYHGLQSPPSSLPGGSDPSGTEEYPITAEVPDQKKKHNKSDILVIVVVLGSSLGLLMTCAVLLILLVRWKKLGRLHEAMTPATIPAVNRRYGTRPTLST

SEQ ID NO: 67589 - protein, 151 aa, Zea Mays
MQEAKHLTTSKLPPQSQSSSPSPSAPAANPPPYHHDYGTFHRPFQPTLPVVGPAYHDYHASPIGFGSQGFVASPGAVQQQVFVEGIPVREPPLPFCGVGVGWFLFLLGFFLAAIPWYAGAFLLFFVALDHREKPGLIACTVAVCLGRELAV

SEQ ID NO: 67590 - protein, 72 aa, Zea Mays
MRSGRGFHRQWASATEIRSRGWRGAQPAVRRGRLWGEATAATAPNTTLDERRREDSGVFLSFRYLLGTCVSS

SEQ ID NO: 67591 - protein, 489 aa, Zea Mays
MPGLAASASAAPAPFSLATSRLTPVARPAPSFRTQACGLRCWIAAKLKLRKALKRHHGWQLQRNLDARGNDNVPDCLEAASLTEKRSHWNMHLAYDSGGEMANTSSDTLDSSTVQEKPVVPGHIISEISSHVQKEESAVSKRRSNNEPSLCIAVIGATGELARTKVFPALFALYYSGFLPRNVGIFGYSRKKLTDEGLRSIIEANLTCRVDHHENCDDKLIEFLKKTYYVDAGHDNQEGMVRLNSRMSQIEGIGAANRIFYLAVPQEALLDVALPLADGAQTKQGWNRIIIEKPFGFTGLSSLRVTQSMLSRFEEKQIYRIDHLLGKDLIENLTVLRFSNLVFEPLWSRTYIRNVQVIFSEETSNEIQGRYFGNYGIIRDIVHSHILQTIALFAMEPPVSLDGEDIRDEKVKVLRSIRKVNLDDVVLGQLKDMSGKVDRYTKSMIPTYFAAAMYIDNARWDGVPFFIRTGMGLMTNRSRHKRAGSTRST

SEQ ID NO: 67592 - protein, 178 aa, Zea Mays
MLPRRQSIFHLGEEGGAAAVHHRVSVVGAASSSMAMGGGGGRRARERERLVVGLQILVHHHGRHGHGHAHAANVVLKQMVRPRAAAGSRHGHGSHAFSCSFLKACYLCKRELSPDKDVYMYRGDQGFCSEECRWQQILVDEAREREAAAVMSNKELQRRAQAAEEDTCRSLASRSSVC

SEQ ID NO: 67593 - protein, 636 aa, Zea Mays
MAAAAPAAGKGKRKRHLSEDDVCLLQRYNPGTILTALQEVAQHAEGRIIDWRAVVAKSATGITSAREYQMLWRYLAYHHDLNESIEAGDLPLGDDSDLELELEPNPSETKEALSEASALAKRWALKRPGGSTKPASTKHASVGSEERSATIKALHLAVGPMPVSSALRSGREQSIQHKSTAFAPKMPQVRSAVTPSLAPALALPVQPLRVAAEVQSPLRHGQQAPGQGAPPKLSNASNNTRKKQAALPNSTFSPSSIQAAAIAAGGRLATASTAANLLKAAQSKNAVHIRSLGATSLKSSASFDHGTQSGGSQHLESLNASAVNGVSGVSAVNQSGPPAGAETKKALGTTLAPVPCDSEENEDGSEFCAITLDDLFPEDAKQPETVDTKAKQPETTGPKAKQPENADPKAMHQETMDPKSKQPDTLKVGILDPKDKDMLEFDQYVASQGAHLNTDDLNKSKCTNSASQAQGLVGSQKNPLKLTPVDGKANPVTAAGRGKPVAAGVASTGKKATIPISHLAAGTPRGIVDTVNANAPIRRTLTRRAAALVPAGCQAPPPKHAIDAKGCQMTNSIATFVSSGVPASSQASTPAKDANKASPPSSSCQPKPDSVAVNGAIRAVKSVAKKGNLPAAAARQ

SEQ ID NO: 67594 - protein, 360 aa, Zea Mays
MPNKPLSALTLQDRDIEIQIEVHRKWEFRGAIDNGPILHIDMILTDCIGNAIHCQIPSFPAAKRGDEFQVGKIYKMSRFPVARAKSSYKPVDGDLMFLTSYDKIDPNEPNARNFHDVISIITEISAIKPVGNARIPSSYNRHVLIKNLSDSILKITLWGKRAQEFYLTNTYDPQKQTLVIVLFVGCLPKEFQGEVLLSGGAAYHWYFNPSIEEATAFYNKIESEKINIELPSLDGQEITPPQLPQREHHDLKYILPLNPHDVPDEGYECTVTITSIPEGKTWYYIACNTCPNKPSIDPIIRQCSTCGSTKYCFRYKLTFKASDGTAEAEMFAFDTVARTIIGKPCPMVVASFSRCISYPT

SEQ ID NO: 67595 - protein, 318 aa, Zea Mays
MVPCSCSHPSGTFERDKPACGYSITIRETITATSVDFTGAKAFEISGTPVDCVSLALSGRLFPWSSPALVISGINTGPNCGYEMFHSSAIAAAREALVYGVPSIAISLNWKKDETKDSDFKDAAQACLPLINAALDDIEKGTFLRGCLLNIGVPSAPSAIKGFKLTKQSGYSPAQSWQAVSASRPSSATHFMGMHQSLGIQLAQLGKDASAAAAARRVSGQRKAVEVESVATAGKQETREVVKKLFRAEFVERQHQGLDEDTDLRALENGFVSVTPLNVHGQVEPEIQAPASDWLSAAVSLEKEKEAAPATAEAHSAA

SEQ ID NO: 67596 - protein, 184 aa, Zea Mays
MPPVPVICEQRVIIPNGHGEKLVGLLHRTSSKNLVILCHGFQATKDDSILVDLADAITKEGISAFRFDFSGNGESDGEFQYGSYRKEAADLRSVVLHFSEQKYDIIALIGHSKGGNAVLLYASKYHDVPAIVNISGRFALERGMEGRLGKNFMRRINEDGYIDVKNKKGLAFLYLINNTSFFSC

SEQ ID NO: 67597 - protein, 118 aa, Zea Mays
MGLEVLQCRPWSGGAIAENNDNIASRKRRGGPDGLSEGDWTCPKCDNINFSFRNTCNMKKCGAPRPTPGANTSSSRKDNKEAPEGSWTCPECNNLNYPFRSVCNRKGCSYNKSAPTNN

SEQ ID NO: 67598 - protein, 346 aa, Zea Mays
MRMEAPRSQKKVQRLTGCMAALSRFISRLGEKGLPFYKLLKKVDKFQWTSEAQEALDALKKFLTTPPVLKPPRRATPTQPAEDLLLYISCTTHVVSTALVVERVKEGHAYPVQHPVYFISEVLGPSKKKYPQVQKLLYAVLLTARKLRHYFDDHKVIVVTGFPIGDILHNKEAIGRIAKWACELGSHDIKLRPRNAIKTQALVDFVSEWTEQQVPDNPETAEVWRMYFDGSLKLQGAGAGILFTAPGGEHLIYALQLLFPASNNAAEYEALIHGLNIAISLSIKRLMVYGDSLVVISQINKEWDCLSDSMGKYCTAVQKLEDKFEGLEFHHVEREIETRWSMYCPS

SEQ ID NO: 67599 - protein, 74 aa, Zea Mays
MALLNKDAKAMCFATLIVMAVIFSSCEAGGNRCHAFPGCDSILCWAECDRLGYSNPKPRCLYPKPNHDGDECCC

SEQ ID NO: 67600 - protein, 492 aa, Zea Mays
MAAMNGEVLGECGRNINSLKRKRESPAAYAAGVFCTSELHQHTVNDSAVRFHLDKDRKAKIVCHFNKQVLQSYKKFMSSAPPKRILLRQGAVWKDFPEKIVKLAQADFRAKKMITETGYQNQLFLLDFAHMTFIDTKTGFQRPIAWIDENEKCYFPESFIQDQKLFMKKDFGNGNHEYISEERNGTRETNHQFGASESSAESSNFESSIGDVSSPKRARAEKNFIVKKYCDMGEAIGENESCTLLPTACNLLPHQANLGEVSRAQRTIEAVEKLLLQGMGSVIESKDIIGIYRTPLLDDHGQVRYHIHQKQVQVTGCHRGNANVRYAWLPCSKSTVHVMMLNGVLQVDKPPNKCAAYGEGTLLTPANRSDACVKYSDVDENGIVRMMLCRVIMGNVEIVHPGSKQCQPSNKYFDSGVDDLKNPRHYVVWDMNLNSHIYSEFVVTVKLPSKTKDSFVSQENCQNSSDLSLVLNSSSPDCISQKSSTVGAARVQ

SEQ ID NO: 67601 - protein, 230 aa, Zea Mays
MGRGRWASGIRAAALVLLAVAAAAGAAAGDPDPDELERAFPIVEPDHGHTKLRLSEQGLEAIRRIETPIAVVGVIGPYRSGKSFLLNQLLSLSCDKGFGVGHMRDTKTKGIWIWGTPVEMDVDGSKVSVIYLDTEGFESVGKSNVYDDRIFALATVLSSVLIYNLPETVREADISRLSFAIEIAEEFYGRVKGQDVAFEPAKLLWLIQRDFLRQSNTRFVGSYGEQQHCF

SEQ ID NO: 67602 - protein, 72 aa, Zea Mays
MPLPIPCPRHPLPPDLARARPRITRRASRGTRLHPRRPTARPQTSPALSRPPSPPRPTLSQICVRDILCQQQ

SEQ ID NO: 67603 - protein, 506 aa, Zea Mays
MGEKRKPHTLPQFCQGHWMYCCQHWHTGFGGGKASFSSWIDITNHKADLNLKKTPQLVELFDDSKDIDEVLSLSPEKMLLRWMNHHLKKAGYKKTVNNFSSDVKDGEAYAYLLKALAPEHSPETTLDTKDPNERAKLVLEQAEKLDCKRYLTPKDITEGSANLNLAFVAQIFQHRNGLTSDTKQVTLTQTATHDDVLLSREERAFRMWINSLGVESYVNNVFEDVRNGWVLLEVLDKVSHGSVNWKLASKPPIKLPFRKLENCNQVVKIGKQLKFSLVNLAGNDIVQGNKKLIVALLWQLMRFNILQLLNKLRFHSQGSEGKEISDADILNWANCKVKASGRTSRIESFKDKSLSNGMFFLDLLSTVQPRVVNWKVVTKGETDEDKKLNATYIISVARKIGCSVFLLPEDIIEVNQKMILTLTASIMYWSLQKQPQSQSELTEQSEPSSMTSDAASEVASEDGASTTAPSESEEVNSLSDSISNLTTDDATSNAPSAENGNGVAGS

SEQ ID NO: 67604 - protein, 471 aa, Zea Mays
MGNTCIGPSAPSDRHSFFNTVSLAVLWRPPAAADRAEPSPTAEPSSSTPCSPPSRAPNPVTISDSEHPPHSTSTALGPAAPPNPNGKPKPKPKVKRVQSAGLLAGSVLKRDSERLKDVYTLGKKLGQGQFGTTYQCVEKATGKHFACKSIAKRKLVTDEDVEDVRREIQIMHHLAGHPNVVSIVGAYEDAVAVHLVMELCAGGELFDRIIQRGHYSEKAAAQLARVIIGVVEACHSLGVMHRDLKPENFLFVNQKEDAPLKAIDFGLSIFFKPGEIFSDVVGSPYYVAPEVLKKRYGCEVDVWSAGVIIYILLSGVPPFWAESEQGIFKQVLKGGLDFSSDPWPSISESAKDLVRKMLNRDPRKRLTAHDALCHPWVCVDGVAPDKPLDSAVLTRLKQFSAMNKLKKMALRVIAENLSEDEIAGLKEMFKMLDTDNSGQITLEELKIGLKRVGANLKDSEITTLMEAALLE

SEQ ID NO: 67605 - protein, 208 aa, Zea Mays
MVLLRSCLLKSGFNWDDNRKMVQCEKHQYEAHCKDNPDAKGLYGVAFPYFDTLAAIYGKDIATGEGAEGLGEAITNMEKEIAMGEDCPVVEEDMISMDTPQRSMDNRNSDHSTSSSSKRRKKHKDSMSSDPFLDLASGIRGDLNKASQHFGRMAEVMEMEAKKDQMQELQEKSVVELTRLGFGGSELLKAATIFVKMKLKGSDLSNYQ

SEQ ID NO: 67606 - protein, 72 aa, Zea Mays
MCFSRADCKFVPLGLWPLDGVLCGIRNLLLSSRTEGQACEAFAGSAGSRPSTPSRPCAYGSRGARSYHQWCR

SEQ ID NO: 67607 - protein, 486 aa, Zea Mays
MGSGSSKATTSSTSPTAAEAGGEGKRPNGSEKARRGRSLLPLPSSSCFRGSTTPCDCDVSAVAVDVECNKGGETASLPSLTHTTKSDEDVLATPKSHPGEEITLPSSDRERDQDDGVLQNAAATNTLTAASQLTDPSGRSRPRFGVNFGLSRAVSLGSSVACSILSSGLPTSANPGEGRGDVDDSSDTVISQQGSAPTAGIDSTLDMLRDSVTAQARAARQARRNLQESEDAILRNSYRRMGSQEPFEGSVRFSRTLSVGRLRDRVLKRPPFSDGLFTPALLYDRAVWLSGNASARQDSAVMQRTNSDRSSESRSDPSTNGLYNLSSERQASNSDLLERRSVFLERRRRIRSQVRALQRLGSRFENLSGHERSCILSGQHRTGTCNCRTGSRQGNPDEETSTRASISRIVMLAEALFEVLDEIHHQSAALSSSRPAFSSIGSVPAPREIVERLPAKVYRRPLKYHSEEAAQVKKVKRCANSYVCAG

SEQ ID NO: 67608 - protein, 341 aa, Zea Mays
MSQGNTTKASECSTPAILNMSDDNGPSEMGVGQPMVVGRKLLPPIVPGGEPIFVCEKQYAAILRLRERRLRAKEARERRLLQAKEEPNGGSMVECNPAPGDSHQHLITTSGYQQVTTGGSEAQSSIPLGFYWYVFTTSEGGQSSTPAGMGFYYPFNTTNGGENVGGVASGSEVPSSNAPSGFFWPLIMASSEENNGEVTYGSMVPISNPAGYFCWPVAVTNEHGEDTGESADGGEAPISNPAGDFCSWPVVATNDDEENVGEVAYNSVLNLESPDHTDLLRIMMGNRYSTDEASEQFQNVARLQAPGFTALLTVMNNAGYGPAADCGPHDAHKVMTRLEGW

SEQ ID NO: 67609 - protein, 559 aa, Zea Mays
MSGLLNSNLNSSASNLSDSAGRPFTASFSGQSGSIPGFHHSGLHNTHGSYNLPSMPGSLAQRNAAMSGLPSSGVQQPGGSIPGRFPSNNLPVGMPQIPHAHSGVSGRGMNFGAGPAFSSSMNIGGNIQGLSSGLGSGGNRNSVHGMPVSSSIGNSGQRISSVGNMVSASNIGRNIGTGGLSVPSIASRINLNGSGGSGSLNVQGSSRMMNGLLHQQATPQLINMLGSSYPTSGGSLSQSQIQAGNNSFSSMGMLHDASDTAPFDINDFPQLSGRPSSAGGPQGQYGSLRKQGVGVNTLVQQNQEFSIQNEDFPALPGYKGNPSDYNAIELHHKEQLHDNVPVIQAQQYPMARSGLGSSYLPNRQQHQQGANSVQNGGSHNILLRPPSQTSSLGSYDPFLQQYQQPQPQNHFRLQQMSSAAHSYRDQIQKIQAGPTPPDPYGLLGFLGVIRMNDADLASLALGIDLTALGLNLNSPDNLYKTFGSPWSNDPAKGDTDFRIPACYLFDKTPPLQTLLFQRFHIVTLFFVFYSMPKDEAQLYSANELTGRGTKKHITICRKD

SEQ ID NO: 67610 - protein, 327 aa, Zea Mays
MAAALPHSRLHLPLHTPSPTSRRRPCPRSRRRLPSFVAVSRLQNTTAATHPVLPPPAPPPSAALLAAEGASLAPRREHRFPGSVSSPTSTASASNEAEYAVLLRALQVRRAVAAEVLVAALGGGKVGGLTYIKNLTGRMGPFVDRVVVEAAAMRRDRPELAHMSFNARAKAYIQESGLVELVKWFKHNSMTYPQIAKVVCACSGDLGKVRKMIKWLRSIYVKGDFLGRVLANGGSFLNRSFEELEEIIGYLESLGVRRDWIGYVISRCPQLLSLSMDELETRVRFYTDLGMDKKDFGTMVYDYPRVLGFLSLEEMNSSISERVWFKY

SEQ ID NO: 67611 - protein, 477 aa, Zea Mays
MPPTATEATSSSATSATSSTDADAPGPTSPSPSRRAAPTLLLVAFLAALLIFSTGDDATAQPLNGVSLQNPEVSFVPSPLAGQFCERVLLSGVPRLHLDSYASQIRVKMNVSQSIPEKFHWKIEVCFHRNASMGLCQCEAGEWQGFQGGMWTAVSSPYGNKYVDLKLADKKPARFTLSIQEEFQKWRLACLGIGFVLLFLSPIISKWVPFYYSSSMALGILAVVLIVIFQVSIFLLVAIVLTGAGFGYWMVRRFILSKDGSVDAGIAQFVKWAMRVVATFFIMQSTLDPLLALVALAFSWWLCSLLTTKKVQKTMTQKQKQSKVLSQQMLTQGLPTGPKIQFLSPSKTGFGGTTSRTSATQYGRSNLANRGMVCSALAKRAVPNEDEDHYSTFHNIQPRKYTKQEWEDFTQESTRKALAECTATPEFAQWVGDNARRLQVEKEEDNLSEEEIMESSSSSEETGDEADGAPGLIRLWG

SEQ ID NO: 67612 - protein, 380 aa, Zea Mays
MEARAASVPDLSLHISLPSSAASPSPAPGLGAGGVGRGAQPSGGDPWRRLNGSTASTELSLSPPPPRQEAAAGDVLPWRLRPPAANYSSSTAEATFLPVTVPRLSFDAAAEAAPARPINGVPVYSSPRTGAAHPFLGAGGEYRQCHHHKAAVGLYNPYHSSSSWPSSLRSTTTAPLGAVAPPASDPTASSYLSPSAYHRMLSSTGRLHLQGVLADTLRGYGSGHHHRQHLGSLAAARYMPRLPASRRGMRAPRMRWTSSLHARFVHAVELLGGHERATPKSVLELMDVKDLTLAHVKSHLQVEFRPMRSWFFNSVYPCDSLIILCSSCISCSRSGLMYKEGGQILTRCQPGHRLRGTMCSVREKVVRCACADSQPRNCHP

SEQ ID NO: 67613 - protein, 174 aa, Zea Mays
MSSLVPLLSVSLDMVLCCTFPRFLQIFLIMTSVDPMHFLRLARTERTTREKLMGRNRKVKKRQFLQLQNQVRLPRRARMTMILMRTRLMILTRTRQTILMRDSSDEDDTSDDEEEDTSTPKKHEAGKKRAAESFVLKTPLSDKKAKVATPSAQKTVQVAFSTWPWGPSAVIFFL

SEQ ID NO: 67614 - protein, 160 aa, Zea Mays
MPLLLLPPPACTTAATSLAFSRPRPSRARWANLSYAFPRLRKYGRRHREPVAGPSLDDDGGEEDETEAEDWESDDGDEEMEIDEEEFLTMRPKPAGFGEGKTYSTDIEEQLLREMGFGGGAARRGEAAPANRRAGDSSTKVAAADHLKLASLYLATTISV

SEQ ID NO: 67615 - protein, 140 aa, Zea Mays
MAEASGGRRVARTVVVMAEASEARTEGCTAGTWAACHGGAWAACCGRRRSRSRVKATSASHCRARPVHSCCSATPASRGAGGGRRRRRGAGGRELRWRLPLRLGSTQRRATGCSVHTAAHASPFIEEERHVRSLRTLTLW

SEQ ID NO: 67616 - protein, 601 aa, Zea Mays
MVHSAYDAVELVADVPGHIEAVASHAGKLLVAVSDTEGFLWGSDCSLRIYSAPSPSDGGGEIRWDGPYALERQEPRFWRRPPLAMEVSASRDLLISLSEWIALHRLPGLETVAVVSSKTKGANVFAWDERRGFLAVGRQKRLTVFRLDSGREFVEVKEFGVPDILKSMAWCGDNICLGIRREYMIINSMTGALTEVFSSGRIAPPLVVPLLTGELILGKDNIGVFVDQNGKLIQDGRIIWSDTPASVVIHKPYAVARLPRHVEIRSLRPPNALVQTVVLRDVQKLVQTDHCILAALSNSVHGLLPVPIGAQIVQLTASGEFEEALALCKLLPPEDSNLRAAKESSIHIRYGHFLFDNGSYEEAMEQFSDSHVDITYVLSLYPSIVLPQTNIIGDHDKLLDMPELARESSDVTDEMESYSLQLQEPDDKSPLEVKKMSHNALAALVKYLQKKRSGIIERATAEVTEEVVSGAVHHSLKLSEPYKSKKLSKKRAQTHTSSIAREMATVLDTCLLQALILTGQSSGAIELLKGLNYCDLKICEEFLKERREYMVLLELYKSNEMHRDALQLLNQLVEESKSEMENTYFNKKFNSQMILEYLRIW

SEQ ID NO: 67617 - protein, 66 aa, Zea Mays
MRWASRSWRRVPKTPPTWSRPSWLWLHPSRTGWPANQPRPTQGQRRCRSAGNPSTRRRLAARLKLA

SEQ ID NO: 67618 - protein, 61 aa, Zea Mays
MLGADVTVSHRTPSPTNLGSGHALFISSGHNLFGSLLVTVLTGRVSLYIVTLAQSIGVARD

SEQ ID NO: 67619 - protein, 754 aa, Zea Mays
MRRPHDASDGDEDRGYPSSSAVNGAGDEEEERRQAARTPGKDGPVDALWRWRSQSLSEIVLSWSVDQILDKDLLRDKVSKIPETFSSIEQYMTSYFGPLLEEVRGDMCSSMEDISNAPYADLLSVNSMRKGKGSYEISLGRWRGTSHGCGIDNYKPKSADVLLISETKPANQSDILKQSKSCVIVWVSKVNGNKMTVKASQLMETGAQGGERRPIGANKYDKLYAECLDKSWEMLDQEAMASKCRNSSVHRNVWKESHKVEKRSDVHGRNEKETGESKRWSFYAMYLTNMVTYDRVWVVLRRGLTMDSKIIHSMLGRNNYALGHCKHCVNKSHDEIKGDLCDFKLNDSQLDAVASCILASECTHRSSMGLVWGPPGTGKTTTVAVMLQMLLMKEQRTLACAPTNMAVLQVASRLLELIGDFSLRHNYSLGDIILFGNKDRLQIGKLLSEIYLDDRVQKLLSSFNRQHGWKHCVDSVVTFLKNCNSRYRMSVDIQQGSSDARDLTFKKYFTSRFSTLADGLVRCIDTFYDHLPRSSLGKNFDKMMFVKRLLDKLQQSLSADDVSDELLFTIFNPADEVPDSSGSHDDLIDDEDDFHDCKISLDSPLDIKSLCIKILMSLSNMRLPCEDNELSIRDLCLKHAKLIFCTASSSFELFRLQSVRPISILVIDEAAQLKECESLVPLLLQGIEHVLLIGDENQLSSLVKSKIAKDADFGRSLYQRLCTMGYSKHLLEAGGLCQELSTWAYLWCLFIHSY

SEQ ID NO: 67620 - protein, 743 aa, Zea Mays
MAVRATVSRFPATPEALESCAVQWGVAVTPFAAVDERGQPPTTGAGGDRIPRCEHCWAYLSSHCDLERWGWTCALCGTLNGFDDEAERRFQRPDACPELNSSFVDLEIAGAGGDGVQALPVYVAAVDLACSEEFLELIKSALLAALEALIPGSLFGLMTFSHKIGLYDVQGPIPLVKNVFIPPDLEEDGLPVALEDAMPLLSFLAPVDTCKDRIAAALETLRPTSSWERGAASGHEEDAVLLGGRGFGTAMSALIEYLSSGYGSTFALARVFAFLSGAPDYGAGLLDTRRYGEQYASKGVDANLALLPEQIPFYRDLAAVAVQSGVCIDIFAVTDEYTDLASLKFLSIESGGYLFLYANADDSTLPQDIYRLLSRPYAFGCVLRLRTSSDFEPGNSYGHFFPDPQYESVQHIICCDSFATYAYDFEFSHNNGFSRHTDPAVVQIAFQYSVIEPAKETSGDGSQSSASYKFSLKRRLRIRTLQYRPARNISEIYDSVDPEVVLHILVHKVILECVDKGVREGRHQVHAWLSLLAARYNQVLSSDVRTPLSSIDIDFSQCPQLQTIPQLVFALLRSPLLRLHEEGVHPDYRIYLQCLFSALEPSSLAKAIYPVLISYSSPDKQAFPRHTLSRAALIMSESPIFLLDTFTNLIVYYSSTADPSFPFPPPRDCLLRTTINKLKQDRCITPKLTFIHGGEDDSTLFESYLIEEQDVDGSGLTTGSGFVAFRESVRNVAGEIIQEEIGS

SEQ ID NO: 67621 - protein, 298 aa, Zea Mays
MCKVLSNHWSQEKRKFLRSEARDASVSNGEMAQKPREAETEQRNPFLRGLENGRVKRRRTGEARPKEAESEQEEHSLSLSQHSSPSQSDQEQTGAHKLPASANTSPSALQPFARLNGNGAQLRAAGPGGVSSRPLKADQLLRTIAPQHRREVQFLSSDHQPQPRGPPGPPHLIGAEVHGTVDGAFDSGYLVTAVVNGQLFRGVLFAPGPGVTAPRPAVHHQILTSSAVPPQQRPLLAHAIPVHARPVPLPQATGFVLPDCAHHARQGFPAKAVKSEPERGSSDLHDVVLTLGGPGGGK

SEQ ID NO: 67622 - protein, 625 aa, Zea Mays
MENMRYAEELVREFLVFRGFTSTLQAYETELSTEIGRNFQGDKIVDLVFSEYVPKYQLDKLLGLFAFFKQCFMSPADTELFSTLVKLELSVLRYYVINALKSGRQDKVIEFFGESGNYLMQKRGDWLAWFAIPYIKNPSLDPQFRLYFSKEWLDTLVLSFRNFLSGIFNDTRTPALMRISSEKNTIKSLKNDIKQLNNKLAELQASLEEKEDEISLLRRNYNSGGYGNKNVVGTSTAGSPHEEMSENYEESSASSSMIQGFDSRSSSSVKSYTRGGKFHESSEINHTEDQQVLVTEEEFPEVKVDFQETFLGHNSPISRCRFSASGSNIASSSIDGTVRIWTYDSSTASSRNATIYCGSEVSALSWECRSDRLLLIGTANGGIKAWNADAKRVVCDLSTSRNFPSILDLKCSPVEPVFVSAAASRRHGSTTFERTGFANLTVWHMKTWKPLTVLPLGEDPPAITSLCFNHNGKILAASATDGMIHMFDMSAGLQITGWPAHDSPVSSVLFGPAETSIFSLGSDGKILEWSLHNQGQILWSRDCSRFCNPESFKTRMHEIALDSNGKRLLVTSGLVRAPIYQVQGHESELRTLPHSSSITSVDWHPTLPMYITGSADHSVRVTSIL

SEQ ID NO: 67623 - protein, 64 aa, Zea Mays
MSSSSSIPPPPVSAQRSTSTTHLVVYIFVLWSSSIEKNPHRQVVYLLQAGVCDRVRQPGRLRVT

SEQ ID NO: 67624 - protein, 467 aa, Zea Mays
MFWRMTGLSAASPVDTILDKENFTLEELLDEDEIIQECKALNTRLINFLRDKAQVSQLLRYIVEEVPEDSEKKQSFKFPFIACEIFACEIDIILRTLVEDVELMDLLFSFIKPDHPHSTLLAGYFSKVVICLMLRKTAPLMNYVQEHPDIVVQLVDLIGITSIMEVLVRLIGADETIYLNFADTLHWLENTYVLEMIVDKFSSSDSPEVHANAAEILSAVTRCAPPALAAKICSPSFVGRLFHHALDESRPKSVLVHSLSVCISLLDPKRLASVSYQAFRSNLTHGTLVTASPETVDGILESLGDLLKLLDITSSQNVFPTTYGCLCPPLGKHRLKIVEFISVLLTIGSEIAEKKLISQSVIKHCIDLFFQYPYNNFLHHHVENIIVSCLEVKRNQLIDHILNDCGLVGKVLAAEKSSSLAVESNGPTLPSEGKEPPRIGNIGHITRIANKLIQFGNSNSMIQSHLQ

SEQ ID NO: 67625 - protein, 244 aa, Zea Mays
MGTKCVGLSSATKGTWCCRYCENRQQRESCLAYNNNAIAAGRVEGVDALEQIFTRSIRIATTLETGFGGCALCKLHDFSKKKFSTRTVLLCDQCGREYHVGCLKEHNMADLTALPEGAWYCSTDCVRINQTLQDLLNSGGEPVLAMDLDVIKKKREVKGFNDDDADLDVRWRVLKDKSSDDSKLVLSKAVAIFHETFDPIIQVSTGRDLIPAMVYGRSARDQDYTGMYCTVLTVNFCGSFPHHG

SEQ ID NO: 67626 - protein, 96 aa, Zea Mays
MLGSGDTPQKAAMPLRLGCPPAPDRRRRRYTCRGARSTAAAPPLEIAPGRRGRAAHRSSAPFFTPLLLPQGPNHPTLSIQQPPPRPSALVESKSRL

SEQ ID NO: 67627 - protein, 420 aa, Zea Mays
MESDSADRGEASRHRSKRERPPDPEGDACPDVGRRRVAAGPGVDAGANVPDLGDQKEFEHGEKLQRIPKQKYQVQNDMRTLAYWLSNLSTLTVFLQRSFKTTRTTISTPQRRRFSSERMFGNQTSNAGLAYLSGQSVGSAGLLQVEAKYPALLFKQQLVDLIEKVYGMISDSVKKELNPLLELCIQDPQTSQSSIAKGNLNGMGQQNQLTHWLGIVKILTSYLDVLRENHVPSILVHKLFTQMFSLIDVQLFNRLLLRRECCSFSNGEYIRAGLAELKHWSDNATREFAGSAWEALRHIRQAVDFLVISLKPMRTLREIRTDVCPALSIQQLERIVSMYWDDVNGTNTISAEFTSSLKSAIRDESNMATNFSILLDDDSSIPFSLDDITKTLPVIELADDDFLPFVHENPSFAFLLQRGE

SEQ ID NO: 67628 - protein, 238 aa, Zea Mays
MGPTGSGKTLLAKTLARFVNVPFVIADATTLTQAGYVGEDVESILYKLLTVADFNVQAAQQGMVYIDEVDKITKKAESLNISRDVSGEGVQQALLKMLEGTIVNVPEKGARKHPRGDNIQIDTKDILFICGGAFVDLEKTISERRQDSSIGFGAPVRANMRVGGTSSAQVTSSLLESVESGDLIAYGLIPEFIGRFPILVSLTALNEDQLVQVLTEPKNALGKQFKKLFSMNDHWVSG

SEQ ID NO: 67629 - protein, 147 aa, Zea Mays
MCASPSARISPDPLYSLHHADPDPTPATTRIHCALHGHERERSCADLNQALHGRSAWFPLLHPMIRMPPHHGRWSGPSNPDARALRRVDLLDHAGARPQVRRRDHEVAASTCLSCSPLHTPPRSCGYSALAAEINGGILAVGRPRQH

SEQ ID NO: 67630 - protein, 632 aa, Zea Mays
MQNFQNFADLQHKMNNNEQNKLSSEVELPRQKVPMTNHVNGSGGEMHSAEWGTNPGLIESSGFMPSNEDRQNDISHQPSSSFVYSADGTVDHCSKKSPLMYECEEQMEIDSLLNSFGVSTDSFSQTYGMFERSNNLVEFDMKTELDESGSAACFNNNAPYMQTGPPESAISDGSSYPEQYQSTSQTCGLVYASASQWQNMSSSGLPLLDCRKSIGEPTSIISLGGNGKGHLLPTSEDTLLQKPQSVAPDARLEMTDNVADCYLESAASLDGHSCPLGASACHDEAMAAKDLQTAQHGVVTDCTFGIHTSNHAGHSDMLLPITQTTSVQEPGLSLSKDLNSSCIRGTEVKKVDLTATYNSERHGILRLKSFEQKTPESMGMKTYIYHCGDHSQIVDPQQSIILAASKPSHSSVLPVDKSDGKVVSQQKKRKRAAENLLAWHDHIMPGHGSMHRRRTPELDWARATKRLVEKVDGENATMGSSTFNTPARKRLILTTSLIQYILPVVPARLLAANVTNSIEAIVYHISKSALSDACDTALSVVNDTLPNQSSTSGKEGSRILSEVLETYESRLGKLEISLLRRRHCMIWHQSYRTWGGGIFSIILQSGMGTLTILSSTLAQLLSRNMKELLQHQ

SEQ ID NO: 67631 - protein, 846 aa, Zea Mays
MADALFVVLSKLADSLGEQTLERISTKLIEVAPVLTDFEHSMKQIEAELLILQAFIAQVGTKVGDKAFDAWLDQVRDVAHEVEDIIDEYAYLEVQAVDTGSFFKRKFLQIKKFAAWQKFHSQISHVEARIQRLGEIRNRYGILSGEIDRSKKLRSPNRLFMSDSSYLTDNSEIVGHVDEIGRLTQWLLEYKQERTLIAVFGMGGSGKTTIASSAYKSQKITRTFNCHAWVTVSQTYQVEELLREIINQLIDQRASMSSGFMTMSGLRLVEVIQSYLQDKKYFIVLDDVWDKDAWLFLNYAFVRNNCGSKVLITTRRKDVSSLAVDQYTIELKTLQYAESWELFCKKAFRASKDNQCPENLRFCAEKIVARCQGLPLAIVTIGSVLSYHEFEEQGWESFYSQLSWQLANNPELNWISNVLNMSLNDLPSYLRNCFLYCSLYPEDYKIKRKVISKLWIAEGLVEDREDGTTMEEVANYYLVELTQRCLLRVTESNACGRPRAFVMHDLVRELTSNIAKKEKFGIAYGDASTTQVPPEVRRLCIQRGAQTLNSIGSSRFHDFQQRSLNCLGATKIPVNICHLKNLQAIQIVLANKDLVSQLGNLKLMRSLAIAEVRQSYIAELWKSLTKMPNLNRLAISTCNMEEILDFKMLKPLSNLVFFKLAGKLESGVLPLMLYYFEKLTWLQLDWSGLKKDPMSSLSHMSNLVHLFMCGSYCGEQLTFCSGWFPKLNYLQLSKMENLNWIEIEDGTMMCLNNLYLVDLGNLKAVPYGIKYIRTLHQMHLTDMSKEFLGSLQGSASPVVQHICNIHIFESSDSEAVNKFFFEPYLATKFGPGATKHAPTYLGSSGI

SEQ ID NO: 67632 - protein, 126 aa, Zea Mays
MDPNMKQLQEALVDIETDAEKVLLARHQLVENDKIRNGNREALTALRKQARTSKTSVPSPFEVIMKEMEGSSGKQLIKEICPTCGDHDPKEHTWLMFPGSDMFSRVPFHVAHTVVEKGLDVKKSVC

SEQ ID NO: 67633 - protein, 443 aa, Zea Mays
MGDAGQSHSHRHHHGFQPQLLSFGGVGQHHMHQFTAQAPAASHSSRPRIGGVGAGGEAAAATSASHSRARGGAGEIVAVQGGHIVRSTGRKDRHSKVCTARGPRDRRVRLSAHTAIQFYDVQDRLGYDRPSKAVDWLIKNAKDAIDKLETLPAWQPTANAAAPPSSSTHPDSAENSDDQAQAITVAAHAPFDFSGAGGASGGAAGFLPASLDSDSIADTIKSFFPMAGTGGGGEASSSTAAAQSSAMGFQSYTPDLLSRTGSHSQELRLSLQSLPDPMFHQQQDRSEAHGGNGSAQQALFSGAASYSFGGGAMWGEQAQSQRMVPWTVPDPGGGSAGGYLFNVSQQAAHMQAAFGGQSQFFFQRGPLQSSNQPSERGWPESVEADNPMQHGGLSPAVSAIGFSPGVGFSGIRIPTRMQGDEEHNGGGNGDKPPPPSVSSASHH

SEQ ID NO: 67634 - protein, 360 aa, Zea Mays
MSRLGLSLPQIPWALGLPLFGKRGIEKQPFQLPDFIAATGIEKIRQAYIEKEDSKKLKQKQRERMQPKMGKMDIDYQVLHDAFFKYQTKPKLSSHGDLYYEGKEFEVKLREMKPGMLSHELKDALGMPDGAPPPWLINMQRYGPPPSYPQLKIPGLNAPIPPGASFGYRPGEWGKPPVDEDEPVDRSKHWGDLEEEEEEEEEEEEEEPMEDEEMEDGIQSVDTISSTPTGVETPDVIDLRKLQRKETDKQAERPLYQVLEQKDKRIAPGTLYGYVLGAQDKSSAPKRVDLLKNQKSDKVDVTIQPDAMDDVVAAKYEEAREEEKLRNQKEDFSDMVAENAHKRKRKQEKEGKSKKKEFKF

SEQ ID NO: 67635 - protein, 108 aa, Zea Mays
MQNTVANPSTAAAAAAAEPGAGDELHPEDAGPAPPAQPHRLLLQLCLPAPPPPAPGLRKHLLEELEQAFPEDVEAYREIRATSAAEAKRLAQSQGTLPNGDVKVKAEH

SEQ ID NO: 67636 - protein, 1124 aa, Zea Mays
MLSAASVMAPAAATQKSSLEVLLETLKKRDEQPKDAPPTLPARPTCRGRLPTTRRSSLPAGFMLENGMATVAATEAAVVDKKADAKMEIVGLEAKEEKLVKGCIFGTKRKFPNTEVLEESPYVGKFLEERKGTSVCKNPPHISSATIRMNGNVACTDILDYILQKKLRVWCSSPNAKWELGQIQSMSGDDAEILLANGKVLMVSPEQLLPANPDILDGVDDLIQMSYLNEPSVLYNLQLRYSRDLIYTKAGPVLIAVNPLKEVALYGKSSIMQYKQKANDDPHVYAVADLAFNEMLQDGINQSIIISGESGSGKTETAKIAMQYLSDLGGASGTESEVLQTNVILEALGNAKTSRNHNSSRFGKLIEIHFSESGKMCGAKIQTFLLEKSRVVQRAQGERSYHIFYQLCSGAPPLLKKKLFLKSANDYNYLKQSNCLKIDGVDDSKKFTVLVDALDTIQISKEDQMKLFSMLAAVLWLGNISFCVIDNENHVEVVSNEGLSTAAKLLGCTANQLVIALSTCKIRAGNDSIVKKLTLTQAIDARDALAKSIYANLFDWIVDQINHSLGTGRQFTWRSISILDIYGFECFNKNGFEQFCINYANERLQQHFNRHLLKLQQEEYLEDGIDWTPMEFVDNTNCLSLFEKKHLGLLSLLDEESTFPKASDFSFANKLKRQLSGNSCFKSEKEGTFKICHYAGEVTYDTAGFLEKNRDPLHSESIQLLSSCTCELSKHFASVMVADSQNKSSLSWHSVKDTHKQSVVMEFKVAALENAKRQMLLGTLHIQTQFRGLHSRRGYQRLKKGAMNLQSFIRGERTRIHFDNLVKRWRAAVLIQKHTRRRLAANMFNDQLNHVILLQSVTRGFLARRKYKCLQNEKESKASHSIVQGNTRKNNSESRICHEMNGHYPHEPVITELQGRITKAEAALRGKEEENVMLKQQLEQYERKWSEYEAKMKCMEEAWKRQLSSLQLSLVVAKKSLAADDAATRAARTDCTPTHAQYDSEDTLSTGTRTPEVIESKHDNHNPEAKVSAGNSDRRVNAVNHLAKEFEDRRQVFEDDAGFLVAVRSGQIGSNMNPDEELRKLKDRFATWKKDYKSRLKETKVNLSKVGTHDEKSRKRWWGKKSSK

SEQ ID NO: 67637 - protein, 850 aa, Zea Mays
MFESQQGWIMNTMQREPAPPQVEYAPVIFSQDTVSYLARIDMMSGEEDRENILRARTTGKAVLTNPFRLLGSNHLGVVLTFAVYRPDLPADASVEQRVEATIGYLGGAFDVESLVENLLSKLAGNQDIVVNVYDVTNASEAMVLYGPSSSDERVPFLHVSMLDFGDPFRRHEMRCRYRQKLPMQWSAITNPLGTFVIWMLLGYSIAAAYSRYDKVTEDCRKMEELKTQAEAADVAKSQFLATVSHEIRTPMNGVLGMLDMLLGTDLTMTQKDYAQTAQMCGRALITLINDVLDRAKIEAGKLELEAVPFDLRSLMDDVISLFSSKSREKCIELAVFVCDNVPKDVLGDPWRFRQILTNLVGNAVKFTERGHVFVRVCLADNSNMEAGQVLNGAMNGKDGRVDSTTNGAFNTLSGFEAADRRNSWQYFKMLLSDKESLLDDLEGTNSDQSDSDHVTLAISIEDTGVGIPLQAQDRVFTPFMQADSSTSRNYGGTGIGLSISKCLAELMGGQISFVSRPFVGSTFTFSTTLKRSYKDISVDSSRSLLEALPTAFKGMKAILIDGRPVRSAVTRYHLKRLGIIVQVVNNMSAVVKAFPGQNGATVSREKATILFIESDFWRPETDVQLLNHLREHKNRQLSDGHKVVLLVTSEADKDKYGSIFDIVMCKPIRASMIASSIQQLLKVEMPERRNNHNRPSFLRSLLVGKNILVVDDNKVNLRVAAAALKKYGANVSCVESGKDAISLLQPPHCFDACFMDVQMPEMDGFEATRQIRQTEMRVNEERKNKLVLIEGSTFVEYHLPVLAMTADVIQATYEKCIKSGMDGYVSKPFDEEQLYQAVSRLIVGTTDSTV

SEQ ID NO: 67638 - protein, 304 aa, Zea Mays
MTRHNISKSLAVVLRARMQPNPISSPPPPTPPPPPTDPDPAAPLVASVSHWLHVSASAASPPPAALDSFSDGYRSLDLVGRREVLRSLAVDYDVPRARVRDLMKQYMSVTSAEPSGVDDVEAEEGKEGAASALYRMERGLRDALRPRYAGFLEAMNAQPGGLKLLAVLRADLLALLGEENVSALRALDSYLKEKLVTWLSPAALTLHQITWDDPASLLEKIVAYEAVHPIRNLIDLKRRLGIGRRCFGYFHPAIPGEPLIFIEVALLKDMEASIQEVLWDDPPTPESEASCALFYSISSTQVLI

SEQ ID NO: 67639 - protein, 229 aa, Zea Mays
MTSLSITVMTLNLHEGEQPSESPNSWEKRRDICVSVITSYSPTILCTQQGLRWQLDYLQQCLPGYEQFGISRKGSQDNTDEYCTIFYEKEKVELTEGGTFWLSESPSVPGSISWGANAPCIATWATFQLKRLEPPGFSFQIVNTNLDEVSPRARRRSALLTWQHIASLAPNLPVIYCGGFNTQKESMTGRFLLGRSREHGVVGDMRDAWPNARVRKNVSIIHTYHGFKE

SEQ ID NO: 67640 - protein, 400 aa, Zea Mays
MNVPSFISSSSSSNHFAKMNSSSLIGTETLLPTESVYIMSPQKNLGISRSNMEPVSHGVNLPKDVIPMPVQDISRFISSGKSYAPVWSDGLLGRSQCFPSGPSGSSFANISNSVVLNASKPFSVDISGRSLANGSNDRPPLTSNMCFSSSHSCSSYASILGGKILGSSRRIPFEDIADGEMLAPGNLPLQSPQLVKQPSSAGLFNEVARDVHQFAGLSNSWKVAVPPRFSDLGHNVGTSEGHSQGNIFKINRLSRLARSSAQIPTFRNEYQKKTTGIMGKAVPVVGFREQVAPFSFENNTRSTVTLIGNSALSSSSSTRPGLNINNSAMLTQVLNGGGANDNLHGVSTVNQQAVNDQVNNEFFMGTNEAHNAESDDLDDFLAYLVNQDFINNGDSFIDRD

SEQ ID NO: 67641 - protein, 606 aa, Zea Mays
MAKEGAEGDGWRVMDRRRQQVRGRSSGAGIWSLRGRANWEARGRGTWRGRGGRFVASGSSLGLDARVAVERSSGVQSEAAKKRVADVASGVSDMGKKRREELCCEICEDNHVPEECPVFNGPKPQAALCGFAGGESGFFQIPTWGAKGVLPRSDGVTAFITVKEGNVTAELVKSELSRLIPVKWNWSVQKHADGFIVTFPCRVELQRMIAMKYVHTLGGEGILVIQEVNQKIEPISYLQKAWVNVYGVPFEIRSFLPLWAVGSILGATQKVDMRYTRKMGVVRILVAVTDVNHIPESAEIVVGEGLYEIFFKVDKVLKDGRWIDNNNTGTRDRDDKEQGENDDFTENHENDIFQPEEAVEDTVMEDNSLHSDPMKPHDESSDMGIGVQHRKPFINDSVTLESEVLTSVEPTVLNLMTSTCADQHLQPAPEEYGLDSVICIADHASDGLELSTGRVGVDGNLSSLIDLAPDCSVLASGSISEEGLSVSKVSIPSLEATVPFAGREINLAFDDINIPSAADSLLIEKHKTRESTIHLGHVNYFTDVPRSVLQEALKSNSLTKRVKTEKLNQGGVMLSARRTNTDEDILSKAQRLAAKRNLEINHCWRS

SEQ ID NO: 67642 - protein, 840 aa, Zea Mays
MALFRKFFLKKTPDRLLEISDRVYVFDCCFSTDSMGEDEYRDYLSGIVAQLQEFFPDASFMVSNFWSGDKRSRISDILSEYDMTVMDYPQQYEGCPLLQLEMIHHFLKSCENWLSVEGQHNMLLMHCERGGWPVLAFMLAGLLLYRKTYTGEQKTLEMVYKQARRDFIQQFFPLNPQPSHLRYLHYITRQGGGSEWPPISRPLILDSVVLHVVPRFDVDGGCRPYLRVHGQDSSPGNKSAKVLYEMPKTSKHLPHYGQAEVPIKLSVFCRVYGDVVLEFIHIGDNIEHKETMFRIMFNTAFVQSNILALNRDDIDVAWNVNNQFPRDFRAEVHFSDPDSFKPAATVEEIADDGDETDVASVDTGEEFYEAEEDWHDARKDQETRSTDGGISLDDVADGGVATEERSSLEKHQFNEGVKIGVSQNLGSMNEKGASAPTPTFDNQEGLQQPREVLANGKLSSTNGQENSDVHDIQVVATSVDSEGHKFGSTCQEDMKGVIAQTLVTTVDPSCSDEIECQANEQTKISEYPDLDYTAFGSPRSLSRTNGDTHLRTTKNEGLQNGDIKIITENTISMDNDLVIYEEKTIVVNGNTVQEVKNIVNEKSIAAKIDKPIIESRNSLNNNNGKIQIAKPSDTSNGKLDGCRLESCLEEALPTKKTTVHDRIVVLPATDVGTEIKTKQEGLGDKQDFGIVLPQSRTVARARSPRLESDDRGQIPDKAVSSVLKKMAVGNAKMEEQPKLAKPKTIRRWISPKKESDATSVHRPSHPPSRYDSSPAALAIRSMPTDVKISAVNDAPLLSLKQPYGCNFTREVTSALSASSPPQQSLLPGAQIASRNQCFRV

SEQ ID NO: 67643 - protein, 168 aa, Zea Mays
MTVYHPAPTRGDWDCEEERREGEVDCTAHTTRPRSSVPFRAPPQHETPKPYPLASPSSSSPPPIRAPAECRREAVGGSSSATRRRRPRCCTCGTFRGSARKRSSSSSASLSAASSTPRAASAPTTTRPLSSSLTLIRQSRWFLISHHLQNQHKYEARLFIFSIQIGKK

SEQ ID NO: 67644 - protein, 400 aa, Zea Mays
MAWELIEVPGNLNISLQDSTVDVVAAKIDPKLANTLIRQLSQVCPLENLRHVKRVRRGKSELSIILCVSTGSETCGIQFSEDLKKIVDTYQLSPFTAKVARCCATSKEEWEKQCKLWPTSYHPAHDLDIVRGFQEEELPSIFNCMKTTIQLSKTGNAAIIVDPSSMQIVAKATDQTHKHDTPEGNTVSEANADVTCSLNESMGNGSNLSLPGSFLPKCDSLNMEISCINPWGWMKKKTCERKPLPCDGCFAWHPLRHAPMVAIENAAERDRTMFPSLASITKTDSNGNLEKYCDNEQAKRLKTDTKDNEPSASESFCGDLSETSRPYLCTGFDIYLVWEPCTMCAMALVHHRFKRVFYAFPNPVTGALGGVYMLHGERSLNHHYNVFRVSVPEAYSNGLN

SEQ ID NO: 67645 - protein, 330 aa, Zea Mays
MPPVRSEVIAIVVTCKADVDVFFGRLLEAIRARAWEVTPAAAPSSGTSVAEGAAPTEDIAIRMPVVGVSGILRMEQESWENAGQNLQDAFQDLNALMSKAKEMMQLAEKMRLKLLMNSSTESNSNDEEMGSKQDMQDLLLSVGIVSPVTKETAGALYHQQLSLQLADFVRIPLEKAGGMMALVDVYCLFNRARGTELISPEDLLQACSLWEKVDVPVMLRKFDSGVKVIQTKTHSDEEVFARISSLAQKPDALQKGISPSDAAFTLGIAPALAKEHLLNAENKGLLCRDVSPDGFRFFSNLFNDIDPQNIHSQKPHGMYKAWISVAMASH

SEQ ID NO: 67646 - protein, 413 aa, Zea Mays
MGRGRWASGIRAAALVLLAVAAAAGAAAGDPDPDELERAFPIVEPDHGHTKLRLSEQGLEAIRRIETPIAVVGVIGPYRSGKSFLLNQLLSLSCDKGFGVGHMRDTKTKGIWIWGTPVEMDVDGSKVSVIYLDTEGFESVGKSNVYDDRIFALATVLSSVLIYNLPETVREADISRLSFAIEIAEEFYGRFVHGQDVAFEPAKLLWLIQRDFLQGKSVQQMVNEALQRVPNDNGDKYIDEVNQIRDSLAVMGNNSTAFSLPQPHLQRTKLCDMEDKELEPLYVKRREQLKQLVSSIVKPKIVQGRTLNGKDFVSFLQQILEALNKGEIPSTGSLVEIFNKAILDRCLKAYREKMDGLGLPVPVDKLQKLHEMANGDARILFDKQHFGKHHAAQSALKLEDDIKKALLTATKVS

SEQ ID NO: 67647 - protein, 179 aa, Zea Mays
MEAAPTTITVQVKFAGRTIPVEVPAAASGAELKRLLQPLTNVLPRGQRLICKGKVLQDAASLSSMQVVGGSKVMLIASQGLHQGDGPITNNSSSSATTVRRPSNVKENQTQKPEVVVTKSRSERWKLTGVVALQDCDLKVEGWEEFDQRRRQKHQKQLDFRVGSSGVFDEGADDDNRRR

SEQ ID NO: 67648 - protein, 144 aa, Zea Mays
MPIQHYWPVRYDNKCASIKYAVDWGNSHKQLAQRIGKQASNFIQDELSMDHVYDYMLHLLTEYAKLLKFKPTKPPDAVEVCSESLACQAEGLEKKFLMESMVKFPRDACDLPPPFNPHELKLLKQKKENSIKQIHMWEQKDLGA

SEQ ID NO: 67649 - protein, 114 aa, Zea Mays
MVVGGSSAPAPSVNSISFSGKEGLCGLKRWQTNSSKTLHRSYLHRLEIQTAALWRPRKMLDRSCQQIHALHGSHSALQRHVRSESPRTRPENGLAYIWTAPGTGVWKNTSDYYR

SEQ ID NO: 67650 - protein, 506 aa, Zea Mays
MAERWRSRARRDPDLDEDASPPSRQPRHSGGDEEDDELGNEDLSLEIVARAQRKRRGESAGGVPVFADLLSVSSADEEGAVVELDEADEPRRKQKKKQRRKQRKKHRKETTEAAAGAAVEVDENAVCSTEEGPIGTAESVLTENGADAPASDNMVLRKLLRIPRYFDPGETLLETCFNCSEEGHVAANCPLEKRKKPCFVCGLFGHNAKQCTQGQDCFICKKGGHMAKDCPDKHRRNDHQSTLCLKCGEIGHDMFGCTNDYPPDDIEKGHLCCSDFSDDCPKQISCYNCAQSGHSGLGCAKRRETSAVTTPTLCFKCGEEGHFARGCTKNAKSDRSKGKSSSHIQRKEKWKKASSSARSAPYDARKTSKRKSPHLEERVGTPRHKPKSRGGWTGGDDLPLKKYKSNGWGSPSTPKKSYANHQFLSGCDYLTPQPSRRHNYHGTMSSPNHQFLSGCDYFTPESSRGHSHGTMSPNWNYSPSARKHGFSSSRFAAAAASNTHVRFGRN

SEQ ID NO: 67651 - protein, 112 aa, Zea Mays
MVAAHLTGIHSAIKMLNSRVRVIHQYLVAMQKGDIPMDNSLLRQVSSLVRRLPATESQKFQDDFLMEYNDTLLMTYLAMFTNCSSTMNELVEKINTSYERPTTRRGGRGAFM

SEQ ID NO: 67652 - protein, 820 aa, Zea Mays
MEILSPSPPPSHCPLLRCGGHWEQHHGETWVHVAVGRSPEKTLSLLRWALRRFGCSRIVLLHVHHPSPLIPTLLGKIPAVQATEEVVLSHRKSEKEEMNKILLTYLAFCHRAKVQARLLVTENGQIHDGILSLVDHHRITKLVMGSTPDNCFKLKYGKESLMASSAPAFCQIWFVWRGRHIWTREASAATDNATPVQYQYDVMTTKRIRFSSYTDNTGAILDEGYPAHEALTTVDLNQGVVSDCGQSNDYEAFGEHEVNHLRGMSISDWQDDTEPELNSTFWSRSSIHADTLQLDPKEVLANVKQLMMEADRSRKEAFSELMKRKETESKAASAFAKTKDSDSAKKHEIEMREELEVVLVDTRKQHEDLIKNKERAVSVLDSSTRRSAILDAHAEKIKLQIDEFSAELEVIQSSIETLRQKKLKMQRLESKHIDLDKGCTYSHATLSNCASNAFGDDLYGFREFTVLDMQSATCKFSESFRMWSQGRGCVYKGEIMNRTVMIYKLHCHSIESVRQFQQEVYILSNVRHPHLVTLVGACPEALCLVYEYLPNGSLHDRLFSRRSSRHLPWRIRARIVAEISDALLFLHSCKPQTIVHGNLKLENILLDTECHCKIADFGISRLFTGDVKDYPSGGSEPPEGSFPYADPEYMRSKVLTPKSDVYCFGTVILQLLTGRQEPARRLAGEVRCAMACGKLSSILDPAAGHWPMEVAGRLAELGLRCSEDRSRDRPDLTAETVRELEQLHLTREEEQAPSSFLCPIMQVCAADGVTYEGRAIRERMELETGQGTAPLNNLKLEHLSLTPNHALRFAIQDWLRRSRR

SEQ ID NO: 67653 - protein, 61 aa, Zea Mays
MYGAVGWAHIRTFFINYDAWVDIYATLYESLCFCTIPVIHFLRLYSGNENDIQNLHACNEN

SEQ ID NO: 67654 - protein, 189 aa, Zea Mays
MGSFVKLARRAVETDAPVMVKIQELLRGAKDVMSLAQGVVYWQPPESAMAKVEKIIREPTLSKYGSDDGLPELREALFEKLRRENKLTKSSVMVTAGANQAFVNLVLTLCDAGDSVVMFAPYYFNAYMSFQMTGVTDILVGGSDPKTLHPDVDWLEKVLKENDPIPKLVTVVNPEDFRSVQKRWCMACG

SEQ ID NO: 67655 - protein, 371 aa, Zea Mays
MRATLILPVLKQDQIWKDQSKFEDIFDVDHFINYLKDDVRIVRDIPDWFTEKDELFTSIKRTVKNIPKYASAQFYIDNVLPRIKEKRIMSIKPFVDRLGYDNVPTEINRLRCRVNYHALKFLPDIEEMAVKLAARMRNKTGSINPYMALHLRFEKGMVGLSFCDFAGTREEKAMMAAYRQKEWPRRFKNGSHLWPLALQKRKEGRCPLEPGEIAVILRALGYTSGTQIYVASGQVYGGKNRMAPLRNMFPNLVTKEELASAEELAPFRRHVTSLAALDFLVCLRSDAFVMTHGGNFAKLIIGARRYAGHRLKSVKPDKGLMSKSLGDPDMGWASFTEDVVVTHRTRTGLPEPTFPGYDLWENPLTPCMCRA

SEQ ID NO: 67656 - protein, 535 aa, Zea Mays
MKDQTFDLGLVNEINPVIGILPFLGSKAKLTAELEKVDEKLKLTESLLESKNLELKKTNDEKKAAMAAQFAAEATLRRVHGAQKDDDMPPIEAILAPLEAELKLCRKEIAKLQDDNRALDRLTKQKEAALLEAERTVQIAMAKAAMVDDMQNKNQELMKQIEICQEENKILDRLHRQKVAEVEKLSQTVRELEEDVLQGGAAANVVRDYQRKVQEMNEEKKIRDRELARAKVTANRVAVVVANEWKDANDKVMPVKQWLEERRFLQGEMQQLRDKLAIAERTARSEAQLKEKYQLRLKVLEDGLRGTPSGSCRPSMEGKCISNGPPRRLSLGGADSISKISPNGVLMRRSPSFNSRSPLSTSSCLVLKHAGRTSKSFDGGTRSLDQGKVLGSGPHSLNRSTDAVRDCETADSWKANAEEKSNETANNDSADMVSGVLYDVLQKEVVSLRKACHEKDQTLKDKEDAMEMLAKKVDTLHKAKEVEAKKKRQEIAALEKKFAAVCLEQERLGNLRGPGTSQTVSGRTASRGGLTRNLQ

SEQ ID NO: 67657 - protein, 519 aa, Zea Mays
MRDPFDAPVDLINPDHNGGNKLSRTGAVSAGDYGLQNGPKSFAPNSDTLVRHQVQVASLHKDLVLEDPNTRIMDPETKELYFRSQSQGDEILLLRKKIAEASLKELRLLGEKHILERRLTDLRMAVDEKQEEAISGALQQLNQKKTHLEDNMRLANELKVEEEELYFFTSSLLSMLAEYNIRPPQINASIITTVTKRLYQQMHLKLRSLNDNLGDMTQPGNIYNPNLQQVTLSRNEPSPSYNLDSNRNTLQQYAQGPSDRHMDQMDTGGTTPSNYFEGDRRVDGDSQLYQPDGDALPGIEGFQIAGEPRPGFQLTACGFPTNGTTLCNFQWVRHLENGTRQSIEGATMYDYVVTADDVGTFLAVDCTPMDDNGRQGDLVTEFANNGNKITCDPEMQSHIDAYISNGRAEFEVFVLQAYSPEEWELATLVLTRPNYQIKFKKTGEAIIDEKYSQSLQMKIPNGRTTQFVLVTAGATLPFNTQGISEPNNEDYDVRLRDLIVLVMRTFQKKALDAKRKVNT

SEQ ID NO: 67658 - protein, 576 aa, Zea Mays
MNENEEDEPDNRIPDMIRELYPTNDQGRGKSMFAALLEEMKHELYPGAPYTRFSFLVKLLHIKSFYRISNVAFTAILKLLSSAFPDCSLPASYHEAKNVINALGLGYDSIHVCPNNCVLFRKEYAKHDECLVCGASRWKDSTDGKKHIPEKVLRHFPIIPRLKRFFASKKISEETQWHLLKRKALENELSHPADGETWKDFDRKYEWFAKDGRNIRLGLATDGFNPFGKMNSSYSMWPIFIIPYNFPPWECVEQSNFMMGLLIPGPSCPGKDLDVFLEPLIEELQELWKGVSTFDALTGKDFDLHAVVIWCIHDYPALSTLSGRVTKGYYACVHCDKNPCSRRIKNKICYIGHRRFLPWDHIWRTKKWFDGKEDHLEKPEEFSTDELMQQLERVKDVRPGQHPQSKKRKREVDGQCWKRRSSLWDLPYWSNLKLRHNLDVMHIEKNICESIIGTFLGIIGKTKDTINARLDLEEMSIRKHLHLKRDGNSYTVPHAPYVMNRSQKLVFCDFLRRVKFPDGYASNLAKSITSDGCNLQGLKTHDCHILLQRILPVAIRGIMHRDIYEAIAELGYTRKS

SEQ ID NO: 67659 - protein, 160 aa, Zea Mays
MSNKSAKVISQGSADMLPNLSGGAWDPHNHNSIASISDSSLHLWDLRSMEKSSAIEHAHIRDVDYNPKKQHIIATTEDDFGICLWDLRMLKLPLKDLPGHSHCPSGSPNRQEEPLLNSYTDYEDSIYGIAWSSHDPSLFASLSYDGRVVLESVKPYLQRK

SEQ ID NO: 67660 - protein, 114 aa, Zea Mays
MGGSPVWDGTLSPDSFNTSAAALVKRWKEIEVDDSLPEWTWKPCSKFGGAVGGRRVSSPGKSVPQLWNKPGADRRDEVRWCRGCSLGKCFCELLIDKLAKSDLHLTPAQQLEFI

SEQ ID NO: 67661 - protein, 464 aa, Zea Mays
MPRYQVGSTKGDSSSRRHSEEWRQPSTDDVRMSKPGSRYFTAFGVDLSPDNMAVAIVYFVQGVLGLARLAVSFYLKDDLHLDPAETAVVSGFSSLPWLIKPLYGFIRSYLFLSGLLGALSWSLMATVVSSKYSAAFSILLGSLSVAFSDVVVDSMVVERARGESQSTSGSLQSLCWGSSAFGGIVSAYFSGSLVDTYGVRFVFGVTAFLPLMTSAVAVLVNEHGIPSGEHNTFLSGSGFVESSKQHVRQLWASVKQPNILLPTLFIFLWQATPQSDSAMFFFITNKLGFTPEFLGRVKLVTSFASLLGVGLYNYFLKEVALRKIFLVTTIIGSALGMTQVLLVTGLNRQLGISDEWFSIGDSLIITVLGQASFMPVLVLAAKLCPPGMEATLFATLMSISNAGSVTGGLVGAGLTRIFGVTRDTFGNLPLLIVVCNLSSLLPLPLLGLLPEGSGDTDNGETKNN

SEQ ID NO: 67662 - protein, 77 aa, Zea Mays
MTSFMAACLVSIKKTKDLPPDQLQKALRKTFSAEKKKSKIRKALDGTKVIYNVASWGATAVGVYNNRALHTVATTTF

SEQ ID NO: 67663 - protein, 867 aa, Zea Mays
MDFGDYANRPSTSSAVSRGISPRLQLASDGVGTVSKGSDLADGLDRPSTSYATPRGMSPRCRVASDAINVTSERIKFTEKDSRTVSSSVAPRGVSTLRQLASDGVKTISKSMDLVEKDTRPTTSSAASRGLSPRRRLSSDGVNVIIKSMDLVENNNKLVTMSAAARGVSPRRRLASDVSNVISMSIDLIENSNKPLAMSAVARGVSPRRQLTSDGIECISKSTDITEKCIRPSTPSTSSRGFSPRRRLASDGINAALNKEFADKNCRPSSSSAALRGVSPRSRVASNAISTGMTFAEKDSRLSTASSASCQTLQSSRLESDGVNTLSKGVESPSTASGCISDSKLDDTGALVKNIYVTEKLIVSTEYGGDGYDPGRTDSSDIATSAVSSSLASQEPSLRPVTDDDKNASENVVVNQKGNRTLTVKVPSRGASPTRRLASDGTDTISKSMDFAEEDKKPMTVPSRGMSPRRTARSESANIMSKIMDFADECNGPVSSMVPSRVFSTRRVLGPDGVNAMSRSMDLTDKTRQQISLTVQPSRVSPRKTPLAYNRRKGPEILSGDVESPGSADGNEGQEENASSSPDGPSNNSEKSTPPKQLARGSSSPSRVLIRPSSPSNASSSPSFASRRLPSPSRTRPSTPVSPCSSARSDSGSSILSYIVDATRGKKSPAHMEYVHQLRLLHNRNLQWRFTNSYVDEMLSIQKLSAETMLYSVWDANSRMCDNMVMKRSYVQRLRQEVKLGIVLKEQMDYLDHWAALQTEHSSSLSSATEAIKASTLRLPVSGGAKADVLTVKNAVSSAVDIMQAMGSSICHLLSKLQASHSLVTELSAVAAKESILLNEYRELLATAAALQVQESSLRTQLIQQTE

SEQ ID NO: 67664 - protein, 407 aa, Zea Mays
MAKLVGTANVLCESLNTFVSNTLFLLFFVFLDLLPFFGAQSAILALDDTVLDADQVENLIKFTPTKDEIELLKGYKGDKQVLGECEQFFMELMKLPRVESKLRVFSFKIQFRSQVSDLKRNLNIVNSSAEEIRGSVKLKRIMQTILSLGNALNQGTARGSAVGFRLDSLLKLSDTRARNNKMTLMHYLSKVLSEKLPELLDFPKDLSSLELAAKIQLKSLAEEMQAVNKGLEKVEQELTTSENDGPVSEIFRKTLKDFLIGAEAEVRSLTSLYSNVGRNADALALYFGEDPARCPFEQVVTTLQNFVRLFTRSHEENCKQLDLEKKKALKEAEDNSKQLDLEKKKTQKEAETEKIKKKSDSEKACKKELENDKSSKKDSANEKGKLNNPIKELDISLQSPAQTASAK

SEQ ID NO: 67665 - protein, 630 aa, Zea Mays
MEFTGTKKDVEMAGQLNTELSSREHALPALLIKVPSQAIAGFDCVPAAADAAVVSLNEPGDRAEDVAISILPAPARAYGGDAHGVPYSVSLSMPASPSGFHLSSHFMCAGDAPVATADVRPVLLEDQRQAAAAAHSPRLIKQTRFHSQPILNLHPPSKNVVDEAAARRWDSARDTRFDPFKTFSGRLERQLSNLRGRPQEPVDGISPDSKISEEETDQVPAADRYFDALEGPELDTLRATEVPVLPKDEKWPFLLRFPISAFGMCLGVSSQAILWKTLASAAPTAFLHVSPAVSHALWYAALALTVLVSGIYLLKVVFYFEAVRREFYHPIRANFFFAPWIACLFLALGAPRLVAEMHHGVWYALMAPIFCLELKIYGQWMSGGQRRLSKVANPSNHLSIVGNFVGALLGAKMGLREGPVFFFAVGLAHYMVLFVTLYQRLPTNMTLPKELHPVFFLFVAAPSVASMAWAKINGQFDAGARIAYFIALFLYMSLAVRINFFRGFRFSLAWWAYTFPMTGASVAAITYATEVDNVLTRALCIGLSGISTVTVAGLLVTTVFHAFVLRDLFPNDVSIAITRKKPKFSKILAHFRSSSSDMKELVLSLPRTAQSDSGETETEPSVTAKSRAEP

SEQ ID NO: 67666 - protein, 1060 aa, Zea Mays
MDMERGAGSEQGSPDSEMGEGDNDSVGYGAEMEVDAGSGSAPASSASASASVSASAYAARAGAFDGVDPFEGMEFDDEEDAWTFYNVYAHRVGFSTRISVMHRSRRDGSVMSRQFVCAKEGFRTYRGKNEVSRADAADAGDDDSGRGRRTRAVTRVGCKAMIRVKKQDNGRWSVTKLETAHNHPLVPTNQAHCLRPHKPLSECGKHRPFGGHRNGGSLLAIEPPPPPLTPPVPHTSVAQVVPQYFSDGIGNATRVILDYVKRMQAEDPAFFYAMQFVEGRPVGNVFWADARARTTYKDFGDAVVLDDYCKRSKHELPLVAFTGVNHHCQPILFGCAIMAHNNEVSFVWLFETFLLAMSGCHPTSLIMEHDNVLKPAALKVFPLTRLQFCKWHIMNEAHDKLSYLLDAFPSFHDDFINCINMSETINEFEENWKALISKASSQKSEWLDLVYNCRHHWVPVYLRDTFFGDVSLKLQCSSRSSLFEGYISAKTDSQSFIQQYEKALDCCYEKEVKEEFETKYSLPDIKTSSPIEKQGAELYTRSMFLKFQQELICATAYTAEMVKEEGNASIYTVAISEGSEKSVTVQFCSSGSSATCSCRMFEYFGIVCRHILTVFGVRGVSALPSHYFVKRWTKNALDRSLGKNVDEVSREELKEEPRSSAEDGEQSLTWRYNSLCHEALRYAEEGASSLEVYIVAMQALQEAANRVNMAKRGIGQVAPLAVMPIAAQPPESFARNQEITSNKQKKRKKNSSSSRENATSNQLMYVRQPVNFLFVAPGSSSALQGPSQLVAAPPVSLSSKYGQTSGANNSVDDNIPPASVVDKFSGLPDQNAPATSTGNLQGGVTKSIGADSRIKESHELSQANGNRGCSVNTLNSSAARQLVTVPIGLCLPPTDGSEISAACLNSVDSGDISSNGKLSLGLHQSQSSAQQPATPSQTKTLDSIDCRANPEGSSIRAAAIAAGARIGSPSDAATIIKAAQSKGAIYIRPGEIIPNYLKPLAPKPLSSLPPMNPGQLRRFGDSAAAKDAIFGSSDGTDDDDEEDTDDEEDDELTDNDAEHE

SEQ ID NO: 67667 - protein, 121 aa, Zea Mays
MVAHPLQPHLVATGTNIGIILSEFDPRALPAIAPLPTPTGNKEHSAVYIVERELKLLNFQLSNTANPSLGNAGVASDAGRSMNNSIEQLIVKQTKKHISTPAPHDSYSVLSVSSSGKRIPF

SEQ ID NO: 67668 - protein, 954 aa, Zea Mays
MRGSANEPGIIPLAVHDLFQRIQEHMDREFLVRMSYMEIYNEDINDLLVPEHRKLQIHESIEKGIFVAGLREEIVTCAEQVMDFMSFGESHRHIGETNMNLYSSRSHTIFRMVIESREKGDDNEVEDFCDAVRVSVLNLVDLAGSERAAKTGAEGVRLKEGSHINKSLMTLGTVIKKLSEGIESQGGHVPYRDSKLTRILQPALGGNSNTAIICNITLAQIHTDETKSSLQFASRALRVTNCACVNEILTDAALLKRQRKEIEELRAKLRKSESDHWEEEILNLRNTLLQSELEKERISLELEEEKKAKEQRDRCLIEQAKKIENLSSLVLNSDRDDRSTAFSKNKRRVTWCPGPNAKQFDIEDLRPVQEGSTSSTVRNERDMGMPPLFEELMQESNDEPCANVYSSGPGNVSKDSEDVPLPDSHALLHVTNRRKPKAMKKSDQEQFRGRAGELLIPQDPCDGNDALRHKNTVPCVVSSLSSRESEAILVIKQLQDQIKLLEAEKSSVQTNLDAVLVLATQQKVSFNEEYEELQQITLAAEEQAKVANENLSTLSATVKSKQELAYEFLGNLLMETQGINVEMDQWRNSVDSALSFIDELFQNLCIMAQGIREVNHSAHEDSARSCSVIRDYEKLSTCLMDKVYKLELEKKLLEEQSQDQQNEIYKLKANLESCEKAIDDCTLQHELEKDAILLELLNLQKEVSILSSSSLMKEKESIRKELDRTKSKLRETEDKLKNSIQEKTKLQSEKAEAHKEIKKLQSQRTLLERDLRKRDSATVDKRHELNSMPQESSGAFGHMQENYQNLEMHAFDMDAEIYSLQEALVTSIDEKDEALSKVGLITSELEDLANKLNLAESERNSFSNEITLLTEKLIASESSLKSLETSLNSVSREKEDLGMQLTDALLDMESERSIWTAKEKEYVEANHRLNICLDENHKLSEDLMKCINGLPTFS

SEQ ID NO: 67669 - protein, 64 aa, Zea Mays
MMTPQAAPCRHLLLRHAQRRLSQPRVLPRHRCHGHGPHIPCPRHRNWDMVTVHDGCTSFDSCWR

SEQ ID NO: 67670 - protein, 252 aa, Zea Mays
MATEEWELREEDAYAYEFEFDLENPFTSPADEPIASLLDAEGHHAPSISAAASATRRAAAAFISKMQRVATFSTADIQRDEDFMFDAVTIRRMERVVLGALEWRARSVTPLAFLGFFLSACYPPPQHPPQVAAVKARAVDLLLHAQPEVKMAEFSPSVVAAAALLAAAGEVAAANLHAFQASLAACPFEKLRECGEVLAAAGGVGRGRAAPSADTPVTVLGHQRSASSASETDWINGGDAKKRCMGPPSQWG

SEQ ID NO: 67671 - protein, 399 aa, Zea Mays
MGSFLWKQPSYLFILIILHLVAHEARTLSSDGEALLAFKKAVTNSDGVFLNWREQDADPCNWKGVRCDSHSKRVIDLILAYHRLVGPIPPEIGKLNQLQTLSLQGNSLYGSLPPELGNCTKLQQLYLQGNYLSGYIPSEFGDLVELEALDLSSNTLSGSVPHSLDKLSKLTLFNVSMNFLTGAIPSSGSLVNFNETSFVGNLGLCGKQINLVCKDALQSSSNGLQSPSPDDMINKRNGKNSTRLVISAVATVGALLLVALMCFWGCFLYKNFGKKDMRGFRVELCGGSSVVMFHGDLPYSSKDILKKLETIDEENIIGAGGFGTVYKLAMDDGNVFALKRIVKTNEGLDRFFDRELEILGSVKHRYLVNLRGYCNSPSSKLLIYDYLQGGSLDEVLHGF

SEQ ID NO: 67672 - protein, 155 aa, Zea Mays
MFQTMDTDNSGAITYDELKEGLRKYGSTLKDTEIRDLMDAADIDNNGTIDYIEFIAATLHLNKLEREEHLVAAFSYFDKDGSGYITVDELQQACKEHNMPDAFLDDVINEADQDNDGRIDYGEFVAMMTKGNMGVGRRTMRNSLNISMRDAPGAF

SEQ ID NO: 67673 - protein, 169 aa, Zea Mays
MEPFLGGGEMIADVFEDKSTYAEPPSRFEAGTPAIGEAIGLGAAIDYLSCIGMEQIHEYEKELGTYLYESLLSVPNVQIYGPAPSQTVHRAPLCSFNIENVHPTDIAEILDLQHSVAIRSGHHCAQILHRTLGINASARASLHFYNTKDEVDTFVDALKATVDFLTDRY

SEQ ID NO: 67674 - protein, 687 aa, Zea Mays
MSFNHQIRGAVTALSFRTDGQPLLASGGSSGVISIWNLEKRRLHSVIREAHDGSIVSLHFFANEPILMSSAADNSVKMWIFDSNDGGARLLRFRSGHSAPPRCIRFYGNGKCILSAGQDRAFRLFSVIQDQQSRELSQRHVAKRAKKLRVKEEEIKLKPVVTFDCAEIRARDWCNVVTCHMDTPQAYVWRLQNFVIGEHVLTPSSSTVTPIKACVISACGNFTILGTEGGWIEKFNLQSGFSRGSYIDTSLAMQCAHDGEVVGLACDARNGFLISAGYQGDIKAWDFKTCKLKSRLDVGKSVTKIAFHRPNGLLATVAGDMVLILFDTVSMKMVRRFEGHTDRITDLCFSEDGKWLISSSMDGTLRIWDISLARQIDAMHVDVSITSISMSPNMDVLATTHVDQNGVYLWVNQSLFSVSTNTENYASGKHVRNVCLPAVSSTERSEEEQVQNLGESYKSSIKPFVITDHQIPNLVTLSLLPKSQWQSLTNLDIIKVRNKPIEPPKKPEKAPFFLPSVPSLSGEILFEPPASSKDTDISTTKNTNHKMSELSSHFSQQLQFCGETKNYSAFTDYLKGLSPSSLDMELRMLQILDDEESEDLEQRPELQSISSLLDYFIHELSFRNNFEFVQAVLKLFLKIHGETIRRHSMLQSKVKKLLEVQSLVWQKIDKIFQGARCMVTFLSNSQF

SEQ ID NO: 67675 - protein, 119 aa, Zea Mays
MVGKRPDTEAGRLACWGWSWACHTDCCMRWRGARPSRRVCRGGARRRAPPWLCRRAADRTHGMGARASYLDDSCNHVLSLSDEHGDTNGSWNMVFAWKDYGSYRTGGASVPICSPETVG

SEQ ID NO: 67676 - protein, 75 aa, Zea Mays
MPPGNGWSHPQDLRVQQQRLSFFSSPTSIAYSISSTVLFTSQEKVGRGPCSSARISTATIATHTGTFLKPSSFNA

SEQ ID NO: 67677 - protein, 167 aa, Zea Mays
MMVARLLNLEEAEKERIYEKDVDMKYVQGEQHVVGREDSGVNAHSTSRFGEGSNGDELDVSRNSTRAGKGRSGGSASAELESFPSKKPKYDPVLPASKWSREDDISDDEDRKGGRGLGLSYSSGSDIADGLGKVDTTEASTDHTSRHHDTIVDEEHSGSGSMHTGIV

SEQ ID NO: 67678 - protein, 264 aa, Zea Mays
MLTQGDHMKDALQQIQDAVYLTKANIVRSNEETLKTIQRSPHPSRTLSDYKSVPGNDSQKLDPVLALSSDGYDMVMPMPPLWLAPLQHQYDRPCDLCDVLKDLVAGALPLAYKQQRTLDLTEISHPLHVAVEESALRKALSNLIEGALLRTQHGGVVQICAVEAPAGGALVVIDDDGPDMQYMTQMRSLAPFGSDLADGMLEDNMTWNFIAGLTVARELLEEYGCVLRVISPRRTDAVIGTGGSRVEIWLPSFQTQAAKTSQEV

SEQ ID NO: 67679 - protein, 1058 aa, Zea Mays
MIFGIALGFNLLFEYDDLITGICFATVVPNLLPYAISHLGKKMEGTINACIAGFALLSYVLGLLVSQPQIPLTMNVIFPKISGESAYSLMALLGANIMAHNFYIHSSVVQGQKKSSAVGLGALFHDHLFSILFIFTGIFMVNYVLMNSAAAESTNTLLITFQDVVELMNQIFVNPLAPTIFLVVLLFSSHIISLTSAIGSQVISHHLFGINLPLSGHRLLLKVFAIVPTLYWAKVAGAEGIYQLLIICQIIQAMLLPSSVVPLFRVASSRSIMGAHRVSLHLEILVFLAFLLMLFSNIIFVAEMLFGDSGWMNNLKGYTGSPVVLPYTVLVLVALISVAFSLYLAVTPLRSGSHEAESHEWSVHSQRELLNTSQEREDVKVDNVTYEEDQRSDVVPSPRDVPDSHPELALDYIDTSDTAVESDHDSQQSTAYASTAPETCSSPSFTREESKSVVAVNWPEPLEKVPTSTVMEESTVENVVSRITTERDVLVETDVVSGKDKEDIRTLESEKSIVDSTPYVSDDGPPSLTFSRGKGSDAGNGSGSLSRLSGLGRAARRQLAATLDEFWGHLFDYHGKLTQEASTKKFGILLGIDLRTPSTSVRTDKQAAEILKSPLVRDSMRGAAFLSSSVDMMSPKNETSNLELAYGLQRGPGMGLSSWSQGMQLPNTQLQSSSNSLLEQSARLNSNFSSSYSDNNQFYQPATIHGYQLTSYLKQMNASPSLYSSMPLDPQRLPKSSVSAVPNYADSMMHARNHNLLASLGGTTTQLPATSRVGSMMPERSYYDPSSVDGNENAGSPAYSKKYHSSPDMSGIIAASRAALLNEAKLGAAIGPQSYLSRLAAERSQYASSTARPAAPLAFDELSPPKLQSDIFSAQSSMRPSARSLWAKQPFEQLFGMSSAELSKGDFNLPGRSGGVAKDDFSYKESETKLLQSLRLCIMKLLKLEGSGWLFKQNGGCDEDLIDRVAAAEKLLMQGTAENQLLLHGGDLQQHSSDQAGIQYMRTLPNCGEDCVWRASLVVSFGVWCVRRVLDMSLVESRPELWGKYTYVLNRLQGWTII

SEQ ID NO: 67680 - protein, 117 aa, Zea Mays
MFLCAHELPGPTSTSSMSMGDAAAPFPPWPWRPPALPCQRPGNAQDQHPTLPSAPFCTAFGSREFFFFPARRSSLGARRRPCSPPPSFSLSAAARSPCSVRCHGVQLFCAAVPVQKK

SEQ ID NO: 67681 - protein, 283 aa, Zea Mays
MLLDICSSVYCWTYCWIQCICCSAILQLEVPQKNYSFAQISWYGLRWILSFLLMEGMTHFFHYNAFVVSRLWQQLSPFEVFIISYGVLNFMWLKFFLIWRYFRFWSLVGGVETPENMPRCINNCHDLESFWKSWHASFNKWLVRYLYIPLGGSQRKLLSIWVIFTFVAVWHDLEWKLISWAWLTCLFFIPEILVKSLSSKFQATSSLGMLVHREFKAIAGAVTISCLMVANLVGYVVGPSGIKVLISRMAGKDALPSLAFIFTTFYVGVKLMFHIRDASKNQG

SEQ ID NO: 67682 - protein, 729 aa, Zea Mays
MLDPAYEHIVLVHYRDVLEGSISVSARNDSSTLNQNGSASRAEVHSSPGWTSELIAHCTNSCSPGSAEEVSSQISASESDLIQHKAALRKLKMQLSLEDKEDCDVNAEDVPADNEPIILPVIQNEEPGTSRNHDDIFDVLDFSEDHINGTGTHPCHSAIDVLKNSDTWLEDDQLEAILHPACMTLTENQWFRIHEVSPESAFSYESTKVIIVGDFLCNPPHSSWQVLFGDVKVCVEIIQQGVIRCHTPCLDAGKVRMCLLDGNGKSCSEAREFEFLEKPTKCMIDGNTNPCNEAQDVKLHQIPTKSSEELSLLLHYVHTLFDGHASGLFSNFSLPLQNLGCGIQSNQMDVMKKAYKQLDPENVVSSVMEVLLNDKFKQWLSSKCEQNIDGDHLLPKQYRNIIHTVAALGYDLALKPLLSSGVPINYRDANGWTALHWAARFGREDMVVALLTAGAAAGALSHPTSEDPAAKTPASIALAYGFKGLSAFLSEAQLTTHLDSIESKENGKLDSREEGICRAVDRISDKSSHVHGGTDDQLALKDSLGAVRNAVQAAGRIQAAFRIFSFKKKKEMALGNRNSCCLSISEAGAVSHDMLEKAVLSIQKNFRCWKKRKEFLKMRNNVVRIQARVRAHQERNKYKELISSVGILEKVMIRWYHKGVGLRGFNSGAMTIDEEVDEDVAKVFRKLRVETAIDEAVSRVSCIIGSPKAMHQYRRMLNRYQQTKDDQEK

SEQ ID NO: 67683 - protein, 120 aa, Zea Mays
MVSKGVIRERPRSAEEAREFINGYSGDRAFAVNFVLVTDLSTGTTRGGWDVPEIRFQHIPDEFIDQVVNQGDMTCVAGGLKLTHPSVQPFVKELVGTVDSVRGLPRELTEKLIRESLQGK

SEQ ID NO: 67684 - protein, 91 aa, Zea Mays
MASFNQESRAGTQREEAPLQGKYGGISPKKALINKDHERAYFDSADWVLGKQGVSSNSPTTVPAAEPLKPKLQRTAYHQLPPRRPAYTSSE

SEQ ID NO: 67685 - protein, 769 aa, Zea Mays
MMGRLCQFFLCQGATLRTDTWLLVATVLRDYEHTEAEAADGPAMKYTIYIVTEPVMPLSEKLKELNLGGTQRDEYFAWGLHQISKAVSFLNNDCKLVHGNVCLASVVVTQTLDWKLHAFDVLSEFDANNEASGSPMLQFEWLVGTQYKPMELSKSDWASIRKSPPWAIDSWGLGCLIYELFSGAKLARTEDLRNTASIPKSLLPDYQRLLNSTPSRRLNPSKLIDNSEFFQNKLVETIQFMEILNLKDTFEKDSFFRKLPNIAEQLPREIVLKKLLPVLASSLEFGSAAAPALTVLLKMGSWLPADQFNIKVLPTIVKLFASNDRAIRACLLHHINQFGESMSAQIVDEQVFPHVATGFSDTDGTIRELTLKSMLVLAPKLSQRTISGSLLKYLSKLQVDEEPGIRTNTTILLGNIAGYMNDGTRKRVLINAFTVRALRDTFPPARAAGIMALSVTSSYYEMTEIATRILPNIVVLTFDPNSDVRTKAFQATDQFLQIAKQHHEKLNTGDNSVAESTGVKLKPGNAGLLGWAMSSVTQKGKPFDHAPISTANANNSQASTTSTATPDTQASTLAYAPSTSTSLDQAASASARSSVDGWGELEDGNIHEENSSDKDGWDDVDPFEDKPSPSLLSNIQAAQKRPVVQPKQPVANSSKPNPLKAPKSEDDPLWGPIAAAPPKSAVKSADIKPSTSHNDEDDLWGSIAAPPKSSGKPLKPAVANSDDLWGAIAAPPPATKARPLASSGRGRGTKPAQPKLGAQRIGRTSSTGM

SEQ ID NO: 67686 - protein, 90 aa, Zea Mays
MADVMQQVADVIDRALFMLDLLSSAIVSCTCASQKRGKSRKCRPLCNYSDPGGRRNCLDGVSHFSRVQGPVQVHARMMHARQAVPSDCST

SEQ ID NO: 67687 - protein, 574 aa, Zea Mays
MGQPRRRGYPHGRHHRCPRGIALPAAGAGLLFLSVSLLSVSLLSAPPLADPRPGLGTSSSSRRFLRRHPARGGWTGQDDLWGSKLASNFHGCSNSSSRFLDSGITTQPDRYLIVVTSGGLNQQRTGIVDAVVAARILNATLVVPKLDQTSFWKDSSNFSEIFDMDWFISFLAKDVRIIKEPPEKGGKAMKPYKMRVPRKCTPRCYLNRVLPALLKKHVIRMTKYDYRLSNKLDTDLQKLRCRVNYHSLRFTDPIQELAEKLIQRMREKNRYFIALHLRFEPDMLAFSGCYYGGGEKERRELAAIRRRWRTLHIRDPEKGRRQGRCPLTPEEVGLMLRALGYRSDVHIYVASGEIYGGEDTLASLKALFPNFHTKETLSSQEELAPFLKFSSRMAAIDFIVCEESDAFVANNIGNMAKILAGQRRYFGHKRTIRPNAKQLYPLFMKRGNMSWDAFASQVRTIQKGYMGEPMEITPGRGEFHANPAACICEKTSRNSAIVKSISGNNLEPVTDSGIRKTIGISRPPYPVYTDEEADGSDTEEDPDSSGRGEVIDTEPDDDSAVRQEDPELEEILSD

SEQ ID NO: 67688 - protein, 332 aa, Zea Mays
MADVQGDNEAVLEDDAFPDDGPLDTEEGGGGEPISGGDEEEEEDVDGLASFLESEILSGSSDEDPIDQSNWLPRQEQRQQKEEGDAAKNKRKQGSGSDGDGCSGSEGEQTKRARREEKRRQAKGKAVAPQIDTGLFSNVPPELFLQIFKFLSSEDLISCALVCRFMNAAASDETLWRRLYCMRWGLASNAKFRECAWKNLYIQRDREDMVEFVRNTPTEFKEYYIQMQAAKRSQAPRPSEVNDDKVMLDKTVADQVSSWKNSRGLTDEAVKGHSCSGNTCSYTQIGDAYICEKTGRVHVGCFFVRYLATALRGGCVLMMNGMLMIPICNRLV

SEQ ID NO: 67689 - protein, 211 aa, Zea Mays
MNEYRLPSGEADRYQKEISLCKVYKRPGIEDNFHLSTTTARSSGSKAAANMDKKHHRTSASPRLAPMFDGGHSSAHMNKPYGGANTAIAITSSAAARAVTMVPQTSMFLSTPSLSSTTSTEEDGTSLYLMKGANNSPMLHSSTHALLNANSATMATIPIDELSRAIGSYSSQGNPNHPLPSQGPLLPFPSMEKIWDWNPLLESPKVCTSFK

SEQ ID NO: 67690 - protein, 112 aa, Zea Mays
MDTFLDRLFEYIGTKEVYHEKYLNATSADDQSCNPGQMMDGAQINVDVTAPGAILALALIFLKAESEEIAARLNIPNTYFDLQYVRPDFVMLRIIARNLILWSSQVWYFQHE

SEQ ID NO: 67691 - protein, 415 aa, Zea Mays
MELDLNVAEVAPEKPSAALEASDSGSSGSSVLNAEAASAGGGGPAPGEEGSSSTPAVLEFSILRSDSDAAGADADDGDATPSPPRHHQQQLVTRELFPAPQHWAELGFFRAGPQQQPDIRVLPHPHPYPPPPPPAQPQQAKKSRRGPRSRSSQYRGVTFYRRTGRWESHIWDCGKQVYLGGFDTAHAAARAYDRAAIKFRGVDADINFNLSDYDDDMKQMKSLSKEEFVHALRRQSTGFSRGSSKYRGVTLHKCGRWEARMGQFLGKKAYDKAAIKCNGREAVTNFEPSTYDGELLLTAEASAEVADDVDLNLSISQPASSQSPKRDKNCLGPQLHHHHGRPFDGSAVLKKTKIDAPSELSSAGRPHRSFLPHLVAAEHLPPRSHPFFITHHEVRRHYTVLNHLQRFVKLARLAS

SEQ ID NO: 67692 - protein, 83 aa, Zea Mays
MALKKVPYVGHCSSIYREDELPLYRFTIMPIKVLHTLFTNDIKTITYFLRFWLCGSQPLLFSYFLFGSCPKSLPLVVVFSTCT

SEQ ID NO: 67693 - protein, 801 aa, Zea Mays
MEAAVGRRVVASLAAVVAMVLMMLPSFGGAAAARATGTGEASNCTRSCGNISIPYPFGIEPGCYLAAWFNLTCDHSYEPAKLFLGDGTVQVLEISVANGTVRINSTRLLYTVGGVSTTSGTWGRGLPPGGPFFLSESRSSVALVGCGAQVEVRGGVDNSLVASCAAVCPLDGDGRIVVDSSGACAGVGCCQANIVLGYDFYSIRINKLNGSVYALTASVYFVDQGFRNAQDMISAVYGYFPESLPATLEWVTSNYTCPTPYEYSHDPPPVNGECSMEHSVCLEGPYNVADRGSRCGGGVGYRGNPYVGDGCQDIDECTSPSTYSCYGDCKNIPGDFICQCPHGYYGNASLPNGCQDINECEYPEAHSCYGVCLNFPGTFQCQCPSGTYGNSSQKWGCLTIKNTTAVSGLGIGLGVSGGTILLLLTFGSPLIIRKAKERKAKKTREKYFRQNHGLLLQQLISHKADIGERMIVTLRELEKATDNFDRSRIVGGGGHGVVFKGILGLHVVAVKRSKIVVQREIDEFVNEVAVLSQVNHRNVVRLLGCCLETEVPLLVYEFISNGTLYHHLHVQGPVSLRWNDRARIALQVAKALSYLHSATSKPIFHRDIKSSNVLLDDTLTAKVSDFGASRYIPIDQTGVTTAIQGTIGYLDPMYYYTGRLTDKSDVFSYGVLLIELLTRKKPFAYRSDAGDGIVSYFVSLLAQGRLLEIMDPQVIDEEDGEIQEVAALAAMCTKLKGEDRPTMREVEMTLENLLVKKKHVPCDTSLRDEEIVARWMSNEQVSTETSSRQYTMEEDTLLSGR

SEQ ID NO: 67694 - protein, 64 aa, Zea Mays
MGRKASHVALECALQSHPNMVKFSPLIQPLLRQFPGRLRIPSHRLIFEVCVSLNTNIASVENRN

SEQ ID NO: 67695 - protein, 86 aa, Zea Mays
MLRKMPILFLRDRVKRRRAEAKKESKDDIVVASLSSSKQHKGSPDLAELSKGLPTGWQAYLDESTKQVYYGNSLTSETSWERPTNE

SEQ ID NO: 67696 - protein, 84 aa, Zea Mays
MRVTKIARSERGKEEGGEIDGWTVTAIKTREEANGGRIGAFESGAEMRYYRGGRRQELRGRLGTANSSSNRWELRRCDGRTVHG

SEQ ID NO: 67697 - protein, 96 aa, Zea Mays
MANRTRRGHGVSAMLARSTRFDESLTEISGTTGPAYNIDNLVKSLKFVTNKRAYGPYGRDEGTPFRVKVMNNGHVAGFFGRSGDCLDAIGLYVNPN

SEQ ID NO: 67698 - protein, 651 aa, Zea Mays
MDINILLSEFGDFSDFFQQEELDFGEPPGTAESHALVIPASDCGDVTFTDSPSTAMDIPEQRLSPVGFTTLDAFDHQIMAPAQDVVAKVQEPHNDTATPAQSHSQVLSSGRFDYLTKAEAKLTFAPEYAAVEILIAEAPTPLFTNPYFPRSKKPGSSSFSARVYSYDVAQSSQIESTGDKPDKTSKLISGNHLHDISSSNLYTLVQGGNKGSDKILKSTDTQPSKGELSPPISGVTSFNFSLVSQKKSGNMFNAGYFLLSMKTALATEIECITFQAAMCRIRHTLLSLRSKASAEFNSATSSFIQTNVSNKSDLTPRSLMDNVGVWRPVVTPKGPKSLESLSANTLTGASPSLSIQRQPVVDLLCAMTLLVQQSTSFVDMSLDMDDGDGSFFWLSLDEQKRRGFSCDPSMVHAGCGGLLGTCHSKDCAGVDLVDPLSAEVSEPSMISLLQSDIRVALKAAFANMDGPLSVIDWCRGRGNAAESAGTGDAYSFQYSSGDILEPSSSLSIGGDSMSPPQPTSSNRGISELEFQKGYHRVRPTIAVLPSPSMLVGYQDDWLKASVNSLKTWEKAPFEPYALPKPVTYYALCPDIDMLTSAVADFFMQLGTVYEVCKLGTHSPQNNGGQMELSPGKYLPSGLVLVDCPEQLKKDT

SEQ ID NO: 67699 - protein, 320 aa, Zea Mays
MVTSGEQSAGGGSAARASKLRYPLRSASKGKAAVVSPAADAPPTISAPRRAKPSSDVSKSMCLDLSVKDNSAKPPRRHSIQTKPGASPRPTPSGTVTPVSGVRSKRSESQGRFDTPTSEVSMSISRRKFSTLSSISYWMTQIRLAEAASKHSVSLGFFKLALESECEPLDRMREELKSYVARHGLATELEDPVKDILQVYDILDDFEKLKISAEPSQQPKKSDKAARTATNASPNGNLKPRSLNSDATESKEAVKKESIQKVNPGARIRGSCNRNPVKNTTAKEAVAKNTADVVKEITHEDKENMGDIEMAVDVAVAQDI

SEQ ID NO: 67700 - protein, 261 aa, Zea Mays
MCAPYGTNHNRMCVDVIKMGGKVSCMITHGPWVLIGIPKFVEAWNTKTGMKLRFQGPSSLVCSMAITDEMLFAGTGDGRIMAWRFPAKESNTEPVLILSGHQRPVISLSISARRLYSGSLDKTIKAWDLTTRQCVQTLSEHKAAVTSVLCWDEKLLSCSLDKTVKLWTLSESGNLQVKYTHAEENGLRTLFGMHRVGKTPVLLCSLHNSNRVRLLDLPSFDGIGTLLSTKEVRTIELAAGGLLFTGDCSGELKVWRWAPKD

SEQ ID NO: 67701 - protein, 669 aa, Zea Mays
MYLGMILDVQVALKCSYIETTGCLGQFLALGAKASSWCRKHIVCSIESVDDSEDVQQEEHSKILPEIILMALNISIKILPSAAKCVTVDMVHNIGDFISELLSLMESSIVDNDKKIHGAALDITKAAPVFLDETTKLCRAYSEATKVDNCTMSITDEDATVKHNKQGLASDVIRITSSTIQTMCRLGTYAASSGGSQVILLNVSWKGVVSLLQSGKGMIEGKVNVREIIVTLLSLSIESLRVAAETWCAPLLETLGATEARRAFLPIKFFLINAVRICSTYPSEAMIIYKNIINCAVVITSSSILFSKKPQLKAANETLVELLEPTLFVLLDTLMKSSDLTPESKCQLAHHFFENEEDKSPDLMGQANQREINLASLDCIFSMDSDVDHRNRALLPAELLVFLHFLNASSWLTEMVVITLSKKLQTLLNILTSEDIYSYVLGFQIPALNGADQSPAVVWQPVYTSIIQALKAFMISTVASSAAWNELEAFLLENIFHPHFLCLEIITELWCFFIRYAETETSINLVNQVSLLLKTVASPEDVLSPLSALRKVARSLCIILSYASSATVDQIYTCVLNGENSSKSSILHLALLMEGFPLDSLSDGTKELAMKKMFTSFAGYLESYSKNHRVINVPTCKLGVVGLPIHALASALQHSANRQWLPLCQLSVT

SEQ ID NO: 67702 - protein, 707 aa, Zea Mays
MPPGADASSLAAAVLDAGTPPAAAAATSRVLDYLSRHADDQPRAFFADAFPSLLYRLFVSAPSSPSFIDLAAADPALGDLILSLIYPTGPLLAAAAAADRLTLIRYVFPSERLPDWLRLALASPPSTDLASPLLSRRVASELHLSVFEYYLFWFAYYPVSSASSAAPAASASNPRLTSRARLETWVSTLATTAIRKSGQKPENSLYLRLLYAYLREFVPTRTPPVNMSGGGTLLHRAPSHGVDAIDSFARAEFFLHTLVHFWLVGDDFSPLPKQTCHALGLRLPSRAHADLSERPPSPGLGDAVKLLVMYLNCCDGRALADACVPSPQGLSVSNGLCDTQVGFWNPLIQRPLYRFVLRTFLFCPIGTAIKNASQVFSVWLAYMEPWKVTQQELDRYGKQQGGDEKEPQTTKMVYNSSWRTYVLSNYLFYNSMVVHFLGFAHKFIHSDVASVLLMVHKVLEVLSSSPELLGLLHKVDAACHSRLVASSPASDHVLKYVPSIREQLKDWEDGLSESDADGSLLHEHWNSDLRLFSYDENGAYNLLQLLLVRAESEILRLPGETQQALQTLDSIKSQMKTAFQGHIERINGNTSLEESHNQQHQVRGEVFTPKHPSLRKGSWADVKYKGSPAGATYIQFDGNTTVGGPRDAARMALGAVCSFMVLVGQAVLKLMRSHRVKISLRVFASKKLLSAAVVLYAVVAVTRNVSR

SEQ ID NO: 67703 - protein, 91 aa, Zea Mays
MCTYVNFPSYIDIYPSNFIIFSEYQFCYLGCGLGAALYILGIATDRIKIRYCKYLFPVIFAVATNIRSRPYLRVKNYIHVRAYRVSDIHRI

SEQ ID NO: 67704 - protein, 66 aa, Zea Mays
MNFGRRPRAEYYEGFTFVIKLTKIIQSNIKCETIKINTLEINDIIYISYYMNLRCLNIIFRYIYTF

SEQ ID NO: 67705 - protein, 102 aa, Zea Mays
MAAELRIDMRTDGYVRVRDLLKLNLQTFAKAPLKSHTVDEIREAVRQDNKQRFSLLEEDGELLIRANQGHTVTTVTSESLLKPILSPDEVSEKTLTRFCNLG

SEQ ID NO: 67706 - protein, 353 aa, Zea Mays
MYVSAHLPFLVTLSSPAFPSSPPFRTSSTPANNFTSHDLAGALEDMQVAAAAASMRGTETVGAKSAARRLSRVLVGRRRRAAVLLLALAYAAAMLMLTIGGSEGSGSSGVVAGVLRRGAQSAPPGSVYRSHLVFERLLPEMRAFASRPNPLVTSQYKKFGKQWEPCISKGLIHSELPPSNGFLIVEANGGLNQQRISICDAIAVAKILNATLVTPAFHLNSVWRDSSKFGDIFDEDHFIESLRKYVRVVKDLPEDVFLRFNHNISIIPNMRTKAFSPPSYYLQHVLPKLLELGAVRIAPFSNRLAHSVPMNIQALRCLTNYKALRFSEPIRILADNMVDRMIKRSFLSGGKTW

SEQ ID NO: 67707 - protein, 1881 aa, Zea Mays
MQEGLGQRMHVPHGINLCIATSSMPFQAQSFIEPSTGQVNPPVTSENLSANSQAVNDAGAVEGTDMNEKSVQKPKRKKHRPKVIKEGQSAKLQKPKTPKPPKENGNQPTGKRKYVRRKGLSAPAEQIPLCADTHTRAKPGVVQRCLDFDVEDQHGHLDLVPQTQETEIQTGPADTQPSISGVERSNVQISYHWGGTSSSISSVDPIAGIHGLQADCNSKRVSFDLNNSIVSQLPTNYSSPMDSSEQFFNFDLREEVRTNQLLPHLTSSVDHTRHPSVNFDQYISTSQDCPEKSPRHYQMVSSYRILENMTTASQYTERVSMGGNFNPEACMGEDAIIKQMAQSYRPLESPFVPPNHNERDMMNGNLNEFPVKNDYLKFSTNSNYQTGAGFDHCSPDYSDVLAMGTKREHDAISGHQISLGIDFINSNRTRKFCSDDPLSTSSQTSYCPQSCKRMRPEDHSNQLHGTMGKLSSASAFSDGLNTNKVSAMNPRIGTLADVQLLMALEKSKASQQMFEFDYVTSQNNMIHERTGLALQNIADKGFIALPNKQFPSFAAQNIPLPGSTVNQLGESNTLRNGVHQIQPWEITYRLHDSRDNFSLPGNTQFSNGTVNPSSENYIQSNAIHEHQCLENVVAKVPVLSETQNTSTQEGHNHCTAATTDEHIRTTSDEVVRSLTRRASQPTTNGNYNIKSSRVTAEANCTEKPRKRGRPRKVVNPNGEPKERGTKGKQNVGHAELISPKGSCADFLKTNGITYASESSTGITPRMSTVELKSSDQDKEIHGGAMPQATAASVDPLDGIIEKIKLLTINGPDKGVSEVPKNALVPYEGEFSALIAFEGKAKKSRPRAKVNIDPVTTMMWNLLMGPDMGDDAEGLDKDKEKWLDEERRVFRGRVDSFIARMHLVQGDRRFSRWKGSVVDSVVGVFLTQNVSDHLSSSAFMAVAAKFPVKIEVPKKPVAEMSHTPEQKDSCSGLFGDSIKLQGNIYIEEISDIKSLITTEDNEESNNNELIGNSAGNGVNCATGGCHVSYSVVETEDGSLEDVISSQNSAVSSQNSPDYVVRRTDPIGSSSLQNFTEEGCIMRNMSNGTGISTDYTLFLPIQDPKGMLGLSEYCGLNPLPVSGVNKDMLLDLNRSYQPLHTYMPYDQNSESDFTGVSCLNHMGKSFHTGPDKVNLSSVTQSEASLYPIDPLEQGDFSPLIKQNFQPLHSSDEVPFFKEHSSCNDFLRNKTEAHFLEPLVCSNPQEVYTTSTDQMGAEQSQSGCGQKYNDARVQTASHERHQSSTLCDNQNSCSVVLQGVASDSTQKFVDTQKGPSKARQNGSKAKVRGRPKKKTDDWDSLRKKVLSNGGDKQRSHDARDTVDWEAVRQAEVREISETIRERGMNNMLAERIKEFLNRLVTDHGSIDLEWLRDVQPDKAKDFLLSIRGLGLKSVECVRLLTLHHMAFPVDTNVGRICVRLGWVPLQPLPESLQLHLLEMYPMLEHIQKYLWPRLCKLDQRTLYELHYQMITFGKVFCTKSKPNCNSCPMRAECKHFASAFASARLALPAPEEKCLVTLEDPNVVEFSHQTYINSGSVGQLEWSANYPKHAVSGNHQPIIEEPLSPECETENIEAHEGAIEDFFCEESDEIPTINLNIEEFTQNLKDYMQANNVEIEYADMSKALVAITPDAASIPTPKLKNVNRLRTEHQVYELPDSHPLLEGFEQREPDDPCPYLLSIWTPGETAQSIDAPKTFCDSGETGRLCGSSTCFSCNNIREMQAQKVRGTLLIPCRTAMRGSFPLNGTYFQVNEVFADHCSSQNPIDVPRSWIWDLPRRTVYFGTSVPTIFRGLTTEEIQRCFWRGFVCVRGFDRTVRAPRPLYARLHFPVSKVVRGKKPGAARAEE

SEQ ID NO: 67708 - protein, 589 aa, Zea Mays
MGSGQVVLVGRVTPGSSIQKELVKEAKLCAAMVVVLGANKKYSFGGSSCLAKYCAKKLPPTTTVVAIQDGKAVFVREAPRPPLGAEPKPVLRTVLHPSVGLEPKVIIPNPNRRARSMSMDLDAPCCGHGAADAPASRCLDDATKGDGGVAPEQRLGWPLLRRAHAAAAASAAPVQTPGGKNHEPRKQSVVHWVMSLPRRSAPSESAEPHAGAGLESELKAMLGGSGARCRWFRYEELYDSTNHFSAENLIGNGGNSRVYRGSLACGRQVAIKLCKASAEASKDFLREVDIITKLQHHRIVPLIGVCVEGRNLISVYRYLPRGSLEDNLHGERSKPALSWENRYKAALGIAEALSYLHSGSPRPVIHRDVKSSNILLAEEFEPQLSDFGLAIWAPTNPTSVTHSDVVGTFGYLAPEYFMYGKVTDRVDVYALGVVLLELLSGRKSISSDGSSPKGQESLVMWATPVLSSGNICDLLDPRLDVKHDEVEVRRMASAASLCLRRSARLRPPISQILSILRGESAASIADQGATEPDCVDDEAYPAANVRSHLGLALLDVEDSESISSTEHSSGLSPLEEYLRERWSRSSSFD

SEQ ID NO: 67709 - protein, 109 aa, Zea Mays
MFVTASFKFCFFKDQDSHAFLKKKEEEERKTGIQPVKKIGKAESPNLQSFVKQQFSGTPPDQQKVNTLGPEDRPKDTTHTEDATTDNERYTEPTGTGATFKPGTWQPPT

SEQ ID NO: 67710 - protein, 84 aa, Zea Mays
MLDNMFGTLDKYVAVSMCGCACFCVLCVMNLELFWNIGARKGASRMEHPSVWLCVMNLEHYSMRQQLCHCVFLNMCARVMCAYL

SEQ ID NO: 67711 - protein, 805 aa, Zea Mays
MSQSFDINVLREEARSRWLKPSEVYYILQNHERFPITHEAPKKPPSGSLFLYNRRVNRYFRRDGHTWRRKKDGRTVGEAHERLKVGNVDALSCYYAHGEQNPSFQRRCFWMLEPAYEHIVLVQYREVDVVRNYSSQLSNGLPEPLSSLGYPNAICGNQYHSSSSGASECSESHQSYSNLSSVTEVSSYSGNKEYTKNDGGLLSIPEVGHTCLQQNRTDNGNSKNKSGLNIALKKIAEQLSLGEDDDDYIFSNQAHSVGGDNQVKHIQQEGTQKGLSRNIAPSWEDVLQSSSGLPISSIYQQSDVEYQKNSEYHPPERLDSSDLRIQLAAAKKFLLGPEATVDSPSLNSVLRNRANCVTDTISAYDSRFGSSLNPDWQTKTALTFQSNSQGSEITELFDHGHFEHYSREDTTFSLGQTNKFNIREISPEWAFSYEITKVIITGDFLCNPSNLGWAVMFGDSEVPAKVVQPGVLLCHTPLHCSGNLRICITSGNREVCSEFKDFEFRSKPSSSFTDIAPSSRHLKSSEELLILAKFARMLLSGNGNPEVPDGDPQSGQCPKLKMDEGLWDRLIEELKVGCESPLSSVDWILEELLKSKLQKWLSVKLRGFNGTDSISKHDQGIIHLISALGYEWALSSVLSVGVGLNFRDSNGWTALHWAAYFGSCSFRRNTKVAKVATFLNMRRNAVKIQAHVRGHQVRKKYRTIVSTVSVLEKVILRWRRKGHGLRGFRAEQQSMVEAIEEDDEEDDDFDDDEAVKIFRRQKVDQAVKEAVSRVLSMVDSTEARMQYRRMLEEFRQATNWKDQMK

SEQ ID NO: 67712 - protein, 263 aa, Zea Mays
MTHGLAVGFGSLRCGPSVSSSSATIHRTLVAPPRRSLRICSSTFPPPPAPAIEGRDVSLSVTTRRGRVLPVLKGCSLLVPPGQLWMLLGPNGCGKSTLLKVVMPTVGSDVAFGLGKLKLPLDEVRLRVSKSLDAVGMLSYSQRPIQTLSGGQKQRVAIAGALAEASKVLLLDELTTFLDEHDQIGVINAVRDSVAADGEVAALWVTHRLEELKYADGAIYMEDGQIIIQGDVSTISKFIKKKQAYMNTAWPGKSLVPAAYTRL

SEQ ID NO: 67713 - protein, 188 aa, Zea Mays
MEEGLVSVDKFSGGSQAYFLTHLHQDHTRGLGAVGGWRHGPLYCSPTTARLLPIRFPGIDASLLRPLAPGSLMYLFRGDLGCMLYTGDFRWELGCDEARRAKQDLLDALDGDTIDVLYLDNTYCHPSLNFPPRPVVAEQVIDIIRSHPDHEVIIGVDTLGKEDLLLHISRALQTKVRLIFSTYSIFYF

SEQ ID NO: 67714 - protein, 361 aa, Zea Mays
MSEADRIRHRTAALVLHDDEVRDKPDAKANVFADLGSPVSPLRARASVATSSSSSSGSAKSPAPSNAGMAGGRSHSGELVGECNPPRLMAHRRSGSGQLIFSGGSSRGSGGGGGDRGSTASSPILNALPSGNICPSGRVPATAAPPPPRSRPDVLGSGTGHYGHGSIMRGAGMAPARSSIDSSSFLGHSSRSPASFPASSGSLQEVTRLGNEWYKKGKYGEALRHYERAVALCPESAACRGNRAAALIGLGRLADALRECEEAVRLDPASGRGHSRVAGICLRLGMIDKARRHFTQAGHLQQSDPTDWQKLQEVEVHLGRCTDARKIGDWKSTLREADAAIAAASCLEVRSTSPPSQAGGG

SEQ ID NO: 67715 - protein, 195 aa, Zea Mays
MPLSLLSVSVVEHQQSTSSPLAERFPRGAQDPSQTRSAPWSVCHLADASSAPPPVARPYLLLSPWRLPLDPSLREPSPAARQCRPQSPMAQELPILLLLGRRRWARPVSRFLCSSSNRLKVFQFVSSSNRYSSSAPWRSQPSMPCPCNLVSSSCPPWWRRRFSSTLPKCSMICSGGHRRSCKKIKSDHDVVRYVN

SEQ ID NO: 67716 - protein, 105 aa, Zea Mays
MASRVKEDERHEKILRGLLKLPANKRCINCNNLGPQYACTNFWTFVCTNCSGAHREFTHRVKSVSMAKFTAQEVTALQEGGNEVTCICFFFYFSHQSHVFYSTRH

SEQ ID NO: 67717 - protein, 136 aa, Zea Mays
MATALFPASSRVPLCPAMVSDSSPPLSPSSSARSLLLHGRAVFPTAPPLCSAMAIASSSLRALGPQLNLPRPCSLRPRAPSLSSSLLWCWLPQHLLPSPRCLVIPVLPHIVSLPLRVCMAPQRSHTNNHCRCPWLG

SEQ ID NO: 67718 - protein, 299 aa, Zea Mays
MRVKRRDTEQWMAHRLLPENLKDRIMRHEQYRWQETRGVDEEGLLKNLPKDLRREIKRHLCLSLLMKVPMFENMDEQLLDAMCDRLKPMLYTEGSCIIREGDPVNEMLFIMRGTLESTTTNGGQTGFFNSNVLKGGDFCGEELLTWALDPTSASNLPGSTRTVKTLSEVEAFALRADDLKFVATQFRRLHSKQLQHTFRFYSQQWRTWAACFIQAAWHRYCRKKLEEALYEKEKRLQAAIVSDGTTSLSLGAALYASRFAGNMMRILRRNATRKARLQERVPARLLQKPAEPNFFAEDS

SEQ ID NO: 67719 - protein, 334 aa, Zea Mays
MVSNPAPSSAPRYSAYSLPSTHLPGEDILFCIDADLEVHAKMKSAAVASSGSTSTASPQSVGADGAPAVGTRTVVAREPPTLRLTHPKPDKDGYPHIFDYFAVQTHDFLVPLWLPPDLAFARIDHRAAAVTYHGALPRRARRDDGGRVPEDGTDDRRAEEEARRWHCARTLRGDDAHGGEDGVPGRPAGACVHGAVRAKMEKYAAKKSAAQAKEKRAVWEWDYESFVDVSWRFRRLFPPTRWACEFNTALTVPFFRWLVGPSEVEVGGLRQRSEVRIEKCRYLESSGCVGMCVNMCKVPTQDFFTNEFGLPLTMDPKRLCRPSIDLNQHSLSGT

SEQ ID NO: 67720 - protein, 123 aa, Zea Mays
MQSGPAGSDKADYGSIGASIAGQTIQSEIPVFVQPEASNMNRSAATGMRSPSFGSPTERSLSCVAPSPTDPLLIHGRVSDASKPGQSEQRAASQPPVQTWHQIDGVTTELERSMQQSILPTSC

SEQ ID NO: 67721 - protein, 476 aa, Zea Mays
MSLLSRHARHPTTPPPASFSGGVETPPRRRVPKENVDPSSPARNHHSALDHGASPFRSPSSAAKPLSARNRLPPRPPSSNPLKRKLEVSPAAAAVGSAHDAAPGLDSGVQVVVRIRPSCWVDEEEAGEDGRGPEACVRKTAANSVAIQGQDFTFDAVADSVSTQEDIFTLVGLPLVENCLSGFNSSIFAYGQTGSGKTYTMWGPLSALSEDSLSSERGLTPRVFEQLFSRINEEQVKHADKELTYNCICSFLEIYNEQITDLLDPSQKNLQVREDVRTACVYVESLTKELVFTLKDVTQLLVKGLANRRTGATSANADSSRSHCVFTCVIKMDSKNPEDGSSITRSSRINLVDLAGSERQKLTHAAGDRLKEAGNINRSLSQLGNLINILAEISQSGKQRHHVPYRDSKLTFLLQESLGGNAKLAMICAVSPSQSCKSETLSTLRFAQRAKAIKNNAVVNEEKIEDVNALREQIRQ

SEQ ID NO: 67722 - protein, 341 aa, Zea Mays
MPQMEGSTDQIAAGWFAKEPASERPVGLPRTGSSSRLNAQAPEFVPRGPPPPAPAVVLPPPPQVIRMFAAPPPPPRGGFFSAPQPRPFEYYAPIGERSGFAAKEQQAPELEAEMLPPAAVKTEPVVDGLDDEVVHKITKQVEYYFSDINLATTEHLMRFITKDSEGFVPISVIAGFKKVKTSVRNNVMLAAALRTSSKLVVSDDGKRVKRQQPFTESDLQELQSRIVVAENLPGDPSYQNLKKIFSAVGSLISIRTCYPQTPNGTGPATNRSSKLDMLFANKLHAFVEYETPEDAAKAILELNDEKNWRNGLRVRLLNTCTVLFGSPSGAGRCLCILHLLI

SEQ ID NO: 67723 - protein, 87 aa, Zea Mays
MTYVALNPCICQLATGVLKTRSGSCPPRAQIHHRPASCHGGYTLLSPSLHSHCVLSYSGISLPEAKLTHDEACDQLKGPRSAGLHSL

SEQ ID NO: 67724 - protein, 103 aa, Zea Mays
MATDSEASKAAEVVVDWHKQDKKRMLHAVYRVGDLDRTIKYYTECFGMKLLRKRDVPDEKYTNAFLGFGPENTNFAVELTNFAEVSRPTCVAPLPGSVLAVPL

SEQ ID NO: 67725 - protein, 352 aa, Zea Mays
MTICSSEEIIDEFELLTRDARRVQQDTLRKILELNGDAEYLNRFNLGRRTDSKSFKSCIPLCVHSDIESYIQRIADGDDSPVLTGKPITSLSLSSGTTQGKPKFLPFNDELLESTFQIFRTSYAFRNREYPIVNGKALQFVYGSKQVFTQGGILAATATTNLYRSQRFKEAMKDVMTQCCSPDEVIFGPDFHQSLYCHLLCGLINSDEVQFVFSPFAHSLVHAFHSLEEVWEDLCADIRDGVLSKRVTAPSIRQAVSKILRPNPELASSIYIKCQSLSNWYGVIPTLWPNVKYIYGIMTGSMEPYLKKLRHYAGHLPLLSADYGASEGWVGSNINPTLPPEEVYTDTDWEIL

SEQ ID NO: 67726 - protein, 140 aa, Zea Mays
MEAAAATALPFAAAVPTAWRVRASPRTRRRSVAAKLERGLGKGVPTTNYVVPLDKATGMTRPLVEILRDLNKRVPDKIIDPDTNTVNWYHANRMLSFYAPGWCGEVRDVIYSENGTVTVVYRVILKGTDGERCHGHSTVT

SEQ ID NO: 67727 - protein, 144 aa, Zea Mays
MCIWKSRRSKEVLDFVWDLDSDLPFPSPLIQYVSEAIQPLSFGNSRYARLFRVVHAPVFLQSFASDRSHMKDPEGNWIQLPPKYEPIVAEDGTTNNLNEYIMMSVGDVADRERMANDVYCNKHGVVLNETIFPEFFAQLPAPHT

SEQ ID NO: 67728 - protein, 366 aa, Zea Mays
MPKLVLLIFQIKVNSIAIVCMRSMDRGPEHTINRGFYVAEGAKMCSVEQVRVAQALYVSGSLFNHSCQPNVHAYFLSRAFVLRTTEFIKSGSPVELSYGPQVGEMHISERQKSLQENYYFSCQCSSCSELNLSDLVMNSFCCPQSNCLGAISESTYYRSKENFVNVSLGGSYVCKLSLPDVSKVDMDMENVAKSLLQNSGVSLNIDHGCCMSCRSCIDLSSALATSHREESTIDRLKKHTFLDKTLITEALQSLKQLKKLRHPYSKALAQAEDTIAEAFAKVGDQELARKHCEASIQILEKLYHPKHIIIAHELIKLVSILLSLGDGASAAATFAQAEAIFSLYYGSHVEKVLTYMGALKKAVIDV

SEQ ID NO: 67729 - protein, 423 aa, Zea Mays
MDWDLKMPVSWDLPDLEHDAMPPPPPVSAASTAAASGIAAAAAAPSSATAPSRAECSVDLKLGGLGEFGAADGTATKEPAAATAAPSASPMKRPRLGPGGAGGAQCPSCAVDGCKADLSKCRDYHRRHKVCEAHSKTPVVVVAGREMRFCQQCSRFHLLLEFDEAKRSCRKRLDGHNRRRRKPQPDTMNSGSFMTSQQGTRFSSFPAPRPEPSWSGVIKSEDSSYYTHHPVLSNRPHVAGTSTSPAYSKEGRRFPFLQDGDQVSFSASGAGTLEVSTVCQPLLKTTAAVAPPPPESSKMLAPVLDSDCALSLLSSPANSSSVDVSRMVQPAERIPMAQPLVPGLQHHQFGGSPVPDWFAGSGAVPAAGTGGFACPHSVESEQFNTVLVPSSDGGHEMNYHGIFHVGGEGSSDGTSPSLPFSWQ

SEQ ID NO: 67730 - protein, 286 aa, Zea Mays
MRPAFSASKPSPSGREKGRRKGASAAEQLLTGQAVPLRTRLHDALALGLTKSDGHGAKKWQSTDAGVQSHVLKSVGAFVGCLSNELLRLPPIKESISDILVALEGILKTENVSVLIQAADVSSKFFSTLGNSVRQYSVLEMVSCLSCHLSANQLRIALPCASALTCILNNQVTARASTQAEIWEALDKTNAVASVISTLQNYTEDVHPLNYLTEMISLLRSILWIWPSSRYHVWSNHNLMAKLAHYCLTAETTVSAKILKLYAALGTSVPVLYVAMEQWSFLRMKS

SEQ ID NO: 67731 - protein, 128 aa, Zea Mays
MNHGFVCRLHKETHRLIKPVFEESAMDRNVPKQNKMQVVLHKNQVHINQLHSGRLNCNTTTSAITEKSGIRPTVICCKYFVFRSTTERVKRSPRTDASMVFYMVPRVRKLSVALKRSALCHFNTLTQM

SEQ ID NO: 67732 - protein, 236 aa, Zea Mays
MHDRSHKPQPPEAGEGAGGGNVDRVLFKNLVEMVPLVESLMDRRVNSAYSRRTSLVYTPAPPKKASELESVKLPQSVSAKKRRDPGDVSKKSTPDSNGDNGLVVPLSLSGAENKPKDDVAGLREQVDYLQKKLLEKEEALRSAESLVTEMNAAYATIDELRRLVSDKEALIRSTNSQLHDAKIMLADKQASVEKLEWEVKMSNKKVEDLQGDVSNMGFEISSLMAFFDKISENLSE

SEQ ID NO: 67733 - protein, 76 aa, Zea Mays
MRKFYEGGFQPTMNRREAALILGVRETANAEKVKEAHKRVMVANHPDAGGSHYLASKINEAKDVLSGKTKGGGSAF

SEQ ID NO: 67734 - protein, 371 aa, Zea Mays
MDEHTTLLSLLEKHLIPGPWKDQLTQYRNTKLHDLKLFIQKCAKQSESPYRLLNIEEPLRPQLRGILVVEYPTINVFLPSDNCDFEMEKMVNRLPKDGKGPGSMTDEPPVEGSKFHEEEIEEGELSPETEIIDLKDHGTSNACKISPADVTSESKIVNNVDSSVLSYPGCQAQALHGQPKGLNQYSKISPNGTSGPAETKSRMEVCPLDMEKTRESGLSSEGRVVDLKGYGISYPVSTAEAGGAALSKIDTKATYPLVPSSTSIVVSDGATGPQLEHSQQNKRTPSSTPEALKRKSCMKVYPLDIDEGLFPEVPDLAFEQEMLDTYPELFENMDVDDFLSCDFAMVNRDEPVDATSGLPRDDLEEGEIPTL

SEQ ID NO: 67735 - protein, 319 aa, Zea Mays
MFNHRLDDAARHHGSAEAIPERLAVVTGGNKGVGLEVCRQLALKGVTVILTARDEKRGKDAAETLRRECQLPNIIFHQLDVRDDDSATTLARYVERRYGKLDILVNNAAISGIVADEEGLKALNIDAETWTSGRAANLLKEVFQNTNDEAFNCLNTNYYGCKRVTEALLPLLKLSTSGGARIVNASSLASELKRMPNEKLRNDLSNIDIWDEDRIEAVLDTFLEDLRSGRLEEAGWPVMLPAYSVSKMVINLYTRIMARRYPEMRINCVRPGFVKTDINWNLGVLTPEQGARGPVMLALLPDDGPTGCYFDQTEMVNVW

SEQ ID NO: 67736 - protein, 303 aa, Zea Mays
MGWHLEAHSRLNHLPPALNEVHDSIDIDADDTLEPARTDKRLNWSHEEDVRLVSSWLQNSLDPVDGNDKKSDYYWTDVTNTYNSTTPSNRRRNRNQLKIRWDRVKKPLSEFHGCWVRTTRVFQSGQSDDQRTDNALQLYASEHNGKPFLLQHIWRVVRHERKWAAYVDKLINAKDNRATPSPVVNVEDSPTKRPTGKKKAKEERFGKRKAPEAISAIGEKLEKFIEASSKVEKMAQVQQCLADKKLEVAKINHKAAQEQTKCKMIDLYKDLLCGSTAGLSEEALAERSKALECMRLSLFAPDN

SEQ ID NO: 67737 - protein, 553 aa, Zea Mays
MQYAYGATRLVLMDYDKSRRSNSKKRTHSNSDDGKRKRLNTRHDDTSMFSEPIETIYRILCPVKKIGSVLGRGGDIVKALREETKAKIRVADSIPGADERVIIIFNYQNEPEPTDEAAEEKNSDGLGNFKSHCFAQDALLKIHDKIVSDEIHDEVANDEKSESADDVTARILVQGNQVGCLLGKGGSIIQQLRSNTGAGIRVLPSENLPQCALKSDELVQISGAPSLVRKALYEISTRLHQHPRKENRPLEEIIDASTQRKRESPTLQHEYSMLPHLHSDHTPPIPLLDPYRSGPQYPVTETEEFSIRILCASELIGSVIGKSGANVRRVEQQTGARIKVQEIDKDASGERLIIISSNEIPAEPISPAIEALILLHDKVSAPSEKHHSSTRLVVPSSKVGCIIGEGGKVITDMRRRTGAEIRVYSKADKPKYLSFDDELVQAAGQIHGREDYREPTSATGRFLSTIELRIPNSSLGSIVGAGGVNLAEIRQVSGARLRLHEAHAGSSESVVEIQGTLDQAKAAQSLLQGFISANSRQQQQPYSSRMPLYPSWG

SEQ ID NO: 67738 - protein, 75 aa, Zea Mays
MLLSKALRMQQDLEDKKHEIIIEGLESKIKDQAAVLEKKDFELQTMEGLLAEAEAKIAKLDKELLSKSESFEQEK

SEQ ID NO: 67739 - protein, 535 aa, Zea Mays
MIDIIVDGEVNDEYMKTLETLSKKIKFIDADPMVKSSKALKDVQPEVERLRQKAVSKIFEFVIQKFYALRKPKTNIQILQQSVLLKYKYTINFLKEHAKEIYAEVRTAYIDTMNKVLSAHFRAYIQALEKLQMDIATSTDLLGVETRSTGFIFSIGKEPLKTRPSVFALGERINILKEIDQPALIPHIAEAKSQKYSYEVLFRSLQKLLIDTATSEYLFTDDFFGEESIFHDIFAGPIQVVDEHFNTVLLNCYDAIGIMLMIRIIHQHQLIMFKRRIPCLDSYLDKVNMSLWPRFKMVFDLHLNSLRNANIKTLWEDDVHPHYVTRRYAEFTASLVHLNVEHGDGQLDLNLERLRMAIEDLLVKLAKMFSKPKLQTVFLINNYDLTISILKEAGTEGGKAQQHFEEVLKSNIAIYVEELLLEQFSSLIRFVKSRPADETAANSEKASIAEVEPLVKDFASRYKAAIELMHYDVITSFSNFLCGMEILRATLAQLLLYYTRLSECVKRINGGSALNKDLVSISSILFEIKKYSRTF

SEQ ID NO: 67740 - protein, 879 aa, Zea Mays
MVLQTERAEMDGGLERNGVSSVADILAQDVHELHTSSIVHEDGVENNLLAQIPSFTIKIQNFLLHPKHNSQVDGKQMYDKDGNCTIKGRKLVKQIEIEVKKIRVVPQRPKLRATSSFRNLYMQAGSEYVRQISKILKSQVTMLTSTSSTSLPEEMFTCTLELQSSCKGHKRDSISPQYLKPGTGESQLFYLESQGDVILVEVQDNNRVVIGRAKIQVSSLTDTQQDEIIRWWPLYLDDQDCVGKVQLGMNLSMSSNNYGSEKMLQGGPAVDTIIYDMVLEAAMRAQNFNSKMLHINGPWIWLLDEFSDYYGISDAYRKLRYLSYIMNVAIPTKDCLELIYELIVPVTKAREDRTLTRQERSILIDCEDRIKSLLAALFENYKSLDEYSPTGLSDLFGPITDSAAPALAPAVQIFSVLHDILSKEAQDILRNYLQIAAAKRCRRHMIETDEFLSSNNDSLLTDPMTISAAYLKMKTLCINMSREIQADIKIHNQNILPSSIDLPNIAASLYSTELCKRLKGFLSSSPPSRPVQHVAELITATSEFERDLESWQVRPVHGGVISRQLFHDYIMVWIEDTRLQLLDNCKAEKISCPAVSTVSPFVEQMYEQIKESINEYGVVINRWPQYLMSLESAVADVEREIMKALEKQYMDILMPLRDGIPEKIEKQVQRLTRRQSIAPYVVPNQLGAFMNTVKRMLDVLHCRVEDILKSWAAYLTISCGNTVFGEQMNSITVMLKKKYKKYLQAIVDKLVSNTQANRNTRLKRILEETREADGESDIRDRMQAVRLQLSDSIHNLHEVFSSRIFVAICRGFWDRLGQIVLRFLESRKENRIWYRGSDYALGILDDVFASEMQKLLGSALQDKDLDPPQSVIDARSILC

SEQ ID NO: 67741 - protein, 59 aa, Zea Mays
MALPQRRSGEQLAMEWDAQRRRKLPLIKVKRKLPLQSPPKRFKQGSSIFKDSTDQKDQE

SEQ ID NO: 67742 - protein, 760 aa, Zea Mays
MGLFDRLPPMDHMRSEKMCFVQLIMPAESSRLAVTYLGELGLLQFKDLNEDKSPFQRIFVNQVKRCAEMSRKLKFFSDQINRAGLRSSVRPALEPDIDLEELEARLGEHEHELLEMNTNSDKLKQTYNELLEFKLVLSKAGHILASSHSHAASAEHELDENIYDNGIHEGNAYLLEQVEKAVFVVFFSGEQAKAKILKICDSFGASCYPVPEEMVKQRQIFNEVSARLSDLEVTLDAGIQHRNKALESIGSQLWRWTIMVKKEKAVYDTLNMLNFDVTKKCLVGEGWCPIFAKSQIKDCLQRSTIHSNSQVGTIFHEMDTIESPPTYFRTDKFTNAFQEIVDAYGVARYQEANPAVYSVVTFPFLFAVMFGDWGHGICLLLGALVLILREKRFSSQKLGSFMELAFGGRYVILLMAIFSIYCGLIYNEFFSVPFHIFGKSAYECRDKSCSDAHTFGLIKVREPYPFGVDPSWRGSRSELPFLNSLKMKMSILMGVAQMNLGIVLSYFDARYHGNALDIRYQFIPQMIFLNSLFGYLALLILIKWCTGSQADLYHVMIYMFLDPAGDLGENQLFWGQKELQILLLLLALIAVPWMLFPKPFILKKLHKERFQGHTYRFLGTSEMDPDSEPDSARARHDDFNFSEVFVHQMIHSIEFVLGAVSNTASYLRLWALSLAHSELSTVFYEKLLLLAWGYDSLIVKFVGLIVFSFATAFILLMMETLSAFLHALRLHWVEFMNKFYHGDGYKFKPFSFALLADDED

SEQ ID NO: 67743 - protein, 58 aa, Zea Mays
MSPSSSIAGCSCMFPCSVVRVLCALRQVRVDGATSELFPHGNPQLQRVRSALPAVALG

SEQ ID NO: 67744 - protein, 491 aa, Zea Mays
MCFYYKQQSRWAGCFSGLSCFGSQKGGKRIVPAARTSDGNGSNTRGNGLQSGANSNQNLPMNLSLLAPPSSPASFSNSALPSTAQSPNCFLSVSANSPGGPTSNMFAVGPYANEPQLVSPPVFSTYTTEPSTAPLTPPPELAHATTPSSPDVPYARFLSSSMGIKTASKDHNMPFLSTTYSGGSGLQTSYPLYPESPCSSLISPASVTPRTGLSSPIPEQEVPPAHWKTSRSACDTPYFRASPIPEQETTAQWKTSRSACDTPYARTSPTNIFGLDSSTPRNYMLDNNFFRPAASAQFYLDQAQQTFSHNGGRVSVSREKQGADEIEAYRASFGFSADEIVQSQSYVGIPDAVDESFSISPFGNNTPATEICPFSDLPNEVDKSCAYAKDDTSPKKSANQLSTDSPNKVLRLDVFKGTKGGHQSEDECIRKDGHLFRKTADEISLKPIEVRKKSLPGHSCSDAEIEYRRTRSLRDANGVLSRRSALARQLH

SEQ ID NO: 67745 - protein, 79 aa, Zea Mays
MGADWAWEMWAVKHVGPSGKPVQAALLLNYAPSGPSRLLPVVVEQERRQLSAFDMQPFLDFVKRGNLQTEFFSVGPTYV

SEQ ID NO: 67746 - protein, 130 aa, Zea Mays
MRLGVPFIAPRQLGAVESNQGRLILPSVDWHTGQSGAHRTLSGARFPSKYGTVDRWQPESRWRTGHVRCTPDSPVPPSSRWLGHVPRADCAADRWPCRPLAHRTVRCTLDSPVNYSRTSTMNSRERRVRL

SEQ ID NO: 67747 - protein, 90 aa, Zea Mays
MNYGERSENCATMLRQDHFSGLEPRKNLCCYNSFFSTTAASPLLVETGPELATKSPGHHAMCIGDLVVVAPSAIGGSCWFLMETTGIASS

SEQ ID NO: 67748 - protein, 373 aa, Zea Mays
MELCKGGELLDRILARGGKYSEEDAKVVMVQILSVVSFCHLQGVVHRDLKPENFLFSSKDENSPLKVIDFGLSDFVKPDERLNDIVGSAYYVAPEVLHRSYATEADMWSIGVIAYILLCGSRPFWARTESGIFRAVLKAEPSFDEAPWPTLTAEAKDFVKRLLNKDYRKRMTAAQALSHPWIRNSQQVKVPLDMIIYKLMRAYISSSSLRKSALRALAKTLTTDQLFYVREQFELLGPNKNGYISLQNLKSALAKNSTDAMKDSRVVDFVNTVCALQYRKLDFEEFAASAISVYQMEALETWEQHARRAYELFDKEGNRPIVIEELASELGLGPSVPLHVVLQDWVRHADGKLSFLGFIKLLHGVSSRSIPKA

SEQ ID NO: 67749 - protein, 106 aa, Zea Mays
MFLPPWYYNMLALNDLLKVNSGSIVIPIKRVLTDHVLRVWTVMLPFSQTSIYDQLQARCGLAVGMRITKVVSSLFSMFQCRVFQIGLLSGVCWFAWNQSGLAWIHE

SEQ ID NO: 67750 - protein, 854 aa, Zea Mays
MASVEVRKSRALRARSGPSKLQPARSMPLDYRYSAGASPANGAGGGPDANGVGRRAAAAEAENGGEVVVRLEGGDADSPYSSTAVTAAEEEEVGERGGGGDEVDSAATATPRRLSPRAAASPTEGDARWGDTSSYGAKKKHRVFCQLPNGDWALCTVITTSGDESVVKVSEGKVLRLKTECLQPANPEILDGVDDLMQLSYLSEPSVLYNLQYRYSKDMIYTKAGPVLVAVNPFKKVSLYGNEYIDAYRNKSMDSPHVYAIADAALCEMKRDEVNQSIIISGESGAGKTETAKIAMQYLASLGGGSGIEYEILQTNPILEAFGNAKTLRNDNSSRFGKLIEIHFSTTGRICGAMIQTFLLEKSRVVQCAVGERSYHIFYQLCAGAPASLKEKLNLKKVDGYKYLKQSCCYSIAGVDDAQMFRTVTQAMNIVHISKEDQESVFAMVSAVLWLGDVSFTVIDNENHVEIIVDEASKTVSELLGCSIEDLNLALSKRHMKVNNENIVQKLTLAQATDTRDALAKSVYASLFEWLVEQINKSLSVGKRRTGRSISILDIYGFESFDKNSFEQFCINYANERLQQHFNRHLFKLEQEEYVEDGIDWAKVDFEDNQDCLSLFEKKPLGLLSLLDEESTFPNATDLTFANKLKQHLDSNSCFRGERGKAFAVRHYAGEVAYDTSGFLEKNRDLLHMDSIQLLAKCKTSLPKMFASKMLVQSDNSMSVPYRSSAADSQKLSVAMKFKGQLFQLMQRLESTTPHFIRCIKPNNLQLPAIYEQGLVLQQLKCCGVLEVVRISRSGYPTRMTHQKFARRYGFLLEDVASQDPLSVSVAILHQFNILPEMYQVGYTKLFFRTDWQP

SEQ ID NO: 67751 - protein, 60 aa, Zea Mays
MQCNGTWRLSLAGSSSTAAGLMPYSLALLYLLSSSSTQYISVVVGSTCRLYWFLNSRSSA

SEQ ID NO: 67752 - protein, 345 aa, Zea Mays
MASPRGHRHRRANVPPPPKVPAVIVFGDSTVDTGNNNAIGTVLKSNFAPYGRDMAGGARPTGRFCNGRLPPDFVSEALGLPPLVPAYLDPAYGIQDFARGVCFASAGTGLDNKTAGVLSVIPLWKEVEHFREYKRRLRRHVGRGRARGIVSDALYVVSIGTNDFLENYFLLVTGRFAELTVGEYEDFLVAQAERFLGEIHRLGARRVTFAGLSPMGCLPLERTLNALRGGCVDEYNQVARDYNAKLLAMLRRLQAARPGLRVAYVDVYQNMLDLITNPSTLGLENVEEGCCATGKVEMSYLCNDKSPHTCADADKYFFWDSFHPTQKVNQFFAKKTLDLCYEQLL

SEQ ID NO: 67753 - protein, 400 aa, Zea Mays
MESLKKHCVGRAHWSLVIICIPAKESISGPIILHLDSLAMHPSTKILNTVERYLEKEWCQLSSWEDFKNNIHKQSVEVPRQNNEYDCGIFMLYYIERFIKEAPERFTIDKLDMFNRSWFKPEEASGLRRRIRELLLEEFESAKLDDALPGADASERDDSINDGELKPDASSDSSEMVVEVVGGLGGTDKSNEGIKVVASEEASGESGDAGKSTEGTVAASEEKSIEGINVAEPEDACESIGGIYVAESDEASGEFGEIGKTNKGTKVAVSEGASVSGYTDKNMEDISDSEVAVLDKAPTSSYRRGEKTTACVLSEAASLSDSVKDEQGMVKPDSGSSKAEREGDLIVIASPERSEGNDEIIGSMPITDVVCDSCDSDTETKVRIVKIHRRKFVPSCGCSN

SEQ ID NO: 67754 - protein, 331 aa, Zea Mays
MSWAAIENDPGVFTELLQQMQLKGLQVDEIYSLDLDALNDLQPIYGLIVLYKWRPPEKDERPVIKDAIPNLFFANQIINNACATQAILSVLLNSPGITLSDELKKLKEFAKDLPPELKGLAIVNCESIRMINNSLARSEVSEEQKRPSNGDDVYHFISYVPVDGVLYELDGLKEGPICLEKCPGGVGDAGWLRLAQPVIKGHIDLFSQNDVRCSVMAILKNRKEMCTVELKELKRKRESLLQQTGYPSAIRHVPSVEQSLAEVSAQIEAVTEKMIMEEEKVKTWKTENLRRKHNYVPFLFNFLKILEEKQQLNPLIEKAKAKQKSHCPSPR

SEQ ID NO: 67755 - protein, 162 aa, Zea Mays
MSSAASSPCHRLRRVALLLLVAAVLAGGTEGKAHDYGDALRKSLLYFEAQRSGRLPHSQRVAWRHHSGLTDGLEQGVDLVGGYYDAGDHVKFGLPMAFTVTMLSWSLIEYGGDVADAGELGHALEAVKWGTDYFIKAHTRPDELWAEVGDGDTDHYCWQRPE

SEQ ID NO: 67756 - protein, 178 aa, Zea Mays
MAAEVAGGGAVGAPSSSPRRVVVAVDESEESMHALSWCLSNVVSAGKAAVAPPPSVVLVHARSPRPLYYPTIDGTGYVMTQQVVDCMEQYMASAADTVVTKAKTICTAFPDVRVETCVEKGDPRDVICGAAEKAGADMLVMGSHGYGFLQWALMGSVSNHCVQNCKCPVVVVKRPDSA

SEQ ID NO: 67757 - protein, 766 aa, Zea Mays
MTRWDLEQFGKELHEFLQNKRYLIVVDDIWDVGSWEAIRYGLKNNNCGSRIIMTTRNFELVTKVEEVYRLKPLSNENSKKLFYKRIQSQEGESLDDELSTEIIDKCGGIPLAIIAIASLLVERPCEEWSKVYHSISLGNGDNTTKILSYSYYDLPSYLKPCLLQLSIFPEDYQFDTNAAIWMWIGEGLVHLEKEEGSLFVVGERYFKELVNRSMIQPIEDKYDRLVEVFRIHDIVFDLIRKLLKDEDFITLLDSGGQHSPQASLRREKKTCVPRSDCKLRRLAVRNHHVQRFPEDIMDIPEALRSLNIIYCNIAIMTPLHSFRVCRVLCIEYSYVPISLKHLGKLLHLKYLELYGTPVDELPKEIGHLRSLQTLLLVNTGLDELPPAVCSLTRLMCLMAEGFKRLPADKMGNLTSLEELRLESIVGQSATQALVAELGKLTRLRVVNITFSEELEESLQEALVQSLFNLWGLQELALSSKWSQQGSAMWGDWEPPRQLRRLIIKGIIFSRQPRWINRSCMAHLCFLSLAVHAVEAQDLDNLARLPELRYLKLDGVSWPPRYDTGPDDFRNLRFCDVGTMLVFHMGAMPRLEELVFGVCAGYWSWEHNGVLLEQCPTMDVIEDLDLGLDNLLSLEQVTVVVDCSGATAAKVQEVEAVVMRAMENHANRPTIKMERLQRRIEKEGRLLEFKDKSDAFFITFLRLLRHPLKSVISHDCAGASMCEVQKVEPAWRHAAEVHPNHPSIELIRKNNDEIASSSDHPNTELRN

SEQ ID NO: 67758 - protein, 131 aa, Zea Mays
MSPSPISSPRTTSGTSTPLSGGNGAIPFNHLRYATYSSEGFGTTSRGLDDHFSNCHKDLNLGHFAEAHQVSQGPRERVVSEADILSPQFRKKLGNVFDLRERLSPSEHFTRRALVDHVELNPSNPGLKRGK

SEQ ID NO: 67759 - protein, 51 aa, Zea Mays
MTTPRGRRDNARPNGQRSATAGELTEEVGAELLLLHRWRGPKKMTRKERKL

SEQ ID NO: 67760 - protein, 195 aa, Zea Mays
MAILAVASPLKTLNPSPGDHSRCRLSSSLLHLPLPVPRWRRLRCSAQYSEAAAQPTSTTTARPADIPWSKELCNSVRLIGTVGTDVELRQLPSGSAVARGRLAVWKSATETTWVTLQFWDDLAIVASEHVKKGDRIFVSGRLVSDTVDEGPEKRHVYYKLAVQQLNFIESQPVRLYEPEASQDALEEPKVSRLQA

SEQ ID NO: 67761 - protein, 67 aa, Zea Mays
MLVCDLCLLNLAILVVSGSSEVLGALGQILLSYLVHMHSRLRSLRQGQVHVGPITWEVLPQLVPEQD

SEQ ID NO: 67762 - protein, 65 aa, Zea Mays
MVHLSSLCIRLSFYIQVMICVLGLTLWDKANEESLLKYVSIIDCSMIVFKKYVQTFVSSLSNIFS

SEQ ID NO: 67763 - protein, 247 aa, Zea Mays
MEIGGQTESGANGGGGGGFRAARCWELLRWAAGVLRGKAVGLAGRLGRIARDEPRRVAHSVKVGLALTLVSVLYYVRPLFNSWGASTMWAVLTVVVVMEYTVGGTLCKGLNRASGTLVAGFIAVGAHKVAYMCGDKAEPVLLAIFVFLLCTYLLADHFYRTARMHMQCCVACTSCSVGGDVLAVHPGGEGAVRLRRDHLHPHLQPGGRVELPRRRAHPPRAPPLLHHRRRRRHLPLHHHLRLPGLGR

SEQ ID NO: 67764 - protein, 281 aa, Zea Mays
MAAPALRITARLGLALDGATAARRREASAPVAVPAAPWLKKAAVRCQRAVGAAVAEKKDAPVSVAQDRSGDGGAAPELTVVMKFGGSSVASAERMREVADLILSFPEEHPVVVLSAMGKTTNKLLMAGEKAVGCGATNVSELDELSFVKELHLGTLDQLGLDRSIVCGLLDELEQLLKGIAMMKELTLRTRDYLVSFGECMSTRIFAALLNKIGVKARQYDAFDLGFITTDDFTNADILEATYPAVARRLHVEWINDPAIPIVTGFLGMEIWCNNYLGQGW

SEQ ID NO: 67765 - protein, 146 aa, Zea Mays
MGRFGEQQARRGHTGLRPRQTRHGNLTRAEKQHGTVEHGPSASEQGNFARAGRKHQRDVAAGTHRKDRARRRDDTRGRTRRGELKGDKLGAAMDVTGNTQGTGTRKLELQASRGAGGRELQQEGAGASSAGQREIPQRGSTACNGE

SEQ ID NO: 67766 - protein, 619 aa, Zea Mays
MLAFEDNGSSKIGVRFDKQIPDGNDLGGLCEEDHGFFCSAELLRPDFSAGEEVERLAMTELIEVISEENKSGPLIVLLKDVEKSFTGVTESLSSLRSKLESLPPGVLIIGSHTQMDSRKEKAHPGGFLFTKFASSSQTLFDLFPDSFGSRLHERSKESPKTMKHLNKLFPNKILIQLPQDEALLTDWKQQLDRDVETLKAKSNIGSIRMFLSRNGIECNDLEELFIKDQSLSNENVDKIVGYAVSYHLNQNKIETSKDAKLVLTTESLKHGLNMLQSMQNDNKSSKKSLKDVVTENEFEKRLLADVIPPNDIGVTFDDIGALENVKDTLKELVMLPLQRPELFCKGQLTKPCKGILLFGPPGTGKTMLAKAVATEAGANFINISMSSITSKWFGEGEKYVKAVFSLASKIAPSVIFIDEVDSMLGRRENPGEHEAMRKMKNEFMVNWDGLRTKDKERVLVLGATNRPFDLDEAVIRRFPRRLMVNLPDASNREKILKVILAKEELGSDVDMDSLANMTDGYSGSDLKNLCVTAAHYPIREILEKEKKEKNLAKTEGRPEPALYGSEDIRPLSIDDFKSAHEQVCASVSSDSANMNELLQWNDLYGEGGSRKKKALSYFM

SEQ ID NO: 67767 - protein, 727 aa, Zea Mays
MEAATAMDFHTLSRRELQALCKRNGVRANMTNAAMAEALQGLTSVDGVDEIGTTLCLPTATPGRSAMKSAAKMVAVEEQQHGSPLPRGRRVSVKSPEAIRMEVGGEDEMKENVKTPGVVLRSTRRGIRATPAPLPTPVPASSARATARRTAVRRTGEVAPTPATRRRAASRKAAGAVEVDRPAEDVSEDKTSKMTRALDQEAEVVAVASKEEKGQQDEPRAALSDVKCDDPKGEEKVQQEEPKAVVLDVKCDGPEQEEVVQFLEGDNKVEEVEEGEEGSAAVLGKSCNDPKVEEVVVVMEEQFTEPHEGIVKEQEPISVERSASVEVMDDSPILGVIEKKQDASVEDCEDLAEFSPAREMTDEAIPVTEDKEVAISEESVTEDNEVAISEEAVTEDKEVAISEEAIEEDGFANTVETDPTPKEILLTEGEIILIEGKEGAANEMPQAGETSEEDEEDYLAELKEGAADQVLQAELADNETSKEDEDDLSEKREGTAAKMLQGEEDEDALSEEREGTAAKMLQGEPTDDETSEEDDLDEDEGWASDDDENTEEIGSTDETDEDPDETNEESYTSDAVQMMQGSGIAEDANEDASTEDDDFSGDLPPEFENIMIFSGAETESDIAPPVLEENKDAVVSATKTAKSLDDSALKTGQEEEGPEEVDNVVKSLDEEVESKEMQKQQPQDYNSMSLRKLKATHKKYLIAAKEEVTEGKRLPLEEVDENACIDH

SEQ ID NO: 67768 - protein, 670 aa, Zea Mays
MKAYISDPEDLKQDSTYQEKWDDMIINFLAECLDVVNDTEWVISLGDAFARQYDLYSISDGHAALLHRCLGMLLQKVDDRIYVSEKIDWMCRHSSMSIPINRLGLAQGIGLVAASHLDTVLEKLKNILDSAEQSAFQRFLSFFSFGPKVEDVDDTYAALALMYGYAARYAPSTVIEARINALVGSNMLGRLLHVQHPTAKQAVITAIDLLGRAVISAAEMGISFPLKRRDQLLEYVLTLMGRDQSNDLTDFNTELLHTQSLALSACTTLVSLEPRLPMETRNRVMKATLGFFALPTEPSSIVESLVTNLIILLGAILLTSGEDGRSRAEQLLHILRQLDPYVSSSLEHQRRRGCVAVQEVLIKFRNLCSGGFGALGSYPTFTMNKQIDRGTRSLSSLPSAFVLPSRDSLSLGERTMAYLPRCADTDTEVRKVAIQIIALFFDISLSLPKQKAYPNDIDLESSYSALSSLEELVSIVRREASVDQTELFQRVVSSVCILLSKDELVVLLHSCTLATCDKIKQSADASIQAIIMFIIRRGKELREADVSRTTQSLLSSAISLTDTHSRQEVLNAISCLAENTNHVVVFDEVLSVAGKDICTKDIPRIRGGWAIQDVFYAFSQHKELALLFLEYTLSILHKEPVIINSSEKGESTSESLADDCILQATMFALN

SEQ ID NO: 67769 - protein, 170 aa, Zea Mays
MIQRDHPVDQILGDISKGVTTRSRLVNFCEHYSFVSSIEPFRVEEALLDPDWVLAMQEELNNFKRNEVWTLVPRLKQNVVGTKWVFRNKQDEHGVVTRNKARLVAKGYAQVAGLDFEETFAPVARLESIRILLAYVTHHSFRLFQMDVKSAFLNGPIKEEVYVEQPPGFE

SEQ ID NO: 67770 - protein, 359 aa, Zea Mays
MAPRSRAPSRRPLWFIVLVAFVCVVAIGAYLYTPQHYTACYLVPSEACNSRPPPEPARVYTDDEIAARVIMRDIIRARPVQSKNTKIAFMFLTPSLLPFEKLWEKFFMGHEDRYTIYVHASRDIPSHSSPIFAGRDIRSEKVIWGTISMLDAEKRLLAHALQDPENQHFVLLSESCVPLHNFDYIYSYLMETNVSFVDCFDDPGPHGAGRYSEHMLPEIVKKDWRKGAQWFTVKRQHAILILADTLYYGKFKRYCKPGNEWHNCYSDEHYLPTLFNMVDPTGISNWSVTHVDWSEGKWHPKVYRAADTSFDLLKDIAHVAQRRPCVWNGMKRPCYLFARKFYPEALDNLLNIFSNFTII

SEQ ID NO: 67771 - protein, 538 aa, Zea Mays
MLRRRRAPLLLAAAAAGAALAATSPSGENGRSVASALHQGIARSSRSVYTIGFVMADYKYSLRGLDAGSADYRVKLSKVHLRSAKKLLKLCEVNGGFYVKAGQYVSSLRQVPKEYSSTLSCLQDQATPSKFQDIKAVIEQNFGKELYDIFLEFDEHPIAAASIAQVHRGRLHNNQDVAVKVQYPGLEQRMKIDIMTMSFLSKMVSWVFPDYKFDRILIEFEKSMTMELDFTREAKNSERTASCFRKNSVVKVPYVFWQLTTREVLTMEFCYGHKVNDLDFLRKTDISPTKVAKALIELFGEMIFVHGFVHGDPHPGNILVSPEGHGKFSLVLLDHGIYRELDQKFRLDYCRLWKALILLDSNKILELGEQFGVGKYAKYFPVIFTGRTIESKSALGTQMSGEEQRRLKEDLNSLGMDDISSFMESLPPDFYVILRTDGLLRSILGNLGAPRHVRLLTYARCAIHGLEKQHKMESDVQLCSGAIRRMFLNVKTNVSYLRLRVIIEIAVLLAKANGAKQKVVNKLRQMLQETSQGFHRRM

SEQ ID NO: 67772 - protein, 739 aa, Zea Mays
MDIERCRIWWPRQELQFKQKPFSPRLILFGWFFSSAGSIDIVISAAVPQVHILHSFATLDTLQTIILSSNKRMPVSLQESAAFTILGDCVRHPPKELEGYCFNKLEQLPLDANFVQKEHFGTRRNNVMIGSVGNGDQGPSYDHRRWGCDCCVLDGFLEVCRKSAVKEGSWVHLYWKFGENFKSNLNQVPVLHHLYLDGQQIENNRCHVILYEVPTIGRNHFSLGLDAPRTLNVSFKKPNWINDLQKQPSFLDLDSIVLALNCSNAARLPDTQECSTTCSGAYFIFASVYDVLVQVTWHCVGIFLASSSTILYIMILMSRKCLSHMPQYLMLNKVFRHSWNNIHLRSCQILYWPIVFQDASLSSTVNVEYAHKAAIRKHALWSSIIVDLLMGFVLGAAFLLNTETICIWTIALVHHMTEAILRSGCVWLMGVPAGFKLNTELAELLGMISLNAVQIYSTLWFFVGGYLRHIIQGIAVSGIILGLTAPVSFFIDIIQLATLHVTILHWLISSLYSRQIQTVASLWRLFRGRKWNPLRQRLDSYDYTVEQHVVGSLLFTPILLLIPTTSVFYVFFSILTTTVIWVCVMLEIVIALIQSTPYAELTLWVMRRHRFPAGLFFFHLPSNGHTFEDDDLSSHSVGCCNETRKEDLIDKLSESLVSELHCSYATFVQVIRSNYERVFNRTGYSFCKQLAYGILSGERVPSSLHLQTSPSFPWMNIGITEYWMHCYVCVLQCAPKRDT

SEQ ID NO: 67773 - protein, 1023 aa, Zea Mays
MEGFNEFLEHCENIDGFLAGVFNKRPSTRAVKTEDKEKDRDRDREDKDRDREKEREKERERLDKGSTFNSKEGSSHKPSMFSGKEKYNLSKPISELDLSNCQRCTPSYRLLPKNYPMPPASNRTDLGASVLNDHWVSVTSGSEDYSFKHMRKNQYEESLFRCEDDRFELDMLLESVNAATKRVEELIEKMQDNSVKPESPIRIDEHLTPLNLRCIERLYGDHGLDVMDVLRKNASVALPVILTRLKQKQEEWSRCRSDFNKVWAEIYAKNYHKSLDHRSFYFKQQDTKNLSTKSLLTEIKEINEKKRKEDDVLLAIAAGNRRPIVPNMSFEYIDSEIHEDLHKIIKYSCAEVCNSSDQLDKVMRVWTTFLEPVLGVQQKHGSEDPDLVKTKSRTTKLGLANVRESNTIAGIVSKQSNGDESEQGPSSRARLANGVAAGTQNGFHDADRIARKGEEPSNAILNGRVHGAVSADETLSLITQNIASTERPAENAAAVRTEQHKANLVLTPGMNASRSSHDAVEVAGEGKTGNETLLSAEGGERLGPSLNGTSEGIKGRLNNDGSVPHTSKVEREEGELSPNGDFEEDHFVPFEDGTSKGKEDSTSRPFHGRPGEVVPSSAEAAGENDADADDEGEESAQRSTEDSENASEAGEDASGSESGDGEECSREDHDEEEEDMDHDDQDAKAESEGEAEGTTETHDVEGGISLPLSERFLYSVKPLAKHVPTALHDREFSRVFYGNDSFYVLFRLHQILYERLLSAKTNSFTAEKKWRNSKDTNPPDLYAKFMSALYNLLDGSSDNTKFEDDCRAIIGTQSYVLFTLDKLIYKVVKQLQAIATDEMDNKLLQLYLYEKSRSPGRFFDLVYHENARVLLHDESIYRFECCSSPTRLSIQLMEYGHEKPEVTAVSIEPNFSSYLFSEYLCSTPDKKLSEGVYLGRNKRKYSNNDEPSDSLKAMDGINVVNGLECKISCKTSKVSYVLDTEDFLFRLRKRRKILRGGNVPDRLQISSISAAKVQRFNRFLSKP

SEQ ID NO: 67774 - protein, 298 aa, Zea Mays
MALTGFGTPEFQRLDRQTELIRQLASGAIVDISSSTIINAQNDDGKTALHLAVVCNLHSDVVKLLMSVPCIDLNICDKDGMTPLDLLRKQPRTTASEILIKQLILAGGFTSSRDHETRSAIASQLKMHSIVGSPGTSFKIPDGEIFFLHAAGVDVSGGIGEGGAAVPFSSVIARADVLHGPKLKRLNSFQDAAKHIKVLFRWPRRGWNKSGSGGRKGLDDDDASSVDSAKTWSHEETPTPLRQRYSRIGSLFNKRTYAAGRASPSEAVKKGGVVQPAGSTLLSTSLSSSSASLVDSHG

SEQ ID NO: 67775 - protein, 385 aa, Zea Mays
MQRNGVVECSVCRSRVVVPSPRSVSRAYDKHRNKMSSKFRALNVFLVVGDCILVGLQPILVFMSKVDGKFQFSPISVNFLTEVMKVIFAVVMLIIQSRKQKVGEKPLLARSTFIQAARNNVLLAVPALLYAINNYLKFIMQLYFNPATVKMLSNLKWEALALLLIGISINQLRTVPVGNTAFGLPVTAIAYIYTLIFVTVPSVASVYNEYALKSQYDTSIYLQNLFLYGYGAIFNLLGILGTVLFQGPESFNILRGHSRATIFLICNNAAQGILSSFFFKYADTILKKYSSTVATIFTGLASAAFLGHSLTINFLLGISVVFISMHQFFSPLAKVKDDKPADSIELEDTQNDRPSESSFVNMTAGAADDASHRIGTDERQPLLPI

SEQ ID NO: 67776 - protein, 577 aa, Zea Mays
MDDIKETVRTAGDSLCRAVSSLTIRLCDISLTSTSEANETMNIVLPYLLSEGILSKVSSVQKAAISLVMKLAKGAGPALRPHLPELVSCMLECLSSLEDQRLNYVEMHAGNAGIKTDKLETLRIAVAKDSPMWETLDICIKVVDKNSLDLLVPRLAQMIRSAVGLNTRVGVASFITLLVQKVMVDIKPFAAVLMKLLHSAVLEERSSAAKKAFASSCATVLKYASPPQAQKLIEDTTSLHSGGKNDQLSGAILIKAYLSNASDILGGYNAVVIPVIFVSRFDDDKDTSALYEELWEDIPSSERVTLTLYLPEIVSLLCDGMSLSSWAGKRKSAKAIKKLCDVLGEPLSAHYQNILKSLLKELPGRFWEVITAFRDPGFFNSVFPMLFEVSNQSAISKTKGSAELDESEGASVSLDKVLNCATSCISVAFPQDIINQKKNVVELILNSLLPEESWQVKLSSFLCIKELCLKFDNSGDSNTWPQDTAYLVEELFHLVSPKLVDSIRLVKIAQVHVAASECLLDLSKLYRDFPLSNRTEAKFEDELTELCESEKSEQAKAILKECLAILKALPGVTMTTD

SEQ ID NO: 67777 - protein, 455 aa, Zea Mays
MFGLAKLLTGCKSYDEFLQLSQKGDNFVLDLIVKDICGELVCQKQGLSTSTLASSFGKVITSKKKLTDYKPEDLASTLLSAFTYNIAQIAFLVASLLGLRRVFFGGSYIRGHKSTMENISYAIDFWSQSQMQAVFLRHEGYLGALGALMSYGDPSGENLTLEEKEPHHESAPVDGTSADEESDSNIFPYLLVNIGSGVSMIEVIGKGKFERIIGSHLGGGTILGLARLLTGCSSYEEFLELSQRGNNLSVDLTVGDIYGEEGYPKIGLPASTTAASFGKVNSSKLSEYKVEDLAAALLNSFTYNIGQIAYFVANLSGLKRIFFRGAYVCGHEKTMDKISRSLKYWSKGEVQTTFLCHEGFLGTLGAFWSYENMGIDSLAAHEVIREVLLGAPYTGQFPSLPVTQQQENGEHGTLEGEVESLRHDNALLKAEVERLQKENALLRAKLVRSGETSTL

SEQ ID NO: 67778 - protein, 113 aa, Zea Mays
MAHEVGDNGGELPPPAKKKSPAEEEAEKRRKKLTPGSLMKGIIRSGSGDATPAEGDQVILHCTTRTMDGIIVNSTRREHGGKGIPLRFVLGKSKMILGFAEGFPTMLKVQNAA

SEQ ID NO: 67779 - protein, 87 aa, Zea Mays
MLIRGRVSYTSPIPPFNVVSVESSTSYSEQGHTDERRDDMDFSHSSIRFCALIMVWSLVRLQRPLAVAQAWTSLLLPFKFWRYILCT

SEQ ID NO: 67780 - protein, 203 aa, Zea Mays
MCIAGSVVIVIHAPQEQEITSVKEIWNMATQPAFLLYVASVIVIVFVLVFYFSPLYGQSNVLIYTAICSLMGSLSVMSVKALGTSLKLTFEGTNQLIYPETWFFMLVVATCVLTQMNYLNKIPLCADASEGLCWICPNHLNRCWISFSSMVLSLAYHVSSFRTLSLTLLQIQHNMYFRNTYLLNVMYFYRPIFNAIQHSNSNR

SEQ ID NO: 67781 - protein, 295 aa, Zea Mays
MFWHHDCTSITLMCMSLPTALLKSVGICLLYTEWQLCIVTSLARKHCSISSFAITSTTICMIRQKSLDQRHLVLKHTPINNSADTCSTWVKSGQSSWSTPMLKKASCKLLKGMKKALIPYFELTNAVRVGDLELFRAVADKFASTFSADRTRNLIVRLRHNVIRTGLRNISISYSRISLADIAKKLRLDSENPIADAESIVAKAIRDGAIDATIDHANGWMVSKETGDVYSTNEPQIAFNSRIAFCLNMHNEAVKAMRFPPNSHKEKESAEKRRERLQQEEELAKHMAEDDDDDF

SEQ ID NO: 67782 - protein, 838 aa, Zea Mays
MIQVHETRSRVHAAAQEEGKLASKKQKPDNETKERGQNVPSKNKKSADNEGKDGEPEAPTKSKKLKAEESEPNGREAAAREFAEFCKAIGERLSLEDMRKILQANEQDASGSEDAVVPRCEDMMFYGPLEKCPVCEGQLEFKEWKYKCTGNYSEWARCTFSTNDPSRRSGSIEVPDDIKDDFIRKWLKQQEGKEFPKRDLDEEAHIFSGMMIALSGRMSRSHGYFKEQIMKHGGKVKNSVLGATCVVASPAERDKGGSGGFAEALERGTPVVSENWIIDSIEKKEAQPFAAYDIVTDVVPEGRGLPLGQLDPSEEAIETLAAEVKLAGKRSVHKDSKLDKDGGCVFEKDGIIYNCAFAVCDLGCQMNELCIMQLVMVPGNRLHLFYKKGPIGHDQMAEERVEDFGSRVNDAIKEFVRLFEEVTGNEFEPWERQKKFEKKSMKMYPLDMDVGVDVRHGGAALRQLGSAAAHCKLDPSVSFLLKQLCGQEIYRYALMEMAQDLPDLPIGMLTDLHLKRGEEMLLQMRRDAETVAESGPEADAFWTDASSKWFTLFPTTRPYTMRGFEQIADNVASGFETVRDINDASRLIGDAFRSTLLDDPLSECYKKLGCCISAVAEGSEDYKMVLKYLEKTYEPVEVEDVVYGVSVERIYAVESSAFPLYEEIRNLPNKILLWCGTRSSNLLRHLHKGFLPAVCHLPVPGYMFGKAIVCSDAAAEAARYGFTAVDRPEGYLVLAVASLGEEIEEVTGTPGAEEARVLEEKKVGVKGVGRKTTDESEHFSWRDGVKVPCGKLVPSANKDGPLEYNEYAVYDPKQVSICFLVGVKYEEQNMEVVPPDDQ

SEQ ID NO: 67783 - protein, 132 aa, Zea Mays
MPWNRFMPFLSKCCTSTVQTSSSYSSFSSSFSPIQPWLFVGLGNPGEKYQSTRHNVGFDMIDAFAQSQGIPLTTHYFKALFGEGMVDGVPVLLAKPQTYMNLSGESVGPLAAYYKLPLNRVLVGCQDRTTAW

SEQ ID NO: 67784 - protein, 937 aa, Zea Mays
MKVVSSVVSSSQRSLAAFKKKVENPKLHVNQDNLRPNQDNLTGVGDIHYRNLPRTVNPSVSHVQHQKSYTPQGNAKVSEQLERNNSDGLMQSARDKRVPNGLFVNDRNGQNRSRFARTRSSPELTDSSTEGFRGRRTNAVGMEKSFGVDYSRRNILIPEVSSNHSTKSSQDESVSSMNGSSHPSALAASDSNSVSSSFRDDNGFVMNEELPSVSESSDMHHDEQVLANLMESMKLHGFNGQIQLPMQIPSHLSVAHPPLLAPTTYSQKHLAGVPPANLIGTPWLPNMQFLHGFVPPMAHYIHNPNFAPNIEDGTETEKPNTSDVNHDAGKTWQEYGVGFSRHFDPEARDPHFYGIDGKEHSSLPNGVPGAPLERQMKFTVENNVVGDETYTGMFQIHTGREPAVDYSKRSGYGNVPSSHASSSKGKTLDSSSWDEMTVNTTIPPRENWGKRPAFVAPATTTHGNTGWQMGNITEHLAAEVNDGPRNGTVVPIITEASEIVTGSDSFSSKSRTSQVPNELDPSQVGMPNPVFTPFLIGSPQHRQADSSGLTFVPTGPPVPFVVLPFVPGNNDGSGPQFERSEGIDQLPANTVGQFFGSLNDVHQQDSSAISTVSSSTMTEPSGEHKPDILHSDFVSHWHNLQYGRLCQNPRPMGPVLYPVPVPPMYLQGHVPWDGPGRPAAPNVNWTQMVGGQRVFPVMPVQPATERTGVFQHYGEDAPRYRGGTGTYLPNPKVHFRDRHSNSRNYRGGYNGDRGDYNDKEGSWINSKQRNPNRGYGRSQSERSGMRSDRQVTDESRSDRQRRTYRNDSYRHEASSQYLVQGQPFGSTSSMRKPGNTVHGVYTPPSTYSNGTSALSGPPGPPFFMVYSYEQGSNHAASSSEPIEFGSLGPLPAADGDDIPRSTRQVMPNGFYGQRRGRYRGGSSHSSPDQPSSPQPRR

SEQ ID NO: 67785 - protein, 260 aa, Zea Mays
MDPCPFVRVLVGNLALKMPASASPATPRASGSGVHPTAARCHCRIRLNKMPYQTASAPLLPATEDGPASCTAAFAAAFHVSKADLDRAAARPAAALLLAARRRRTARLKVAVYAGRGGGVSASCGGGGATSGRLLGKVVLPLDLRAAMAKPVVFHSGWVAVGSRRGKAAAAASSSARAQLSITVRAEPDPRFVFQFDGEPECSPQVLQVKGSMKQPMFTCRFSCRSSSDLRSRLIRARATGWRSWGRSASARGRSARGGR

SEQ ID NO: 67786 - protein, 551 aa, Zea Mays
MEIGLRGPTNLFGHPTDKQMIELDQALSQWNTDFDKVPVTKIAFGHFPLSFSALTESGKSIKDVFLKQSLAAYLCGHLHTRFGKNLKRYYHRAVQEPSLSEHYYQHNMHQGDAFQGNKENCSEEASHVEEFWEWEMGDWRKSRSMRILAIDDGYVSYTDIDFRLGSKSIIILPTFPLDSRFMQRASAFRDFKCHVMGASSFDTVRALVFSKHEIVSVSVKIYDSRPGTLEIVFDSEMKRVDSNETRGNMYLIPWNWRAFEDSSPSRYWLQIEVMDITGDTSVSQLRPFSVNGLLARVNWTWKEFFVIGIQWASIYHPALWCAFSLIFSLLLVPQVLAVVFKDRFTYKSLCAYGGQRTLLKSLVGGFICCFVELARLVLVWLLLLLYAIYLVFIPWLFGHPITEDGSLTYMTHKGWILKGPSSSNEVVHAGIPDVMVIVLPHLCFVLVPTIVILAAMAAERTAYREHYLSRSGKKKDDYRKSRRQIEHENFWNGRWISKFLCLLCVVVLCKHWKLCRALVKAYAMNPLLHAPVLFFFVPLLMVFAIYKTRSI

SEQ ID NO: 67787 - protein, 143 aa, Zea Mays
MPGRRAIDVRLLPGGGDAAAAPKWRMSLLENTFSGFLQGAGADTAARAVFAEGSLFCPFLFGNFFDPADPFPLWEFESDVLLAALRRGNARTTVDWAETDCEYYLRADVPGEIFLAFACGTLAHRNPHRSSWTVVKARVARTA

SEQ ID NO: 67788 - protein, 240 aa, Zea Mays
MIDLLSLTLCSPTPETSTDSSAQDQNGPQQPAVTHNQKGLQEPTVTNGQQYPSSVPQYPSNYQPHTANQAYAPQTSNYVAPWAQTGAYPPQPPAYASGYAYPAPPWVAPTHPVDSNPFLSVNYQDPRPAATSVAQTATYAPPPASYPPSISYAQFATPQSIQHSNSVASPSNGQIANQAQMNVNQQPKDSSAASSRPYYIPDNLFSDLIDAKSFGGGNKMGGPTTMGSSNGGQPMIGGKK

SEQ ID NO: 67789 - protein, 99 aa, Zea Mays
MRGDVEAIDPGNKAAAEPVGDVAALSSRLARRLLHGSWCPPRCQGICLDQSREHSCYGHKLRWTWCSTIQNIPITYIGKGNPRRFKVRVSQLAANLGSF

SEQ ID NO: 67790 - protein, 277 aa, Zea Mays
MTVIDILTRVDAICQKYDKYDVDKLNGANVAGDDPFARLYASVDADINQCVDKAETAKQEKNRAAVVALNAEIRRTKAKLLEEDLPKLQRLAVKKVKGLTREEIATRSDLVAALPDRIQSIPDGSSTATKKNGSWGASGSRTGGAIKFDSTADGNFDDEYFKGTEESNQFRREYEMRRMKQDEGLDVIGEGLETLKNMASDMNEELDRQVPLMDEMDDKVDRANADLKNTNVRLKETVLQLRSSRNFCIDIILLCVILGIAAYLYKSGVEAYICWIS

SEQ ID NO: 67791 - protein, 112 aa, Zea Mays
MIVQTRDDTHRTRNGHQILRELKSMSEHRARKMCVSTNRLWLCLQDALKDALLEKSELQRCMGVEGLHPSDVLDQHVVVLIRAACIEPSGDLCIGIISAQSRRKDAGFPLIF

SEQ ID NO: 67792 - protein, 476 aa, Zea Mays
MFDLVDSSQLDTTTVLRLSPLSLIPIDQDSSGTLSVQIPQKSLRSLSLKFHGDIVNNAESSAIKKKEGTLTNTTAEAEKDVLADDDVNKSIRYAHSILRDIHKSIFEEQVFDMVIRETFNQSQGINVTGMCEDFLQLAIGQECSLCLSLELSGQNNNAGTVGQQDHMDTNYPGNLAVATVNGKESSNKDVRGFPNPKSLEIYLLHMFHEILRKLREKSRHVVRYQSSAQAAPDDCGLLSHFCMTVAHRIFSNKVHLELESVVSRVPYLHLRSLPTWHSRTSSWSLCLKVPQPILATGRVTKPSDYHELKYKSRSQFSTKVILKDGQISLMGEGSPSIVGSLTGKPSDSRLINSYNCDLEDLPMMLLQQVASQVIHWLHDEAMILGMNVTRDFLCLYFDLGQGETLGLLAHVDPDDTYGCISWYLTVEHPMEEGKMSAGSPESEKRRFLGYLSLEVLYSTLMDLIKLCSTSDQIRAS

SEQ ID NO: 67793 - protein, 537 aa, Zea Mays
MMSSTPLSQPATAGDDDDDMESLPLAAASDYASVASTFDPLFSSTSATATSPRSPPTRAAAFTLSPTFSSSFVDPPSYADATGAGAGAVSSSPCSASSPSSASPRSARVAASEYSFLAVSDPETEAEPAATSLVPGSAPTYVSYLVTSVRRGDPDQRRHSVRRRFRDFVTLADRLADAFRGHFVPPRPDKNTVESQVMQRDEFVAQRRAALERYLWRLAEHPAIGPSDELRVFLQAEGKMPLPGTTDMASRMLDGAARLPRQLIAGEDTVTAPQEVVQPAKGGRDLLRIFKELKQSVVTDWAGVKPPLVEEDREFLEKKEKLQEWEQQLTSASQQAEALVKAQQDMAETMGALGLAFVRLTKFETEEAMYDSQRMRAADSRRVATAAVKASRACRDLNAQTVKYLDTLHEHLSIMLSVRTAFSDRASALLTVQTLMSDLASLESRIEKLEAASLKIFGGDKARTRKVEELRETIRATEDAKFCALREYERIKENNRSELQRLDSERKEEFMRMLKGFVASQHICFALDLCKSYVHTQ

SEQ ID NO: 67794 - protein, 176 aa, Zea Mays
MLPHDILDEEYDDNNDDNKAFWSQASWDRLELKPNKTHQSMFEHMDSCFPCTSIQGHWAYFILSNLNLLPLSLLTSVFLFLFSYCYRAIGSHYAWVPLEVSDGHVQTISTDVEQSFLQLVLPQPITYIINLDSIPSCKATNQPQHTHFRNSYLLNMLSFLGQDSVPYNIVGRIAVL

SEQ ID NO: 67795 - protein, 354 aa, Zea Mays
MDGRESTVASGPNFSSFYTQHRGIGAPGVPGHSAVLHDPPPAGYRQHLDAVSAGYAFQTPQVGGSHIGQGYHHVEASPHVAQYSSGGGTSSGGDMDIGMGSAVCTNVKGELGSGPAQDEQVKKKRGRPRKYKPDGAVTLGLSPSSSLTPHSASLGMGTMISAPGSGFGSEGSGASGLGAPSEKRGRGRPPGSGKMQQLASLGKWFLGSVGTGFTPHVIIIQPGEGRFEILCLSGSYLVVDEGGGARTRSGGLCIALCGPDNRVIGGSVGGVLMAAGAVIVGSFMYGGGSKKNKVKAELDAEPEEANAGDQEVALAEHSSMAPHPAMSGGGGWASGMMRQMESRTPNIDINSIRE

SEQ ID NO: 67796 - protein, 144 aa, Zea Mays
MAPRGHHLAEVALLASASADLAAAGAGEREGWLDDPAILPSLGPRARSLAVASAAHSVLVIVAVAGGGGGGVTVEPALGPDEGRISAVEWVPFAGEDDAEGEEGVSVVIGTDAGWLLFYSLAGDLLHKQVVQYISCKDTETQLS

SEQ ID NO: 67797 - protein, 65 aa, Zea Mays
MTAVYPIMPRYTPPYHIAVSHGGWPITVPSPYPFERHSRRAPMTHLFTAVSSPRSKIRSTYSQSL

SEQ ID NO: 67798 - protein, 862 aa, Zea Mays
MPLPDCGRRGFPTLPLLLLVLHALPRRLPRCAAESATCLAVYREGGAPAVFQSAHCPRWTLPPHDGQGGGGGKSIPMGCHVAADRGRRRSQEDRAVCALGIRIPFVENMRIKEVDVGVVAIFDGHNGAEASEMASKLFLDYFLLHVYFLLDGIHSLRFRKSTGKLTYREVTIFNNVFNLYKHGQSDHAERSCWASPAILDRSFHTEILKESLMRAVHDIDLTFSKEALQNNFESGSTATVVLIADGQIISANVGDSKAFLCSEGYNLHHRNRKRRRKRNSINHEEFALANYDGPLYHARELTKDHHPNREDERNRVEAAGGYVLEWAGVYRVNGELALSRAIGDVPYKRYGVISTPELTGWQILSENDSFLIASSDGIFEKMTMQDVCDLMLHAKIRVKHDFGSSAITQRNLADYVVHVALQKGTTDNVAAVVVPLGSPGSTGTTLKDSSQFEEDLKISISPMLNVPYGLKPDHGHSSAVIDMEYFKRSSIKFQRFLVEAKPKKLGCFYLSESLDEDMDYIFRVPEAYQREEVHDFNHIPAETALYSDGNLEKYKDKHFCLYLGPEDGEMGQCNGPEAFANFFGLLDSLPHNGSKPNGSHSFGNTIDFRYKLKRRFDRGSYGEVWLAFHWNCSEDTDVHKEPPHFTNISQSEMYNCTSSGRMSSDEDHGSGTVNGDLFILKRIMVERGNAAYLSGLREKYFGELFSNASRTLEGLSRIESSTISVDMLYDPDIHLEKNLSATEEPLKHVARFIESFESESREIWLVYHNEGHSLSKLIYTAEETKLVTGNNNERVRHIQVLHPSKWWHWLRTTKAGLKQMQNLLWQLLMGLKACHDRNITHRDIKPGRNDVTAYFFLVFYTS

SEQ ID NO: 67799 - protein, 3227 aa, Zea Mays
MAYTASSLMTRSRQDEVNKIIEISNVGIYCHQLEEEQDLCHVGALENDHSRDYLVNPFCVTVSVLANKAAKLDGTPQYNMTAELTALALSVDEIQLQQILNLCDYFTICALRTKYGRYRPSQSSLSKRCKGWYRMWWQYAQNSVLADVRRRLKKTSWRYLKQRLNHQLRYVKLYRMKLELLQKGQIVSEDILQELENMDRECDIDDILNYRTIAEQQLQVVDGSVRRTLRESLVKSSIDTHSPGSPRSDEQLAGASQGWLNWLSLGMLGVGGTADSSSFAGVISEDIIKDIYEGTEFRPVSSAENCLKKENYYSLFVRLSISQIVTTVTSRRFGTKLVDTMFSGLGMECKIWDDAATILAWLDSLRVINPLNKTKILWAEKCSTGDGLGAPVVSIQVDFPKSNERSEASTRVVVQEFNAIYEPEFFVNVLYIYNVFSAFQFQHDRVLSSLNRFNNLGTRLVSKLKYMSANRKKLIWDLRIYHFVIRIPSQNCERKELAMVIDAGDVFIQSKDTIDDISRTQESNSFLDHISKSLPSYFSDDLLLGIQLDELYNQFELGLTGFQVKVLLPDRHNVSSTLIKLDASIALRLCVFLDEPVLKQLEVGFIVSSIDAYLSQTMYSTIVNLPRMKETNLFKNSVFDNTKTHVPKKLALNVSVSLKLAKLGLHVDLDGNFEESSGLIVGIEDIDIRYAICELSDLSLAMKTVNVTFRYWKDKSDSHVLCLSGNLTRCPENSVETCLDLHYRTHKHDDQIHHVYRLILCDVDLHVNPSVIGQIRMFLRKLDSGPSIGSDVESTMIGQSSMKSGAANGILPMFFLSNLCGADGTVFAGVSVDHFPFLVADHSCGYNFGCLGTQNVEAQESLYSKNEHCHDTSGLNGYHASDLTSNTYGKTQRSDCSSGSSNDPKNASRTVLDLSLISVRIHFPESCGTLVTITIPESISTLTYFDASSWDLLLSANNLTLASPWTPPNVNELVWGTASHRNASVLNVRVKKDLPALSTEVCVGIQNVCCVLPSKLLAMFVGFFLLDDWNRIAEQEFLVADNNLEGLRESHDCVTYKFDISDCVVFFPVEEQGLSCLKLEVPHFFCEFIANGSSVEFAKRIPKEFFSSECIVSRRVDVICIYARNASISLLIVSDQTDFMLKLDENVPKRIHSLIEKLDADVWIQVPCKDIPYSQQPTSPTSVMSKISRCNLIAEDLYFINGMETVIGVVDQLISIGNESKMYKGNASQFLDHRSFCEGNPDPNECTNLTISIKDLMILLGQSKAKGLALERIATANMEFDVSAVLVGEKPERIDFDVVSLTLQSPGGYTLISIVSDGPLSPVFFKFTKHHTGQDEILLSVPLFEIWLYLQDWNTIINHSHSYIKTEVNSMPVEHAAALSQFPEMVSSPLIASEFGSPDDFNLVVTCETISGVLHIPIWGKEENHTSNHMGVTPASFPMEVGTHETDDIQYCEPKGCKFVTLTFDTKHFVVMSGDSCINFRCDLERLKVLLEMIQENKGTSVPFVHISKVKSSGYVRQSERNLEHLSVDLQAEYMDVSFSHQIFNFWHNMELKFPAASSASSFYSVAFKAGLRKGSLLLSDGRWSSHGPVIETLLKNLTVQFSQMKDRTEVSAFVDLLVNYNNIDKVMWEPFVEPSRFQLNMLRKCGDCGLDISPSTDVCLSSSKQLNLNISEPLIEALLRLNQMITDSLDPSNGSGIWEDPGILRLNHDDVRTRRYAPYFLSNDTSLPFRFKVYRGAVNSDDIGSFSVIDENSVPAGYAVPIYVEETPDEFFFQHREARSSDHLIEKRMSALSHYMISIEFDGTSGPSKPMSMDLVGIYFFEVNFSSSKKPILGEESLGAFSSNAKGNDGLIVPVVLDVSLQNYSKRIRVYSTVILYNATSMPLELRFDIPFGLASKVIGPIPPNKEIPLPVHLSEAGQIRWHPVGRTYLWSETRSLSSLLSRENRVGFMKSSVCYPSHPSNDPFRCCVSVEEYNVPSSVSTKKKQLCSERLNTQVSGSSTPNTFKQNLTRTHFIRHVKLNTPLLIKNYLPVYISLAIDNGGSARVISLKEVGSASILFVDPSNDLGITIDIQDYRSLNIKFPRAESFSTTAKLNGFKFSITESITFYSNLSNFPLNVMLEKSMDARSGARELYLSVPFLLYNCTDLLLTVTESSSERSGPTLVIPPSFELDGYARHMLEKGGLSLVNPSVQCFTGKMPQIYLMDGHCSSSDISCTRNSESVKKDLDNSVKAYMFAPDGHTPATELSVKLNASPPNNGTETTRRNWSNPFLLVPASGSTNVTIPQSSTSGAFLVAVASIPVSTELFGRTRAIAFRPRYVICNACSNDLFFRQKGTRFSKHLSSGQHSFLHWSDTARDLLVSIRIDGPGWQWSGSFFPDHLGDAQLKMRNSASGLSYMVRVEVQNADLDLNSNRFSGKNNINTGTVLILLSDDKTGFVPYRIDNFSMEKLRIYQQRCESIETIVYPYTSCQYAWDEPCYPHRLTVEIPGERSLGTFNLDILNDDVHVSLPSTSEKAARQFCISIHAEGAIKVLSVLDSNCHNKETNEKDFLGSKEPKVVDHKLELDMNFAEVIKLHLPFIGISLISSCPQELLFASAKEMTVVAMQSLDQQRFTVQIQSMQIDNQFPDSPHPVMLSFEGSHKGKSMNFFKSKDTKLKSANDILSSTSEPVLQFAAAKWRTKDVSFVSYQYINISLAPLRLELEERLVLSMIEFFRSVSSRINIGHLEKSIELSIGGATDMLREYEKISKNISDKLLVQDSELLPSVVPVGAPWQQIHLLARKQKKVYIELFQLTPVKLTFSFTSTPWLNRNEGGSDPSVGFNNATAIQRGLMALLDVEGVPVYLGEIIVENLMASWQSVQDILMRHYSRQILHELYKVLGSAGVIGNPMGFARNVGFGLKDFISASRKGKLQSPVELLNGIAQGSKTLIGSTVYAVSSATSHFSKTAYKGLVAFTYDEQAASKMEERERQLGLHGEGVLNGFLEGLTGLLQSPIRGAEKHGLPGVISGLAMGTAGLVARPMASILEATGRTAQSIRNRSNPHESNYLRVRFPRPVARDRPLFPYSWEEAIGESLLAQADSGRLKEETFVMCKTLKGAGKFLVLTEKLLLLVSSPYLVDLGSPRFIGVPPDPQWSIDTEMHLKSVVHLDRSQEVVNIVGSNGQTSPRDKRGGTRNRVMSSAFVPLFHLSIELPNEEDAEGTVQVLQALIEKGKARRWDKNILHRSNIS

SEQ ID NO: 67800 - protein, 744 aa, Zea Mays
MAKFSNSAIVLLMLLIAAWRTTPAMSHFRMGKPPAEPELDYGGRYVHQKNPINPYIIVMVKNEKKTGPYDPEFKKAAGEAALLIRAKQEMTKRMVKHIETIASSAKIAIHLKLVLLIKSAEFMRAMAGEVADQMFVVSQQHASVAAADIVAALRFQQEILKKAAERCKAISSDVAMAQKMKHEMLKGVAHDLCNVAGNIAISMSSMAEMAMSVSGRVVVGVDVKVHTDMESRALAKVEAEAVAEAQALDKAEGEAVAGAEGEAKKGKSGGVSAGGDAGGYAGGKTDADATASGGKIDAGAGAGGASGGAKVGSDVGGSVGGGADVNAGAGAGAGADAGVYTVAKGNKAGGSDAKADISGGAKAGGDAGADASAGTGAGVGISKSFTIGGGVAGKAGGSGNAEAGVDAGVGGKAGESGKAYTGADAVVSKDAKVGGGAGGSVGGSGNAGTSATVGAGVSGDAKVGGGVGGNVGGSGKAYTGADAGTSVSSGGSAGADAGTGATVGAGVSKDAKVGGGVGGSVGGSGNAYTGTGAGVSSGGSSGGADAGAGATVGAGVSGGAKVGGGVGGNAGGSGKAYTGTGADAGVSGGGSGGVDAGVSGGAKVDGNIGGKAGGSGNAYTGADAGTSVSGGGSGGASAGTSATVGAGVSGGAKVGGGVGGNAGGSGNVYTGTGADAGVSGGGSGGADGGIGANIGAGVFGGVKFGGGAGGSVGGSGSAAAGASGGSKSSGGGSDFGYGSASKEL

SEQ ID NO: 67801 - protein, 264 aa, Zea Mays
MDSSATDGARLPPPRAGSRLCVRCGERKAALKRPKTLEQICRECFYIIFEDEIHQTIVQNSLFKAGERVAIGASGGKDSTVLAYVLSELNRQHNYGLDLFLLSVDEGITGYRDDSLETVKRNEIQYGLPLKIVSYKDLYGWTMDDIVKAIGLKNNCTFCGVFRRQALDRGAALLKADKIVTGHNADDIAETVLLNILRGDIARLSRCTFITTGEDGPIPRCKPFKYTYEKEIVMYAYFKKLDYFSTECNVWIFFLFSSFHFFPH

SEQ ID NO: 67802 - protein, 652 aa, Zea Mays
MANGSNWLGFSLSPHTAMEVPSVSEPASTHHAPPPPSSSTTISSSSTNNTISSNFLFSPMASPYPGYYCVGGAYGDGTSAAGVYYSHLPAMPNKSDDGTLCNMEGMVPSSPPKLEDFLGGGNGGGQETATYYSHQQQGQEEGASRDYRQYHYQHQQLVPYNFQPLTEAEMLQEGAAPMEEAMAAAKNFLLASYGACYSNEETRPLSLSMMSPGTQLSSCVSAAPQQQHQMAATVATAATAAAALGRSNGDGEQCVGRKRSTGKGGHKQTVHRKSIDTFGQRTSRYRGVTSRHRWTGRYEAHLWDNSCRKDGQTRKGRQVYLGGYDTEDKAARAYDLAALKYWGPATHVNFPVENYRDELEEMKGMTRQEFVAHLRRRSSGFSRGASIYRGVTRHHQQGRWQSRIGRVAGNKDLYLGTFTTQEEAAEAYDIAAIKFRGLNAVTNFDIARYDVDKIMESSTLLAVEEARKVKAVEAASSAPMTHTHSGGKEQLNATTAEETSSAGWRMVLHGSPHQLEAARCPEAADLQSAIMNNDSHPRPSLHGIAGLDIECAVHDHHDHLDVPAGSRTTAAGSINFSNSSSQVTSLGNSREGSPERLGLAMMYGKQPSSAVSLAATMSPWTPVAAQTVAHVLKQQPNVVVSHRPVFAAWADA

SEQ ID NO: 67803 - protein, 242 aa, Zea Mays
MDGGRAAAVGGDPSPIAAPSNPPALSSRPVDVSSFTHTPCYCEENVYMLCNELIRTGVADPAGTDLYVVFISNEEKKVPLWHQKAGHSDDGFICWDYHVICIQSRRSKEVLDFVWDLDSDLPFPSPLIQYVSEAIQPLSFGNSRYARLFRVVHAPVFLQSFASDRSHMKDPEGNWIQLPPKYEPIVAEDGTTNNLNEYIMMSVGDVADRERMANDVYCNKHGVVLNETIFPEFFAQLPAPHT

SEQ ID NO: 67804 - protein, 257 aa, Zea Mays
MAASYDREFWNFSDQLRLHNNFSNLSIADPIWSSTTLDPPSSFSDAPGLIGSAKLAFGNATTANADRYNANAAGVASKSMSVGMIDHYLNKNTNNDVVKSYFNKSVGSRPANNNTTTTVKKNSAAHHDKKHKNSGNGAGVDKRFKSLPAAEALPRGEAIGGYIFVCNNDTMEENLKRRLFGLPSRYRDSVRAIRPGLPLFLYNYSTHQLHGIFEVRLQASEDPTSIQQLGRTRSAPASPASLLSCMHRKVVKVVGRA

SEQ ID NO: 67805 - protein, 1469 aa, Zea Mays
MGAQEEAVDEMLRAAAAEVSTSSVKRRLRIFHHTLPPLIAKAIESPSDTVLLVDLIFQTLPIYDDRASRKAVDDLVIQALGEPTFMKPFAAVLVQSMEKNLKVTNPLTSLKLLRWSHYLLKWSQFATLTKGAFTRLANAQAVLCQVLMDGSFRRRRTCKQLFIHLFSEHSGIYKMYIEELRDLRISMRDSPAFLNLILDFTITSPSLSTQYQSVFLDLYVKIILSSKDRPPKAATEAFKPLFLNIGHEDFKNTIIPSCIKMLKRNPEIVLQSIGYLLKTVHLDLSKYSMEFMPVVLHQARHSDEERRINALSIIGTLSEKSSDPDALPSMVNAIKAVLGGSEGKLSLLYQRIGMINALEQLSRSPPKQIGRLAPSVSTFLLTCYKDDGIEEVKLAILSAIGSWALVSAEAVQPDVVSFIAAGLKEKDTLRKGHLKFLRVICKNSESLTKVASLLDHLIQLSKTGFSKATQRLDGIYALFAVSRLAAVDTKADGAILKEKLWTLIAQNEPSLISLQLLPKLADDDCLAVLDLVQSLFVEQFFRVREYFSIHSLLQLLIYLLCHPSWEVRKVAYDVTKKIFSSSSGLAEDILFLFTDWLSLVGERLSILKQGDMDSPSDSQLPFFPSTEVLVKCLFLIAPYAVVHSLRSYSRIILCSHHPCLTSSSSPAGVYKRLQRRLRQEQIFFVDLITPNISVICKELLSQDGLFSSNNQVQSAALCSLSTLMTITPNDTFLEFEKHFIGLQERTLHDSFSESDIKIFYTPEGQLSTEQGVYIAEAVANKNTKLAKGRFRAYDDQMQETARSIVPAKNEKKESSGIGKRETGKSTKRTAPIDKAKTAKEEARELLLKEEASVRMKVGQVQKDLSLMLDALGKLAIANPIFTHGQLPSLVNYVEPLLSSPIVSDAAFCTMLRLARCTAPPLCNWALDIAAAIRVISVGDFEMVLDLTPVIMEDDSKKPSSGIFEQIVNGLTIACKAGPLPADSFTFVFPIMERILLSSKKTCLHDDVLHILSMHMDPILPLPRPRMLSVLYHVLSTVPAYQPSVGPMLNELCLGLRGHELAQALVGVYAKELHVRLACLTAIKCVPVHSVQRDLQVSTSLWIAAHDPEKVVAELAEELWDRFGFDAITDYSGIFNALSHKNYNVRAASAEALAAALDENQDKMQDALSTLFSLYIRDIGTSVEFGDAHWLGRQGIALALHSIADVLASKDLPVVMTFLISRALADPNVDVRGRMINAGILIIDRHGKENVPLLFPIFESYLNKRASDEKTYDLVREGVVIFTGALAKHLSKDDPKVHSVIEKLLDVLNTPSEAVQRAVSDCLSPLMVSKQEEGQALVSRLLDRMMKCEKYGERRGAAFGLAGVVKGFGISSLKKYGIAVTLQKNLEDRMSAKSREGALLGFECLCEKLGKLFEPYVIQMLPFLLVCFSDQVLAVREAAECAARAMMSQLTGPGVKLVLPSLLKVSIYLI

SEQ ID NO: 67806 - protein, 72 aa, Zea Mays
MVAFRPSRFPPALCEIAAAVPASSIAIHTSTEQRSLTAKNDVLPNQQANRACRHGGAQRQGARLVEAVTAYY

SEQ ID NO: 67807 - protein, 58 aa, Zea Mays
MTILNTDWSVRSIILNTDWSVRSISISPMLNLLRTELGRHGVVWLQLSGLLRQLVMMS

SEQ ID NO: 67808 - protein, 162 aa, Zea Mays
MITKLITNPGKQFHSPRKPSFWASSGRPSLRAPEIVRPRGDSGRTDAGRRRGGDGPAPGGIGLQLVVDRQGQRRVLAAGEGGGRGGGGAERVRGRRRGQPRWVGGIGGGAAYSALQKTLLSQRMHTPENGRISLPTSSCMEIHMNHGQLKFMKLPPLRGMLV

SEQ ID NO: 67809 - protein, 389 aa, Zea Mays
MGPVAGCLVENASRSDLKSVAQQADVIYMVCCLLERLRGAARATQPRTQKVLFEMAHTVMNPLLTLLEVYKNHSTVVYMILKFVVDFVDGQAVFLDAKETSALVSFCLQLLQIYSSHNIGKVMLSLSSSLRNESQAEKYKDLRALLRLLTNICSKDLVGFLSDCGGEGSPDIAEVIYIGLDIVTPLISLDLLKYPKLSRDYFVLISHLLELYPEKVAHLNSDAFTRIIGSLDFGLRNQDSDVVERCLAAVNALASYNFKERLGGRGRLNSQLMESEGSNGKLQESISSHFLRLLLQILLFEDFRSELAGYAADALLPLLFCEQELYQRLVHELLDKQQNPTVKSRLATAFHNLTSSNNLSSSLDRPNRQRFRKNLLSFMADVSGFMQIK

SEQ ID NO: 67810 - protein, 199 aa, Zea Mays
MEENNVIGLKQGKQSISLEPGGQFELSGAPLETLHQTCAEVNSHLYQVKAVGEEMGIGFLGLGFQPKWALSDIPIMPKGRYEIMRNYMPKVGTLGLDMMFRTCTVQVNLDFSSEQDMIRKFRAGLALQPIATAIFANSPFKEGKPNGFLSLRSHIWTDTDNNRAGMLPFVFDDSFGILCKESFHRLLGSCPLLTIGRTI

SEQ ID NO: 67811 - protein, 106 aa, Zea Mays
MVQTSYFQDLDLCSMKRVLFSMAWRPCTSNRCCLFIVIILSAATSRKMMMVVGIDDSEQNFYTLKWAHCSTSSRQASCNSTALSSSPSSPLPPPVSALPAQNSKSK

SEQ ID NO: 67812 - protein, 299 aa, Zea Mays
MGKVRMVATEFETAGRLTKNRSAGRGGEPGRFVLWQMAPEMWYIELAVRGSKVHAGCNGKLVWRHTPWLGAHSAKGPVRPLRRALQGLDPLTAASMFARARCIGERKVNGEDCFILKLSTDPEILKARSEGHAEIIRHVTFGYFSQRTGLLVHIEDSHLTRIQSAAGGDAVYWETTISSSMEDYRPVDGIVVAHSGRSAVTLFRFGEVAMSHTKTRMEEVWSIEEVAFNVPGLSMDCFIPPTDIKSGSVGEAMELAHGERSRAGPPPPPPGCRAKVAALGKAEEGKVAWGGGTVLENQN

SEQ ID NO: 67813 - protein, 279 aa, Zea Mays
MVFLATAVVVCGSFEFGTCVGYSAPAQAGIVSDIGLSNSEYGVFGSVLTIGAMIGAVTSGSLADILGRKMTMRFAAVVGIFGWLTVYFAKDAMMLYAGRVLLGYCTGVLSYVVPVYISEIAPKGIRGGLATSNQLFICSGCSAAYIIGALVSWRCLVVVGLIPCAVLLVGLFFIPESPRWLANIGKEREFHASLQEFRGEDSDISEEATEIKDYIKSVRRLPKAKIQDLFQRKNMYAVTVGVGLMIFQQLGGINALGFYTSYIFSSADSNHILWGPSDG

SEQ ID NO: 67814 - protein, 207 aa, Zea Mays
MCEGCHGDENIEFYGQLKEIIELRYNSDMSKCRTVVLFRCDWFDTYSKKVRMKDDGYFRSINHGSCWYKDDPFILSTQATKVFYLDDTKHCESWRIVQKFTHRHLWNVTENENEETPMGLGLSYQDEICAGFHVQVNEGNLNDEVPDSEDCHHVNTSLVDEFRKPRQDNVQGDGTSDDEDETIWQYVSDDESPTILVEDDDDDSDAE

SEQ ID NO: 67815 - protein, 136 aa, Zea Mays
MPAARPPRTARPLGPAQARGPFDDGAGCTDARAHGVGAASRGTARGRAGTAIPGERAGVAQTRAYGPRPSVGTVSACGQPARPRRRRCDWHGPVRPWASPAWARAQQPRWHRRVPVSPSGAGARLLWRAALPSSVR

SEQ ID NO: 67816 - protein, 919 aa, Zea Mays
MDPAAGGGRGRDRAGFERACRLPNTVHSEVLPSLPLPTLPRELGFDALRDDEPLAAPDRPDTIMQAANIARVLADTDVSHLGFTAADNVDVDPIRCSWLWREVLKHNPDAFKVKAPSPSSQGPFGGPGYQNQEHEKHFEHFTPNTSKARNESAFPQDEIDSHREHFYNELTSDSIASKKPKIRKRENNNSVSSSAPSIPNTQDVITTFCEVVEDFCGKTEIPDDGDGGDWLSIPLGDVKVLVNEITSVRSKRILHEVPMDTVTRLLDVIDRQIRYSQGLSIDVKENSDVVDAEPLVFSALEASHAALAIMTHHDMPKQLYREELIERIIDFSRHQITDCMAASNPTFRALYKPAENVANDGDDDEDDLENGQVSKRRRTATNLSMRKSSNKLSASVYSAVQKLCLILGFLKELLTTVRLSDGCILQLAKTCFTTFLVDNMQLLQLKAIGVICTVFSSYTQHRSYLVDEILHLLRKLQFSKNAVRTYHLADEDQKQIQMITALLVHLVQFSAIVPNSLKGTVDWTTIVDASGDADYYPIKCHEAATEACCRFWTDVLQRFTAAKSQDMSETKGIIDNLVQDFLMILNLPEYPAAASILEVLCVLLLQNAGLKSKDTNVRCFAIDLLGGIASRLKHDSVICSEEKLWILQDLTDAGSDGSKILKNKCCVCLGGRGINIACNECGRCFHSDCMGAASQDNLERDSVCPLCFCKQQLNVLQTYCQSQIKENGKKTAASTSKKSAKPAEVPAVDIIQQILLSYLQESGPQDDGNLFTRWFYLCIWNKENQHSQEEIIYYLARLKSKEILRDSGNGLAISRDSAKKICLALGQKNSFCRGFDKILALLLASLRENSPVIRAKALRAVSSIVEADPEVLGDKRVQSAVEGRFCDSAISVREAALELVGRHIASHPDVGLKKKLLSE

SEQ ID NO: 67817 - protein, 278 aa, Zea Mays
MSKNLIDFDSDLEPPQGVAQTDIQKGSSPQTDVGWATFDDATSKKTTTMPSTSSTNFLEGPMLQIADLTSAPQIRFSNAKSLSFAPSNRGNQLNQQNFSPVNTTQYSNTLLNRATSAPVHSQDIFAMSYRPVSSAWNWQPNPSVNMQYGQHRTHYPVGIVNTTQLAHPYPVNPVSLAGGPASAHASTRFPSLTSMQEALPNLGSTAVLSRAPVHQYMVQQHTVQVPNYTFPSGYEGTRGIAATASTYGLPPMDQRLAAQNLQVMNHGSLPRVGGNPFA

SEQ ID NO: 67818 - protein, 186 aa, Zea Mays
MVRSLAPHRPLDPTACRANFFVYILAGPEEGQGPAAVVEAGQVRWWQAKEEEVEQGKAKGEGKQRGAVRPGYLRQAALGGAQVQANHPFHPLRASEDQRLPCSEGHQGLDGAWPHSDGLGPLKPADLHQGNQYIRMGKRSKMHCLPSLQEELVFRTVAIFVKSCQCYVTGDEFQMVRRRNPSVINF

SEQ ID NO: 67819 - protein, 505 aa, Zea Mays
MLPPFGNPLWVPEDMDDQQQHAPPPTPMELLTVPAQGHEEQNLLALASAAAVAGAGCVFSSPAMLDDDWYFDPVAAAAATGAQGHLLLAPPGPVPGPGAGSQMFSLFNVGGAATFDVHGFDIGLGTLGGGSGGDLVPLAGAGNTSNSASFSMSLNAGLLASSFGGFGTAPAQMPDFGGLGGFDMFNNGAGSSSAAPPPASASLTVPFSGRGKPAVLRPLETFPPVGAQPTLFQKRALRRNGGGEDYDKKRKAEATAAAAGASSACGGDDAEDDDGGSIDASGLNYDSEDACRGVEDSGKKDGKGSNANSAGDGKGKRKRLPAKNLMAERRRRKKLNDRLYMLRSVVPKISKMDRASILGDAIEYLKELLRKIEELQNEVESSASPASTASLPPTPTSFRPLTPTLPALPSRVKEELCPSALPSPTSKQPRVEVRTTREGREVNIHMLCARRPGLLLATMRAIEGLGLDVQQAVASCFNGFSLDIFKAETRSALHDGGAASRIPSK

SEQ ID NO: 67820 - protein, 659 aa, Zea Mays
MDDAAGEEEASMFETSHVLGALLASSPLLASAWDRCTTATAAAPGFVHGEDGGKVYVGFSGVQAALSAAGAAVAGGGADVFAPVGLGGDAAGRMFAPLLAAEPDSSAAGEPVAVQALALQCFLKLCGNPDFQMLLNEIRGKAVMFTGHSLGGAIATLAALHYLCISSSSSPWSPAAPVLCVTFGSPLLGNEALSRAILRERWGGNFCHVVSQHDVVPRLLFCPPDAVPAHIIVGMQLDQWPARTRHTGAVNTVTTRMADTDKNALQQLIQTHMAAVAMEQKLATPETTGGSPYRPFGTYVLCSPEGAACVDNATAAAQMLYATFASRSSPGAESPEAAHSCYGELVLKMPQHLLLKRCLRVDDTRATPNYDDGVSLALEASGIDATVRAHAMEASTARQWLKTSKRAGRRPSLNCACLATQLGRITPLRAQIEWYKAVFDAEMGYYDAFKQRRSPRKYSKVNLNRMKLGQFWDGVLTKLDAGQLPHDFHRRAKWVNAARFYQLLVEPLDIADYHHQGLHRTSGSYMTHGRERRYELFDRWWQEKACTGAGGDITSSMLAASASSRRRSKYAGLTQDPCFWARVEEAREETESARGERDVAELAMKLEELQEFERYSRELVANKEVSVDVLAPQSSYTLWVEEWNQLKLRDEVRTLLLQF

SEQ ID NO: 67821 - protein, 270 aa, Zea Mays
MKPPRLGPSPPSIRIPPSVPRAIPSFIPILVRAAARGSLRPGARMLAVFSGEVVEVPAELVAAGSRTPSPKTKASELVARFLGTSCPAAVSVRLADLGHLAYSHANQALLRPRSFAAKDEVFCLFEGVLDNLGRLSQQYGLSKGANEVLLVIEAYKALRDRAPYPASLMLAQLAGAYAFVLFDASTNSLLVASGGDVPLFWGVTADGCVAFSDDIDVLKGSCGCFYSNALGGLKCYENPKNKVTAVPANEEEICGATFQVEGATVLTALH

SEQ ID NO: 67822 - protein, 101 aa, Zea Mays
MKAPRGSLDVEDPSRHKEFLMEFASCKAACGMGGSPASCQLGYVAPKQIAMVPRAYRAIRGWDSCVGTTYGVLASDVRRGGTVLPYPALGGGRRTCPCRWI

SEQ ID NO: 67823 - protein, 96 aa, Zea Mays
MMWNTVMGFLFKNQSKLIVMIPLRPKWVHHSKRVPLSGTKNGKMVGINLDQTLSRKGRPSVSFKDRTESRLADLGPFNWPHASSWVSLASVEPIPE

SEQ ID NO: 67824 - protein, 92 aa, Zea Mays
MDSPCRPEFEGSAENEFIERNQLQKSEPNNDLVPGFQHPNTRQGVKARTLSYDDLVPGIQRADGRQEMKASTLSYEDELFRKFKMGSSVPEI

SEQ ID NO: 67825 - protein, 278 aa, Zea Mays
MVDGGTEGFKGHARVIIPGTTPCFECNIWLFPPQVKFPLCTLAETPRTAAHCIEYAHLIKWDEVHPGKPFDGDDAEHMQWIYSEALKRAELFGISGVTYSLTQGVVKNIIPAIASTNAIISAACALEALKLISGCSKSVSNYLTYNGLEGTHIKVTEFVRDKDCLVCGPGTLVELDTSSTLSDFIKMLEEHPKLRMSKASVTHEGNNLYMQSPEVLEQMTRPNLSIPMFELLKEVPYTTVHATGMAENNGKKVSSLRKLRVAFKGIEDASKMDTTVSS

SEQ ID NO: 67826 - protein, 212 aa, Zea Mays
MVLDTNYPKAISRRATLYEMIRDYGHAANDLRKLISLLEKKVNVSGISPKAFNKHKDIKQAHARLSHIHAEAKNDTPLNLYLILGVEPSCSSADIKKAYRKAALRHHPDKAAQLLVRNENAEDGFWRDVIKEVYADADHLFKTIGEAYNVLSDPDKRQEYDFEENLRNARRVSSSRSMRRSPEHNYSDRGFNPRQWQSSRASRWYSKSDDYW

SEQ ID NO: 67827 - protein, 89 aa, Zea Mays
MMQQVAEYSKNQQSDKHTHICLDTKEASICRNRTHMSLCFDLWTSVIHLSFCLSHTHTHTLYLSLSLLSVISFFNLCGYLLLVPPIQLN

SEQ ID NO: 67828 - protein, 211 aa, Zea Mays
MVQVETVAQFGVIFLLFALGLEFSTAKLRVVRAVAVLGGMLQIMLFMFLCGILATLCGGKTKEGVFVGVLLSMSSTAVVLKFLMERNSINALHGQVTVGTLILQDCAVGLLFALLPILSGTSGLLHGVASMTKSLVVLITFLTILSILSRTGVPWFLKLMISLSSQTNELYQLAAVAFCLLFAWEIRLIFWLLPKYPSHLEDRWHLLSTTA

SEQ ID NO: 67829 - protein, 172 aa, Zea Mays
MSAGLVTDEATVGRLYRIRRTVMQMLRDRGYLVVDHELATSRRDFLRKFGESFHREDLLINKYKKNDPSDQIYVFFPNDDKVGMKHIKKYVEMMTHENVSRAVLVLQQNLTPFAKSFLIELEPKIHLEIFQEAEMLINIKEHVLVPEHQVLTNEEKKTLLERYTLKETQAKV

SEQ ID NO: 67830 - protein, 511 aa, Zea Mays
MHVHSGRSSMRPAPETSTRRPQLRRRRPVPLVTVAVSLALISLACLPVFADASRALHRDREEHRRQHHRTEDKKSRVSLPPDADGDSPPEPPDSGGAPPPADDSDCGNVFDVRAFGASGDGSCVDDDTAAFRAAWKAACSSDSAAATLLVPSDGVFTIASTIFSGPCKPDLTFQIDGVLMPPDGPASWPATDSRKQWIVFYKADRLTLAGEGTIEGNGEEWWDLPCKPHRGPNGSTLRGPCDSPALIRFFSSNDVTVCGLRIENSPQFHLRFDDCERVRVDGLFVSSPASSPNTDGVHVENTKSVQILNSRIYNGDDCVSIGAGCSDVHVENITCGHGHGISIGSLGVHNTHACVSNVTVRNVRILDSDNGVRIKTWQGGAGAVSAVEFTGVQMQNVKNCIVIDQYYCLGHGCANQTSAVRVAGVAYRDIHGTYNPQAGAPIRLACSDAVACTDITMSGVELLPAGGDDGALLADPYCWNAYGVMETLTLPPVYCLLEGSPESLQDPLTSC

SEQ ID NO: 67831 - protein, 325 aa, Zea Mays
MAIPSALGVSATKGYNVNSLAVPRKAKEAIGGITKLTHVDGRTMVINVEYNQLDPLLRATGYPDGDTNSETGYSPYPGNINQLILELGPYIEELKKTHGAISEFVNPKYTDSTKTSFKSSTRLECMMQDYPKTLPPSTKVGFTVMDTWLAYAPVKNNPEDAAKVPKGNPYHSATSGEMAIYRANSLILRKAGAQIADPVVDTFNGQEVEVWPRVTWSPRWGLTFQSVKEKVHGSCSVSQRSALVIDGRSVFLDGLSLDGTLIVNAVDGAEVKVTGHVENKGWTIRHVDYKDTSEKEEVRIRGFKFNKSEQLEVNYTEPGKHSLSA

SEQ ID NO: 67832 - protein, 431 aa, Zea Mays
MRGGGGASWLSFRGVVVEEEEAVVSAPEKPMRRGRRRWGAEVDDGYSPSSTGGGGSSCCDSFGCDSPLAGFVRPDGDPDTDLETDGLATSTSSAFTERQDDEAEEALYGVKEEEWAQIQEPAKNPAFRATPECHKQRYRTDAAVLLHGRKGSKQRPASLDLGSPGFHGATFSPSFVIGGVGLMNKGLGASVIRSDVFHSPGTPNYPRHRASVLGCHKGWSSERVPHPSKGNRRYPGSSMAFPYSNGRTLPSKWEDAERWIFSPNSSDALGRTTVAHARRPKSKSGPLGPPGRLGGQYSSVSSVSLLDNGRAGPITANSPFAAGVLMPEHVCEGKSTNGTYSSRPIGNEINIGRGVKICPLNGGSHPVRTSRVRQRLDYAVESSVSLPSTQESVQDEQVEITEDSASTIASIISRKDAATQTSPELSGQRKM

SEQ ID NO: 67833 - protein, 1218 aa, Zea Mays
MARAEANWERLVRAALRGERLGSAYGQPVTGIAGNVPSSLGNNVHIEEVLRAADEIQDEDPTIARILCEHGYTLAQSLDPNSEGRGVLQFKTGLMSVIRQKLAKRGGAAIDRSQDIAKLQEFYKLYREKHKVDELIEDEMKLRESAVFSGNLGELERKTRKRKKVLATLKVLWSVIEDMTKDISPEDANKLISEEMKRVMQKDAARTEDVVPYNIIPLDSLTSTTNAIVNFPEVRAAISTLQYYTDLPRLPGTFSVPDARNSDILDLLQCVFGFQGDNVKNQREHIIHLLANEQSRVGKLSGNEPKIDEGAVHAVFSKALDNYIKWCNYLPLRPVWDNNDSLTKEKKLLYVCLYYLMWGEAANVRFIPEGLCYIFHHLARELGVILQKQTAEPAESCNSGGGVSFLDNVIYPFYEIIAAEAANNKNGRAPHSEWRNYDDFNEFFWSHKCFHLRWPWNLSDPFFSKPSRKYKGLLSRNHHYGKTSFVEHRTFLHLYHSFHRLWMFLIMMFQGLTIIAFNDGSFDRKTILQLLSLGPTYVVMKFIESLLDILMMYGAYSTSRGSAITRVAWRFCWFTIASVAICYLYIKTLQDGTESATFKIYVFVISAYVGIKIIFSLLMSVPCCHGLAEACYRWSAVRLVKWMHQENNYVGRGMHESPLDYIKYATFWIAILGAKFSFTYFLQIKPLVEPTRTIINFTGLQYAWHDFFSKNNHNALTILSLWAPVLSIYLLDIHVFYTVLSAIYGFLLGARDRLGEISTVEAVHRFFEKFPGAFMHRLHVEVPKRKQLLSSGQEIELNKFDASRFSPFWNEIVRNLREEDYINNFELELLLMPKNDVGVLPIVQWPVFLLASKVFLAKEIAEDCKDSQEELWLRISKDEYMQYAVVESFHSIYHILTSILEKEGRLWVERIYGGIRDSISKRTIQSDLHFKKLLNVIAKLVAVLGILRGTTESSDLKKGLVNAIQDLYDVVHHEAFSVDMSGHIEDWDQINLARAEGRLFNKLKWPNDPKLKDLIKRLYSLLTIKESAATVPKNLEARRRLQFFTNSLFMEMPVARPVSEMVSFSVFTPYYSEIVLYSMAELQKKNEDGITTLFYLQKIYPDEWKNFLTRINRDENAADSELFGNPNDILELRLWASYRGQTLARTVRGMMYYRKALMLQSYLERIQSEGLAGSADRHFELSPEARAQADLKFTYVVTCQIYGKQKGEGKAELQTYPY

SEQ ID NO: 67834 - protein, 768 aa, Zea Mays
MAAPLGFFCMLLLLLLQLGHSSCNNVYIVYMGARNPELHPALVRDAHHGMLAGLLGSEQAAKDAILYSYRHGFSGFAAVLTDSQAARLAGSPGVVRVVRNRVLDLHTTRSWDFMRVDPSHSAGILPESRFGEDSIIGVLDTGIWPESASFRDDGMSEAPRRWKGQCVAGDRFNVSNCNRKIIGAKWYIKGYEAEYGKMNTTDIYEFMSARDAVGHGTHTASTAAGALVAGASFRGLAGGVARGGAPRARLAVYKVCWATGDCTSADILAAFDDAIHDGVDVLSVSLGQAPPLPAYVDDVLSIGSFHAVARGIVVVCSAGNSGPYSETVINSAPWLVTVAAGTIDRTFLAKIILGNNSTYVGQTLYSGKHPGNSMRIFYAEDVASNNADDTDARSCTAGSLNSTLVKGTVVLCFQTRAQRSAAVAVETVKKARGVGVIFAQFLTKDIASSFDIPCFQVDYQVGTAILAYTTSTRNPTVQFGSAKTILGELMGPEVAYFSSRGPSSLSPAVLKPDIAAPGVNILAAWTPAAAISSAIGSVKFKIDSGTSMSCPHISGVVALLKSMHPNWSPAAVKSALVTTASVHDTYGFEIVSEAAPYNQANPFDYGGGHVDPNSAAHPGLVYDMGTSDYVRFLCSMGYNVSAISSLAQQHETCQHTPKTQLNLNLPSISIPELRGRLTVSRTVTNVGSALTKYRARVEAPPGVDVTVSPSLLTFNSTVRKLTFKVTFQAKLKVQGRYYFGSLTWEDGVHAVRIPLVVRTMISKFYANS

SEQ ID NO: 67835 - protein, 882 aa, Zea Mays
MPPGGRRGAKQRSNWTREPQLGDLVLAKIKGYPSWPAKISKPEDWKRKPTPKKFFVCFYGTGEIAFVPLADLEEFTEKKKNDLLDRALKVQRKYVQQFNVAVEQICKAYNELPKTSEAANVALPDQSEKTTEHLVRSPDIGGTPGLGQMEDDPPTDCSSTSGQGSGTEEDVKDGGHEIGDNSLAVPQKKASLQQDPKHPKTKKSAASKSGFDMYTEQEHSPTSLRAERQIEEVKIEEESCHLEGFVLEPNLEVVCALEVPKNFKSNKLLRNAESKENEHVGVGSPTGRIAVEAASDVVLNMSAEEESREFKKSKIMTKQSLTTGSEKRDNKIVHGKPDKQLTGKSSAGFSLNQKSLTGSGQHKMDSSADTRPAKKARLMDRAGETDKTVAKSETKLNINYENHNAVKHEQSTAVETCKNTILKTGIGDDRARKSGGAVSPISKLHSEIMEPASGSSVTQSTVADSLKKGSSRKEDVSRVDRKLVKPKRRACRFDDDEDEGQQTPLHRTSAKSLSTHIVPTEKPGSRGNFASHVGNASGKKPGPAREEKSRSVRMSPVKHEPVFSSPSQDKVHARHQLMGRNLITGSVETPVIGNKMSLVDGKSSAQVKMPACSEVKKLHSTSKPLQVTSGKSHSRNYPASEKIALVPKSEETKAKSKPATSVEHKVATTLSTERTGKRDHLKEERSSSVDKAAYSEPNPDSAKSIKHLIAAAQARRNLMASALAKFDGSSTDNSAITSTSYAIARDALEGMIETLSRTKDSIGRATRHAIECSKYGIAGEIVELLIQKLENEHNLHRRIDLLFLVDSITQCSHSHRGVAGASYVPTVQAALPRLFGAAAPPGAGARENRRQCLKVLRLWLERKIMPEDILRKYMGDIEQCNF

SEQ ID NO: 67836 - protein, 513 aa, Zea Mays
MTTRLTATLLLSRTLVRRVTSRTPTPLGPFGLEPSAGIPISWSRRASSTASGDRGQEPPPAMDSPIKVVSHLGGGRGGGGGEGEGEGEGGAAAIDAGKSARRPLSLWPGMYHSPVTNALWEARSSIFERMMDAGNGASSAEQRPQTELLVKTPAQSRTSIVYKFATDDILREQYRDPWNEVRIGKLLEDLDALAGTIAVKHCSDEDSTTRPLLVVTASVDKMELKKPIRVDTDLKIAGAVTYVGRSSIDIQIEVTQVDKADGDNQSDPIALTANFTFVARDSKTGKSAPVNRLSPETEREKQLFGESEARDKMRKRKREEQKGGLENGIHRLRAEAERLDVLLAEGRVFSDLPALADRDSILLKDTRLENSLVCQPQQRNLHGRIFGGFLMHRAFELAFSTAYAFVGQRPCFLEVDHVDFLKPVDVGDFLRFKSCVLYTQLDNPEQPLVNVEVVAHVTRPELRKSEVSNTFHFTFTVCSDTLKNGLKIRNVVPSTEEEARRILERMEAEGLCN

SEQ ID NO: 67837 - protein, 68 aa, Zea Mays
MRKLEKGLENSSNFSRGIGESTLSTSPHWSTRARISFPLSPCSRAATTCSNSGFSKSISIPILLWAIE

SEQ ID NO: 67838 - protein, 163 aa, Zea Mays
MATGRPVRLVLDASLLLDPSSTREAAAVALRPGVEELLRRLRYSNLNVAICYAEGMPTNESGFLEKVASSHLFGSIALLAKSGNLSLTELMLEWSQTSLCFYATSRVDKGLSSELQNQNWRVLSVANECSIEVPGVLNVQRLQQLLLTLATLIKGNYVTHLFW

SEQ ID NO: 67839 - protein, 1023 aa, Zea Mays
MGVPAFYRWLAEKYPMVVVDVVEEEPVEIEGVKVPVDTSKPNPNSLEFDNLYLDMNGIIHPCFHPEDRPSPTTFGEVFQCMFDYIDRLFVMVRPRRLLYMAIDGVAPRAKMNQQRSRRFRAAKDAADAAAEEERLREEFEREGRKLPPKQQSQTCDSNVITPGTEFMAVLSVALQYYIHRRLNYDPGWKQIKVILSDANVPGEGEHKIMSYIRGQRNLSGFNPNTRHCLYGLDADLIMLALATHEVHFSILREVVYTPGQQDKCFLCGQVGHLAANCEGKVKRKAGEFDEKGGAIVPKKPYQFLNIWTLREYLEYEFRMPNPPFKIDFERIVDDFIFMCFFVGNDFLPHMPTLEIREGAINLLMAVYKKEFPSMGGYLTDSCTPDLSRVEHFIQAVGSYEDKIFQKRARLHQRQAERIKREKAQAKRGDDLDPHVRDDLIVPIQRFQGSRLASGAVPVPYEQNGSHKDNKERNSRARKAARVSTSGSSIASALVEAENDLEAQECENKEELKSMLKDALREKSDIFNSDNPEEDKVKLGEPGWRERYYEEKFGARTPEQIEEIRRDVVLKYTEGLCWVMHYYYEGVCSWQWFYPYHYAPFASDLSGLGQLNIKFELGTPFKPFDQLMGVFPAASAHALPLQYRRLMTDPNSPIIDFYPTDFEVDMNGKRYSWQGIAKLPFIDEDRLLAEIKKVEHTLTPEEARRNSIIGGMNGYITLCSGDPCPPIFRSPVDGLEDIMDNQVICSIYNLPDHHKHIAQPPVGVIMPKKIVEAGDLKPPPVLWHEDSGRRPHDNSNRQNPSGAISGRQLGEAAHRLVINSLNAQGRGQHSGTSMPYRTIMNGLHHLDVASPVSNQGMRPQVGQSAGPPGWYVPRGSVSNGQPPAYASSGSGHYQYESSGHSQYEQGNHGRQQSHPYARDGFHDTRGRVPPAYGYQQSNMYPSGPGLYGQPPSAYPGVHGGGYQPPPYGGGQQWQQQSYSSYAVRGPYGGRPPPTRADSGSQQPQNRYGALDRSNNRRPSSGYRR

SEQ ID NO: 67840 - protein, 602 aa, Zea Mays
MAIPEDLEGTSGDGGVTNRGSRGRRKGAAKGRGRGRPRSADRSFPPPAMAGVAVGDRVLRERRHTTNVFCERDTDVDDEWANFYAERFCSQIWPCINQNLNALSKFVFDLVYLQLPLVQRLSIRVIYSSLDDVETVRSKDSRSGDVLQTAKKRKKGGAGKVSVTKRSKREGEEQKKASPSKDKDCAETNGKRKMLTGDNALMCHQCQRNDKGRVVWCNSCRNKRFCVPCIERWYPNLSEDEFAAKCPYCRKNCNCKGCLRMRGVEEQPPKKEISEENQISYACNVVRLLLPWLRKLRQEQMEEKKLEAKIKGVLVNEMKLEQAEYNLDERVYCNNCKTSIVDFHRSCKYCFYDLCLDCCVEIRRGEIPGGEEIMRVKPEDRGRAYLFGTTNSKDGSKRFSMRRHSSSLENEPSNVVGSSEGANNSLELWKAESDGSIPCPPKELGGCGGSILDLKCFFPEKMLSNLEERADRIMRSEVFAKAVAKRSDQCPCYDHSGNIRTQDVRETANTKGSSDNHLYCPVATAIKEDDLAHFQMHWTKGEPVIVSDVLHLTSGLSWEPLVMWRALREKKTNGDVEDEHFAVRALDCLDWCEVRSYISLNV

SEQ ID NO: 67841 - protein, 833 aa, Zea Mays
MDDVCEGKDFSFPEQEERVLELWAKLDAFHEQLRRTEGGEEFVFYDGPPFATGLPHYGHILAGTIKDVVTRHQSMRGRHVSRRFGWDCHGLPVEFEIDKLLGITNRQQVFDLGIGKYNETCRSIVTKYVSEWEAMVTRTGRWIDFKNDYKTMDLNFMESVWWVFAQLWEKDLVYKGFKVMPYSTGCKTALSNFEAALDYRTVPDPAVMVSFPIVGDMDNAAFVAWTTTPWTLPSNLALCINANLMYAKVRDKSNGKVYVIAESRLGQLPVKAKASGKKQAPSKGSNAEAAQDGLDKESYELLVKIPGPYLVGLKYTPLFDFFIELQETAFRVIADNYVTDDSGTGVVHCAPAFGEDDHRVCLAAGIFETAGLVVAVDDDGCFIEKISDFKGRYVKEADKDIISAVKDKGRLVSKGSIEHSYPFCWRSGTPLIYRAVPSWFVKVEKIKDQLLECNKETYWVPDYVKEKRFHNWLEGARDWAISRSRFWGTPLPLWMSQDRKEIVVMDSIEKLEKLSGVKVTDLHRHYVDDITIPSKRGPKFGTLKRVDDVFDCWFESGSMPYAYIHYPFENRELFEKNFPGNFVAEGLDQTRGWFYTLMVLSTALFGKPAFKNLICNGLVLAEDGKKMSKSKKNYPSPKDLIDEFGADSLRLYLVNSPVVRAESLRFKRTGVFAVVKDVFLPWYNAYRFFVQNAKRLEVEGLASFSPMEQAVLLKSSNVLDHWINSATESLVSFVHQEMDAYRLYTVVPYLVKYIDYLTNIYVRLNRKRFKGRTGEEDCRISLSTLYHVLVTTCVVMAPFTPFFTEVLYQNLRKVSSKSEESIHFCKFPSTTER

SEQ ID NO: 67842 - protein, 750 aa, Zea Mays
MAVGDALRRLCEEVGWSYAVFWKAIGAADPVHLVWEDGCCGHVSCSAGSEAPEAGCELGTSVCTLVRKVMTSQIHVVGEGTIGRAAFTGNHQWIVHDPANDHNLRPEVSAEMNHQFAAGIQTIAIIPVLPRGVLQLGATSVVMENTNLVLQYKNLCSQLNNRSSMASSSSVKNDLNQKIQSRPLNGLTSIHPADTRSKFFSGPPLTYQQCYGPDGRTVSSSTLANMGSNASMLMVAQRNGQVGKEHIVYAPDMRFRPQNPYCDRRVGSNTQNSVVSSGFISSISASMERHPLMTNNRQLEQGNTGEPSDSRSVLLKSLAYHNPLVHENTNMTLLHGRGQVPGFVNGHGGFDFLPEGTRVVKSNLYGSTTNQILDQICSSTSGMKGHGPTISYKIPQPTQFVGKTESSKRETCQASVALLSDSDIQVSSVLKTAISQENQTSRSDLIGSKKANEVHDPTDAIVQAVKNMDRRRLPDISNERSPPFLMDPAAESDLFDMFGSEFHHLCHNVDNDLTWKAAKPENSNRDVPEFSDHLGSSPAFNSVDDEFPYSGIFSLTDTDQLLDAVVSNANPGGKQISGDSASCKTSVTDIPSTSYCRLKEPKQSESSAPPLLIKNELAVSNFVKHPSFPEKAADGCLSQNNAIQKSQIRLWIESGQNLKCESASASNSKGVDTSSKASRKRSRPGENPKPRPKDRQLIQDRIKELRELVPNGAKCSIDALLEKTIKHMVFLQSVTKHADNLKDSNESKYG

SEQ ID NO: 67843 - protein, 173 aa, Zea Mays
MQPITLLPFHLSARLHFHLALGVPVHRLVKAADSVSVCLSKGLGAPIRSVVVGSEAFIDKARILRKTLGGGMRQVGFLCAAAYVAVRDTVGKLADDHRKAKALAEGLTKIKQFTVDSSSVETNMVFFDIVDPHISPSKLCQVLEQRNVLAMPASSKSRYFARSSWPYWERRCS

SEQ ID NO: 67844 - protein, 110 aa, Zea Mays
MLFEVFTGKRPTDTMFEGELSIRQWVQQAFPSQLDTVVDSQLLQDAISSSANLNEVLPLIFELGLLCTTDSPNQRMSMSDVVVTLKKIKMNYTKFGISKDTMSFPAIDHA

SEQ ID NO: 67845 - protein, 109 aa, Zea Mays
MKGEIKIKGIELQESCSLSFFSMGVIETETMGTRVKESKTVLVEKELELIDEPQIQESPPVRALLHDEVDFAESSLAIRESDIPVKKVLIIVTITFVWPQQPYYLKPMF

SEQ ID NO: 67846 - protein, 53 aa, Zea Mays
MSETQATVAGSSDYFNQSARSFGQDGQSGRGLPGLGQLCLVVGSRQQFGAQHC

SEQ ID NO: 67847 - protein, 343 aa, Zea Mays
MDCPLHDSLLRVHYKGMLLDEPKSVFYDTRADNDGEPLEFCSGEGLVPEGFEMCVRLMLPGEKSIVTCPPDFAYDKFPRPANVPEGAHVQWEIELLGFEMPKDWTGLTFEEIMDEADKIKNTGNRLFKEGKFELAKAKYDKVLREYNHVHPHDDEEGKIFANSRSSLHLNVAFCYQKMGEYRKSIETCNKVLDANPVHVKALYRRGTSFMLLGDFNDARNDFEKMITIDKSSEQDATAALLKLKQKEQEAEKKARKQFKGLFDKKPGEISEVGVESDGGKDAGDARVNGGEATSADRGVNTNDSPTSESEYAFEEERPGLLGSLWPSARMIFSSLGMNRCAIL

SEQ ID NO: 67848 - protein, 217 aa, Zea Mays
MHKLLVLMPIIMRMRMLQRAHVLFVLLVEKVEKAKYIYIAGFFLTVSPDSIQLVAEHAAATNKVFMMNLSAPFICEVFRDAQEKALPYVDYIFGNETEARTFAKVRGWETENVEEIALKISQLPKASGTHKKITVITQGCDPVVVADDGKVKTFPVILLPKEKLVDTNGAGDAFVGGFLSQLVQEKNIDECVRAACYAANVVIQRSGCTYPEKPDFN

SEQ ID NO: 67849 - protein, 455 aa, Zea Mays
MGCAASRLEDEEAIKMCRDRRDFIKQALEQRNRFASSHIAYIESLKRVSMALQRFVAGDDHHELIFDTFISPVKQQKPETLSLPYGSYEKRTIHVSRYLRSGPNPSVSVEEHPRPVETVRVESHYPMDNHSGMDRFLQSHSSPVVSSSYYPPPYTRPSYPSPSSQEPVMNTSTYYMPYDRPRYAPPSPQEAMRTSYYASYDRPSYRPPSSQEPPRNSYHVPYDRPSFPPPSPQEQESSPWDSFWNPFSSLDSFGYPRPRSSYDNVTNDDELARLQRVREEEGIPELEEEDDECQEHVQMHRKEEQEDHDNADDDDEDDEEDDDDECEHSDEYMVSDEGTCSVNFDANMKQETKGFESKGIQCTEAPEPRKTVELELKAHKKELMRNRVANAEETPGFTVYLNRRPASLVEAMKDIDCQFSGICDAAREISVMLEASRAQYSASNDLSGTAFMIQC

SEQ ID NO: 67850 - protein, 102 aa, Zea Mays
MVRQRGGSRGRLLSYSYYTHATSGRVRGRCFSSSRSSVGRWREPAHVVVQCSVPNSSPPPPPSPPPPLSLSLSRTVESHMSLSIGGMVFTCPMRASSLRFQP

SEQ ID NO: 67851 - protein, 268 aa, Zea Mays
MSAKCEGLSGPLRLQQGPLKRPLNYRGCARDPNCGGRPPCAIRATDPPAAARKLPPPPTARWRLHLPGPSPQSGVLRRRHRGRWETRGLARADAEHGGGADRRGVHGHRRTRSIVEEQIEEASMATAAATPFQLQFDKPIPFQGNGWFTDGQARPLPHLKFYDLHRIREGVRKEGAQKSGQKYLSESDLQNADGHPEIDLAFVLLLPRRSLIKMAEWNPEKDLLAMVTDDSKVLLHRFNWQRLWTISLGKCITSICWSPDGKIIALGT

SEQ ID NO: 67852 - protein, 87 aa, Zea Mays
MVHPCTTRGLAHGVTVSETGCLVVDVKRSGAPPVSVDNYTGASKTPCGSSGGYERVCGARAALYLGDGRNKTMSRPLGWRSTARLRR

SEQ ID NO: 67853 - protein, 132 aa, Zea Mays
MGPRREFGEGNGNGVEGGYGGGGFGDSGFPRREEGDGKAMGRGHGPRQPYRGGGRRGGYTDSEAGDESGRPPRRAYERHSGTETVETEGAPAVAEAENKLEEAPQSEVEKGKEGESTEVEEPEDKVVDIFKW

SEQ ID NO: 67854 - protein, 1927 aa, Zea Mays
MSGRRGPAATGGGRGGGGGGGGNWRRSGSAKAKEQRLRLGAEELLESRLGFAPYTDGERRLGWLLTFSPSSWEDEDTGKIYSCVDLYFVSQDGSTFKVKYKFRPYFYAATKDKMELEVEAYIRRRYEGEISDIEIIEKEDLDLKNHLSGLKRKYLKLQFDTVQQLMRVRNDLLHVVEKNEEKIDAVEAFESIHGVKRVERPQDYINYIIDLREYDVPYHVRFAIDNDVRSGQWYNVNVSGSDVLLQRREDLLQRAEVHVCAFDIETTKLPLKFPDAEYDNVMMISYMIDGQGYLIINRECVGEDIDDLEYTPKPEFEGYFRVKNVQTELDLLKAWFSHMQEVKPGIYVTYNGDFFDWPFLEKRAAHHGIKMNEEIGFQCDNNQGECRAKFSCHLDCFAWVKRDSYLPQGSQGLKAVTKAKLGYDPLEVNPEDMVRFAMEQPQTMASYSVSDAVATYYLYMTYVHPFIFSLATIIPMSPDEVLRKGSGTLCEMLLMVQAFKASVICPNKHQADLEKFYNNRLLESETYIGGHVECLETGVFRSDLPTKFQLEPLAYEQLIGNLDRDLHYVIAVEGKLDIDSVTNYDEVKDAIEQKLVALRDHPIREERPLIYHLDVAAMYPNIILTNRLQPPSIVTDVDCTACDFNRPGKNCLRKLEWVWRGETYMAKKNDYYHIKRQIESELIQSGGIASSKPFLDLSKPEHLLKLKDRLKKYCQKAHKRVVDKPITEVREAGICMRENSFYVDTVRSFRDRRYEYKGLNKTWKGKLAEAKASGNSMKIQEAQDMVVLYDSLQLAHKAGKKLTISYPCVMLNADVARNNTNDQYQTLKDPVNKTYTTHSECSIEFEVDGPYKAMILPASKEEGILIKKRYAVFNEDGTLAELKGFEIKRRGELKLIKVFQAEVFDKFLHGSTLEECYSAVASVANRWLDLLDNQGIDIADSELLDFISESSTMSKSLVDYGEQKSCAVTTAKRLAEFLGDSMVKDKGLHCQYIVAREPQGTPVSERAVPVAIFETDPEIAKHYLRKWFRFSSDANIRSIVDWSYYKQRLSSAIQKIITIPAAMQKISNPVPRVLHPDWLHKKVREKDDRFRQRKLRDIFSPLAKEEGLHNLNRTGDMEDLLISNKDLRKNPSHGLDIDKENNPNGASVGSGLNISKKQQNCMTGLNVPCTSQIQNAASYETVDKGTDYQGWLDAKKRKWKYVREQKKRRRLGAAATFDDPNALLSARHANQLPVNSRNRSTFFQKQELALFRSHWQIIQLASSTVPGHFFAWVVAEGIMFKIPINVPRTFYLNSKAPVTEEFPGRRVKKILPHGRPCFNLIEVVTTEEQFRAEGKKLAAHLAEPDVEGIYETKIPPELNAVLQIGCVCKVDKSAKRRSIQDGWDLAELQMKTTAECSYLEQTFSFFYLYHSLSEGRAVYVFYFPTSFRIHAVIVNPFRNKEISPSFLEKQFGDACQALGSVPENLSFHVDYQTSIDAGSKYAQRMLLEYRQQHSGPVVGIIECPKLQAIKVAIRALDDLPCVTIPSNARDNNYQALGWQATAGRTSMQRCAASTQWFNERISLAKYAHVPLGNFELDWLLFTADVFFSRALRDQQQVLWISDDGIPDLGGTYEGETCFADEVIQPALTYPGAYRRVSVELKIHHLAVNALLKSSQVDEMEGGSIGSFGNDVPPGSNATETDFDDASLCIPAFQVLKQLIQRCISDAVSSGNVFADAILQHLYRWLCSPRSKLHDPALHRLLHNVMKKVFALLLAELRKLGANVIFANFSKIIIDTGKVDLSSAHAYCDSLLRTLQTRDLFEWIELEPLHFWHSLLFMDQYNYGGIQAKTQNVDSSDGDNDIDIVSSWNMAEDLPKDTQDHFVLIVSEFLYIPWKFMKEQVAAQATIRDDTSCTPSVTIMAAENLEGQVIEHLRDKQLLCRQASKNCK

SEQ ID NO: 67855 - protein, 152 aa, Zea Mays
MEQQGQGWRRRQIPAFGRWNQHTDEAGYLESAVQAGLVRPGHCYHDDGGNEVVLFRSSASPPPHKPAKKVRSTMEGHGHHHQVQVEAGSRKQRPFVAGDGSRSRAAKPRPRVVRAAVDEDLYIVPSDMSRKKKGRKHVRSMWMGCVGLNCVA

SEQ ID NO: 67856 - protein, 913 aa, Zea Mays
MQPDGGGAIRVLNVAEKPSVAKAVAEILSRRSAQSRAGRSQYNRIFEFNYAINGRACHMLVTSVTGHLMELEFDDRFRRWHSCDPAELFHAPVRKSVPQDKQAIKQTLEEEARRCQWLVLWLDCDREGENIAYEVIDVCTRANSHLNIWRARFSALIDREIHESVQHLGRPNKLFADAVDARQEIDLRIGASFTRFQTMLLKDAFVIDVTGDERSLVLSYGPCQFPTLGFIVERFWEIQAHEPEEFWTINCTHTSDEGTASFGWIRGHLFDYSCAISIYEMCVSEPMATVQNVRNQEKLKYPPYPLSTVELQKRASRYFRMSSEHTMKVAEELYQAGFISYPRTETDNFSPNTDLHAIVREQVNHPVWGAYAQRLLNPEARLWRNPSNGGHDDKAHPPIHPTKFSEGERNWSPDHTRLYEFVVRHFLACCSQPAVGAETTVEIDIAGEQFNASGRVILAKNYLDVYRFDSWGGTLLPTYNIGQQFVPTTLTLDSGVTRPPPLLAEADLLSCMDKAGIGTDATMHDHIKKLLDRCYATKDENTRFSPTNLGEALVMGYDEMGYELWKPYLRSMMEADMKSVSVGTKSKSEVLESCLQQMKACFLDARVKKAKLLDAMGTFFARSNRPINETQNPVEVVRPCGACNGSEMLLKRRASGEFMVGCRSYPQCRNVVWLPGSLSEAAVTNQVCPICAPGPVYKIQFKFRRRDIPPNFDVDHLGCVGGCDDILKDLMEISRFGSRSQAATPARGPTPNGVGQGTPRQDLHTIFRPASQLNNDNPSVMHSQGFRSTHTQNPSNASGQVLCTSCGALCISRIANTEANRGRRFYKCQDPGCGFFKWEDEVDNGTGRGRRGRGSSRQASASASAGRRGGGRRGRGRNADGGMFVSATGDTVLGCCFNCGDPSHFANACPNRR

SEQ ID NO: 67857 - protein, 554 aa, Zea Mays
MAGGEGEMRSLALTPTWSVATVLTLLVAGSLLIERSIHRLSNWLKKTHRNPLYKAMEKMKEEMMLLGFISLLLAATSRIISGICIDSKYYNSRFSPCTKEEVQESINAEHAIAHARKHLLEVILHHSPRRNLKTSYHNHEGCREGYESFVSHEGLEQLHRFIFVMAVTHVTYSCLTMLLAILKIHKWRKWEDEAFRDNHESFSQIAYESATRRQPALTKSYSFRSWSQNNVVMWLVCFIAQFGQSVVRADYLILRKGFIMTHNLPPTYDFHNYMIRSMEEEFEKIVGLQHVIATLTAEGAKMSTYGPRIQPRDDLFWFKKPEFLLWLIHFVLFQNAFELASFFWFWWQFGYDSCFIKNHLLVYCRLILGFAGQFLCSYSTLPVYALVTQMGSKYKAALIPRRIRETIHGWGKATRKKRRRRRGDDSTVRTETSTVCSLTDDDEDFEDDDDHHHHGPSYDTPRAGGRPPYLKIETHRQSGSGHDGPRPGGTPCFHPSGSGSGHAMLLRQASVSAPSSPSYRGGNNVTRSASMPGIAALRTTGSGTPTRVSHEEPT

SEQ ID NO: 67858 - protein, 75 aa, Zea Mays
MAPSPGVVSPRRRRSMTSSTMALTTWWSRSTRWTSISRSSSSAPNSSRRRVPHAHSPSQSCDRVASILGCSPHHI

SEQ ID NO: 67859 - protein, 883 aa, Zea Mays
MSPPQPTSSNRGISELEFQKGYHRVRPTIAVLPSPSMLVGYQDDWLKASVNSLKTWEKAPFEPYALPKPVTYYALCPDIDMLTSAVADFFMQLGTVYEVCKLGTHSPQNNGGQMELSPGKYLPSGLVLVDCPEQLKKVRCGHLGPISSTSDCLQAFSKHWSVKSFVTSISRILKDIKLTSNISTNQKESSSGPCTVIYVVCPFPEPCAILQTLVECSVALGYVISSPERERKLLYSQVAKALNSSASVDEASASNVVMLSGFSIPKLVLQIVTIETVLRMDKPNKELAVLKDIAFTVYNKARRIPRAVSTSDMFQSPTYLGRSQSTMMHVTSPAPTLWKECLVPRMSGPTLSRETDFDASMRSATWDNSWQPARSGGLLDPSKLPDLCAQDDRKYAFEPLFILADPGSADLNALMEPSKSGADASGSRVYGSISGSNSDSGVSPLLDVSESDSAASLHCCYGWTEDWRWLVCIWTDARGELLDSLIFPFGGISSRQDTKVLQSLFIQILQQGCQIMSSSPEASNMRPRDVIITRIGGFLELEIQEWQKAIYSYGGNEVKKWPVQLRRSIPEGIPPSSNGPTLQQQQQQDMALIQDRNMPSSPNPLYSPHPKSSFMKGALGQSGNKKQILVEQSGMDTSRGSLHLVRSISLVAVSQDHSLHLTCQADLLSRPASAGEGSQGSSGPWSYLEGFTPVKSIGSMSASHSYLLVPSPSMRYLSPATLQLPTCLTSESPPLAHLLHSKGTAIPLAMGYVVSKAVPPVRRDSAQLTKDEQPSVLSVSIIDHYGGSSGTVQEKMSRGGGGGSKQARNLSQETTGRECEMEMHSVLEAVAAELHSLSWLTVSPVYTERRTALPFHCDMVLRMRRLLHYADKYLSEPKGETTH

SEQ ID NO: 67860 - protein, 94 aa, Zea Mays
MERGFRGEPQTQCSIPSPAVAQTIVRLDGDDGAASSGPVRSRPRSRRVLGTPAQALSKRAASFVSPRRDTSRPRMPATRRSPSLGALGTLGKRG

SEQ ID NO: 67861 - protein, 667 aa, Zea Mays
MAHSPAPSGGGGGGPLPLLVSLNCLDDLSLEQEGLAGVAAVEHVPLSAVACGRIEAASAVLLPSLAFLPRAAQRRLRPWQLLLCLGSADRAADAAAAADLGLRLVHVDANRAEEVADTVMALILGLLRRTHLLSCHASSVPAAGWLGSVQPMCRGMRRCRGLVLGIIGRSAAARCLATRSLAFRMSVLYFDPRYVASGKTKRPSIVFPSAARRMDTLNDLLAASDLISLHCGLTNETMHILNADCLQHIKPGAFIVNTGSCQLIDDCALKQLLIDGTIAGCALDGAEGPQWMEAWVREMPNVLILPRSADYSEEVWMEIREKAITMLQSFFFDGVLPSSAISDEDEEISEAKNEDDYLGPQAKDSQSQIFDTEIDESHITLESEKKRAISHHKEPQASGKSVNIGSRSEGRRSRSGKKGKKRPAHRRPQQKPDDLSAVESDSNYSSRRDDDTAMSSRDQVVSSSSRFASPEDPKYKHKSLSESPMEITSEKKVPVLLSRKYPDKLKDGFIVALRARDNSGYHVARQRVVGGGGWILDVVSNATNRDPAAQFLVTFKNKINRKMEFVFASHSFDVWESWMLDGSLLEVMVVEVVLAGGGGSMLVRLEVKVSTCSRGWPHLEEARGVIIGAERGKHGKRSTVTDSPSEDVRSHEMRKISLFHGWKEIGD

SEQ ID NO: 67862 - protein, 64 aa, Zea Mays
MSMRQVETNKKNRKQIESGRLCGSVQGAVGQSQPLVLPGGRTKVSGRKKRKREVRSAVPQLPGG

SEQ ID NO: 67863 - protein, 57 aa, Zea Mays
MDTLFTDDDDDDDNAGFYCDYDYGFLVFFPFGKGTFGLTTWVNAKTWLYISNNYLTN

SEQ ID NO: 67864 - protein, 381 aa, Zea Mays
MAAVTFSPPLLLAILLILTTASTTQCHGHKSQRHHTGGTRVAQKTAAAGASPPADTVHHAICHTTPHPVSCLLAVASHLGAVAGAKAAEASAVSVQLLPPNVLSVALASLNGAESALSSLSPALSALSAPAASPAGASLRRGAAQDCQDLHAATLWSLSRSASLLAAPGESLPAVRAHLAAALANKATCLDGLAGASGPRVGGLLASLDDAYEHVSNSLALVARRGGGVSAAGFVDVVAKTIHNRRLLQDDDDDDGNGGDDDNDNGGDDNDGGADNGGNTGQPAAATVITVAKDGTGNFRTVGEAVAAAPNNSEARTVIRVKAGTYEENVEVLPYKKNIALVGEGRDTTVITGSRSAADGWTTFRSATFDTIRLLHPVGWH

SEQ ID NO: 67865 - protein, 539 aa, Zea Mays
MEKMKEEMMLLGFISLLLAATSRIISGICIDSKYYNSRFSPCTKEEVQESINAEHAIAHARKHLLEVILHHSPRRNLKTSYHNHEGCREGYESFVSHEGLEQLHRFIFVMAVTHVTYSCLTMLLAILKIHKWRKWEDEAFRDNHESFSQIAYESATRRQPALTKSYSFRSWSQNNVVMWLVCFIAQFGQSVVRADYLILRKGFIMTHNLPPTYDFHNYMIRSMEEEFEKIVGVSGLLWGFVVAFMLFNVDGSNLYFWIAILPVTLVLLVGAKLQHVIATLTAEGAKMSTYGPRIQPRDDLFWFKKPEFLLWLIHFVLFQNAFELASFFWFWWQFGYDSCFIKNHLLVYCRLILGFAGQFLCSYSTLPVYALVTQMGSKYKAALIPRRIRETIHGWGKATRKKRRRRRGDDSTVRTETSTVCSLTDDDEDFEDDDDHHHHGPSYDTPRAGGRPPYLKIETHRQSGSGHDGPRPGGTPCFHPSGSGSGHAMLLRQASVSAPSSPSYRGGNNVTRSASMPGIAALRTTGSGTPTRVSHEEPT

SEQ ID NO: 67866 - protein, 172 aa, Zea Mays
MGREHTEVVVGQLRTGRADARSEHRGTTHAGDVGRWWRQTDERELGCSCGRGDAGWTDDTRKRRSPARALRKTTHCETPMLAFIHQALDTPHDPHCRTPSHDHIELLLVALRYVTASVLYLKAHHYGIIITLHMPLLCAWYVTHSTPVTLGVHGDDVVGVIVVAILASEFTS

SEQ ID NO: 67867 - protein, 380 aa, Zea Mays
MGRPQPARAGAINIEACARPIAVDHRISLPYYFRIAGSLLRQANIYRNESNLLDLYVILLRYSSLLCETIPKHRDYHAFKLREKAFFDKLIDIIKELETLKPVVQRQVVEHNRGSTVEFNTNSLNGNYGTTRRIEQCTPSSYTPQTFVGSSNGALQKPFHAGRQVASLSSVQKQFMNLPYPKEETLARHSILGPNGLNGRWNGPVTGIKVQYPSNFELTQNGITSLVPSILNQDDLHGSNTAPAPPPPSSSSNDNDNMKSVLSLDDGRWSVPAEEHTPLPSANLEEELFQLNIKQPSPPPVLAEVQRPISPSRVADPTPGLPTSGTARFQNLHVPIKLMECFLRVAESNTKRSLETCGVLAGTLNFLCDNLNYSKAEIDI

SEQ ID NO: 67868 - protein, 662 aa, Zea Mays
MPLGQRSGDKSDSRYCGVEVLDFPAGEGLPAVLNHSLASAFDFILAPLVDPNYRPAPGAVLPVSASDLVLGPSQWSNHVVGKISEWIDLDAEDERLRLDSELTLKQEIAWASHVSLQACVIPAPRRSFCGNYARVVNQILQGLTNMNLWLRLPLEKSEPMDGDLDKIKNNNHTSEIADSWELWNSFRLLCDHSSQLCVALDISGTLPSMNSLGRWFGEPVRAAILQTNAFLTNARGYPCLSKRHQRLLTGLFNHSVQAIISGRSNHNVFPASEGVLSGDEGNAEDSYVRHALAPYLEYIAYLYQKMDPLPEQERFEINYRDFLQSPLQPLMDNLEAQTYETFEKDVVKYTQYRRAVAKALVDRVADDAVSTTRTVLMVVGAGRGPLVRASLQAAEETGRKLKVYAVEKNPNAVITLHSLIKLEGWESLVTVISSDMRCWDAPEKADILVSELLGSFGDNELSPECLDGAQRFLKPDGISIPSSYTSFIQPITASKLHDDIKAHKDIAHFETAYVVKLHRIATLAPPQQVFTFTHPNFSPNASNQRYTKLQFEMLPDMGSCLVHGFAGYFDSVLYKDVHLGIEPNTATPNMFSWFPIFFPLRKPIYVPEGSPIEVHFWRCCAPTKVWYEWAVTTPTPSPIHNSNGRSYWDARLHVAWKVHEVH

SEQ ID NO: 67869 - protein, 465 aa, Zea Mays
MATTTSATTAAAAAATTAKPRGSSSALCQRVAGGGRRRSGVVRCDAAGVEAQAQAVAKAASVAALEQFKISADRYMKERSTIAVIGLSVHTAPVEMREKLAVAEELWPRAIQELTSLNHIEEAAVLSTCNRMEIYVVALSWNRGIREVVDWMSKKSGIPASELREHLFILRSSDATRHLFEVSAGLDSLVLGEGQILAQVKQVVRSGQNSGGLGKNIDRMFKDAITAGKRVRSETNISSGAVSVSSAAVELALMKLPKSEALSARMLLIGAGKMGKLVIKHLVAKGCKKVVVVNRSVERVDAIREEMKDIEIVYRPLSDMYQAAAEADVVFTSTASETSLFAKEHAEALPPVSDTMGGVRLFVDISVPRNVSACVSEVGAARVYNVDDLKEVVEANKEDRLRKAMEAQTIITEELRRFEAWRDSLETVPTIKKLRSYADRIRASELEKCLQKVAPEVRRQRQPHP

SEQ ID NO: 67870 - protein, 654 aa, Zea Mays
MLFSVGRQRFQLGILLLLADLDYAKARANRNDELDAVVLAQQLRKRFLNQVMTSGQRVPFEFYGTNYVFTVNQALLEGQESSTPLDRGFLSSDTYIIFEAAPNSGIKVINQKEAASSKLFKHKEFNLEKLGIGGLSAEFTDIFRRAFASRVFPPHVVSKLGIKHVKGILLYGPPGTGKTLMARQIGKLLNGKDPKIVNGPEVLSKFVGETEKNVRDLFADAENEQRTRGDQSDLHVIIFDEIDAICKSRGSTRDGTGVHDSIVNQLLTKIDGVEALNNVLLIGMTNRKDLLDEALLRPGRLEVHIEINLPDENGRLQILQIHTNKMKENSFLSPDINLQELAARTKNYSGAELEGVVKSAVSFALNRQITMDDLTKPLDEESIKVTMDDFVNALHEITPAFGASTDDLERCRLRGIVDCGKAHKHIYQRAMLLVEQVKVSKGSPLVTCLLEGPAGSGKTAMAASVGIDSDFAYVKIISAETMIGFSESSKCAQICKVFEDAYKSQFSMIILDDIERLLEYVAIGPRFSNLISQTLLVLLKRVPPKGKNLLVVGTTSEVGFLESVGMCDVFSVTYHVPKLKKEDAKKVLHHLDVFDDGDLDAAAEALDDMPIKKLYTLVEMAAQGPTGGSAEAIYAGEKIDINHFFSILSDIIRY

SEQ ID NO: 67871 - protein, 713 aa, Zea Mays
MGRSRRHEGGGGGERRGAGAGGVAAAAFAALLLGCVVMALVGGAAAQGPRLPSDYKTLSGAAPLVVARGGFSGAFPDSSEGAYSFGASASAPGTAMWCDVQLTKDGVGLCLRDVNMKNCTTVDQTYPGRKRTYVIDGVHKTGWFVPDFTSAELLQSVYLTQAIWSRTERMDGIYPIVTVPDVQSIVNTSPIWLNVQHPIFYKQRDLDMSSYIHSIRKLVRMDYISSPEIGFLRNISARVRRRTKLVFSFLDKKLLDHSVNQTYGSLARNLTFVRSVASGILVPKDYIWPVTADNYLLPSTSIVTEAHEAGLEIYASGFVNDKAVPFNYSYDPLAEYLNFVGDGGFSVDGVLSDYPITASEAIGCFANLNSSKTDHVTGKPLVISHNGASGDYPDCTDLAYHSAVDDGADVIDCPVQVTSDGVLMCMSSINLLDTTNNAAFIAKSLGIDMVDSVTAALSAAGFSNQTTKEVLIRSTDSAVLVKLKQQKTRCKLVYTLPLGIGDASKPSLKDIKAFAEAVVVDRTSVFALSYDFIMGQNRIVRDLQAAGLAVYAQVFRNEYVAHPFDFLGDPTVEINYYVQTFNLSGMITDFPKTVRRYKENTCTALGKDMPKYMRPVEAGSLADFLRSFQTQPPSVAPMPALNSSSVEEPPLPTAAPRNVPPGGGAPADAAGTAGGAAPSDASSGGAPPSDARHTATGSSGMLLVVLVSAALLI

SEQ ID NO: 67872 - protein, 269 aa, Zea Mays
MWCCSGADDEPHAAPLAANPAATPPRAPAQARGPSMPRTGGAAASAAKVLPIDVPAVALSELNRLTGNFGDRALVGEGSYGRVYRATLATGEVAAVKMFDNGSSSGQSEAEFCEQLSVVSRLKCEHFTQLLGYCLELNNRIVLYQFATIGSLYDILHGKKGVKGAAPGPVLTWIQRARIAYGAARGLEHLHEKARPSIVHRDVRSSNVLVFGGHDAKIGDFNLTNQSPDSATRLHSTKVLGTFGYHAPVRDDGAADAQERRVQLRRRAA

SEQ ID NO: 67873 - protein, 729 aa, Zea Mays
MDRADGPTQPGTIQCMRTRGPAMDMGFVESQPELTAAPAAGPGTGSRLPGGGGGRKRKHLSSIANHVLRQCSLTLDRSVDDLVADFELGLKTAAVDSYSRKLVEFCSLQALQIITSRDIGEKISEGSLGRFTFDMMLAWETPTPSDQQITMESVAKEREDRKETLGEGEAVMGDETSLFYSDIMPLLVNEEPTVGEEAYVWFGSVFPLACDVVNARFTFEALTATTANRLHYPAYDRFLKEMDKSFKFFQDLPTPTGVEFAEDEFILHMEGTAGTQRVVRHIGTTSWPGRVTLTNKALYFEASGKFSYESAIKVDLSDTGVEHQISTASTGPFGVPLFDKAIVFESLPEPVVLEFPEMTSSTRRNTWLALIREVLSIHRFISAYSIVSPVHRWEVHSRTILGVVRLHAAREMLRMSPPPASSFLVFSLYGDMPKGDFVLEQLASNLKRTSTITRLSASYVFKGLSRSSSVPPLSAEVAAEGRGADDDASGREHERPLASLEDKIGRVRDEAREVTAANAAVEGMKDEGISDSLLVLVGLVGPVGKLRPAIQRITSWERPLVTGSILAAASLIIYNEWFSYVLAASLVLAAGVMVWARQRKIGELCSEVIIDASSSSSSDKTTMDSIVEAQRSLQKVHRYIVTANVAILRLWSIALARSPKHTETVIWMLAVSAAVVAVVPFRYILIGLVAGSFALNTRVARAVMNPQGGRRWREWWESIPAVPVRTVHS

SEQ ID NO: 67874 - protein, 381 aa, Zea Mays
MWSIGCIFAEILTGEPLFPGKNVFHQFTLMTNLLGTPSTDTISQIQNEKARKFLSCMRKQPIPFSEKFPGADPSALKLLQRLLAFDPKDRPTAEEALADPYFEGIGEVEREPSCQPIPKMEFEFEEKFTEEDVKELIFLEILQYHPQLLKDYKNSSEKTSFLYPSAVDKFHRQFTSLEENRGSNVMLVRKNASLPRTTTVHSTPIPAKEGPTATSQAAQRIPAARPGRVVGPVLPFESASVTDQHIARQVARNPAVPPATNTSSAYCYHLKPDSADRQEQQLELEEDHMQYRTGQHPMDAKGLAQSDLTDRANLHRSPLHGVAPFKGVAAVAGVLHRKSEGCPMTGMLDELQQICNGMVKLVQLTLGLELMFLNSKEFLEA

SEQ ID NO: 67875 - protein, 65 aa, Zea Mays
MQSERRQSRRRRRSMRHSTKGNTDSTGSRSIACFQQARSEVLRASWRKTIGPKPPWAKRTTKRGG

SEQ ID NO: 67876 - protein, 844 aa, Zea Mays
MEGVWRKAKRALGASLCVRLPAVAGDREDGASERRASDALSLDSTAAAHASAPNTPAAPGTGALRRSKSGGKSSKRMCAICFDSMKPGLGQALFTAECSHMFHFHCISSSVKHGNHVCPVCRAKWKEIPFNRSLSSIVPRGRGGLNVNQARLPQQGAYMALLRQVPNRQREGPVLVTSEPSDFNDDEPLHKMEPANIGSSRTVEIKTYSEFSAIQQSSQDDFAVLIHLKAPYANPEQVIGRPVNATSVGYPTARAPVDLVTVLDVSGSMAGTKLALLKRAMGFVIQHLGPSDRLSVIAFSSTARRLFHLQRMSHSGRQQALQTVNSLVASGGTNIADALKKAAKVIEDRSHQNPVCSIILLSDGQDTYNIPSNIRGARPEYSSLVPSSILNRTFGLVPVHGFGFGVDHDSDALHSIAEASGGTFSFIEDEGVIQDAFAQCIGGLLSVVVQNMQVNVECVHPGVQLRSIKSGSYHSKVAAHGRNGSIDVGHLYADEERDFLLSVSLPHCREQTTLLKVACAYRDSLTNEEIKIQGGEVAILRPRSPVSEPVCMEVDRERNRVRAADAIEAARAAAERGALSDAVSILEDCRRILSETFSSRSGDRLCMALDAELREMQERMANRQRYEASGRAYLLSGLSSHSWQRATARGDSTDSDTLVYSYQTPSMVHMLQRSQNHCPSPQGPSQPRVLVKPQPRGGEAGLELSTSLFSVDVGSIKSTTTPSLCSELRPQIVVGVCTHGSREKGGYGDGAAEMRRRGAARTPRPARELRAPQRCRIWETSGGSQRSASAPQGGLPTADLRVAEAGTRSFEHARAGTREDEWTSRASAGAEKPHIMSGGAGGGV

SEQ ID NO: 67877 - protein, 80 aa, Zea Mays
MEAKQRPRHGEERRPPATDNGGGGGEEYDPWTAWLYKPHTISVLLVGACLLIWASGALDPEGAAAHSSLTSIKRNKEKKE

SEQ ID NO: 67878 - protein, 341 aa, Zea Mays
MAGAATPPPSSSSSASCGTDAAYLLFRGETLLPDGVHASLYAVALAYCFVGLSAVTARFFKSMEQIMRHSREVVVGVDPRTGAPVVRRDKVWNYTVADIALLAFGTSFPQISLATIDAIRNLGQLTAGGPGTLVGSAAFDLFPIHAVCVLMPRAGSKKKISDLGVWLVELFWSFWAYIWLYVILEVWTPRVITLWEASLTVLQYGLLLLHAYAQDKRCPFVSIPFARGERPEDWVPPEDVSAVYYAKCDGIDETLPMGADGNDGIVDIFSAHSYYDAAEYSQLAEEDMEGSSTMDQVVKNTQDNMSWLSIWWQQFVDASMVIWFISFMGQMCLTLLIHWTP

SEQ ID NO: 67879 - protein, 333 aa, Zea Mays
MAADAPAGNSGSLSVASNDNKKVSREDIELVQNLIERCLQLYMNKGEVVRTLSTRARIEPGFTTLVWQKLEEENSEFFRAYYIRLKLKRQIILFNHLLQHQYNLMKYPAPPNIPLAPIQNGIHHMPVSNLPMGYPVLQQPIMPAPGQPHMDPMACGLSSGHVVNGIPAPGGYHPMRMNSGNDMVLDNGAPEAPHAGATGSAMSSEMAVSPSSAASSNHAPFTPSDIPGMTMDVSALDSAFGCDVGNPESLQLGPDGSSRDSIRSLGQLWNFSLSDLTADLTSLGADLDVLENYTGTPFLPSDSDILLDSPDQDDIVEYFADAINGSPSDEEKP

SEQ ID NO: 67880 - protein, 64 aa, Zea Mays
MPNLGSSPWASSRGYISIRRGIPFTHPLVPAPVPHAPSLAQGALESAASRTHLPVESTLILSHE

SEQ ID NO: 67881 - protein, 691 aa, Zea Mays
MAFFAEDVHRLASASVDGRIFVWRIDEGPDEENKPQITGKIEIAIQIVGEAEAYHPRICWHSHKQEILFVGIGNCVLRIDTTKVGRGKDFTVEGPVKCHLEKLIDGVRLVGKHDGGVTDLSISQWMSTRLASGSKDGTVKIWDDRKQVPLSIFKPHDGQAVYSVAFLTAPERPNHINLITAGPVNREVKIWASTNEDGWLLPSDSETWKCTQTLELVSSLEPRVEEAFFNQVAVLHQASLILLANAKKNSIYAVHVEYGPDPASTRLDYIADFTVAMPILSLTGTHESQPDGEQVVQVYCVQTMAIQQYGLELSLCSPPTADSTGFGRDPAISRVYEAALEMAGTEPSIGTSCTDSYSVTALSKQPNVDQSAALAPKIEVPGSGPAPGTRDIEQSAFNYTNTTNRNMERDALKRQDTPMPIRKDILGKDEPRDGQSNVPMLPNPHMVFQVGGNATRLVTPSEIISGTLSSAENNDVSESGGENRDVSSGSSWVAEVEPKHIDESKPDQNLGLEAVKETQIVCENMAKTSMEQTVEMITKRSVTTDKHSVEESQSSSDRPASDQTCGTDENVLKKFVEMPEKIDYSASREQPSLFTKEKVLHPQTSGQPSPPVSAFNSTEPHEPLSSTYLPVSSFPEDAATQGMLQQKLLNILVQHCSLQLAATAALGSPEGHGKAAEYCGSCVHRKGGQKT

SEQ ID NO: 67882 - protein, 847 aa, Zea Mays
MCSDMDQRDHHATREAAPEANGYHHSPHGVDQSQVVDADKHINHHSTDDNAPSSASGHRHGGISRHASTSSVDDRSIKSGDDSDGAESTNGRSSNTEISFLENDTVWIPPQAADKEDEAQSFATSIAYDDDDDDYSDGIKWGQSSFPSPGKQHDAGTSNHREVREKAMLEAMNGQLKILVSRFLASVGIPSSNEEASDSWLDIVTSLSWEAALLIKPDGSMGKEMDPGSYIKVKCIASGTRRQSEVIKGLVFKKNAAHKHMPTNCHNPRLLLVKGVLGHSDVGLSSFNSMGQEKDLLERAIGKIMEICSPNVVLVEKTVSRNIQELLLKEEVLDKPKLKQCDYFHIGKFTEEHNNASEGGKMTSKTLMFLEGFPCPLGCTILLKGANSEELKKVKQVMHFTVFAAYHLILETSFFEDQRVFLNDSTTKETSATATEGTYGVAALSGPIPNFPSHDDSPALRLFHATSNSYADVNKPLISPRNVDKFSAVSSSSSNDLEQGANVRSNNAERLTLPVQGPLRKLFADMLCHQNIYLPVTSLQEANDNRKEVRVESSQETVSNGFHRPKTGESVISIENGESINDAQTQEITQAIMPTGSSVSDKDAESPVMGDNGAHSTTSIIIKEKHADGDQADDALDSHSILILMSSQCTEKQVICEQSHLTRIKYYGSFDVSLGRYLQDILQNQQKLSCSSCGEPPESHMYSYTHRNGNLTVLVKRLVPKHYLPGESEGKIWMWTRCSRCDHEHGVSKPTPRVLISAEARNLSFGKFLELSFSSHSAARRLSICGHLVNRDCLRFFGLGSKVAMFRYSPVEIYTTCKPQPTLQFVNPIRQDWFEGQRRNISTELEE

SEQ ID NO: 67883 - protein, 70 aa, Zea Mays
MKKIEDNNTLVFIVDLKADKKKIKAAVKKMYDIQAKKVNTLIRPDGKKKAYVKLTPDYDALDVANKIGII

SEQ ID NO: 67884 - protein, 51 aa, Zea Mays
MQLVKQCWSRPHRRAAREGNSSTLMQSGPTIAILGLHLHLHLPNIRFWKRF

SEQ ID NO: 67885 - protein, 511 aa, Zea Mays
MAQPEKGSLLPQPKSLSLSQTKRRLPLPAAAEHRQFRVHHHAFDLQPIAQSRKHPSTPTAPAIKSPPLLPIRHLKEAPFPKSTTTEKQPQEIRSALGSGHSVAATMKEGRPGAGDYIASLLSSSPRLDFGGEEEEDCLDRFCGDPGFAARAARLSSFSGQRFAVTAGLFGLPPPLPAASGGGEFAGSREASSVSDPASAMKDANAKKRKAPAAAAAKGKGREPSAQAQAGEPKGPDAKRCCKAEGGEGEEGSPVKLPKPEQAGSDSSVEDGGAQNQKPPPPVKGKNAKPVEPPRDYVHVRARRGQATDSHSLAERVRRERISQRMKVLQDLVPGCNKVIGKALMLDEIINYVQSLQRQVEFLSMKLATVNPLDLSNLPTLLQKDVSMFQACGASASSVFSLESCSPGFPFGGQGDVFQSFVPNGLENPCGGLNPLDLALSQATGGQFGFQDGTAGTNLQQRNYWEEEEEDLQSVFHIDDNGQSQEHGASASAQSFHGQLQPQEGHMKMEFF

SEQ ID NO: 67886 - protein, 850 aa, Zea Mays
MASARKVRNANKRYAKINEDWQDKDTPSVPKSKVRKKKLSDMLGSQWSKDELERFYGAYRKYGKDWRKVAGTIRDRTSDMVKALYNMNKAYLSLPEGTATAAGLIAMMTDHYNILDGSNSDRESSDSPKASRRLQKRGRAKLQSVSKTSDTHFTDLLQPQPASSSYGCLSLLKKKRSGDLFVGNRPRAVGKRTPRVPVASMYHRDDRGAPNRQAKPDANDGDDEGAHVAALALAEVHQRGGSPQISHTPRRSGDHMFLSPAKSSGRKNADSEMGSSKLHGFQLDADYPEGSLGSREAETGDYTKGTSYLIANKGSPSSKPQKKVKRPQKRRKKAVRRTDDQFEDDREACSGTEEGCSMKKAKEEPELETLGTKTAWPSSTSNKRSRQLFFDDESLALDALHTLADLSVNILQPSSVVESESSAQIKDEKRDNDSDGKPGIPAAAVSVYEQKDNSKSTSKKLKRQPEMASTDMVTRKKGKLAKDTHPDGSTTSEVKQQACTCGVKTEKKKKSSMGKILKDEKKMPKDVEKTEVSPEEEKTSSNKTMDIAETTTQVATTLHADLMAKGKSRRKLGIQKSLTQECKPAEGAGDSGSDKLSYSLSNIIDLKDKLSHCLSSRLLRRWCMFEWFYSAIDYPWFAKSEFVEYLNHVKLGHVPRLTHVEWGVIRSSLGKPRRLSKQFLHEEREKLAQYRDSVRQHYTELLSGVREGLPTDLARPLAVGQRVIACHPRTRELHDGNVLTVDHNQCRVQFDRPELGVELVKDIDCMPLHPLENFPESLRHQSAINGYYSHLSEAKYEDQMKELASGGAARSTSNLNGTDATFYTPSGHPMSTLMKQAKVACLMWKLFTFL

SEQ ID NO: 67887 - protein, 486 aa, Zea Mays
MEAALGALCRAGGWSYAAVWRFHPQDPRLLTLGDCYCEDEAKAMVQKMLNLVEVVGEGILGQALVSGECQWIYDDTCHALNQISHADNGDLHQGYTWWQHQFLSGMKTIAVLPLQLHGLVQFGSTRKVPRSSVFLNQVRDIFDRMKNASSDGPMEYTQNNSLACAVSGKVKDCLQTESDKFLCKSVSFGSNPCASKFQENRLSPYHALMHEQSLIPDPGESVRLLSQEESFIVQGDSSQFKDTADFTGQGNSTFPELPNRSPEEATAETLENNMKDCSGNNSLLETMMLDLSTNSFVQDWWDNSVLLAENLPNSSEKDPEPAMELANRHSLPTGERGSPFIPVIEQLLGDVAHPPTPTGHSSLEAEATALAGRVSDYQLPQFAFRDCLTVDNAQIPALACSNYTCRTRSAQNGSSEVPSANVSVDDTCSLNTANSNGSQSSNPEGTKVAKRRARAGESTRPRPKDRQLIQDRVKELREIVPNGAKH

SEQ ID NO: 67888 - protein, 567 aa, Zea Mays
MFSAIMAKKNYKQHSKSEKIQGGCMSGLIRMLDFRRSPKLLSDGRVKRDKKGLDDIHGNISANNGKDHRVELIYVGRSSIRTLMEEEMASSTQPLKQAQSNVAGICSEDIDLNLAGSLMEIYRSHTEGQETRRSIESGRSSISTDEEKNTDPPAHHYQIPSSIQRALEDVAEAVIRHQSANKKYINSGDETRSREFVDALQLLSSNKELFVMLMQDPSSRLLECLQNLYMSLGSTRLDSEEYDEGTELQGTTDSLEQSATSPSKVKRRHNSFLKEDGLVTRKPPKLNDGSRGLSRIVILKPSPARGHSSLISGSATSSPLSNHIDWQVQEGSDKHDCHFSLRELKRRLRIAISNNQKDHQLNSTSSDIHEAEADSGKLLPVTSMSETESLASTDSSDRAKEPSIVDEKIVPEDSESGMRNDVAHGVGVSSFSYEKAKMYIIERLNDQGEESCQIVQKSESFERLISLPENGTFSPIDFPQEEKISIAHEATKPLNLHTVEQEDGSASPYSTMQYEETESADTSNLGTETLIEPTIDHGSYSQNEGAISQELVREDHARYNGELIALC

SEQ ID NO: 67889 - protein, 527 aa, Zea Mays
MAPTGGAPYNTTSRSVPTPRLLLEPPSPRLPLIVGQTAPSGSVAASTASANPIVSPVVTESSGIAQAAQPILVDSEPVNINDDDDEHGAKRQKKCTSEVWQYFTRETKTVTINGKNYTEKWASCNFPRCKTKYRCESTKGTTGFWTHLRTTHSVVKGQQQLAVGKDHEKDINIVEPYKYDPEVSSRKFYLAIIMHEYPSNIVEHEYLIDFLKSLRPSFPIKSRIIVRKEILSIYSEEKKKLYAYLKTFNCRFSTTMDMWTSNQNKGYMCVTAHWIDDDWRIQKRIIDFFHVEGRHTGAKLYVTFSECMVRWNLEKKLFSLTLDNASANEVAVKDIVNDLKTSVGVSIVCDGVLELMKHATECGLETNKGISLDVSTRWNSTFLMLRDALYYKDAFTQLKLADRRRYEHISPTPEEWDKAKMLFHALKKFYDLTELLSGTLYPTANLFYKGFCEIRSLLGDWSTSEDINIREMAISMSKKFEKYWNKSNVALAVASFLDPRYKRKVVEFYTRKFYGDAQYHAKLEEFN

SEQ ID NO: 67890 - protein, 65 aa, Zea Mays
MESAAPLATIRPVLAQLRAPRPRKETTNQQKTPWAIGRRRRLGEARRGDKDNRQTHPGSATARGA

SEQ ID NO: 67891 - protein, 72 aa, Zea Mays
MGLSQVFSCTSSMVLFLANTTSVDESGKQHFLDASVAYKRVVLNDIEYLARFGYSKEQDLWNSRLSLCSVNS

SEQ ID NO: 67892 - protein, 889 aa, Zea Mays
MAMAAAVLEEALRWGGGSVGDDNVAARRAEEAAIRRHEAASWLRKTVGIVCAKDLPEEPSEEEFQLGLRNGIVLCNALNKVQPGAIPKIVGVQSDTAVPADGSALCAYQYFENLRNFVVVIQDFGLPTFEVSDLEKGGKSVRIVDCVLALKSFSESKKTGRQAACKYGGILKPLVSGNYFILKNCDAFMNKNARIHTEEATLNGFRGEQNLSLDCSPESYEVITSDNLSTIIRTILLDKKPEEIPLIVESLLNKVIQEYELRFANQNLMDEEKQNNLTTKEEASFAVNGSNAAQKFHLKAEINFDLQHKQIKGLRGTVSSIKSGMEQLKLHYSEEFTKLGKHLYTISNAASGYHKVLEENRKLYNQIQDLKGNIRVYCRVRPFLPGQISSLSSVAGMEERTITIMTPTKYGKDGNKSFTFNKVFGPAATQDEVFSDMQPLIRSVLDGFNVCIFAYGQTGSGKTYTMSGPKVLTEESLGVNYKALNDLFNLQAQRKGTIDYDISVQMIEIYNEQVRDLLQDSGNRRLEIKNTSQKGLAVPDASIVPVTSTSDVVELMNQGQKNRAVGSTAINDRSSRSHSCLTVHVQGRDLTSGTVLRGGQAKTLMFVHISPELDAAGETISTLKFAERVASVELGAAKQNKEGSEIRELKEQIASLKAALAKKEGEPENILSTRSSPSIYRIRKGNATPATPKDRQPMEEVGSLEVQNVFTPAQKRSKMHLLGILTENNSSNSVQNCNVPQKEIGLGGWVDKMALGDNHFENSNSILELEPDTAQLPTSFYHQRYSPVQQSCRTESVPSLGLHGFDSATSCSNQEIVVSTMGLKASGVANRGASTVKKYEATSTRSTNLASKSPLLQKKLQTPTRNRNQLTSSTIGGRRTPNGKIGIAK

SEQ ID NO: 67893 - protein, 1241 aa, Zea Mays
MHELGGKEQPYEGEQSREHTARRASSIAQSRGGERFVSAEARIFDAATAAMPESWRPAEANASSQPAAGTSGPSAQSPGNDAKGRAAGETPGAAEAAATRVPFHKLFAFADSTDVALMLLGALGAVANGAAMPFMTVLFGNLIDAFGGALSIHDVVNRVSMVSLDFVYLAIASAVASFVQVTCWMITGERQAARIRNLYLKTILRQEIAFFDKYTSTGEVVGRMSGDTVLIQDAMGEKVGKFIQLVVTFFGGFIVAFAQGWLLTLVMMATIPPLVVAGAVMSNVVTKMASLGQAAYAESSVVVEQTIGSIRTVASFTGEKRAVEKYNKSLKSAYKSSVREGLATGLGMGTVMLLLFCGYSLGIWSGAKLILEKGYTGAKVMNVIFAVLTGSLALGQASPSMKAFAGGQAAAYKMFETINRAPEIDAYSTTGRKLEDIRGEIEFRDVHFSYPTRPDEPIFRGFSLAIPSGTTIALVGQSGSGKSTVISLIERFYDPQLGDVLIDGVNLKEFQLRWIRSKIGLVSQEPVLFAASIKENIAYGKASATDQEVRAAAELANAAKFIDKMPQGFDTSVGEHGTQLSGGQKQRIAIARAILKDPRILLLDEATSALDAESERIVQEALDRVMSNRTTVIVAHRLSTVRNADTIAVIHQGTLVEKGPHNELLRDPEGAYSQLIKLQEANQQNNRKGDGNARLGKQMSMNKSASRRLSRDNSSHHSFSVPFGMPLGIEIQDGSSNKLCDEMPQEVPLSRLASLNKPEIPVLVLGSIASVISGVIFPIFAILLSNVIKAFYEPPHLLRRDSQFWASMFLVFGAVYFLSLPVSSYLFSIAGCRLIRRIRLMTFEKVVNMEVEWFDHPENSSGAIGARLSADAAKVRGLVGDALQLVVQNSSTLVAGLVIAFVSNWELSLIILALIPLIGLNGWIQMKFIQGFSADSKMMYEEASQVANDAVSSIRTVASFSAEEKVMDLYKKKCEGPLRTGIRTGIISGIGFGVSFFLLFGVYAASFYAGARLVEDRKTTFPKVFRVFLALAMAAIGVSQSSTLTSDSSKAKSAASSIFAIVDRKSRIDPSEDAGVTAETLRGNIEFQHVSFRYPTRPDVQIFRDLCLTIHAGKTVALVGESGSGKSTAISLLQRFYDPDVGHILLDGVDIRKFQLRWLRQQMGLVSQEPALFNDTIRANIAYGKDGQATESEIVSAAQLANAHKFISSALQGYDTMVGERGAQLSGGQKQRVAIAPPMAA

SEQ ID NO: 67894 - protein, 846 aa, Zea Mays
MLEEDYMHIVLVHYLETKGGKSSRARGNNIIQEAAVGSPSQIMEVESSLSGQASEYEEAESDIYSGGAGYDSFTWMQQHENGTGPVIDSSLFSSYTPASSIELDEPGQMPHLQFPVPSDQGATTEGLGVDYLTFDEVYSDGLSLNDIGAAGTHGKSYLQFSSATGDLSATENSLPQQNDGSLEEAAIGYPFLKTQSSNLSDILKDSFKKTDSFTRWMSKELPEVEDSQIHSSSGGFWSTGEANDIIEASSHEPLDQFTVSPMLSQEQLFSIVDFAPNWTYVGSKTKILVAGNILNDSQITERCKWSCMFGEVEVPAKILADGTLICYSPQHKLGRVPFYITCSNRLACSEVREFEFRPTVSQYMDAPSPHGETNKVYFQIRLDKLLSLEPDEYQATVSNPSLEMIDLSKKISSLMASNDEWSNLLKLAVDNEPSTADHHDQFVEKLIKEKLHVWLLNKVGMGGKGPSVLDDEGQGVLHLAAALGYDWAIRPTLAAGVNINFRDVHGWTALHWAAICGRERTVVALIALGAAPGALTDPTPDFPGSTPADIASANGQKGISGFLAESSLTSHLQALNLKEANMAQISGLPGIGDVTERDSLHPPSGDSLGPVRNAAQAAARIYQVFRVQSFQRKQAAQSEDDKGGMSDERALSLLSVKPPKSGQLDPLHSAATRIQNKFRGWKGRKEFLLIRQRIVKIQAHVRGQQVRKHYRKIVWSVGIVEKVILRWRRRGAGLRGFRSTEGSVESSNGGTSSSSIQDKPSGDDYDFLQEGRKQTEERLQKALARVKSMAQYPEARDQYHRILTVVSKMQESQAMEEKMLEESAGMDFMSEFKELWDDDTPIPGYI

SEQ ID NO: 67895 - protein, 1878 aa, Zea Mays
MAPPRVTRKKGKGAGGKTDLRPDRKQFKRHHKEDAAAEQGDGNGERQQSAAPGSAALLAAASDEADFPRGGHSLLSKDEMAEARAEAEQDFEREAKKGKGKRKRSGGESSGFGVDDDLGILFGGATTGKLPRFANRITVKNISPNMKLWGVVIEVNQKDIVLSLPGGIRGFVRSEDVCDIALQENRKDSGNNLCAEVVHVGQLVPCIVLRVDDDSREGKVNKRVWLSLRLSLLYKGLALDGLQEGMVLTAQVKSIEDHGYILHFGVSSFSGFMQKDDKEDVKTERRQLMQCVVKAIDKTRAIVHLSSDEDLLSKSTIKDLKGLSIDHLIPGMMVNARVHSFLENGLMLSFLTYFSGTVDIFNLLNSFPSGNWKDDYSKNKKVNARILFVDPSTRAVGLTLNKHLLHLEVPPINLKAGDIYDKSKVLRVDKKAGLFLEIPSPTPSPGFISIRDVSDKDAKNLEKFKEGSSLRVRILGVRNLEGVAIGTIKDSAFEGSVFTHDDVKPGMLVRAKVATVEPFGAIVQFSSGVKALCPLPHMSELEHVVKPPKKFKVGAELLFRVLGCKSKRVTVTYKKSLVKSKLDVLSSYADAKIGLVTHGWITHIEKHGCFVKFYNGVQGFVSRSDLGLEAGTEAENVYHVGQVVKCRIINVIPASRKLNVSFVISHNRIAPIDTPKLGSIVSGVVERLTPAAVVVSVNGFSKGTILNEHLADHHGQAAQLKNVLKPGHEFNQLLVLDTEGQNLVLSAKHSLINCANDIPSEISQMHPGVVVHGYICNIIEAGCFVRFLGHLTGFSPKDKVNAETARVKLALQQSMCSSMDSSFIQGYFLLDQKIAALKYSSNDWARHFGIGSLVEAEVGAIEEYGIILNFKDHLDTVGLIEHHQLGGSSVEVGSSVKGLVLDLSDGVVNLSVKPELIDSVRIVGKKKKRQRAVVADLELHEEVNAVVEIIKDSYMVLSIPEYNYAIGFSPLMDYNSQLLPHHHYDNGQRITVVVGNIPSSDSSGRLILLPKASAQYSSLSDSKRAKKKSGYKIGSLVEAEIIDIKPLELLLKFGGNLHGRIHITEILEEDSAEHPFSELRIGQKLTARIVSEAEPSGKSGKKFKWELSIRPCIVNGEFAQKEQNHTTNGIVRAYVVKVDKEWVWLTVSRNVMAHLFLLDSSSEPSELKEFQQRFSVGQAVKGRVISVNQEKRLLRLKALDNQCTQPNIDETQEPKSSVFGQTKQGDIIGGRVQKILPGVGGLVVQIGPHLHGRVHYTEIVDSWVSEPLSGFHEGQFVKCKVLSVSRSSEGSLRVDLSLRSSNLIRDSNNSRLDDLETCTSRIEKIKDLLPGTEIKGYVKNVNSKGCFIMLSRMVDARITLSNLSDEYVENPQKDFPVGMLVHGRILSTDPSSGRVEASLRKTTGSKLEKLDDISYSDLHVGDIVDGQVKRVESFGLFVTIRRSELVGLCHVSELSDEPVVDINSCYKAGDMVKAKILKIDETRHRVSLGMKKSYFDSDLTADTNDDESALMDISVAPQMVEYHNRNLVHRKAEPRASVLPLQVSLDESEGSDLEDNISNTCLEIANGTEANAKKSDKQLKKEARKQRELEISAMEERALQEDIPQTPDDFEKLVRSSPNSSFIWIKYMATLLDLADVEKARAVAERALKTIIPREEEEKLNVWVAYFNLENEYGSPREDAVKKVFQRALQYCDPKKLHLALLAMYERTEQYELADELLDRMTKRFKTSCKIWLCRIQFALKQGKDVEYIKAIVNRALLSLPHRKRIKFLSQTAILEFKCGVPEEGRSRFELILREYPKRTDLWSVYLDQEIRLGDVEVIRALFERVTCLTLPPKKMQFLFKKYLNFEKSLGKDNERIQLVQQKAIEYVQSSLPSQDNS

SEQ ID NO: 67896 - protein, 84 aa, Zea Mays
MSNQIGPWLFFLSSIVFFSPSMELTTLSIFQADAIMSRLNIDDYQKEGSQPTLLITSDILTLRWSSMKGLLEKNQPPRKKHGNS

SEQ ID NO: 67897 - protein, 2743 aa, Zea Mays
MQASLVLGESREICRYIAEKYENQGYSFLLGKDALERASVEQWLHNEEHAFNPPSRALFCHLAFPLGEEDDDIDVHTRKLEEVLEVYEQRLSDSEFLVGNKFTLADLVHLPNSHYIKASNKFLYLYDSRKNVRRWWDAISDRSSWKEVLRYMKNVEEKNKQEELKKQQQQQEEAPSTDPIRVDSRKQSRTEPRTILVPPADNESSASIVPRTKKPLPGDHLVSTQQGKSRKNVHQYPSQDSELATSHSVPQEPMSMELVQERERTTRRPYTDQSQDVFKEAKVAKSTPSSAKPMYPQQPAPTSGHGEVEDTWDKGVKGRETVPDRQQMLQKWAGTAREQVSDRWKASPPSRQAAAEDVRGATGDTTQSADVLDTSKKSRGAYEEAKGPGSVKEEKTSSIYKKKPLVAQDSQEQAQTIPAGEKTDSSIQKHQQASDAPNTFVEKLNASEPARVKTHSDFSAEQPYRKDTTDDQKVIPPLSTRELTSQVQPPSKPSYDEKPTPMSQQKSDKQRVEPPIQIEAEISGVQHASPSFPRASMDDRATIGDKFAMQSIIDERVGEPTQMQTSSPDAHPASLPTKRETPEGHEIGDLGLASTPGGQISEAKKVGDDPDTVHGDVYYVNLSTQDVGKDAFKEPTVTDSLPSSAQPIQKSAITPSRQTQVEEARDKSMQSRETIPEQHKMVERKTGTPGEQLSERQKEIRPSRQSAAEDAPISDAIQPPDILDTPKKSRATFEEYIGPGSTLPKAQILDAQDSQVTKGESTVPTTDQRKDWKYEKDDETIVTEEKSLSTERSREMFQESASTAPKTHLTDSGGSNALEKTSSVYHKGPLVAQDSQEEAQVIPADEKVDGSASEHHESSGTPYSYNEKLSASAPARGDIHDGHSAEEQHKNYTADDQKVAPSLSNKEPASQVQPASEPLQRAVPDGDLPSKSFTIDQWQRMAASLHGVIMDSADDEAAISLNNDQKSRPMNQEAAPSSQSVNQMAKQSGEQRVEPPVPIVVEASDVRRAAPSLPEAARTDVATISDKFTEQSNIDERVGKPKQMQAPITSAHPASKGTLRRTPDSHEAGELLSTYEGQRLEAAKASQDPATIHEDVYDASLSTNDVAVDKKTATDHAIGDEVVTRSLHDQQTPRPASTQAQPTAEAPQDSDSFQYVRTGDVGKTELAKPTVTDQEATAPAAGPTSVDPQRANIIPAGVAHSEQKSTPPDKGSARVAQPPTPVEPIKEDGNVSAANYTNELQMSFQQQARSSAPTTIGIPASDTQSVIGKIQVVTPDKHGTDDSGKPFDLNQGHVSHASQAILGQEELTSPQGARVFPTSDTQQNFAASDEKSDKASKSFDSAEPREEDTDAATADQTTVPPTDVTRQVTISTPDASDSVSRDQESSPDDSQTRNLGSPLIASQEEASRAGGEGSTPEVHSTIVDEKKTLPSSQAQSSSTGPDSIQIGGDARLSDAGVPATSSIEKQEAEPPAETQAPTSKGLQDSGSIESPRQALTDQTVAPAMNSVAPSDSPEGPNSSRSVQTPYQQAITKGDTVVTAADQAENMQTITYQQAITPVPYTAKPSFPGAQDASRQETIPDEGPMENYSPKPGAQTQPPAATLDVSPYASSKVKSTGQGAKPPTGHQASSPETQLGSSQPGEDAPAVQKIAASDEKSATASKPFDSAEPREEDTDAATADQMTVPPTNVTRQVTSSTPDVGDTLSRDKESSPDDDQIRNLGSPLIASQEEASRAGGEGSTPKVHSAIVDEERTLPSRHDAQTSSTETDSTQIDGDARLSGVGMPATSSMEKQEAEPPTETQEPTSKGLQDSRNIESPRQASTYKTVTPAMNSAAPSDALEGPNSSRSVQTPLSTGPTKGDTVVSAADQAKDMHTIPYQQDITPSSNTGKPPFQGAQDASRQEIIPDDGPVGNYSPKPGAQTQPPAAILDVSPYALSKAKSTGQGAKTPTGHQASSPGTQLGSSQTQGKDTPEEQNIAASDENSANTSKSFDSAEPRGEDIDAATADQTTVPPANVTRQVISSTPDASKTLVRDLESSRDNGQIRNLGSPLIASQEAASRAGHTSDDGSTPEVHSTIVDEKKTLPSSQEKSSSTGPNSTQIGGDARVLATSSIEKQEAEPPAGTQAPASKGLQDSGNIKSPRQALTDQIVTPAKNSAAPSDALEGTEPGPNSSRSVQTPLSTGPTKGDTVVTAADEAKDMETITYQQAITPVSDTAKPPFPGAQDASRHGSVPDDEPVGNYSPKQTQPPAEILDVSPYSLSKAKSTGQGAKTPTGHQASSPETQLGSSQTQGEAAPAEQKFAASDEKSAKASKSFDSAEPREDTDAATTDQTIVPPTNVTQVTSSTPDASDTLSRVQESSPHDGQIRNLGNPLIASQEEASRAGGEGSLEVHSNIVDEKKTLPSSQAQSSSTGSDSTQMGGDAGLSDAGVPATSSIEKQEAEPPARTQAPTSKGLQDIGNIESQGQALTDQTVAPKMNSAAASDAPEGTELGPNSSRSVQTPFSTEPAEGETNSTNEESKSQQKVGQFGTQSFKDNNKEADGTVRSNISRSTEELQEPPSRPKGESSEEPENQQLADQAIVKPLEGNEQQAEQTKPHETAIAEDSENTNLKNNRISQVETLDSSGKQASVFQQLGKNTKDALNSTEDAPGDGKAVSKSEHSSRSEESKVQLQSEDKARVPGTDAPSLETGHPSNGGLQANSYQDNSSQSQEEASNKSVEQSSGIRNKDNDSSRLDDSTGSTKTES

SEQ ID NO: 67898 - protein, 352 aa, Zea Mays
MESAVLACEAPTAAAAAAPGAGGDRGAEGVVMLRRSGLAACLTCPLCGRLLRDAATITECLHTFCRKCISEEFVNKEVCCCPVCSIDLGCAPLEKLRIDHSLQYVRSKVFPSKKRKVEDPEVTSPITSPIKTKHSTLRGSSNITKKSGGWRPLGCHFRAAKKKRSLRPKSDDIKTAGKRTDDPVDVTLASQAKTRKQITRRGNLEKRTGTKKVLILKGKQKNTKTKNTPNKRRLPALWFYLLAAFDQKGHPPLPQIPSKFLRIKDVNLPASFIQKYLAQKLNLSSETEVEIFCGGRPVSPGITLHDLADHWIGKRSKGRVRSSVGTPAAEFVLKVFYARSGAPLPKTESNQD

SEQ ID NO: 67899 - protein, 557 aa, Zea Mays
MAIRCYNQAIVYDPQFIEAYNNMGNALKDAGRVEEAINCYRSCLALQANHPQALTNLGNIYMEWNMISAATSFYKAAISVTSGLSSPLNNLAVIYKQQGNYADAITCYTEVLRIDPTAADALVNRGNTFKEIGRVNEAIQDYVQAATIRPNMPEAHANLASAYKDSGHVETAIISYKQALRLRPDFPEATCNLLHTLQCVCDWENRDGMFRDVEEIIRRQIKMSVLPSVQPFHAIAYPIDPLLALEISRKYAAHCSLIASRFGLPPFVHPPPVPVKAEGKHCRLKVGYVSSDFGNHPLSHLMGSVFGMHDRANIEVFCYALSQNDGTEWRQRIQSEAEHFVDVSAMTSDNIAKLINQDKIQILINLNGYTKGARNEIFAMQPAPIQVSYMGFPGTTGAAYIDYLVTDEFVSPSSYAHIYSEKLVHLPHCYFVNDYKQKNRDCLTPVCPHKRSDYGLPEDKFIFACFNQLYKMDPEIFDTWCNILKRVPNSALWLLRFPAAGETRVRAYAAARGVRSDQIVFTDVAMKNEHIRRSALADLFLDTYEVLHLLFFFPNIS

SEQ ID NO: 67900 - protein, 430 aa, Zea Mays
MTTEILRNMLYQSVGMTASEGRLFQVDVIVLDEVHYLSDISRGTVWEETVIYCPKEVQLICLSATVANPDELAGWISQIHGKTELVTSNKRPVPLTWHFSKKYSLQPLLDGKGKKMNRKLRMSNSQNLASPKSEFYYVKGKRRFRTNKIEQGNSRPLDISKQVQLSKHELSNMRRSQVPLIRDTLSQLWENGMLPAIWFIFSRRGCDAAVEYLEDCRLLHDCEASEVELELRRFKMQYPDAIRESAVKGLMRGVAAHHAGCLPLWKSFIEELFQRGLVKVVFATETLAAGINMPARTAVISSLSKRIDAGRQLLTPNELFQMAGRAGRRGIDTVGHAVLVQTPYEGPEECCDIIFAGLEPLVSQFTASYGMVLNLLAVCIYIFFLFLSIHMFLLSPGPNLMDWNMFSRVQKLHINRKNRMMLRTSILEEP

SEQ ID NO: 67901 - protein, 1166 aa, Zea Mays
MNVGQAAHLSGQMSGQTAQMNQVPATGVGIGVGTADGLPQHQPMQEMAAFSGTDQQFVMFRTTMREKIFNYIGRKQSSAEWRKRLPELAKRLEEILYRKFPNKTDYYNMMKGPVEPQLQFAIKTLSAQNQHNQQNPQMARQIASSSSYGTMIPTPGMTQGTNASSRIPYVTENNGLSSSGAGMVPQNANMGASMQGPMSNGFQHLNASIPQNSTTNNIQSTMGSVGVQRQLPHMIPTPGFSNQQNVPSNPDYSNGTGYFNGEPAVASHMQHQNQFPSNQIQHIGGHNNSGIHSSMLDSSSAYGLSDGHMNGGIGVHGSNMQLTNRTTAPQTYMNISPYGNSSKPMQQQFNQHPQQRIPTSVEMTGSGSFYATGSTPLTTANSQSMNVANLQSRSRMNQMLVSNQLNIQSIQQQPQIKNEVLDQTEKVNFQSPQLTHDQLLRQHPMPQHQVQPNSQFVQNQYHINQQQPNSQHQQAMLRNNSFKQSQMASTHSMQLAEQGSLLHTELVSSQTSDPADLPSFQGQYQQRNALDNVKGGQMLGHLSSSQNFHPSVSHGSQQLLPSNQQLDDGSNAVSYVLKGSQAEQMLRPQWQPQTMEKAPVTTNSTLEKQIQEDFCQRAMSQDGAQQPFSSDWRLSNCTAASIDPALPKPAAGGFEQVNGNIHYLRQIKWLLLLFHAKTCTYPVGSCKFHGCVQVQELLKHFQNCQSKDCSYRSCSKSKMMSHHYKTCVDEQCPVCSVVRKFLRQSTEQASKQKALESRKLAQQNVPQRIMNGIEGDRMDVDPMSVEAFDDQPFVPKRLKTHPPSPSGLENDISVVSNYHVNSGFALQETQPEQLDHNNRTSYLKREVDAKADMRAPQKPIKISYGIDGNVTASRHNVIPGVPSEINSHIKQENLLVDKETSETALEVKNETNDPTDATVSKSGKPKIKGVSMTELFTPEQIMEHIDSLRLWVGQSKAKAEKNQAIGHSENENSCQLCRVEKLTFEPPPIYCSPCGARIKRNAPYYTVGTGDTRHYFCIPCYNESRGETIEVEGQTFPKARLEKKRNDEETEEWWVQCDKCECWQHQICALFNGRRNDGGQAEYTCPNCYVEEVKCGLRKPLPQSAVLGAKDLPRTVLSDHIEDRLFKRLKQEKQDRAAAAGKNIDEICLKRMCWDSNADRQGENPP

SEQ ID NO: 67902 - protein, 77 aa, Zea Mays
MDRGPLDHGRRRAGRRSLSAQDTGPRPQIGGEHWLVSLWPLSSPATAAGEGYAKAKRSSGSRGGSHGGDGEAQDLCR

SEQ ID NO: 67903 - protein, 556 aa, Zea Mays
MFVYDEKADQLTDIMKGLGQPGASENDGTPVFQNDQVECSPQSILQGGHVQSTSLHHQDDEQSVYHIHRMNVEDHDLMVVRGIDITSQSEKNSDVPDQSRNGISCVDKGIYCCANNPDKQSDVLMDIKLCKGGLVVYNPDCKNTQLEDLDGVSYKGPSVHACDQDQDLESIGHAVVNHNCHNSPNISSEMSHPTTNAVIDQETENVMEPSCSSSQLPKSSGEQMHVEDFLYLNDQAAKFEKVSGQLAGPLGPPENMMYNDSGDLQIKQTYLSSGQHFSSVYLNNGILSHQQPQLATPAFALDNPASFIEPFSNLQSNRQPETEKDIGAVFYPFRHATNIKQSASLHCLVNKGLAQSASFPRLLQERHQLIDQSDSDLYAQPHEDYCTDVSCPTKVNLHISEQHSYTAFASMDHRYNWFPEGCQSHNNNDNLLGLQSGNFLPQALPSGSSTDGALFSTASQYNQPSVHMGHGGSNRSQLIEPRNQFGPPQNFLSKSQDTNPMFPDMYGFTQNIASGTSSQVAPIGSLDCSHWTNFIQQNSGMPSDFTNRPSRGPWTR

SEQ ID NO: 67904 - protein, 95 aa, Zea Mays
MACTPRVGSRREPHLKSHHYRARVKKNTARLDCGCSGVGLAISWLGAPWGPQGGTHDLLGQDEPPRQLEFLTVPVTQPRSAPLHGQYAGAPIRGE

SEQ ID NO: 67905 - protein, 188 aa, Zea Mays
MGAGVLLGDAAGLGAHLAVRRRRTRLYLRNWASKPLRPSVWLGVAACVSQNRDRRGHVTRFSASASSGSDEPGELSEDEAQREWEAELNRRLKEAEEMEELERTAEQLQSQAAAEAPEESEEEKRERVRRELQKVAKEQAERRETAKQMFELGQKAYGKGMYGRSIEFLEAALTIIRPSSLLGGEVSL

SEQ ID NO: 67906 - protein, 311 aa, Zea Mays
MEDPARILRGFRIAARLGFQFSSETSNAIRDFSSSINNIDKARLMMEMNYIMSYGAAAPSVRLLRKYGLLDILLPFQSAYLSEQMKGGSSDRHLMLMKLLSNLDRLLSADRPCHSSLWLALLAFHSTLVIYPQDTLVIRAFAAVLYFGTWETTVKFLREEVGAEVPFAPETMGPSRTKLDCLKEQTSHLASLVNSSVDILTCPHDLEQSLARFSEPLQFSGVVVASNNDRKKLSAVFEGLASDLHSYDGRRGMRGIDYSSLKLGDLAEVRFVLGKVIMDTMYDKLPCESTEDEGAAADVAGGSLPPLSALF

SEQ ID NO: 67907 - protein, 181 aa, Zea Mays
MLLLHFCLPLSDAHLHLSRHHIVPQLIDWHEGGYLTVDLPMSRGEVVIGGPNVSSFLPTAVPLLQNTVKQKSFIGSSHLGSHAVLEYQFLPEQPSDAYERGSQLRFYDALAEVLNSRVDSFSIGSHFTHVVEQAPSYTFHSQSSGSSCLSNIIASMAQIQILLLAWLKSTVKNWHPSSCQI

SEQ ID NO: 67908 - protein, 171 aa, Zea Mays
MSHARARRADAQQPISCSKFSSCPKLLLSRSRATAPGFFSRSACENRSLCSSPKFQTISYQRREDLGSMAPLQQTSRSWHPNPCGSPAIRVPCVLGWSSRVVAVEDLHDRYCQNSFRHLLHPCRCRSPAQRAQAPGRTMSHARARRADAAAHQSLQVPSSPKLLLSRSRAT

SEQ ID NO: 67909 - protein, 184 aa, Zea Mays
MPSDPLLPRKENLQISPPSPPTICARWPSTGYAHVTVVGSQVSPNSKRPRFERRPQQDVRICASPSSRGRRRWIQGHQRRPSPSSPNGRRGDVLLVHTNVRRRGKSSARWPRPSYSRRNSSQRLSPSREASSWGLVVLLRKKYRSWRCVHTFLGLGIFLSLLTCSRHIATEIANGHCLYCVSFS

SEQ ID NO: 67910 - protein, 61 aa, Zea Mays
MSRRSVLLLPHRRVLLRPVGDIRELIRPQSAAHAMPPSQPKRHVACIRVCSHALRASVGDI

SEQ ID NO: 67911 - protein, 447 aa, Zea Mays
MEEGGRHDHDAGDRISSLPDDLLFSILLRIGSIRAAARTSVLSRRWRHVWARLPELRLGTCDEQPGATFLDFVDAVLDACSAPAVHRLEVAMYCHGLRVHACRLVPWLRFASQRRVGDIHIQVPSQKKFFLSKPIKEELELPVCDGATRITLSLERRWSLRLCPAGSFMSLTDLHISCATMAGSELGNLVSEQCPLLRNLYLFVRLAAASNVSIHSNSLQSLSFNVQNTQKLEVMAPKLEVLAVCDATKAHISAPKLSVVSWDNDTGYNPLCHHFANAARHLRLLHLGSKCVSASLMRQFDEVDVLKLKLNLLNIKGTEAYTNLLNETAALPKCEELKLRVSLRASQHNFASIMFHILRSCNNTRRISIKIDSSMIFKADGIILESLEEVKITFIRHCYGQVQFVEEFARCHAPSLKKLVVNSPTKGLQEMVGGLFDPDVTVKCNVI

SEQ ID NO: 67912 - protein, 209 aa, Zea Mays
MVNKVSEFPGEVSVLALGPLTNVALAIKRDPSFASKVNKIVVLGGAFFVAGNVNPAAEANILGDPEAADIVFTSGADVIVVGINITTQVCLTDEGLLELRNSKGKHAPFLSETCKFYRDWHVKSDGFHGIFLHDPVSFTAVLHPEYFTFKKGVVRVETQGICTGHTLMDQGLKKWNSENPWSGYKPISVAWTVDVPKVIGFVKKLLMAP

SEQ ID NO: 67913 - protein, 408 aa, Zea Mays
MGNALGCAGLGERLAAGARDGDAAEVRRLLDANPGLARCAAFGSLSSPLHLAAAKGHHEIAALLLENGADVNGRNIYGQTALMQACRFGHWEVVQTLLLFRCNVSKADSLSGRTALHVAAAGGHVRCARLLLAGAGSGRSKLVNRAASGGGGGVTALHLAALHGHADCVHLLVDERADVAARTLPCAAPPMASVGAGSAPLHYAAAGGEVKCCQILVSRGADRAAVNCNGWLPVDVARTWGCHWLEHVLSPKSLLPIPRFPPSAYLSSPLASVITLARDCGLALNMSSLPMDTMDGGADDGDACAVCLERPCNVAAEVCGHELCVKCALDLCSVIRSYDAPGIAGTIPCPLCRSGIASFRRRAAAAEAEPGANAGDRQASSSPHKKRSTESDQDGLPLVCAPPAVMSS

SEQ ID NO: 67914 - protein, 426 aa, Zea Mays
MEKMVRKADPSKRIVLLLNKIDLVPKEAAEKWLTYLREELPTVAFKCNTQEQRTKLGWKSSKLDKTSNIPQSSDCLGAENLIKLLKNYSRSHELKLAITVGIVGLPNVGKSSLINSLKRSRVVNVGSTPGITRSMQEVQLDKKVKLLDCPGVVMLKSSNSGVSVALRNCKKVEKIEDPVAPVKEILSICPHEKLLSLYKVPNFGSVDDFLQKVATVRGKLKKGGVVDVEAAARIVLHDWNEGKIPYFTLPPKRDAGEDSDAVIISEDGKEFNIDDIYKAESSYIGGLKSIEEFHHIEIPPNAPPAIDEEMLEDGGKKPSEAIQESRDREEQMPDVKDSGGSKAASASTQNDKLYTAEGVLDPRKSKAEKKRRKASRPSALNDMDADYDFKVDYRMEDGGSEGAHADDEDGGDGSEDNEPMTGVDDA

SEQ ID NO: 67915 - protein, 361 aa, Zea Mays
MELCPRVPSRERPLPWCTMPRPPCSPSRPSRDPPSPLPPSSRPRSIDGRCRPAILASLPATRGASLCRIFYLFTSKVPGTEPSRILEPSRILEISHWHLVTVSGGWASDAAGRYRCLELDHPCKAPWCDGPLGALESNGWVYSAHCSFKLFVADASWWCLDGKWLFFWGDSNHVDTIRNLLTFVLGITDTSAVTRQFDAVFTNPIGGAGTLRITSIFNGHWNMSMNYLGLHSLRNRGFRQLIRSYFMSGDRVPDVMVLNSRLHDGCYWTSVRIYAQAADFAAQFWSGVMDKVRARGHAVPRVFYRTQMPQGGIDAGKNHATPFTELRDEAGVTYSHPQGWVTLQTLPNEVLVVLRKVIRFC

SEQ ID NO: 67916 - protein, 128 aa, Zea Mays
MLQRCWTARDLQNERTERLRPERARVISPARLCLLPRAVPAQRLLPRRHRSSAPSFWSKNFTQERKLDPMEGEGKGGAVWTASQSNFMQVFLANLVVDGIKTSTGGFKRVHLNACAKALNEHFKLNRT

SEQ ID NO: 67917 - protein, 50 aa, Zea Mays
MKFMTSCQLVATFHAYSTTSHFSCAGRYIIFTAHGSVYGCFRNICTHAHE

SEQ ID NO: 67918 - protein, 495 aa, Zea Mays
MGMAAPRAPLPLPQLLLLLVAALLAAAPLPRAARADEFDVRRHLSTVTRYDVARESSSVISMPSIPDGCRVIHLNLVARHGTRAPTKKRIKELDRLAVRLEALLKEANQVLDSDSLKKIPSWIKGWESRWKGRTKGGELISEGEEELYNLATRMRERFQDLFDDEYHPDVYSIRATQVPRASASAVAFGLGLLSGKGKLGQGKNRAFSVLSESRASDICLRFFDSCETYKAYRKRKEPDVEKQKEPILEHVTAALVNRYHLKFTTRDVSSLWFLYDLEGFVLKGYGESINYRMGLPLLKDVVQSMEEAIIAREENRADGTFEKARLRFAHAETVVPFSCLLGLFLEGPEIEKIQREEALDLPPLPPQGRNWKGSVVAPFAGNNMLVLYQCPSKISDGSTISGGRNNSYLVQVLHNEVPVSMPGCGNKDFCPFEEFKEKIVKPHLKHDYNMICKVKSPAASEEPASFASRVSSFFLGLLSQKGYRGVGAEGVKTEL

SEQ ID NO: 67919 - protein, 74 aa, Zea Mays
MLKFGKATLVMQKCLFSSGFLTDPVCFTGSKFLSGFWSTRRAVRSQETYVDVYKQTHFFSWGFLLSVENVMPNA

SEQ ID NO: 67920 - protein, 355 aa, Zea Mays
MFKNIEEGKVYNLVMFVKSPETTDLTVSLTSSNGLQNLASATVTVSGESNWIKVEQKLVAKGTNRTSRLQITTNKKGVVWFDQVSLMPEDTYKGHGFRTELISMILDLKPRFLRFPGGCFVEGGWLRNAFRWRESIGPWEERPGHFGDVWHYWTDDGLGYYEFLQLAEDLGTEPIWVFNNGVSHNDEVDTVAIAPFVKDVLDSIEFARGSANSTWGSVRAAMGHPEPFPVKYVAIGNEDCGKKFYRGNYLKFYNAIRQAYPDIQMISNCDGSSTPLDHPADLYDFHVYNDSKTLFNMKSTFDRTSRSGPKAFVSEYAVWRGDAGRGSLLASLAEAAFLTGLEKNRSHDPTEFCLL

SEQ ID NO: 67921 - protein, 278 aa, Zea Mays
MATPLRATAVLAWGSGEDGQLGMGGNEEKDWPHFVEALGPYAVTAVVAGSRNSLAICDDGRLFTWGWNQRGTLGHPPETKTESSPGPVDALAGFKIVQAAIGGWHCLAVDDKGRAYAWGGNEYGQCGEEPERKEDGTRALRRDIPIPQRCALKLKVRQVAAGGTHSVVLTQEGHVWTWGQPWPPGDIKQISTPVRVQGLEKVRVIAVGAFHNLALTEDVILWAWGNNEYGQLGTGDTQPRSQPIRVEGLSDLSLVDIAAGGWHSTALTIDGEGMLLDV

SEQ ID NO: 67922 - protein, 238 aa, Zea Mays
MWTLLEQSVQRVIVELAIRCVKSGPRVFKGFTVGFHPRSSEIVYNGFTQPGFEQPHHGFSFQTEQIHVSLYLSAKSSLSGLVGKPTFKVNPVKGLGVTLAGSGFNDAMPSTLSPTVLNVDWRCEIVRTSPYEVHIFIPVEGYDPIEFTLTKKCGYRQEKESDPMKGWAKFGIVSCVFIVLSCILCCGGFIYKTRTLHLYGLDALPGIAVLSALLDAVGRPRGYLPAVNPNENHASHAS

SEQ ID NO: 67923 - protein, 725 aa, Zea Mays
MEPRVPCGDGGPEPRAARTHRREGERNHVLDARILEPQRQRSNPIRNIFHLLTQREVSPRLKHHAKRMWNESPKYDPDSIELRSADAKLDIFSWAESQSLHSWSAKYCPLLPPPRSTIAAAFSPDGKTLASTHGDHTVKIIDCQTGKCLKVLTGHRRTPWVVRYHPLHSDILASGSLDHEVRLWDANTSDCIGSQDFHRPIASIAFHGSGEILAVASGHKLYIWNYNKRDGTSVPAIILKTRRSLRAVHFHPRGAPYLLTAEVNNIESADSPLTLARSSGYLNYPSALLVTNTNSRFCTLPESNVVSPCLLWPAYLRDGGILHVLGNDSSSTIVQQRSSLVQPSTSDTANVQLEQFATPMDVCPGEPTSSNDIPDAVTVPTSNGNEMHGAGGQSNSRLQGSSSTSNLERFSARDDLQVSSLSRTDPIPLTAGPSGSDLHRAMPLNMLLTGGLDVQMFLRNVGSGQQDHSLFGDSRNWEVPFLQGFLMAPNHAGLHPALVNNSVLEDMSIAGTAGTNNLKSPHMRNFGCPGASSSIPLTTGSSRGPNRRYASRSVPGVGNLLLGPQIDEAEAHAVSLGAGSEITASMLAPGTELPCTVKLRIWRHGTNEPCVPLEPEACCLTISHAVLCSEMGAHFSPCGRFLVACVACLLPQTEDDRGSQLPVSYEGAGSSPTRHPLPSHRVIYELRVYSLEAETFGDILASRAIRAAHCLTSIQFSSLNWILFV

SEQ ID NO: 67924 - protein, 281 aa, Zea Mays
MEAHASRGRRTLEEIRQKRAAERMQHALPIAASHVDSHGNQRAGAELLARVQELENGNTELIDEKGVEKDALVNRLNDLERNVVPSLQKNLNDISLEKDAAVVAKEDALAQLRSMKKRLKEAEEEQYKAEEDSASLRAQLNTLQQQVMGHSYSGYTMGISTEESVAMEKEIQDLQAQLKQESLLRQQEQQKLAEESQLRQQEQEKLAKEQIHIASLEAEKQQLEDQITMLTKKATGMEDTYTYANLSFIMSGKTTVHASKHVSSLYLLACVFFHIYILQCL

SEQ ID NO: 67925 - protein, 100 aa, Zea Mays
MYNYDYKREYKLGVETTILMKSYTVSLLHILSNNNHLRGHGGDDHDAPRNACVKYSIYVTISIFSNTRLDHPCTSAYLPGKILSSLPRLRIWLRLESLRF

SEQ ID NO: 67926 - protein, 235 aa, Zea Mays
MDDAHIALCFLTQHGKARYLLGRKQDPIEGVKVALTASQVPAVSKLDHDTLHLVWTEEKLQEQLDVLDRRWEISRRRALASFKSGDKLAAYRYVRQSKLFSQSRSRCTQLLERIEEVISLIASAESNKKVYEAIQIGILAMKDNTVSIDEVNIHMKEIDELVAAQREVDAALVPLQSLDDEGDIDEEFSKLEAELQDDVPHIHVQEPMAPSNEESPDEVVESLSHNMSRIRLEPI

SEQ ID NO: 67927 - protein, 732 aa, Zea Mays
MDPAPDQLSISASAPFPTIPAASSPRPRAARTRRHAAPFRSDHPTAGSWRSGIDLPRRPSASAFSQQERYPSVASWSASRDANFVFGSGVAGAPEMRRSFSSGSGEASLAELSYAVHRFALDGSGRPSDIDAPGGEGTLPVTDSGGRFGARGCSSTLYEGFSLDSIHHQTEHLDEERGVPSQTIQCESVGMRSLASPTRTDENAPIEFAKRGDSLPIQDSVDQSRNSGHDANAHHDFFVFGGHAGSNSFATNATQTNTSKVHSADKETVTCNSEQLNTSVSKDGNCIKFILQDAKHVFGSSDNDLPGSEPCEISTTVETPDTITSSFGSEDGIVTVSSIKVPCNIEVVPASELVECQPFDEKSFTFDDQNVPYRNKGGVKGMGMNRGAFMPNKSSANQASFESVSRSGHCSKKVSPEEKLNLKEASSSLQTTESGHAEAEFTSAANTEHSGQSDFIFSASTFHQSMLHPQRRHNKKKSGGMGNHASSIQSLPSSAIGLACSEVSGSQQCVDLAAKWTEYNKIEPNRVAISRGARCSTSENFGDHDNCETWRLRGNQAYAEGLLTKAEECYTHGIDSFSPNEVSRKALMLCYSNRAATRMSLGKMRDALSDCQEAIDIDSSFLKAHARAANCLLALGDVEEAQKAFEMCLKSNHLSSLDHKIVEEASDGLQKAKKISGLISHSEEYLIKKAFDKIPSALQMISDALSISIYSDKLMEMKAEALLLVCIYVAAI

SEQ ID NO: 67928 - protein, 1004 aa, Zea Mays
MAIPEDLEGTSGDGGVTNRGSRGRRKGAAKGRGRGRPRSADRSFPPPAMAGVAVGDRVLRERRHTTNVFCERDTDVDDESIYFQDDVETVRSKDSRSGDVLQTAKKRKKGGAGKVSVTKRSKREGEEQKKASPSKDKDCAETNGKRKMLTGDNALMCHQCQRNDKGRVVWCNSCRNKRFCVPCIERWYPNLSEDEFAAKCPYCRKNCNCKGCLRMRGVEEQPPKKEISEENQISYACNVVRLLLPWLRKLRQEQMEEKKLEAKIKGVLVNEMKLEQAEYNLDERVYCNNCKTSIVDFHRSCKYCFYDLCLDCCVEIRRGEIPGGEEIMRVKPEDRGRAYLFGTTNSKDGSKRFSMRRHSSSLENEPSNVVGSSEGANNSLELWKAESDGSIPCPPKELGGCGGSILDLKCFFPEKMLSNLEERADRIMRSEVFAKAVAKRSDQCPCYDHSGNIRTQDVRETANTKGSSDNHLYCPVATAIKEDDLAHFQMHWTKGEPVIVSDVLHLTSGLSWEPLVMWRALREKKTNGDVEDEHFAVRALDCLDWCEVEINIHMFFVGYMKGRTHHMTHWPEMLKLKDWPPSSSFDQRLPRHGAEFISALPFPEYTDPRYGPLNLTVKLPDGALKPDLGPKTYIAYGFYQELGRGDSVTKLHCDMSDAVNILTHTAQVPYARYQLEKIEETRKKMKEQDLQELYGVSELNLSSPFTDSRNISADEMSKTSCNYGLDVNDVPPVNNESEVQSGAGQCSDYIDKDRSYAGMHNGERTGGALWDIFRREDSDKIQDYLRKHATEFRHIFCNPVKQVIHPIHDQTFYLTEEHKRKLKEEYGVEPWTFEQKLGEAVFIPAGCPHQVRNLKSCIKVAMDFVSPESVNECMKLTGEFRRLPPDHRAKEDKLEIKKIALHALNQVVNFLDPSSEWSKSWFAQLKNKKKAGAEEQEKPKRKRGRPCRKSNDEAAGDRHRKKGGRQRGRKRGYGKSKDGAGAVDVKPPKRQRNLLKGSGNRVGG

SEQ ID NO: 67929 - protein, 86 aa, Zea Mays
MGRAVLRIGPISPALVAIYRRGPLAVPRLQQRVSFVWVRFLHLPRAVGLPRTASKQARSSAFKGRKAATERPPPAPMSPSHPIRRY

SEQ ID NO: 67930 - protein, 116 aa, Zea Mays
MLGPAMSELVCGGCFTMLVHSRSATNVRCPHCGRLGSTRSAGNQMGHLSCGQCRTTLAYPPGATTVGCPTCRNVNPVPTRDARPQQTMVLVENPKTLDEKGKLVSSVAVGVTSWKR

SEQ ID NO: 67931 - protein, 264 aa, Zea Mays
MVSASAPPPQAQSDAAGSGEEVSKKVRKPYTITKSRESWTEQEHDKFLEALQLFDRDWKKIEAFVGSKTVIQIRSHAQKYLLKVQKNGTSEHVPPPRPKRKAAHPYPQKASKNDSSSIHRNSGMNVPVSSWAHSSIPQAVASSMVKDLGAGTPGSNNFCSSSTEGLPRTWQPGETNDPINQIPSLRLMPDFAGVYSFLGSVFDPSTSGHLQKLKEMNPIDVETALLLMRNLSINLTSPDFEDQVLPIRDASTQQSRPEVRTTIL

SEQ ID NO: 67932 - protein, 917 aa, Zea Mays
MCISFWAFTNRKDPPRSLFNMDEGLAPFRGFLQERLALKQSGAELGTSILFFGCRNRNMDYIYEDELQTFLEAGALSELIVAFSQEGPTKEYVQHKMVEKSDLKILEPMEEEEYSSETSNEEDGEKEGNAAESDVFRPVDVDPACLPRVGMIFDSEEDAFQFYVTYGCHAGFGITRRSNNTFDGFRYRSTFICSKGGQSRLRSGVTKPARKRGVKTGCKAKMIVKDAHFQNRWEVIVLELEHNHPLDPNLLKFKRHLKNSPFTINPPQICESEGQQSNSALVHSSRVVDTGITSSSTQIEFKAKIDRNRKLKLAEGDLDALLDFLNKMQDQNPCFFYSLDMNEQGQLRNVFWSDAKSRSSYNYFGDVVAINVTNFSDQYDMQFVSFMGTNHHAQPVLLGCGLLAGRSLGAYVWLFGTWLRCMNAKPPHSIITNYCHDVAIAIKKVFPNARHRFCLSHILNVLPEKLEEIDNKDEIISTFTTLAYDYVTMTDFDREWQDTIQHFRLERNEWLSKLYEVRMQWAPVYVKDSFWAGMSVTDRSDSVTDYFDGWLMSGTSLKMFVEQYEEAVKGKLEKESYEDLRSAQMRPPMVTGLPVEDQAAKVYTAEIFQKFFNEIGHSFHCNYNILERNESVVTYIVSEHVDQTNKVDYKVAYDNVQGDIWCLCRLYQSKGILCRHALTVLRQELVLMIPQKYIIHRWCKDCKQTCASISQPVSAGNQELGSYDDLYKLGHLYFAEVVEFGSMNSESKEYALSIMREVRDKVISYEKSLRDQRVDSHVSTANFAYNPVNEDFTDDALPISLSTKGWDLTQGQSKRSRKKKLATPTVLDTLKKKTKRAYNKRRNATANTLNTSATATDGITDGTNVQQNPVNEGWQLASTSAPETFSYGVENISFDLSQYNNAPSFHWPESSSRSQLH

SEQ ID NO: 67933 - protein, 434 aa, Zea Mays
MNDVTELGWSLVDVFCSDGTFARAAVPSGASTGVYEALELRDGGSDYLGKGVSKAVNNVNSVIGPALIGKDPTAQTEIDNFMVQQLDGTKNEWGWCKQKLGANAILAVSLAVCKAGASIKRIPLYQHIANLAGNKQLVLPVPAFNVINGGSHAGNKLAMQEFMILPTGAASFKEAMKMGVEVYHHLKSVIKKKYGQDATNVGDEGGFAPNIQENKEGLELLKTAIEKAGYTGKVVIGMDVAASEFYSDKDQTYDLNFKEENNDGSQKISGDSLKNVYKSFVSEYPIVSIEDPFDQDDWVHYAKMTEEIGEQVQIVGDDLLVTNPTRVAKAIKEKSCNALLLKVNQIGSVTESIEAVKMSKRAGWGVMTSHRSGETEDTFIADLAVGLSTGQIKTGAPCRSERLAKYNQLLRIEEELGAIAVYAGAKFRAPVEPY

SEQ ID NO: 67934 - protein, 269 aa, Zea Mays
MSIYQTHFCFICCHLTSGEKEGDELKRNADVQEIHRRTIFNLVSRVNMPKTIYDHERIVWLGDLNYRINLPYEKTHELISKQDWNKLFGKDQLKVELKKGHLFEGWTEGVINFPPTYKYKVNSEKYISDDNKSGRRTPAWCDRILSHGKGMRLLSYKTVDLRLSDHRPVTAVYMADVEVFSSKKLQRALTFTDAEAEEQLSFEEDNASGIYNLGLYESSSEVYTPLVRAKVFSKVTWLKPQPLMRALSRPRRNGLPAVSRSFPTLRLRR

SEQ ID NO: 67935 - protein, 233 aa, Zea Mays
MAMAFAAASAWSLSLTAFSLPLPQSLRPKPSQLLHGATSSFPRPRRCGWGAVVRCAKRTGKQRYPSEKKRLNRRKQELLRQAAPEEGSKGRESGYWRLSKLAVPARDDPGKDFTGISLPLLQAIAKAIKFPVPSMLPDEAFTVIRKSFDARKVLKEPQFTYIVDMDVKKILNIEPRAWDFIARLEPKLGVVEYMTEEKLAVDLVSMLNVNLVQKLPYWSVVSLLNREVVTLVH

SEQ ID NO: 67936 - protein, 352 aa, Zea Mays
MVQLLYPAKCERKNVDARSYFMTLEYWEDLFCKLNEMRRYRRIVGSLAGSCLSAAIPLLSSNKETACLVALDIVESAAISIANVEEAYKCECQSKGVIEEAIQFCSFDELLDGTDATEDVDENRLLPAMNKLWPYLVICLRNKISVPVVRKCTEMLRRAICISGGDFYVRRFHKDGPIVWRLLALSPFRRLSKMDEKAIILPYRDTSLNSEEPMAEISSQKIQIAVLDMIAAISSNKRSAVALESVLKKVCGLVVGIAYSSLTGLQEAAIRALAGLACMDADLVWLLLADVYYSLNQRESLLPNQDLALVSDLLPPPVSSREYLFVQYGGEGVRCDVDPSSVHYVFRRMQGV

SEQ ID NO: 67937 - protein, 335 aa, Zea Mays
MVPLYYRDKIVLVAFGGNKKEPSDKVEVLVVLQNEHCFSWRSAPEVEPLLYDESPPGSRELADHLSSCAPPYPTSSAARSGLAATAENSCGRKPLPDSLLRTSNLGGSSLRRQFRQEEECSSLAQKLQKPIDDDRYKDAADECSEHQPPSATNPKPRNDARRSSPEVVVDAKARRLLGRSSSDMNNHQDARVAALVRRNVALEEQLSAALASKDEAEKNLSLVIDSKDGLEKRLAEKDREVEALREKATGLELAQEEANSLSNTVHADNVRLEREVAFLKAVMDETQKELHSTRGVLAGERARAFQLQVRPYHARLSFFLFFVHALGSARLKSFI

SEQ ID NO: 67938 - protein, 120 aa, Zea Mays
MHLYRIFEKKEEFHSDFSSTFYAEKTFLGRRYMRGFYNDVARLQDVRKIFPHCSSDMEPGQCFFPQEVAKSITTPMFILNPAYDVWQVEHVLSPEGSDRENLWQNCRMDISRPASCNSVY

SEQ ID NO: 67939 - protein, 495 aa, Zea Mays
MARHIFSDQPEEYIQSQVNTLLHSLDIDNRMRGPMHGQYPELQEYWKQSQSSTRPAPMHNAADKWITEFGKQNNNPENWANSFEQQYGPNGWASEFEQSQMAMRQMGGANMANLAAMEQSRVLAQTLASNNDPKFQLSQGADKWVSEFSSQPNHGALNENWVDEFSKLNVTDEWAEEFSGGGFGESSADPWVDEFQEHLSSFKQSPGASRGVYVFSENNPYVGHPNPMQEGQELFRKGLLSEAVLALEAEVLKNPDNTEGWRLLGVTHAENDDDQQAIAAMMRALEANPTNLEVLLALGVSHTNELEQGEALRYLYRWLQNQPKYGGLVPLQSTDSPYGPDVVRLFNEAAQMSPEDADVHIVLGVLYNLSREYDKAIASFKTALQLKPQDYSLWNKLGATQANSIQSADAILAYQQALDLKPNYVRAWANMGISYANQGLYEDSIRYYVRAVAMNPKADNAWQYLRISLSNASRADMIAACDARNLDALQKEFPL

SEQ ID NO: 67940 - protein, 354 aa, Zea Mays
MATLVRPPALHVRAVSGGGNKDRVAPQRPWWGGNKPISPRQSGGSGARGGAGGGGVALDQVLGVLRRDGEFVQAAVGAPLRDVFWLRFLEKKQRKQQQPRPKHKPFRQQQEEEEVVVVDESPPAFPPPSYPSGLSCVELMAADFQALKVYAGSARHSLARRFLGSNSKGKSEQQPKPKPQEQQKEQQHILQAPAFPPPSYPPGLSCMELMMADLEALKLYINYYSAILTTPLPQHYDPDLLAQYFASRPHILASRVIQILFTFLSAVVKMRISKRAQLTTDATYSSGNSGNGFDDTQYMVGQLLKETFLNLGPTFIKVGQSLSTRPDIIGSEICEVRPLLSCMKGFLLSQERMQ

SEQ ID NO: 67941 - protein, 92 aa, Zea Mays
MHQRVPSNSYKPNAHFTRLKVCENYLKTQGRVACTGACLGNTRLVLLGDVDHLTIILGQILASYVHLRFRSSAPSCGRLSSGSPHRVVNSRT

SEQ ID NO: 67942 - protein, 51 aa, Zea Mays
MVQGKYFCAPLTYPIYPFSTQRQCYFCSLLSGGQNMVVVDASRRLLVLMVP

SEQ ID NO: 67943 - protein, 150 aa, Zea Mays
MLDVCAPHGPAKLPAAFVAGVRVAWVAGRWWWRSVAVGAARHGVTTRASFFGLDSQVASFLHHQEKMNVLVEPDVHDTFARIPGYGFVQTFYTQDTSDLHERVDFVTCLGGDGLILHASNLFRTSVPPVVSFNLGSLGFLTSHNVHFNNL

SEQ ID NO: 67944 - protein, 694 aa, Zea Mays
MKLSETGKQSVLSSEVKSDEESLEFDVVKEENMLLKDEMNFLKGKLIEITETEESLFKLEKECALLNASLRELECTSTSAQSDVLKLGPLQQDAWWEKVENLEDLLDSTANQVEHASLTLDGYRDFQDKVDKLKASLGTTNVSEFCLYLVDILQQRVKSVEERFQACNHEMHSQIELYEHSIVEFHGTLSKLINESEKKSMEHYAEGMPSEFWSRISLLIDGWSLEKKISINDASMLREMAWKRDNRLREAYLSSRGMEERELIDSFLKMALPGTSSGLHIVHIAAEMAPVAKVGGLADVISGLGKALQKKGHLVEIILPKYDCMQHNQINNLKVLDVVVKSYFEGNMFANKIWTGTVEGLPVYFIEPQHPGIAPAQDLAYCGLDVDHLDRPDRMRDNSHGRINVVKGAVVYSNIVTTVSPTYAQEVRSEGGRGLQDTLKVHSKKFVGILNGIDTDTWNPSTDRFLKVQYSANDLYGKSANKAALRKQLKLASTQASQPLVGCITRLVPQKGVHLIRHAIYKITELGGQFVLLGSSPVQHIQREFEGIADQFQNNNNVRLLLKYDDALAHMIFAASDMFIVPSMFEPCGLTQMVAMRYGSVPVVRRTGGLNDSVFDLDDETIPMEVRNGFTFLKADEQDFGNALERAFNYYHRKPEVWKQLVQKDMKIDFSWDTSVSQYEEIYQKTATRARAAA

SEQ ID NO: 67945 - protein, 583 aa, Zea Mays
MSRKPLLPTCGSSTPPPLLLLRRFLPRRRATSSPPPPSTRRRTAAMPPRAGDSAAAAAAAASFRLGMVRVVSFLVGGLNLAVLLLGLYIIDAVLPSGCGGGLAFASAPALAGVRVLSMIGAARAQHATADAIAKRHLHESDASVAADAVARHEIRVRYKRWLWWTRFGMAVGALQLVAAIYLMFVIVRDLSNERRSTSCFFGQDKADRVSVRALIALFLILSWVVIIVQCFTGSDILRWRSFYATHDMAWKAHYREVFDHGIREALCCLGRAKYLTVLEEDEVYSVARLLGDLVAYRASGTGHLELLAGLALLQKHGNLSELQTDLVEASHELMQEAAFLHPFAEACYTGPLLDFGRNPILFPCAWVYRQGVLTPWARRRRPALDGDNWWRGHAAAFLRFVNIPPKALLKGRVCQSKREAAYFVVVLHDKRTVVIGVRGTETPEDLITDGLCRECAFTMEDLDGLVNSEQLPATTRERVISTFPHYGHGGIVESARELFMQLNGENTSSGRLGFLSTLLGEGSECHGYKVRLVGHSLGGAVATVLGMMLYGKYPSVHVYAYGPLPCVDFVIAEACSHFVTTYE

SEQ ID NO: 67946 - protein, 502 aa, Zea Mays
MHWHETGGVSIDENILIDKTVHKAIDSRSAVLKRYIADIGKSWPVFIVCGGILPVFLSVIWLLMIRYFVAAMTWITVVLFNALVISVTMFFYIKAGWIGNDPLTVVIGESDPYVHISGREISHLHTITILMTAVMIIAFLSSIAIVRRILIATPVLKVAAKVIGEVQALIAFPLLPCLILSILYMFWFSATLHLFSSGQVVRNDCNTDCCSYDLKLGKVNCDNCCGYSIHYTPHISIAILFHLFGCYWATQFILACSSTVVAGSVASYYWARGEISHDIPFLTVVSSLKRLMRYSLGSVALGSLVVSVVEWVRFILECLRRKLKLVDSARESCFGKATSSSSECCLGCIDWTLKSVNRNAYIMIAITGKGFFKASVLATGLIMKNILRIGKVNVIGDVILFLGKLCVSLFCALFAFLMLDTHKYKSAHNKISSPVIPVLVTWALGYVVAKLFFAVVEMSIDTIILSFCQDAEEHQGNAQYAPPALMETLDEQGELQRLTQGP

SEQ ID NO: 67947 - protein, 403 aa, Zea Mays
MGASRKLQGEIDRVLKKVYDTENANQKEKFEADLKKEIKKLQRYRDQIKTWIQSSEIKDKKALMDARKQIEREMERFKVCEKETKTKAFSKEGLGQQPKTDPKEKAKAETRDWLNNVVSDLESQIDNFEAEIEGLSIKKGKQRPPRLVHLETSITRHKAHIKKLESILRLLDNDELSPEQVNDVKDFLDDYVERNQEDFDEFSDVEDLYSTLPMEKVEALEDMVSLAPSSLVKGVAPVSTTAVLSTKSSVATSPTQPTVSTASSQSTSQDQTEETASQESNPEPTPQTPPPKGGNPGPSVPAVPIVVSTGSAAVSVPAETISSPVRLTVPATAATVLSSAIPRSAPENTLAVTSIPANLSTTLKDDESMSVPPRRPSPATEIGIGRGITRGTTSQALVGYASW

SEQ ID NO: 67948 - protein, 2061 aa, Zea Mays
MAATLKIVVGSHIWLEDKDLVWIDGEVFRTEGQNVHVHTTNGKTVTVSISDIHPKDTEVPSDGIDDMTRLSYLHEPGVLNNLAVRYAKNIIYTYTGNILIAINPFQSLPHLSEPRTMEKYKGANFGELDPHVFAIADVSYRQMMNEGKSNSILVSGESGAGKTETTKMLMRYLAFLGGRSKTGGRTVEQQVLESNPVLEAFGNAKTVRNNNSSRFGKFVEIQFDKSGKISGAAIRTYLLERSRVCQINSPERNYHCFYFLCAAPLEDIKSYKLGDPSSFHYLNQSTCIKLDEISDAKEYLATRSAMNTVGITEQEQEAIFRVVAAVLHLGNISFVKGREADSSVIKDEKARFHLNATAELLMCDCGNLENALIKRKINTPEGVITTTVDPNSATVSRDGLAKQIYSQLFDWLVNRLNASIGHDTSSDRLIGVLDIYGFESFKTNSFEQLCINFTNEKLQQHFNQNVFKMEQEEYNREQIDWSYIEFVDNQDVLDLIEKKPGGIIALLDEACMFPKCTHESFSQKLYEKFRNNKRFCKPKLSRTAFTIQHYAGEVTYQSDQFLDKNRDYVVVEHQELLNASKCSFVSGLFPSVLENTKASKSSIATRFKWQLQELMETLSSTEPHYIRCIKPNNHLKPATFENINVLQQLRCSGVLEAIRISCAGYPTRKIFHDFLCRFCILAPEVFTERNNEKLICQKILDNIGLHGYQIGRTKVFLRAGQMAELDARRTEVRNKAAITVQSRFRTHVAREQFLALRMTSISFQSFVRVILASITLQTGLRAFGAYNEYIIRKQNKASICVQACWRCHRDHLNYLKMKRSVLIYQCAWRRRIAREELRKLKMAARDTEALKVEKEKLEEHVEELTSRLSFEKNLRIDLEKSKAREICKLQATLREMEQRVEEAIEMHERELAKKAIEEALAQEREKITVLTNEVDELKVLLSREREENSATKSALVVVREENDVLNKKIVVADASMEQLRDTVTRLQESLIEGEATLLAERKESDAAKKSLTEAHVKNEELFNKIEVAEHNVSIFQDDIQRLEETAATLETSLLSEKQQSTAIISQLTEAQQDIQVLQKKFADANKTIELLQDSLKRCEDSTTTRDALYVAERQEHGQTKQALSKAQERNLELLRKVDDSEKTLNKMLENAQRLEKHATARESLLLKTKQNLDCTTKALTEARGRNRDLLTSFEDSAKKINMLEDSLNRLEECTAEKDSLLAVERKQNKTTKEELANAQKTIDELVHESQQSQEIRNQLEDTIKRFKAESTARDTILLSEKQAHETTKKVLTEIQSRNEELIKKIQDCDKNILELQLTVERLQENTSTTEALLLREREQNNATMKAQAETQEINLQLLNKLEDVETKIGLLQGSVQRLGDNTAKDTLLLSEKREKDALKEALTESEYKNEELLIKTEEANKKVEHLQNTINSLKENMAASLEAERQENEAIKRSLVEAQERNDALFKKVRDSEYRAHQLQDTVQKLQVDAISRLSSFVMERQDGDGVKNAHTEVHGTNEDLMRRNENLLKRNDDLVKKIEDSAILVTELRGNLERLEGKAANLEAENQLLRQQAIATPPSTAKSSQAACSKISMIHRCQESGHILNGNVAYAEMKSSTGQTEMRPSMGSSLDLINHKVYENGQSLFNDVYQHQQPQNHQQLLLKYITQYLGFSGRKPIAASLIYYCLLHWRSFEEAKTTVFDSIIQIVNSATEAQHDTRSLAYWLSNLSTLSVLLQRSFKATRATASTPHRRRISCERIFQANQTSSSGLACLSAQSVDGGTVFHQIEARYPASLFKQQLVDQVEKVYGVISDKIKKELNPLLELCIQDPRTYSNQAKALMSPSSGLGQQDQLMHWLSIVKIFNSYLHVLRANHVPSILVHKLLTQIFSVVNVQLFNRLLLRRECCSFSNGQYIKDGLTQLRYWCNDVSQEFADSAWVALRHIRQAVDFVVISLKPIRTWEEICNDICPALSLQQLERIVGMYWDDLKGTNVTSAEFMSSMRAMLREESNSVSSFSVLLDDDSSIPFSLEDISKSMPNIEETSVNDLLPFIRENQSFAFLL

SEQ ID NO: 67949 - protein, 905 aa, Zea Mays
MATAVASQPCHLPLSAGGDPRCAASTSNVHTLEKVYGFRFICRSIVDVKTHKFHSRISKRKCYLRNSLSECDRTIHSGRWLEFRRHKGVFQRTRRMVHIIPLASDGDGNHISVNGALQVGSTSNIDEIKLKLNKALQSEDISNGLVQSIHDAARSIELALIEHSKLPKSSWFPKTWLGVENNAWIKSLSYQAAVDSLLKAVIDVSSRGNDRDRDINVFVQRSLSRLLTPLESVIKNELSKREPALYEWYSSDQNPLVVRQFVNIFENDPMFYSATAICLEGEPMNTSESDLSLLMLGLICLAAITKFGSAKVSCQQFSSMVPDIIGRFMDMLLEFAPLSKAYNLAKDIGLRREFLYNFGPRAAVPKLGNDHGLEISFWIELVQKQLLWALDREKIWSRLTTSESIEVLEKDLAIFGFFVALGRSTQGYLSFKGLTDLDDSLNGIVRYLIGGSVLYYPQLSSISSYQLYVEVVCEELEWLPFYNDDVLSAKTDTEGREEVPKGEVISRVLNVCSYWMTSFTKYSSWLENPSNVKAAKFLSKGHVMLSDCMKELDISRNMSNDSGFLEPEEELDTGTELASFDKSLENVEEALVKLENLLQELHVSSSHSGKEDLKAACSDLEMIRRLKKEAELLEASFLAKAEYLEADASSGSLSPAEEGPVKTSSRTNDTSAPQKTGSRVDNKRRPFWDFFGRSLKVDPALADQDLITVANVEKEGMESNDILRFEQLRRELIELEKRVQKSADEAQKEEMVVAEKTTAPSPGSSVSSRQTTKKENVITKSVEKVKETTTTVLQGTQLLAIDTGAAMGLLKRALIGDELTQKEKQALQRTLTDLASVVPIGILMLLPLTAVGHAAILAFIQRYVPSMIPSTYAPGRLDLLRQIEKVKEMEVAEGSSEDILEELNK

SEQ ID NO: 67950 - protein, 85 aa, Zea Mays
MADVAPSVRSRRARLSSLRTCHAQPCLYARRGRFPMLCPGFCRASLLAVCPRVMRGATKQKSVRVELPRRILFQLDRDARIMDLM

SEQ ID NO: 67951 - protein, 213 aa, Zea Mays
MMYNIGIQGVSWKFELHRAGQKLIIPVLLSTDLNPLFVTSAFAIPSTLYFLLQTYVVKPYYLKREKQKTLEKMEGLSTQLTEARKAAEKAQKLLEPVSNRKKNRQLENNGLVITKALYGSRQKIKMSSELNDIHNDMASQVFDVTIPLNFLVTEAGQLKLHDGIKKSGIMGFYDPCPGDPKLLLVEYTFHGHKYKVMVDDYEALLIPQDIHQF

SEQ ID NO: 67952 - protein, 1525 aa, Zea Mays
MFSGPKTMKAVHEYQFLPEQPSDTYERASQSHFYDSSAEASNLRVAPLSTGSRFLHGVEQAPSYTFHSQSSGSSHLTQRGSGRSPIASALTDHEGALSNINASTTPIHGQLGIPQVAGFESPLASPERLGYHDEDTYHMDRKRKHNEEAKIAREVEAHEKRIRKELEKQDLLNRKREEQMRREMERHDRERRKEEERLMRERQREEEKFQREQRREHKRMEKFMQKQSIRAEKLRQREELRREKEAARQKAANERATARRIARESMELMEDERLELLELASRSKGLPSMVSLDSDTLQQLDSFRGMLGKFPPETVRLKVPFSIKPWAASEDIIGNLLMAWKFFVTFGDVLGLPSFTLDEFVQALHDYDSRLLGELHVSLLKSVIKDIEDVARTPSVALGVNQSSSANPGGGHPQIVEGAYAWGINILNWQRHLNFLTWPEILRQFGLCAGFGPQLKKSDAEIVHHRDDNEGRNGVDVISILRNGSAAVKAAALMKERGYTNRRRSRHRLTPGTVKFAAFHVLSLEGSKGLTILEVAEKIQKSGLRDLTTSKTPEASISAALSRDTKLFERTAPSTYCVKTPYRKDPDDSEAVLAAAREKIRAFQNALPECEEVEKDVDEAERDDDSECDDADDDADGDDVNIEDKDAKSPLVGAQYGAQITVVGDIKKESNIVMNTSVPPSIQIKSSASVPFHTLDSKASSSTDPEVGDDAKDIEIDESNQGESWVQGLAEGDYCDLSVDERLNALVALIAVANEGNSIRAILEERLEAASALKKQLWAEAQLDKRRIRDDFTSKMQYDSYNQLTTGDVYHQRNGASRESSTNAESLSVQQYASSEKTRSQLKSFIGHKAEQLYVYRSLPLGQDRRRNRYWQFSASSSSYDPGSGRIFFESRDGYWRVIDTSEAFEALVASLDTRGIRESHLHSILQSIEPTFKEAVERKRCANLEHPTGRTSENGSNESPNCNNEFGSPCSTLSGVASDNLMAHSDIFKIEVGRNEAEKNSISKRASVFLKWIWRECYSHQSTYAMRYGKKRCPELIHSCDYCYQIYLAEERHCSCHKTFKHIHNFLEHSSQCEEKQRTDPNWKMQTVDLSVPVGLRLLRLLLATIEALVPAEALLPFWTDGYRKSWGAKLYSASSAEEVLQMLSVLESAIKRDYLSSNFETTTELLNSSTQDFATQNSAGGSGSATALPWVPDTTAAVALRLLDLDASISYTLHPKLGSNKEQESGDFMKLPPRYPSMNKGKQEIEQFRPIGFDQQDGTLLPNSNGRRGRGRGGRGGSRGGRSRGHGGRVPRGIGSSSRIQFRDDNSMLYGRAPRKNARGGRGRGRGRGRGLRTVRPRQPSELSARSIPKANLLGSFSMLSKTNHTGTTHSPESSGAEEWAFERREYVKDDENNLVSQSDESEENVEPMNEEYGEHISGYPRDNSDSRPVQMMGDGSDDNDEDAEGDEGEEDGEDYEAEDPGDEDDDVEMDGDDDVEVDEDDDIEMDGDDDIEDDDDDDGGDGAANGDEDGGGTSSYSSEYSE

SEQ ID NO: 67953 - protein, 542 aa, Zea Mays
MVGAEIAKKLKRSPLAARTVGRQLCIRPNIEFWRNTRDRDLLDETMGALWWSYQHLDEQVRRCFSYCSIFPRRHWLDPEYLVRLWVAEGFVTSRNTGEELEAVGRGYFDELVSASFLQPVDGDKERYTIHDLLHDLVSKVAGSDCFRADNGWEGEFPQDVRHLWVENCKLDLIAHKITRLKKLRTLIISAGENDTPVEEKALLENIFTGVTTLRVLQITPWTAGTLSFPASVGRLKHLRYLSVGSLNVPNIGRIVSLRTLRCFRVKKKAGYELWQLKHLNKLEKKLVIRGLQNAGRKGEAPEANLAAKERLTSLALEWDSDAPLSCGADLQAEVLEGLCPPLHLEKLRLCWYGGSRYPDWIVGVRCLCLYRCSRLGAFHGCSPRLVKLKILECGWDALPDNMEHLASLRKLVIDGCKDLRSLPELPRSLLHLKISGCDGEVMRSCKTVGHPNRKRIQHVRTVIIGWESLPRAELLDHFESEPVVPEKEKEIAALVKKLLVMLGLLLLCMFSVIARLLVGSFLLPAPLVVVILLLVVWIILTL

SEQ ID NO: 67954 - protein, 230 aa, Zea Mays
MRAGRLAGAAEPDGRRHFSHRVQQQLQRREKDLPATGRASFACHDQHSEDHDPRLHEDAQEQQGGGVNPARDNREEDPGDGTRRGHQRRPGGSTVGDKHERRHGDDDRRRDRGVQGVLLRRDGDHVGAATWTMVVLSMHPEWQDRAREEVTALFGRDGKPEYDGLSRLKVVTMVLYEVLRLYPSATSVVRQTYKEMEVGGVTYPAGVILELPVLLIHHDPDIWGGARVQA

SEQ ID NO: 67955 - protein, 517 aa, Zea Mays
MALAAAPASGDSQSGPQRNYQVVVAATRDMGIGKGGVMPWKLLGDLKFFKELTLTTTDPAKKNAVIMGRKTWESIPVKSRPLPGRLNVILTRSGSFDFATVENVVICGSMKSALELLASTPYCLSIEKVFVIGGGQVLREYLNGPACEAIHLTDIQSSIECDTFIPPVDFSVFQPWYSSFPVVESNIRHSFVTFVRVRKSVAETHESNGKESTEIDTKNDKFEIENFSFLPKIVYDRHEEYQYLNLVEDIIRFGAQKNDRTGTGTLSKFGCQMRFNLRKNFPLLTTKRVFWRGVVEELLWFISGSTNAKVLQEKGIHIWDGNASREYLDREEGDLGPVYGFQWRHFGAEYTDMHADYTGKGFDQLMDVIDKIKNNPDDRRIILSAWNPSDLKKMALPPCHMFAQFYVENGELSCQMYQRSADMGLGVPFNIASYSLLTYMIAQVCDLSPGDFVHVIGDAHVYRNHVRALEEQIQKMPKPFPILKINPSKKDIDSFMASDFKLVGYDPHQKLEMKMAV

SEQ ID NO: 67956 - protein, 255 aa, Zea Mays
MRWLSRLLSQAVAARRASAAARSNTSLVKGGSHGFASGGRDGSPEVPREWLRKLWVDELKKQKEAARRWGVGSSLEVAGATEEAPSRSYQYEYSGSNPVEAKLAPLLARANLVIARDIEWANIMFAFEQESRYIIMDPLFPQSPVGFIREKSNIIFRQLLRTRRPFVAEITDAMGNEIFKVRRPFWWINSSIYVEVNDKEIGVVHRRWHLWRRIYDLYLGSSRMLASMLSGLVMRGKATSLLPQKMSKNCMLFAS

SEQ ID NO: 67957 - protein, 1691 aa, Zea Mays
MAGELGQQTVELGAVVRRAAEESYLALRELVEKSQAEAEGKGIGAGANGSWQRSDTEKKIDLLKFITRTRQRMLRLHVLAKWCQQVPLVHYCQQLGSTLHSHETCFTQTADSLFYMHECLQQARAPMFDVPSAIEVMLTGGYQRLPRCIEEIGSQHKLSPDEEKRALRKLDASVRYRVLVTPRPKEVSNVSVTDGIAVFRVDGEFKILLTLGYRGNVDLWRILHMELLVGEKKGPIKLDESRRFALGDDIERRMAASENPFAVLYAILHEFCISLAMDTIIKQANVLRQGRWKDAIRSELISDSATVQTGNTPLMQLVQDAEFDSSGFKIPGLKVNYWLDEKSTSTAEPDSSPFIKIEAGLDMQIKCQHSSFILDPFTDKEASLSLDLSCIDVEQLILRAVSCNRHTRLLNIQRQLCKNVQIFQSPKDVVLTRDVAAAKDPMMNAEKGFSDCFGNEVLQVRACGQAYVSLGINIRSGRFLLQSPENILPRAALMDCEEALNKGSTSATEVFSSLRTRSILHLLAATGSFFGLKVYQQSQGTLKIPKTLLHGSDLMVMGFPHCANAYYLLMQLDKDFRPVFHLLETQCDANGNTNASGDVKEAIRYNKINIGQMQILKNEMNENPFDVKLQALQSLVDSADMMESDLPVQNAIEPLPLLPACSPSFSSIVDEVFEYERGSTAAQNRCLPVDIQGINARVVSPMHDGCLSYTQANNNMNVHPNVSLNSYFPSNFRHLQGANKSLQLVPSSNDNSNQIPAQSSHSGNLGNATPGHLIGSSTTTGGLGKLITAGSDGASRKHYLSDFLSSIPSLRGLQPSEPRKRRKKTESVQSLLPLQAHSSNLQSRGSLTYGDVLAERNNCVPATIYASVLLHVIRHCSLCIKHAQLTAQMDSLAIPYVEEVGLRRPSSNLWLRLPFAQDDSWNHICLRLGKAGSMSWDVRINDPHFRELWELNGGSTKTQWGVGIRIANSSEMDSHISFDSSGVVLTYNTVEADSVQKLVSDLRRLSNARSFALGMRRLIGVKFQDKLDDNQLTMEVKSQSVNKGNSDAADKLSEQMRKTFRIEAVGLMSLWFSYGTMPMVHIVVEWEIAKAGCTMHVSPDQLWPHTKFLEDFVNGGEVASFLDCIRLTAGPLLALGGAIRPARMPVAVSSGYSSMPKQPNIPTQGPLVNGSSSTIHHAPGPSNAASAHLGSHNLHAAAMLSAVGRGGPGLVPSSLLPFDVSVVLRGPYWIRIIYRKKFSVDMRCFAGDQVWLQPATPPKGGPSVGGSLPCPQFRPFIMEHVAQGLNALEPNFMNATQASGHLNNNAGVPQTAPSANRLNATPGVSMVRPTSGVANHVAASLSRAGNAMLASSALASGISGTSVRLTAGAGLPVHMKGELNTAFIGLGDDGGYGGGWVPLAALKKVLRGILKYLGVLWLFAQLPELLKEILGSILKDNEGALLNLDQEQPALRFYVGGYVFAVSVHRVQLLLQVLSVKRFHHQQQQQQAQSNAQEELAAVEINEICDYFSRRVASEPYDASRVASFITLLTLPILVLREFLKLITWKKGLSPVHGDIATAQRARIELCLENHSGSASSDNTENSSLAKTGGAAWLPYCVSVKLRYSFGDNNHIAFLAMNGSHGGRACWLQFEEWERCKQKVSRAVETVNGSGVAGEVGQGRLRMVAEMIQKQLQLCLQQLRDDPLSAGSTAS

SEQ ID NO: 67958 - protein, 116 aa, Zea Mays
MCLRMLEDDVEGMAEDEAVLKTSLNLSASLLCGTRQVPLHQHQNSYRSPYGKRTRRGAIPGVRRRTTRPTISEEPRHIEAAGRTPPWMNTSPHCKVYPWAIKGQDNSHLLHTSTQL

SEQ ID NO: 67959 - protein, 1253 aa, Zea Mays
MSSPENGAAPEASGKKKKKAEEEEVVAKVPFLKLFSFADRWDCVLMAVGSLGACAHGASVPVFFIFFGKLINIIGLAYLFPTTVSGRVAKYSLDFVYLGIVIFFSSWTEVACWMHTGERQAAKMRLAYLRAMLDQDIAVFDTEASTGEVINAITSDILVVQDAISEKVGNFMHYISRFLAGFAIGFSQVWQISLVTLAIVPLIAIAGGTYAYVTIGLMARVRKSYVKAGEIAEEAFVGEEKAVRSYREALLRTYKYGKRGGLAKGLGLGSMHSVLFLSWALLIWFTSVVVHKRISNGGESFTTMLNVVIAGLSLGQAAPNISTFLRARTAAYPIFQMIERSTVNTASSRTGRTLPVVDGHIQFRNVDFSYPSRPDVVILDRFSLNFPAGKIVALVGGSGSGKSTVVSLIERFYEPLSGSILLDGHDIKELDVKWLRRQIGLVNQEPALFATSIRENILYGKGDATAEEINHAAKLSEAITFINHLPDRYETQVGERGIQLSGGQKQRIAISRAILKNPSILLLDEATSALDAESEKSVQEALDRVMVGRTTVVIAHRLSTIRNADTIAVVDGGRIVETGTHEQLMANPYSAYSSLIQLQEAAQLQHKPSLSDSASITRPLSFKYSRELSGRTSMGASFRSDKDSISRYGGAGEAHDEVRKGKPVSMKKLYSMVRPDWFFGLSGTISAFVAGSQMPLFALGVTQALVSYYMGWETTKLEVRKIAVLFCCGAVLTVVFHVIEHLSFGIMGERLTLRVREKMFSAILRNEIGWFDDTSNTSAMLSSRLEADATLVRTIVVDRSTILLQNVGMIVTSLIIAFILNWRITLVVLATYPLMVSGHISEKMFMKGYGGNLGKSYLKANMLAAEAVSNIRTVAAFCSEEKVIKLYADELREPSKRSFRRGQGAGLFYGVSQFFLFSSYALALWYGSVLMSKELASFKSVMKSFMVLIVTALAMGETLAMAPDIIKGNQMASSVFEILDRKTDVRIDTGEDIKRVEGLIELRGIEFRYPSRPDVTVFKGLDLLMKAGKSMALVGMSGSGKSTVLSLILRFYDPIAGRVLIDGKDVKKLKLKCLRKHIGLVQQEPALFATTIYDNILYGKDGATEAEVVEAAKLANAHSFISSLPEGYKTKVGERGVQLSGGQKQRIAIARAIVKDPAILLLDEATSALDVESERVVQQALNRVMRNRTTVMVAHRLSTVKNADVISVLQDGKIIEQGAHQHLIEDKNGAYHKLVSLQQQQQMQTQQSSSEDI

SEQ ID NO: 67960 - protein, 431 aa, Zea Mays
MGDKENAPPLGARGAAAPRLTRAAAKRAAAAAAAAEGPGDAKRRRVALGELPALANNAGLRAPSCPVKPSKPASRPGRHARNVAPEARGPSSAHEAERCASSPPRTADADAESNSVSNPAPRATAYADSCASSSPPRAAAAGAPADPQLCGSYASDIYTYLRSLEVEPQRRSRPDYIEAVQADVTAHMRGILVDWLVEVAEEYKLVADTLYLAISYVDRFLSVNALGRDKLQLLGVASMLIAAKYEEISPPHPEDFCYITDNTYTKEELLKMESDILKLLKFELGNPTIKTFLRRFTRSAHEDKKVANPFLFMRSILLMEFLGSYLAELSLLDYGCLRFLPSVVAASVMFVARLTIDPNANPWNMKLQKTTGYKVSELKDCIVAIRDLQLNRKFPSLTAIRDKYKQHKFKCVSTLLPPVVVPTSYFEDLAE

SEQ ID NO: 67961 - protein, 167 aa, Zea Mays
MWIARRREAVVDQTPQSMGPSSLEDQEDRGAAFTHMDEGDLFATPSTTIRLSEENPGSKFSDATEGDGGMVNNTSRDCGERYPSNQGGPARRPPPMGQQRYDPGPCWRQEPSSGQTKEQFVAEMLARPSSAAGSGPGRPQQARPRQQRQEDASSPAQGSRPQSVGCF

SEQ ID NO: 67962 - protein, 378 aa, Zea Mays
MPSSIPPPPQNFLPLPSPGVGQSTRINLGEIKLKLVKRIGLERAKRYFEHLQRFLSLKLSKSLFDKFCLTILGDDNIQLHNHLVCSILHNACQASGPSTVSTPKSIGVAKNSNHVLSPTVPFSDIGDVLHHHVKDHYPRSRNAHVVQENGVVRLSKLKRFPQPHSELVELLSKRSRVENAYSNLSDPINSNCPGVSGREYVEAVAQHARGPIIAPLGVAFCSGHFGGNSKTLTLPSGASSDDSICCYDLGQLCDTSSLRQRMGRIAETEGLDAVSLECANSLNNGVDFYLKYLIGSCIELVRARSQHDRINHMALKQQLSQKLINGVQLQNQVHGQSATTCPQISSVSLQDFKALSETIPQLLGVNASLVLEKINSYN

SEQ ID NO: 67963 - protein, 431 aa, Zea Mays
MSCWIQDPSRASEGLKADLIAVLSRIENQLKEEGLGWVNVLYVHLYISSMKEFGLANEVYVSFITEKKCYLGVPSRSTIELPLVQAGLGKAYVEVLVSNEVVKRVLHVQSISCWAPSCIGPYSQATLYEDILYMAGQLGLDPPTMKLCLGGPRAELELALQNSEAVANAFSCSIYISAIHFLVYCSAQLTSSEKEEIEQTLKSSYITRLDRSKGGSYPTVLYVFASDLPKGARVEVKPILYVPSTDDWVAAEETETGVPLPAPSKTWTDCTAPYSALRDSCCQVHTTGGRICSAVVSITDDIASKICSAAGQLHHGEENLKIMARFCAFQIAKTLADNRFSWDSVTMLRLYYSVDLAVAADAVSGAFSEALAELAQDNPSMRTDVPFYNVVPVAGAGRSACANDIMACELLASNVSSAKSIPAEPFAVTPA

SEQ ID NO: 67964 - protein, 258 aa, Zea Mays
MAKETEYYDVLGVCPAASDEEIRKAYYIKARQVHPDKNPNDPHAAENFQALGEAYQVLSDPLQRKAYDGYGKNSVSRENILDGTVVFTLLFGSELFEDYIGHLAMATMASSELTSDNDTPEKLQDRLKNVQREREEKLARFLKEFLSQYVRGDKEGFANRAEAEAKKLSCTSSGLDILRTIGYVYSRQAAKELGKKAMYLGVPFVAEWVRNKGHLWKSQITAAKGEMQGPCSCCSCKRRPAGRVARMAMPPSRMSTCR

SEQ ID NO: 67965 - protein, 242 aa, Zea Mays
MLDIRDGNSWYNMGNAYLTSFFVGGAWDHTKLHHSVKAYQNAEKDKTMNLNPDLYYNWATGQLRSKRLASFVSSLSGVKLKSSHKKATISTLSVGLNKAVAVLGKVILFIRHDNVAPLYYLICDLERSYFILSVYGLHNDAEYAGERQVDERNRREIARRRGKGNHRHRPSCDDQPGRSKIKDGDQVVLFEPYYRILDASCKDKHYQFKSIRVDFPEQILVNERVPAPHHVARASIHAHNKS

SEQ ID NO: 67966 - protein, 222 aa, Zea Mays
MSSPPPASPMAAENEACDWAEMPSDALAAVFAKLDVAEILSGAGLVCRSWRRLAASDPTLWRRVDMCYQGDQLQTEEVEAMARAAVDRSAGTMEAFCAETFVNDDLLRYISQRAPSLKSLHLCLCHYVTNQGFAEAVNCFPQLEELDITFCSLYGIVCETAGRACPQLKCFRLNERWSILQSEFAPYEGMDDDTEALGIASTMPGLQELQLIDGRRAEIEMR

SEQ ID NO: 67967 - protein, 420 aa, Zea Mays
MVAMVTTHIILLLQHLYQMLLVEGDTIMPIDPTQGAFIADTLSPNSFLFGPRPEWFRSSEGTGSFPSPAASPQPSRGVPGSYDQNNFPMASRMASNYGGSVTSFGLNGRSLISTEKGRRRGRGNALICSCNGPLDFLNEQSRGPRATKPKKQPEVDSKDEVPTTGVGRELYNKPDFVMEYTNARFFIIKSYSEDNVHKSVKYGVWASTTNGNKKLDSAYREAKEKGEHCPIFLLFSVNASAQFCGVAEMIGPVDFEKSVDYWQQDKWTGQFPVKWHIVKDVPNNLFRHIILENNDNKPVTNSRDTQEVKLEQGMEMLKIFKNHDDDASILDDFEFYEEREKALQENKARLHQQHLPSSIVIEPKKPLTAPSDLVGHITKSFAEAVRLGEAKTVSHLTEKVSGGDPSIPVKHVEVKQSGLS

SEQ ID NO: 67968 - protein, 101 aa, Zea Mays
MGHSSLPNLHLVRCVSLSIYSVVVSTTSVFDHLPLPLRATFRIASLSTKGVVRSRFREAFLNLNPLYGRMSRRILRSTKSLNHAEEEDDYIYGHKLGLLAA

SEQ ID NO: 67969 - protein, 1165 aa, Zea Mays
MELDLIKQYSQVERIFADRVSKADGDDLVPEYLVKWQGLPYAESTWEKDTDIDFAQDAIDEYKAREAATSILGKTVDFQRKKSKASLRRLDDQPEWLKAGKLRDYQLEGLNFLVNGWRNDTNVILADEMGLGKTIQSVSMLGFLHNAQEINGPFLVVVPLSTLSNWAKEFRKWLPNMNVVIYVGNRASREMCQKHEFFSDKKGGRHVKFHTLITTYEVILKDKAVLSKIKWNYLMVDEAHRLKNCEASLYTTLLEFSTKNKLLITGTPLQNSVEELWALLHFLDPVKFNSKDSFVERYKNLSSFNETELANLHKELRPHILRRVIKDVEKSLPPKIERILRVEMSPLQKQYYKWILERNFQNLNKGVRGNQVSLLNIVVELKKCCNHPFLFESADHGYGGDSIGDRNKVERIVMSSGKLVLLDKLLVRLRETNHRVLIFSQMVKMLDILAEYLSLRGFQFQRLDGSTRADLRHQAMEHFNAPGSDDFCFLLSTRAGGLGINLATADTVIIFDSDWNPQNDLQVLPLILFLLQVLDHLVIQKLNAEGRLEKKESKKGGSIFDKNELSAILRFGAEELFKEDKTDEEAKRNLESLDIDEILERAEKVETKGGEGEEGNELLSAFKVANFSSGEDDATFWSRLIQPDPADIIQETLAPRAARNKKSYVEDPQFDKNNNRKRRAVEAQEKPRRRSGRTVETVNSVPLVDGAVAQVREWSFGNIPKKDASRFVRAGTVLDFFGVAVKAYELLARVEELQLLSKRIARYKDPIKQYRIQLPYKKPQWSASCGWTETDDARLMVGIHWYGYGNWEKIRLDPKLGLTTKIAPATLGERETFLPRAPNLDNRASALLQKEYAKFSGNSSKVKGNARQTVNNDSNSGARSMRGRQKDAPDKEDNKPNKDDIQKRKVMMEAEAREEGEISESEAETKYRLDKEEKWLEWCSEVLNEEQETLKRLDRLQNTSVNLPKEKVLSRIRKYLLIIGDKIGEVVRQHSESYRQSRKCSRTSRMTMRLWNYVATFSNMSGEQLHDLYLKLSQDQLEGGVGPSHGANFTSIPSSKGGNSNQLHPTRNHRPTRSLQYNSESLHNNESSGSSEAWKRRRRADPDNQFDTQPLYQPPIMTNGNRLQESSSSAGILGWGPVEMRRYGNERPKRGVHPSHFPTGHGPLL

SEQ ID NO: 67970 - protein, 301 aa, Zea Mays
MVGKYTGLSDSYLSVIKALLHASVALDRKLVVDWVPSCDLEDSAAEENLDAYEKAWELLKGADGVLVPGGFGDRGVQGKILAAKYARENNIPYLGICLGMQIAVIEFARSIMKLHGANSTEFDPTTKTPCVIFMPEGSKTHMGATMRLGSRRTFFQVTNCKSAKLYGNASYVDERHRHRYEVNPDMVPEFEKAGLSFVGRDESGKRMEIIELPTHRFFVGAQFHPEFKSRPGKPSPLFLGLVAASSGQLDHLLQPGLISSTGRHTCSKGGAQKLKAGHVMKPLNGLVNAHYSATGNGAIPI

SEQ ID NO: 67971 - protein, 554 aa, Zea Mays
MTTSSSGSIEAPANSRPGSFSFASTSTSFTNMLGGSADAAGGASRYKAMTPPSLPLSPSSFFSNIPDGLNPADFLDSPALLSSSIFPSPTTNAFASQQFSWLVTPGAEQGGKDEQRQSYPDFSFQTAPTAEDAVRTTTFQPPVPAAPPVEEAYRGQQQPWAYQQQQAAGMDAGSSQAAYGGPFHQAASSDAAAMAPHVPASGGYSHQAQQSQRRSSDDGYNWRKYGQKQVKGSENPRSYYKCTFPSCPTKKKVERSLDGQITEIVYKGTHNHAKPQNTRRNSSSAAAAQLLQGGDASEHSFGGMSGTPAATPENSSASFGDDEVGVGSPRAGNAGGDEFDEDEPDSKRWKDGGDGEGISMAGNRTVREPRVVVQTMSDIDILDDGYRWRKYGQKVVKGNPNPRSYYKCTTVGCPVRKHVERASHDLRAVITTYEGKHNHDVPAARGSAALYRPAPPPADTAGHHYLAAARPGVAYQTGQQYGFGDQLGSFGLSGAPAQSGGGGFAFSSGFDNPMGSYMSQHQQQQRQNDAMHASRAKEEPREDMFFPTSLLYTD

SEQ ID NO: 67972 - protein, 238 aa, Zea Mays
MVTFSYCYRTAVTNGSAIKHDGSYESDPAVEIVRVELQGAAAFLLFSSGSTPIYIGEHGWEMLLVVKKATQEAGSKFELLGFASVHNFYHYPESIRLRISQILVLPPYQGEGHGLGLLEAINYIAQSENIYDVTIESPSDYLQYVRSSIDCLCLLMFDPIKPALGAIVSSLKETNLSKRAQSLRMVPPVDLMETQPEDLRTQEQQLNELVDIQIEEIDGVAKNVTSRGKDKMAELAVQ

SEQ ID NO: 67973 - protein, 206 aa, Zea Mays
METFLVFFSRTNLATMMNLLIAANTGEIWRKRRKKRKRRKRKNQWKTRKWKTEFSPSIPFQVLRLVLKHLMLSTFGSCRGRRLTSRQNGRCIRFLNRRTKGSPLGHYMGQAIRTCWEHKINHQLRKEWICLRIKSQTRWTSPSNPMPWMMLWQPSTKKRERKRSFGTKRRTSATWWRRMLTRGSGSKRRKASLRRRNSSFKDRREI

SEQ ID NO: 67974 - protein, 57 aa, Zea Mays
MYLAYNSYGSGRWEGARQQRWRRRRRGRERREAGTEAPVGDLEEAGDWRCRSDFFGL

SEQ ID NO: 67975 - protein, 896 aa, Zea Mays
MSATATPLNLNTPAGHLLATSPPRPTASTSSSPTAPWPPPLPPPPHLPLLPEQPTVTGTGLGAVPPAAPRPRPRNAGGPPPTTAAGAPSSGSRDFAGGSLLKYVNKSTLHFKKSKNRRSGSPVNWTPRKKTESYMKRKIKHLQETDGMTASLHETLGNANPHYTRMAREKIAAREAARKATDARKAAMVEASWCRILRAARIQNKNAEEVMEKAVLQATEAFEEARALGVMMYDRPDCPHKQYEVESSLHTGAQSTHKVIASFQTAFQVDMEVSAAVKKAFVQLANSPDSAKREEFKELLWKISQNPDLAEHEDKQQLVDCSNEDAIVLKLNKEHLSGSCVASDFNTTKVQESIDVVSIMLERLKALHEEELASLAVIVATSGLNAELQNERSKYHETGAVNNTSAGSLRSQARRYSTAASFIGVQGPKKEVTSELPSLDKFLVKHLSKLEREVQEAREASRKSTLVKSVTQGAHIQFTGSNAKTPESTSDLSSILVKHVSKLEKEILEAKKINQRIHQVEGNCEDVKSNVQSRNKELEFNKIQPEVESNCDSKGSCESKESCIDNNDIKDNDDCVQEDKENKNCYSHQLPPSGAKGKHGGKRLTRLEAARLEALKSFCTIDGNALDAGLDKIFVKPIHRLEKEKREAREGQINVQKHPQKLGQSATVTEGLDDILVKHVSRLEREKIDYQKRNELGVGERWSNVPHDQRSNGNNVKSSDSLDQVLVKRISRLEREKLEYEKRNALEGGSDVEPKREPHCNNAAASDSLDQNLIKHVSRLDKEKIEHEKNGGMIIVKKGQTQCTNGAEGGLADVFVKRPTKLEQAKLASAAEEKPASGFNPVEERRRARQKELLDAWGGMGLGNSMKPHVSRIERDKVAWRIAEDEQKQMAAAREA

SEQ ID NO: 67976 - protein, 137 aa, Zea Mays
MFLAGSSVEYKMSISDVVVAPPFIYIDQVKNSLTGRIEVSAQNVWIGKGGAYTGEISAEQLVDIGCQWVILGHSERRHIIGENDEFIGKKAAYALSQNVKVIACIGELLEEREAGKTFDVCFRQMKAFAVFQTGQML

SEQ ID NO: 67977 - protein, 184 aa, Zea Mays
MGAPKQRWTSEEEAALRAGIARHGVGKWRTILKDPEFSSTLCYRSNVDLKDKWRNMNVIVSTSSSRDKAKSALKRIRTIPKNNEHTMAITRVTSDIDDEIVDEKPIVSLPSEAKNTSSSKKSHRLDNIIMEAIKNLNEPTGSHRTTIANYIEEQYWPPSDFDHLLSAKLKDLSTSGKLIKELWL

SEQ ID NO: 67978 - protein, 94 aa, Zea Mays
MWPRALTHWRRDPRRQPLLSFLSVCTPTDGPVAQIIFLLTTCATTARLLWGRALGNSDLASRLLKLELTPICRVRLARRILFSIHNSHGQTPWP

SEQ ID NO: 67979 - protein, 62 aa, Zea Mays
MTPADYSCITKAEDLCVLLVFTIHIMYSYHYAPGPACRGSASLYVPPLNYKREGTPRYKGQV

SEQ ID NO: 67980 - protein, 463 aa, Zea Mays
MSTSPPPATSPPGAPPNGTASPTAAPPPPLPPAPSNSSSPTPATPTGAPPTAPAPPSTDSPAPPGTPPAPVSPNAAALPAPGRATPASASPPTPSSSGSGLTTSVVVGIAVGGFAVLLLGCLFCLCLFRSNKRSRRRHRHHPPPPPPPHLLHYYGHPPPPPPPPHKGDQHQSWQHNAPPPPPDHVIKINSHPTLPPPPHNVHSSGSASNHSGGESRPALSPGTALSFSRSTFTYEQLMTATNGFSDANLLGQGGFGFVHKGVLPDGTEVAVKQLRDGSGQGEREFQAEVEIISRVHHKHLVSLVGYCISGAHRLLVYEFVPNNTLEFHLHGRGRPTLDWPTRLKIALGSAKGLAYLHEDCHPKIIHRDIKASNILLDLRFEAKVADFGLAKFTSDANTHVSTRVMGTFGYLAPEYAASGKLTEKSDVFSFGVMLLELITGRRPVNSRQADDNLVDWASDDKSI

SEQ ID NO: 67981 - protein, 164 aa, Zea Mays
MNPKISDFGLARIFGRDQTQAVTSRVVGTYGYMAPEYMMRGNYSVKSDAFSFGVMVLEIVTGRKNSNDGCDLLTTVWMHWEAGTVAELVEPTSMGGSFPEGDVLRCIHIGLLCVQPDPAARPVMSSVVTMLGSDTVTLQAPSKPGFFARNNSAYTTVSTVPVDA

SEQ ID NO: 67982 - protein, 256 aa, Zea Mays
MHAPSLPENLGGQREREKRKGWMEVARHARPWQVGPVRGKSAWPFAAAWSGWASAASAAAAAAGAAAWCWTGLIGGGEWQGPAQPAAPASLLVGVSLDPSPLPLPCPNTGWLPTILPLRSSRDSPRSRFRAASAAASLGVRVWTGDRVRPPSDREGGGAFVFLGCWFLDHCRRVFLPRCCCCCCCCCGGIARWSWPLVFAPLPPGLFAEFNLRGCGRGCRWGGGGGACRSLLCSPRSCRRPTPRSPLPASTTKWWP

SEQ ID NO: 67983 - protein, 93 aa, Zea Mays
MQIICIYHVQPGMVTTDLLMSGATTKQAKIFINILAEPPDVVADYLVPNVREIPTKQSMKPTYIRFLTGLKAYSRIFSRLAFGARRNKYVTED

SEQ ID NO: 67984 - protein, 338 aa, Zea Mays
MHAAGAEARLTRSGRGGRRAHDGLAPASPRAASRHRNGAPDLPSPRPPPLRRPPRCPRRRRRHWFGVRRRHLAQVPRMRQHAAEGESDVLGGRRRAEQPYGDQREVRRGPAGRGARRREAAGRRAQPRERLRQVVDAARGLRRRGCARGVHVHREGQGGRGRRRRGVAPRQRRGRPAEDGLLRQGLAAQHRHPRRHGVQVRRRQGAVGHRGRVQGRHSHVRAAEAVLRWRHTFPLDDGRRHGGLRFRVDCRRRRRRAYQAGRRLPGWGGEPRRRGRGAASQYGARVHRHVLARPSLPLLLQLQLVRLAPGLPLLPRESPGDAYPRIRMLLQLIDAHYL

SEQ ID NO: 67985 - protein, 3153 aa, Zea Mays
MNIVKGVADLLRKSTPASPGAGAGGGGGGGDRGGVGSPSADRLAAPPSPRVRFSDNGEEGVLNALWHKYESGIDKAEKKKTLQTFVMHFVKAFKDWEPGYIEQSIDHESLSDDTILGCSTGHPSEVILILIQEISQITSSITESSSCPESSANISELLGDLGLNAEGLTILECLTILTRSVHNCKVFSYYGGVQKVTALLKAAVVKLKTLTSLLAADEQLSNKTVENMRTMQKVLVYIVTIISNFMDLEPNTTRISQFILNSSRHTLSSNYLATVAPNTSKSMVFDRNWQKKAIVSVMEAGGVNWLVELLRVIRRLNLKEQWTDLSLHFITLYSLRSTISENVRAQNHFRSIGGLEVLLDGLGLPSSKFSVSKQSFVPSDERSGILQLQILYLEILREAVYPVPLFLSAYHQQKILNAQAILKADKESTGPSPTLESFSNPVDILDTSEWNEYSVKLSITLCSFLLPPKEIKYCPAPTDVTQISLSISLAYWEQCARWIIKVLSTVFPCMKACASETDLPNHIRILANTMQHYMLCTFRKVLISAPALLKSFREEGLWDLIFSEKFFYFGSSLDYIQQNDQLIDAPKSIDSKSFSETDVNVLQAEAISFLEFAATLNENSNNLPECLALVGALEHCTYDPGLAGGIVKSFHVILQLATEQTLASFKSIDVLTRVLKVACLQAQEIRKLSQDDLNQNGSQSRNAQTTYSDERIKNTCAFVKLAFNLFKEYATISDIGRITVLCNANCIECLFDLFQEEYLRKHILEQVLALFRLPSSSAQHHAAKMLLCSKYLETFTRAKEKEKAFAELSIDLLVNMREVIMIDRVYYQNLFRNGECFLHIVSLLNGTFDEAVGEQLVLNVLRTLTALLAENDESKAAFRLLVGAGYQTLQSLLLDFCKWIPSPKLLDALLDMLVDGTFDINEKATIKNEDVIMLLINVLQKSSTSLQHYGLMVLQQLLKGSITNRTSCFRAGLLSFLLDWFKVEKGNDIVMKIAEIIQIIGGHSICGKDIRKFFALLRDEEIIAKQQHSSLLLTSVSHMLKEKGPEAFFEFSGHDSGIEIKSSVQWPYNKGLSFCCWLRVESFPEKGLMGLYSFFTENGKGCLAMIGNNTLIYESVNPKHQCVLLSLSLPIKQWKFLCVTHTIGRTFSGGSQLRCYVDGDLVSSEKCRYTKVNELMTRCSVGTELMPIGEEPSSLGFENTLAFTGQMGPVYAFSDALSPEQIRGIYNLGPSYMYSFLGDQNLLTNDDSRYKGILDAKDGISSKMIFGLNAQASNNRTLFNVSSALDGLDKSKFEATTMGGTKLCSRRLLQEIIYCVGGVSVFFPLLIHFDDAVVQNGEFATRDQLAGQVIELVASVLDGNIANQQQMHLLSGFSILGFLFQSVSPQLLNIKTLSASKYMFTILKTSSMSDILLRDALSQFYLNPHIWAYATYQVQRELFLFLIQYFEADGKFLPVLCALPRIIDVIKQFYSEKLDPRFSKPLLVSKKVTGERPSMEEIRKIRLLLLSLAEMSLKLKVSQHDIRALVSFLERSQDVACVEDILHMIIRALSQNSLVPSFLEQVNSLGGCYIFINLLKREFEPIRLLGLQLLGKLLVGVPSEKRGPKIFGLPVGRPRSIAEDIRKGATAAPQLFFYSISDRLFKFPLSDHLCASLFDVLLGGASPKQVLQKRSQSDALKDRSMAPFFVPQILVCIFKYIQSCRDASVRTKILSDLLDLLDSNPVNVESLMEYGWSSWLETSAKLDVLRNYKSNSVAKADGLETNELILVRNMYSLVLSYCIFSVKGGWHQLEDTTNFLLLKIEQGQLPNSSMLRDIFEDLIGSLLETSSEESVFNSQPCRDNILYLLNLSHELFVDQIGIKLLFPSPDMSAHLSSDDINSAVLEIMNTEGNGLLTSLPWSNILFNDGEKLTDDWWSFFDKIWTLLCYLNGKGQTRLTPKGLNTAGPSIGQRARGLVESLNIPAAEMAAVVVTGGISSALGGKTNKVADKAMMLRGERFPRIIFHLIIMYLCKAGLENASKCVQQFISLLPNIISEDDQCKNRLHFLIWSLLRVRSQYGQLDDGARFHVMSHLILETVIYGKSMLTTNIVGRDDSTEANNSKEAGFILNLVQKDRVLTAATDEAKYMKDAIADRMKLVQELHSKLDERSIQDVEQLQSFEDDVQFAKTAAIAADDSRKAAFQLAFDEDQQIVADKWIHILRALSDERGPWSAAPFPNNIVTYWKLDKTEDKWRRRLKLKRNYKFDECLCHPSSIKSSNDNAAPTVDPSANAKITEKMKHLLLKGVRGITGDISSESCEDSNDMIDPPQNVPPENHTVSDTSDSADSSDYPAIVQNRKESSSTSSDNDYIEVLSSVHCVLVTPKRKLAGQLTITRNALHFSFEFLVEGTGGSSVFDRFHDKKDSDSKNEMGGVEKLKGNLDGGRGNAAESSDTQIKNQSGKIKHHRRWKITRIKAVHWTRYLLQYTATEIFFDDANAPVFLNFSSQNDAKSVGSLLVSLRNDALFPKGTTRDKNSLISFVDRKVALEMSESARESWRRREISNFEYLMILNTLAGRSYNDLTQYPIFPWILADYSSEKLDFNKSSTFRDLSKPVGALDAKRFKAFEDRYLNFVDPDIPSFYYGSHYSSMGIVLYYLLRLEPFTALHRNLQGGKFDHADRLFQSIESTYSNCLSNTSDVKELIPEFFYMPEFLENSNSYHLGIKQDGEPLGDVGLPPWAKGSPEEFIHISREALESEYVSSNLHHWIDLIFGYKQRGKPAVEAANIFYYLTYEGAVDLENMDDMLQKSAIEDQIANFGQTPIQIFRKKHPRRGPPIPIVHPLYFAPQSITVTSVVPTIVTPLSVLFIGLLDSNVVMMNEGLILSVKLWLTTQLQSGGNFTFSGSLEPFFGIGSDVISPRKIGTSLAENVEFGRQCLATVQIRGDNYLILCGNWENSFQIISLSDGKIVQSIRQHKDVVSCVAVSSDGSVIATGSYDTTVMIWYAFQGRSNDKRYRNANYDLSTKDHVIIESPCHILCGHDDIITCLFVSTELDIVISGSKDGTCMFHTLREGTYVRSIRHPSGAGLSKMVTSQHGSCCGEFMVCAGDHGQIVLRSMHSLDVVWRYEGAGKTITSLVVTPEECFLAGTKDGSLIVFSIENPLLRKNAMQRHKAKPSIGG

SEQ ID NO: 67986 - protein, 257 aa, Zea Mays
MQQDLEEEKNKAIIKDLEEKIENYEAVLKKKDFTIQDLEIIAKEHEGALEKNDFVIQSMEGSLAEVQAENDSLKNELLKKSEKYEQEKEKLEASLKTEVEKNSNLQKSFKDLQEKCLNFGSRCVQRLKDVFHSIGASSEKFLPSAENLPSTLEHIEGEIDALDEVIGGHADFCALVASRGTATAFLKAGCTHGKIVNRPNFSLSAADLVDIPSLARSIGNRFMTQIWVNGGQKMAGDEARSHLKPVRNLYLLLLPSP

SEQ ID NO: 67987 - protein, 695 aa, Zea Mays
MSACGGTIPASRFLRRRAAVRDLGGDAAAGDTDAFWAAPPRLYDFSQQQQQQHTAQAARRSPSPAPTSPCLLARKRHQQSPSPPPSPRRSPSSPGTCLLSALHRTCVGWGVTRRAEYPRRHRPVSPAACGQVTGMHTHGRAAARCVDEDEESTSKNSKCLLAVGKNELEEEVGQDHESCLHRRRRAKKAPWAVKEEQETSGEAAEEGAKRAKRTPLKHEAAAAAESKPAGAATATATPDSGSPRGNGKVDRWAAWRYAAGEAALANILRERGATAGNPTPRAVLRAQARRFISDTGLLDNLLRHVADKVPAGTADRVRRRYNPAGGMEYWIEPAGLAAARREAGVEDTYWVPPPGWKPGDPVSPEARTLEVQKQVEVLAGELAVVKRQMEQLDSNLVQMSKEAYISWKGYDCMVKANGKLEKEVLSLEEKYETAAQVNGELKELLLLLKDKYDTVLEKNEKLEGQMVALSTSFQSMKEELLLQRMEEHPLLMLAQEPWEGDKREAGGANKALVVCAGDQLAGADAFDGSFSSNHSAYGDEKMVLRKRICVREGACQWPRSATSSGATAGSPGDLPEPLTPGADLIVTDFDTMIDSLALPSMEEYLQVDGLPTPTSASSTTASPKLQLLPSPASPSQVQPLPSTTMVVGDFNMQLRHMDTSSSSSSGPCGAKALKLDAGAGGGEVGTELVLATPTY

SEQ ID NO: 67988 - protein, 293 aa, Zea Mays
MGRRACCAKEGVKRGAWTAKEDDTLAAYVKAHGEGKWREVPQKAGLRRCGKSCRLRWLNYLRPNIKRGNISYDEEDLIVRLHKLLGNRLHELTTSSHLLRIHQFRCWPWSLIAGRLPGRTDNEIKNYWNSTLGRRAGAGAGAGGSRVVFAPDTGSHATPAAAGSREMTGGQKGAAPRADLGSPGSAAVVWAPKAARCTGGLFFHRRDTHTPHAGGTETPTPMMAGGAGGEARSSDDCSSAASVSVSPLVGSSQHDPCFSGDGNGDWMDDVRALASFLESDEEWLRCHTAEQLV

SEQ ID NO: 67989 - protein, 283 aa, Zea Mays
MNLGLGASLVLLLSKSAVELNKMVELRAQMEALVSEIRQASRYREEEEKQAASHPTSAAAAAVAGPATSQESDGGSSATTTAVKDPIAFPAADADADAASNCSRTAVVMDLMEAELQAELSRMQQQRGRGGTVVHGHGGDSRIAPTRGLEVKTKGDAPDSASRSCVDYDGGGCDKHDDNDEVDGEGEEDDDGDEEEEEDDVEYGEDRMSPPHGGVSARALERRLHELLQKRQQDRIVELESALDSAQRRLHEKEREVVWWRDAAKLVSHRRDESRRIATASAR

SEQ ID NO: 67990 - protein, 126 aa, Zea Mays
MHKDPSFWRENINNFEENDFQILRVLMTIIDTSSDTTALAVACYDLSQFLQYHPSGRIVVADLKAKDRVMKLMNHENTEVQKNALLCVQRLFLGDLDPENSWPFLKMAVKKTLKILVHYILLLFDF

SEQ ID NO: 67991 - protein, 53 aa, Zea Mays
MCGSMVQTTASAAKKLGLKSIYYPTTPGLEGWVESILEALRVHRTASKEAPKR

SEQ ID NO: 67992 - protein, 425 aa, Zea Mays
MIATTRGSSAKAAAAVGGKAARACDGCLRRRARWYCAADDAFLCQGCDTSVHSANPLARRHERLRLCPASPLQTPPDRSAAAAATATNKRERHDEVAVPAWFGRKARTPRGGHAKSVGQVALSRRLVVPHAAGGDSDSPDERNGGEEEQLLYRVPILDPALAEFCSPPPLEDAAGLALDASVCNEDGAIEDPAKPDPAAPLAQFCPVSGHFNFGPTDAELREFAADMEALLGHGLDDGNEEDSSFYMETLGLLDPMEVGDDATQVKVETDGSSACCEASGTLACGLELDLEASDEMLDIDFDYASPQDTATDERAASSDTGADAQFLQTSLSLTLNYEAIIQSWGSSPWTGGGERPHVKLDTRTCGLWEEWSATAARTCRARLGWGWTAAGRPGCRGTGRSGGRGSSPRRYGTRCASSTPRSGHG

SEQ ID NO: 67993 - protein, 279 aa, Zea Mays
MDHNYGDPNTVRHFPSPAQRDRRHLRGDGRVGGPAAGAGAEPHRAGRHPALRRRGGDGGGAAAEQGGELPAGLQAQPAALQRVERQRASAGRAPALLQPVGASRAAPLQPLQRRPLRPALRRRRGHRRRRAAGTYGLAALRVPRGGGVGPGRGVLDGGAPDAGDVLADGRRGRPQRRAEAAVPGPGRRRELRDRAARVPDGGPARLPPAAAGQPPGVPGAARGVGGRDARRGRVARALPGAAAAAGQRAVQGVAVQAPHRGQGAAQQPQTAVQASVAVV

SEQ ID NO: 67994 - protein, 56 aa, Zea Mays
MSWRRRRGPCRWSWNPSPASSSLTRSLERRSSSSSSSSCSEHQGSTTNIFSCQEME

SEQ ID NO: 67995 - protein, 548 aa, Zea Mays
MASTSSSRYAKHRRIGEDDELEEVEEEAEEELERFDDFTIASSWEKFISEIEAICRQWLADGAKILMQKGAEGVPPFENLYMIKRELKHGKRVYSMEYHFMKSAKGQNSYWDDDTHSMQLSFGVDEFLIIAPLSASGVILDDPESTKLLSSVAIALSNCGSNWPAFVPVHDPSRKAYIGIQNLGTVFTRRFEADRIGSQVPIRLMHLEGLHELFLSKFVLSSSDFPARVKVHFSMKLSYKTPEYDHDNETLDSEATEPLTENEVVNHPRKLWDDDCPWAEWYSAEDPVKGFELTAIWGERTFEETLEMAEVENASSFDADSWFLHPVVSRYMVDDSIGKFVGFASQLHLLVNAYESSVEAQFLEDFVADTSGQDNAKSTATVPPPSVIDRVMKDLFSDETGNYMEAENKYSRAMRGAPADSLFGQFCLHALWFGNCNICAIATLWIDFVREIRWCWEESERLPRMKSTSSIDLSSCLIHQKLQMLTICIERKRSLNREKGTGYKDETSNSTAVNKSRKGSAGVVPKMMLLNTFQEMHAPYTQFLRMHL

SEQ ID NO: 67996 - protein, 279 aa, Zea Mays
MDDTTKVVRHKGTAGEPCRTRTRTRTQRRQRSCADRHLNSRPNPHAGRCTEQQPPVLLSAAYHTRHASPPVYMAGELRHRRAPSEDEGVASSQRLDSAPAGNGKAGTSSGGGEGAEPRGGKRDALGWLEWCRGWMAIVGEFLFQRIAASHLANPLELPPLDGVSIVVTGATSGIGLEIARQLALAGAHVVMAVRRPKVAQELIQKWQNENSETGRPLNAEVMELDLLSLDSVVKFADAWNARMAPLHVLINNAGIFAIGAYISTFSILCRTPTFFEGWT

SEQ ID NO: 67997 - protein, 250 aa, Zea Mays
MIYQLDLPQILEDEYGGWLSPMVVEDFTAYADVCFREFGDRVSHWTTLDEVNVAAIGSYDNGQIAPGRCSDPFGTKKCTVGNSSVEPYIAAHNMLLAHASATRLYREKYQAVQKGVVGINIYTMWSYPLTNSTADLEATQRFLDFYSGWILEPLVFGDYPSVMKKNVGSRLPSFSKVQSEAIRGTLDFIGINHYYSFYVNDRPLEKGIRDFSLDIAADYRGKTVCHSIHDYPFIACNSLDTFPGTSDSFI

SEQ ID NO: 67998 - protein, 515 aa, Zea Mays
MDEAPGNQDNLPFLGNFTGAMFYGEQSAGCSSLEAGWVPMSERIPAQHDIAMARGNWNGLGIMDNANLFDEQALVSAFGNMGLSLTGNAAADSSAHSGTVGSRDGLLFADSLFTSADYPTNLPHQPAFGQDEFVPSYYTVHNAGHMKTKFGAQNPPMYTGMHGTDNAFVTRTNLPQALSFQQHHIIDTQPQTYAPCYQQMDYKFKRHDIDAETNFFMQPQYPYQQYPQAADVHWINSNQYGVINSSDKYAAAPHRGVPTVRHLGHGSPDIYRNGAVIPNGSNRRGLTHVNNCPFISYPDCLCETCEYCQIHLSENLKRSFALRHTPKCSSDDCISDKAKSSPSSLDSVAMKSAQLPYSSVDEVVGELYHLAKDQNGCRFLQRIFIEGSREDARKVFDGVIEHIDELMVDPFGNYLIQKIFEKCNDNQKMHILYEITKIPGQLIEVACNMHGTRVVQKVIESISTSDEVSMVVSALSHGAITLMMDSNGCHVAERCLLKLSPEGKAVRHFFYFNPM

SEQ ID NO: 67999 - protein, 219 aa, Zea Mays
MASSRVMPSSSPSHTASDLARLAQAASRPGGGGSGLGSMNVEELLRGIYSDMPTPAPPASEPERPRSPAPAPEVATRRTAEEVWKEITGGGGSGEPVPPVAAQAAVPAGGGGAGGPEMTLEDFLAREEGAVKEDGVRVSGPSAPAMGFLGGAEGVGVPGGGGGRGRKRQLMDPVDRAAMQRQKRMIKNRESAARSRERKQVGAQMLQFNVIVKLPIVRM

SEQ ID NO: 68000 - protein, 312 aa, Zea Mays
MEDLAPGALALFAAVADFIDDSAPAAAGAGMPPPEPESAPGSPCSDCSSVATADFEGFADLASTLVLDDLVSPASASASASSLPASGPRAARSVFALDCVPRWGLHSVCGRRPEMEDAARVLPTFFHVPLWMLAGDAPVDGLDRASFRLPAHFFAVYDGHGGLQVANYCRDRMHEVLAEGLTRAEQAVSDADLSGLDPSTHEHWEKVFVDCFSRVDAEVGGDAATGTKPVAPDTVGSTAVVALVCSSHVIVANCGDSRAVLCRGKQPLPLSVDHKPNREDEYARIEAQGGKVINWNGYRVLGVLAMSRSIGT

SEQ ID NO: 68001 - protein, 194 aa, Zea Mays
MHTLIRDKNITTPDFVFYSDRLIRLVVEHGLGHLPFTEKQVVTPTGSLYMGVDFCKKLCGVSIIRSGESMENALRACCKGIKIGKILFHRIGDNGQQLIYHKLPVDIAERHVLLLDPVLGNSANQAIELLMSKGVPEDRIIFLTLVSAPEGIHCVCKRFPHLKIVTSEIDSGLNDEYRVIPGLGEYGDRYFGTD

SEQ ID NO: 68002 - protein, 147 aa, Zea Mays
MPLRSETGTAGEGDEEQRLRAALRHLQAEAGVLERLVYKHRNQHRGAAYFQYLLKVRRDLKLLLGAGLAEVLNAVFPVLACRKPANTILVPNKQTKKKPGANHSHHQRLLGVARLLSQMSEPVMKAAMYPFYSACYIMLLFSFLGNK

SEQ ID NO: 68003 - protein, 525 aa, Zea Mays
MRTCPIDLKEAVASVIFASMRCSDVTELADVRKHFKSKYGKEFEAAALEVRPDSGVNRLIIEKLSAGAPDVQTKIKTLSSIAEEHNIKWEPKAFEEKLQQPTEGHLYGSATYSGGNTSTMGSSTSSISTPQPTYSGVSAAPVDSATIHVPANKTAYGSANSNTFSKESIHNSSSASVPPISQHGPSAYSSAQVPGSNNISHGNPGGPPYPQYSATVPDAVSRNEDSNQNRERKPLVTGANWNVEFKDATSAAQAAAESAEMASIAARAAAELASRGNYSGDKGTGAYDSAAYSSKNTVRKQRAEHVVKDESFHDQSSGVNDPSEMPSNSRNFFGGTETSHVDSENISTAPYQQFHAYNPDSHPYVYEMPTEPPRAHSPDPRFDDLYERESDIGRSEVDPFDFPRENFQDTASVGHNFKDVEIRTPSYDQESTDDYYGNFNSSHDTLAHGSSTTAWDKQNDKAQDNSSPVVFDQYDSDVEQENLLDTFSSKHTEQLPAPGDHMRFSTADWSEQHTSESPSKQRTWW

SEQ ID NO: 68004 - protein, 663 aa, Zea Mays
MGHTSSGNEVPLKYSSGKAFPLGVSQVDDGLNFAIFSQHASSVTLCLKLPERGTQDDADIIEFALDRQKNKTGDIWHVSVEGLPASCVLYGYRVSGPQGWQQGHRFDDSAFDSVSWPFLIGVLRKMGFGQIWCDVVCGLLATSSTRILLNGVHGEIISHQRGLRQGDPLSPMLFILVMDVLNLLIQKASDEGLLQQLSAGTLHHKLSLYADDAVVFLRPVASDINLVLEILRLFGEASGLKTNVLKSSVFPIRCTEDDLMRVQASLPCPISDFPCQYLGLPLSLGKLSKAQLQALVDKAASVLPGWKADLMTKAGRAVYVQFVLTAKMIYAAMALDLPNWTTKAIDKIRRGFLWKGRKQANGGHCLVVWGKVTRPKVLGGLGITDLWLLSVALRARWPWLQRTDHSKPWSVLPVQACGAMEALINVAVVSQLGDGHDILFWKDRWLNGRCIGEVAPEVLEHVPTCVASKRLVKDALTNLNWVADIRGALSVRALAQVLDLCDLLEGLVLQPGIPDKHFWKFSASGDYSSSSAYQVLLLGAVEFGPAERIWKTWAPGKCKFFMWLVVHDRCWTADRLAKRGMDHPVCCPLCDQADETINHLLVECSFAKQFWFLFLRSGDFQVLCPSTGDGCFDSWWEKSAEVVGKPLSDGFNLLVIFDRSCYI

SEQ ID NO: 68005 - protein, 120 aa, Zea Mays
MSTVPTDPPLHEQVHATREHTTPFRRSFARRVRATLAISPLPVRDCLFMYGIAGFKLTLSHFQGMWLVKIVLDQQAYIRIQSLANLGRTSPIPSPSPDLSTFILRIVYVPRMKRASKGTL

SEQ ID NO: 68006 - protein, 1930 aa, Zea Mays
MGFLDGFRPDTLLKRVCKSLLKKRLGDLILGDLDLDQFDIQLGHGTLQLNDLALNAEFINRKLSGSPITLKEGSIKSLLVRFAASCEIVVEELELVLSPSVASEVDDVHTECSVSGSTSDTHTLVKIQRNESDSNQCSTSVSRDVDDGVKRIANAVKRFLTSFNIKLKNAYVIFDPQTSLSSRFPETSRSLVFRIKELEFGTQLGLFKLDNFLTFREAVIEFLKMDDVDTLLQNDLNRGTADISAHHSTTAVLTGPIGGFSGKLNLSIPWNKGCLSFEKIDADVSVDSLELRLQFSSIRWIMNVWDSLQRKPVDEQSCVHNIADISISASSSAYCPPASSSLKPCSDSVIASDYMAQSTFSQNRQDKVQDSFLTSAHVITDWMEPVARKDLCDPDSDCDESIDQFFECFEELRNSQSSLGNSGIWDWTCSVFNAISFASTLASGSDQVPKEPVVERTLRASITEISVLLLFSDDTDIKNSSVPISALDDMRHSEMFSSCLSSEHFEKSIISPATASSLNMHHLKAKCENIHLDLQTYPKNVRLKASIAQIKLDEYYHAGNNISDDSNLGNHFLNNNLRQGVQASLPQCLFAVGDHSVETYEFCGNSSTELTRVELLKTFGECTFCYDVSTKDQDGNLVSSTSMSIYLAPLLLWVHFHTIYMLLSFVSNVESDLSHGEHKIQKHGDEKGSRLTTSTTMSSSGSLKVQISLAQARIVLCFPSEFSWDLSHPSVLDKFLVIDHTSCLNMVETASHPQNEMQNEVHLSKSCTSIHLAVGDIDVYLVKPVNNVLVGRICSSSRQTFSAMKILSVTGSSYNDSGITLIRRKYPVTGPEILNNAWSLPKMHDEKITKNQNSKWAGISPSSNDLLETGSSMRQELLKSTELLFHVQLSCVSLRLSKKDCELLNKLLDHVIKGISNEQTSISGNSKDQSVLINDTFIQTSVLFECSILEICTELNETVEVGPLLQAELKGSWNSVKLNVSKFCLFSCSNVGGLNNASFLWVNHGEGELWGSVSAKNDKIPGESKDFLIVACKDSACRRGDGEGTNVLSIGAAGCSVTHIRNPKLKENYTSVDVRSGTIVAPGGRMDWINAICLLFSSGSDRTEKSDDSNTPNSYQSGEPYSSSLFIELADVAVSYEPHFKHSTLSAGAADRKFFSCLLAASSFKLHNKSASASAATDFDIQLRDLGVLISQSSGSTNGTCSYGVDYLRQAGYTKVVQNTFIEASLRLDSSFWKLEISDSQFDIGTCHDTTYGLIGLGSQLQQLYGPDMQDALDHLQSRWNSVQQANKQNMAADASDKSESSLEILVDSGDYQSDGLLDDIIENAFNTEDCMDTNFWENNYHHLFSSSETDDGFELNAATSHVFPISTPEGNVTQISLEQNVCPDQIIDSYCVPEFHQSLSTLCDEEHKCTSGDNSHRTLESEDAGWYNNVPLTIVENHVLKKKNEQVLQHKVSSVCSLNPDEYCNLKGKVHIHDIDVKWRMYAGDDWLLPQKDLTSLTCTDGRNRSSSLEFTVRGLNIQVDMYPNGDVSISRLSVAAEDITLCDQSIHAPWKLVLGCYNSKDYPRESCSSAFRLELESVRPEPQAPLEDYRLHLEILPLQLHLDQEQLNFLINFFKNDSCNNDPHLHCENDTVDVKSTSNGSNMVVDEALLPFFQKFDVKPLILHINYIPRQFDPIALSKGNYAELLNILPWKGIDLKLKHVSAMGIYGWNSIGDTVAAEWLEDISKNQVHKLLKGLPPIRSLVAVGSGTRKLVSLPIKSYKKDRKLLKGMQRGAVAFIRSVTIEAVGLGVHLAAGAHDMLVKTECALTTVPPPLASCEVKRTKHNIRANQPESAQQGMKQAYESLTDGFGRTSSAIIGNPIKVYNRGAGVGSVLATAICGAPAAAVAPISASARALHYALLGLRNRLKLCLEAAPISCLEGYLQTRIG

SEQ ID NO: 68007 - protein, 73 aa, Zea Mays
MGCQIVLNGECCFCIYRGIYVSIPCACTVVVCAWGYVCSRRERTSERVLRGKKKSMSVSKMLWLSPGLSAFVL

SEQ ID NO: 68008 - protein, 364 aa, Zea Mays
MAMELAKQLLVAVLRSYAPPLWATIIASVFVIISVSLSLYLLLNHLSAYKNPEEQKFLVGVILMVPCYAVESYISLVYPSISVDIEIMRDGYEAFAMYCFGRYLVACLGGEDRTIEFLKREGGSGSAVPLLGQASEQRYVNHPFPMNYMLKPWPLGEWFYLVIKFGLVQYMIIKSICAILAVILESFGVYCEGEFKLNFLGDYASVDCPLDPDEVKDSERPTKFRLPQPDDHVRCSTAIKESVRDVVLGGGEYIVNDLKFTVNHAVEPINEKLHMISENIKKREKGKRKTNDDSCISSPTSLTRVISGIDDPLLNGSLSDNSGPKKARRQRRKSGYASAESGGESSDHGLGGFEIRGNRWITRE

SEQ ID NO: 68009 - protein, 179 aa, Zea Mays
MQIMPYKHNYIRIQWHHSRAGAQGRRLLCPPLHTIMMLPDLSTMFNSLRATGGRANGDGAKKTRARDRPKAVPAPEANAELQVNIDKRRFVTHAAKSKSEKFPPPHQDGAVGVPLDTSNHMDPLYEPPDPSSFSTVFTHEKGAVPTWSGPLVDPAAVVNQKRKHKFGRSSKQPATARAR

SEQ ID NO: 68010 - protein, 1194 aa, Zea Mays
MVSRCTGAQIASSADSIASVRLGQCEAFKVQKVTEFPSAKQTNRRSSKTLMFFEGCPWRLGCTVLLRGSCREELKRIKRAVQLAVFAAYHLSLETSFFADEGATLPKLPSRHVVVDPDTRNCTNSNSAALTNVGMPHGRKSEHDKLSQTAMVNIMFENTPVSPSSLPSNGEGHMFVGACQHKETEYSVDHKNSCEHCVSRATGSCNGYETSLCSSDNDSMTQNQNLQNSAKLTSNAHQYEFPAKECQQVDHWDRQPHDDQSVDQRDLNKFSGEYFPGSDNHQSILVSLSSTCIPKGLVCERSHLFRIKFYGSFDKPLGRYLRDDLFDEAYRCQSCKEPSESHIRRYTHQHGSLTISVRRLQSRKLPGERDGRIWMWHRCLKCKPKDGVPPATRRIIMSDAAWGLSLGKFLELSFSNHASANRVASCGHSLQRDCLRFYGYGNMVAFFRYSPVDILSVNLPPPVLDFNCCSTQEWLKRVAVEIFGKMESLHVEVSEFLHCTEKNIVTEDEPVRECVQRQIIEMKDWLKMQRNEYEMLLLPVMRESNHPMQTSIDILELNRLRRGLLLDAYIWDRRLCHIDSVLNTHGHISKTNPDNLDILLCTRLKEWKADLLCGDTEIEKSLGSPKKSLLSREGHLNDNEYSVADTNLEICLEGHPVDDADDLDKVYNKFSGVKKRPTAEPTDGLEPVERLPSLASIFSDTIDLAWTGSCDLQHDLPQAFTKIDENVSFNLDSPKYSNLVTPVRIHSFSSTLGLRQRERTGLVPASLHLSSFKSAEYFGAMRSILKDPMPNMRRSCSQRSPGTIEKLNVVLARKPTYISSTSNIINDGARLLLPQTGYEHDVVVAVYEDEPTSIISYAMTSEEYVEQVTHRLNSSLSFSHQPNTNGISSHGLEASSPSQGDHLHSKGTHFKLSFDDDSPISPDKTKFSVICYFAKHFAALRKKCCPKDIDYIRSLSRCKRWNAQGGKSNVYFAKTLDERFIIKQVTRTELESFVEFAPQYFKYLMESLASGSPTCLAKIVGLYQVGVKSLKTGKEVRMDLMVMENVFFERKISRVYDLKGSLRSRYTAGDSKVLLDANLIEALHTKPIFLGSKAKRRLERAVWNDTSFLALADVMDYSLLVGIDEEKKELVIGIIDYLRQYTWDKQLETWVKASGILGGPKNESPTVISPMQYKKRFRKAMSKYFLTVPDQWSS

SEQ ID NO: 68011 - protein, 559 aa, Zea Mays
MGFWVGLVLGVAAGLALIVGFVRCENSRSARRRQLAATVASFSRMTIEDSRKLLPADLYPSWVVFSSQQKAASELIKTSVEPVLEQYRPIIIASLKFSKLTLGTVAPQFTGISIIENTKESGIVMELEMNWDANPSIILAVKTRLGVALPIQVKDIGFTGVFRLIFKPLIEELPCFGAVCFSLRQKKKLDFRLKVIGGEISAVPGISDALEDTIKNAIEDSITWPVRKVIPIIPGDYSDLELKPVGTLEVKLVQARDLTNKDLIGKSDPFAIVYVRPLPDKMKRSKTINNDLNPIWNEHFEFTVEDADTQSVTVKIYDDDGIQESELIGCAQVRLKDLQPGKVKDVWLKLVKDLEIQRDRKDRGQVHLELLYCPFDMKDEAPNPFSQHFSMTSLERTLTNMENGSGGSSFDRLSSRKKREIIIRGVLSVTVISGEDLPAMDMNGKSDPYVILSLKKTKTKYKTRVVTESLNPVWNQTFDFVVEDGLHDMLMLEVYDHDTFRRDYMGRCILTLTKVLLEEEYKESFNLEGAKSGKLNLHLKWSPQPIMRDSREAGSLRSR

SEQ ID NO: 68012 - protein, 157 aa, Zea Mays
MDAMWKHPDVYKEWIKSGERRGNVRFSHDAKNMPYLSRVEVKDMIAFSCCVYDGGDEEKEMDAAREIGWRGKFTKRGRVIRPGIIRMSGKCPLTPLEVGLMLRGMDFSNKTAIFLASGKIYKAEKNMASLLEMFPLLQTKETLASEEELAPFKNFSF

SEQ ID NO: 68013 - protein, 653 aa, Zea Mays
MECNKDEAQRAKGIAKKKFEAGDLQGARKFALKAQTLFPALEGVDQMIAIFDIYLASEGKVAGEKDWYSILSVPLNANDEKIKKQYKKLVLQFHPDKNKSVGAEGAFQMVQEAYTVLSDRTKRAVYDQKRNVRTFQQRTAQSGKASTVPGASNGFYNFAANAATASKWTVNKQTVGSATHAPSAPSTATRAPVAKPDTFWTSCNKCKMNYEYLRVYLNNHLRCPSCRQPFLAKEVQKPPAGNVVQDSNISGANQNTTTNRNLQWGPFSRAAGAASATASSAAAAQAANVVHQTYEKVRREREEAQAAARREEALRRKYNPLKRHASMSGNVNLGPGDATSGKKTRTMTKDAEVGSSSTISSPGANFFRVPGVNISFSNNIGAYEFQGDDGGPSWKPRPLIHLSLAKTFSQMDLRGLLLEKTKTELKNKLTVIKSKTSQVASEKASKKIAVKENGGDNEALGPEDPTAIKDSHDSEQTGSNTSTDAENEDDDHLSYNVPDPDFHDFDKNRTEECFQSDQIWATYDDEDGMPRYYAFIQKVLSLKPFKLRISYLTSRANSEFGPLNWVSSGFIKTCGDFRIGKYESCDIVNMFSHQMKWDKGPRGLIKIYPQKGDIWAVYRNWSSDWDEDTPDNVLHAYNVVEDVRRRSCKCPQR

SEQ ID NO: 68014 - protein, 303 aa, Zea Mays
MTLQGCEWGDLPLKKGPIPRAVDIPRSSCDHRALPPSGPLDGVCRCSLEGSVSRSSLPVTSPSESMRPWWCRRSCLLPAAIGGVQPHGGWHPFATIRLQGFSSRSPAAVPRRRSPRRMTTSLVVGRSKPGCGLSPTLSFKDVHHPCCGGRQVEPGPFPPLGLVTRFFLQHSEGKGVHQSCGGSVLGYTGSADCRLSAAACLALWGWIALVLPLSLPPAAWSGCGYPSTTRATVVSCAGLPHSWLPLPVGCIGGLYKTSYAAAVAAVFLDGLVLTHVGQNRSEDPFVRAEAAAAHRCRGGRRCW

SEQ ID NO: 68015 - protein, 80 aa, Zea Mays
MDRMVLSLIHCFVLYVDQPITMPLTVTLLFKVQSIHMASIKLQKKLFVVAKRISNKILVELKFLHQIIFGRLQMHYTMVW

SEQ ID NO: 68016 - protein, 172 aa, Zea Mays
MYKSRLQELCQKRRWAPPLYEPTREGPAHAPLFRATVVVNGERFSSRDEGEKSLKEAYNLAAMAAFDNLIALPAAALAPAPAAPAPPSSETQLPYKSQLQIYAQKRGKLLPSYRPIHGGSLHAPLFKSEVTIDGQTFESPEYCHTMKEAETVAAKVALMSLPQEANPTQQLL

SEQ ID NO: 68017 - protein, 145 aa, Zea Mays
MILSTGTVSCCLLQCAGSGVNCIEWPKSPAYISPVSVDCCLSISFYRIALSALIKIYGCFLFHLASDFDNMRPHLIIVGALKMINIIAPSWRVIPATNMIDKIRKDPQLKKKICFNPYMYRGNLALQIGCKLLSVSLDIKKSLHE

SEQ ID NO: 68018 - protein, 1205 aa, Zea Mays
MTVRETLDFSRRCLGIGARYEMIAELARRERDAGIKPDPEIDAFMKATAVQGQETNIITDLTLKVLGLDICADVIIGDEMIRGISGGQKKRVTTGEMLTGPARALFMDEISTGLDSSSTFEIVKFMRQLVHVMSETVMISLLQPPPETYNLFDDIILLSEGYIVYHGPRENILEFFESAGFRCPDRKGVADFLQEVTSKKDQQQYWYLDQEQYHYVSVPDFAERFKSFHACQQMQKELQIPFEKSKTHPAALTTRKYGLSSWESLKAVMSREQLLMKRNSFIYIFKVTQLIILALMSMTVFLRIKMPHGQIADGTKFFGALTFGLITIMFNGFAELQLTIKKLPVFYKHRDFLFFPAWTLGVANIILKVPVSFVESAVWVVLTYYVMGFAPAAGRFFRQFIAFFATHQMAMALFRFLGAVLKTMVVANTFGMFVLLIIFIFGGFVIRRNDIRPWWIWGYWASPMMYSQNAISVNEFLASRWAIPNNDTTIDAPTVGKAILKSKGLFTGEWGFWLSIGALIGFIILFNMLYLWALTYLSPSSGSNALVSEGEDDVNEMALEGRRKDARRSKDEISQVVSSDPGTNGGTNTLAQSRVTLPFQPLALCFNHVNYYVDMPAEMKEQGFTESRLQLLSDISGTFRPGVLTALVGVSGAGKTTLMDVLAGRKTSGAIEGDITLSGYPKKQETFARISGYCEQTDIHSPNVTVFESITYSAWLRLSSDIDDGTKKMFVEEVMALVELDVLRDALVGLPGVSGLSTEQRKRLTIAVELVANPSIIFMDEPTSGLDARAAAIVMRTVRNTVNTGRTVVCTIHQPSIDIFESFDELLLLKRGGQVIYAGELGRHSHKLVEYFEAIPGVPKITEGYNPATWVLEVSSPLSEARLNMNFAEIYASSVLYRKNQEVIKELSIPRSDNQDLSFPTKYSQNFYGQCAANFWKQYRSYWKNPPYNAMRYLMTCLFGLVFGTVFWQKGKNIDSQQDLYNLLGATYAATFFLGASNCITVQPVVSIERAVFYREKAAGMYSPLSYAFAQTCVEVIYTILQGILYTVIIYAMIGYDWKADKFFYFLFFITASFNYFTLFGMMLVACTPSALLANILITFALPLWNLFAGFLIVRPAIPIWWRWYYWANPVSWTIYGVVASQFGENEGELSVPGGTPVVVKQFLKDNLGIQHDLLGYVVLVHFAYVIVFFFVFGYSIKFFNFQKR

SEQ ID NO: 68019 - protein, 139 aa, Zea Mays
MARPRAKKRTTPQAAATDSVEPDATVGASSKLEEAAAEPATRERGKRVKAPPKPKPETEYFDEKGNFEDLWLSAFPVGTEWENIDKIKEFNWSFENVEEALEEGGELHGKTLYMFGSTERRLSFPTFRQNWHKFRPKGK

SEQ ID NO: 68020 - protein, 1759 aa, Zea Mays
MSIKLDQDDTQVLGNDANEIQQFYKKYCASMSHISKKRNFEEMARYYQVVYALYEVLQDVTNKNIDDQVLRCADMVEENGRHFKNYKYNIIPLNFPGSSEEIMELPEIRGAIDAISDIDGLPMPDMSSIQRHEDKSIQDLIEYLSLAFGFQKSNVENQRENMVLLLANISTRTAAQEGHPLVDTVNELWKKIFGNYKSWCCYLHITSSIIISHDITEHKKQQLKLLHIGLYLLIWGEASNVRFMPECLCYIFHHMAKQLHDMVDENNFQPPQAPVEEGSFLKNVIEPIFKVLQKEAQKSRGGTAGHSAWRNYDDLNELFWSEKCFTELNWPPDLSSNFFYKGCGMARKPKTNFVEVRTFLHIFRSFNRMWMFFILAFQAMLIVSWSSSGSLSGITDGTVLKNVLSVFITAALLNFITVTLDIMFTVQAWGSMEWTKLVRYLLKFVVAIAWIIILPLTYSSSIKYPSGAGKILNSWIGDWYNQSVYNIAIVIYMVPDILAALFFLLPQLQNVMERSDSRVLVLLMWWIQPRLYVGRGMHGDILSILKYVFFWAVLLISKLAFSFYVEISPLIDPTKFILDQQVGNYEWHQIFPFLPRNLGVVITIWAPIVMVYFMDTQIWYAIFSTVFGGVSGALSHVGEIRTLGMLRARFKSIPEAFSQCNAIKQREQAFEHRSFFRVWNSFINSLREEDFISDREKDMLMAPSYSSNLSIIQWPPFLLASKVPAAVHMAMNSKEGDEHELIEKIKLDGDRYDAVIECYKSLMIILNSLLLDTNDQNIVNDIDKKVTYSMIKKTFLEDFEMAEIGKVSSTLARLLQLLKSEPINDVGERKIVNALQDFMEITTRDFMKDGQSFKDEDERNQRFMNLNMNMIKEDYWREKFVRLHLLLTMKDSAMDVPINLDARRRITFFANSLFMKMPRAPRVHDMISFSVLTPYYNEEVLYSSHDLNRKNEDGISILFYLQKIYPDEWNNFLERIGVESNNEVSIKGRMDDIRLWASYRGQTLARTVRGMMYYRRALELQCYEDMINDQGYGLADLDTAKAARSKAIADIKFTYVVSCQLYGVHKTSKDSRERGLYENILNLMLTYPALRIAYIDEKEVQLRNGKIEKQYYSVLVKGDDEEIYRIRLPGKPTEVGEGKPNNQNHAIIFTRGEALQAIDMNQDNYLEEAFKMRNLLEEFLLTHGKSEPTILGVREHIFTGSVSSLAWFMSSQETSFVTIGQRVLANPLKVRFHYGHPDVFDRLFHLTRGGISKASKIINLSEDIFAGFNSTLRRGNVTHHEYIQLGKGRDVGMNQISNFEAKVANGNGEQTLCRDIYRLGHRFDFYRMLSLYFTTVGFYFNSMVAVLTVYVFLYGRLYLVLSGLEKSILQDPNIQNIKPFENALATQSVFQLGMLLVLPMMMEIGLEKGFGRALAEFVIMQLQLASVFFTFHLGTKTHYYGRTILHGGAKYRATGRGFVVRHAKFAENYRMYSRSHFVKALELLILLVVYLAYGSSYRSSSLYLYVTVSIWFLVFCWLFAPFVFNPSCFEWHKTVDDWNDWWKWMGNRGGIGLAPEQSWEAWWVYALSWLVIAVALVSLKVVSMGREKFVTRIQLVFRILKGIVFLVLIGLLVLLFVGFDLAVSDVGASILAFIPTGWFILLVAQLCGPLFRRLIIEPLHLLCCPYGTGGACRGPCCARFRQRTGAALRKMGPWDSIQEMARMYEYTMGLLIFLPIAVLSWFPFVSEFQTRLLFNQAFSRGLQISRILAGQNGSGTKSD

SEQ ID NO: 68021 - protein, 314 aa, Zea Mays
MTLREPQSSRWDAFTSAERILSVTSAETPQSLASELRDFINTSTLVESHTQTTSMESSQGLLSFQDVLLLTIIGYILAGENFPTSMAGGPFSWEDERSLKDVIVDSILERPSSVKLRFLDGLDSELEAKARSKDGERNKNSSEVAPSTDDDFDDEWGTWDDSDNTDHQKEEAYGDMQLKLEVRDRVDQLFKFFHKLSSMRLRNQALGEGIAALSRFETDGYSRKCLLYKLLLALLSRYDVPGLEYHSSTVGRLFKSGLGRFGLGQSKPAFGDQSVLIIFVLGGPGSHDSDIGEQQTRCGAYSGWDNPSYPRRHV

SEQ ID NO: 68022 - protein, 536 aa, Zea Mays
MLTLIARRSRHYAGTRYLKRGVNEEGRVANDVETEQIVYENMLGPWQISSVVQNRGSIPLFWSQETSKLNLKPDIICKHLSSCSMRKILFKHLFFLAVHEKDKNYEATRLHFENLRKRYGNPIIILNLIKTLEKRPREIILRWEFDRAIKIINSGLPGEDHLRFLHWDLHKNSQSKSTNALQVLLKVAFEALNMTEFFYCQVSPDQRAKGSPNLSPTLKIGFGHHACDDKNCGNADYVDDLDDISQEDTCGSSDPGNGIAEDKFEVNGSAQIKRPKFQKGVLRTNCIDCLDRTNVAQYAYGLAALGHQLHALGSVESPEVHLDSPLSRHLMHFYERMGDTLALQYGGSAAHNKIFSAKRGHLKFAIQSQEFFRTLQRYYSNAYMDAYKQAAINLFLGYFQPQVGKPALWEPESGDEHVLDDETCKLMKRARSDGSILNKSKLSISSNGPNGILKLAFTGSKNEGQRPNRSSDTACDNGMSKSRSKAISTPDVNISTDSGVRDVISGTTDDQASGIHAQGFSKDFVQWLNQGEAFWY

SEQ ID NO: 68023 - protein, 1452 aa, Zea Mays
MARQTSVTEADLEFMLIDENAKPKPLPYSLLEKITNGFSGAHIIGYGGSADVYEGFIGNHKIAVKRLRIPYQHEKEFSQEIECLMKVKHINVVRFIGYCSDTQGQAEKYEDNHVMADSQERLICFEFLPACLDKYIKDPSCSLEWRQRYQIINGVCQGLHQLHEHEILHLDLNPRNILLDDDMVPKISDFGISKCLKKNQGHFYTETISGTPIYMSPERGKHGPITTKSDLFSLGVTVIEIMTGNKENIDQATVEDVFASCIKIFNDKSLTAAQVRQIMVCAEIGIKCRNSEPDKRPSNTKEIIDKLEEEARTEESQESGKLLKVLPTLLLFDLHPGKLIPCSLQLTNDTDEHMAYKLSITESVDWSKYFTTKLPLYGIVQARSTYTVILTVLLECDAPVINRSCYMTLQSCTLAYEYIWKFNNTLEFEDFLEVKKTENAVKEVKLKAFLCEEGRSISKQTRPRVKLLSIVKPQTPLLSLDAHPTKPWVITGHAFGHVRIWNHETQKLLYSFKLSLGPVYSVKFIARKQWFVSSSAEGLIHVYSMETKMQKVKSYRAHDGVSISLAVHPTLPYVLSWPCSGPHEKKLWNWEKGWDCTQTFEREYVARNFVCQVAFDPKETNRFASASNYRVKVWSVDLPKCNYNLPGFFNEVNFLEFFTRDDQQYLIITVSHDKTAKIWDMRNKKYVYDSMEQNLMSPVSSVFSHPNLPILLTRSIDGTSHFWSPKDFRFEAVLDCRYGGHVWGIACLMGSKRRFVIGQETALTILDVGDQECQDMRQEGTSSEVITPGSSELLLDVHPLTLHFPFHAHKLIPCTLHLTNKTDEHVAFNLSIEDGMESWQQIFVRMPLSGIVPPKSTYTLVVTMRELTYLPTQNFNLTLQSNICEDRYIYSFMSLSESDQFFEDLKEIRNVAPPQVKLKAVFSLQGQTTFENGSSTGENLVQPLINIWTLFNPAKDFSSMLISLDADPTESWVITGHRHGDVALWKHGMQKMMSLINISGEASLPRNSLNTQHDVYSVKFIARKRWFVAGTCDGFIHVYKYETRIMDCIKRFRAYSSGIIDWGICSSRALIVHPTQPYLLSTCEEMKLWDWDDDWKCIQKFGREHTDSILQVAFSPNDSFASVSSDHTIKLWCLKSPTSECTLHGHSDKVNCLDFVTHDGQQYLISGSQDCTAKAWALKEKECVQTMDVFMSPVVSVISLPDTPYITTGSADGTIHLWSSANFRLERILSLGLCGPVWDLRLIGPTRIVIQPNNYEISVIMDIDTGSEASSSAPSNELIQVDPKELRFPVAQEVSSTLEIRNVTDHHVAFCMWSLNHTANYIPVPNIEVLSPQSMRQVVITRIARREPVPADPVDDIVYVKGTTVVQGTTSADVTYDMFDGTRTGQILQPAMELNVVLVADSEIIHKARLPWALDVHPTMPWIMMAQGDYQIRIWNYKTRVKVCICIRGLIN

SEQ ID NO: 68024 - protein, 338 aa, Zea Mays
MPRRNPPPPPREQSNSSLSHGSSKAGDAPLGAFWATQHAQGAQAADNRNPLFDEEPSKVSLSSKQNQSRVDTSISIPGDRHGHSGQTSRISKTPNNSLSNDGFRGVSDTEIHNSVKTKVQQPQPKPKCDKDPFNIFVADFDTHNLNIAVGKASELELEVSSLKEQLKKTTLEKAEMTAKYEKLSAICRSQRQEIQELKRTLAEATPPSNKVSSRTQDSGSQRKEKIQGTLWELEQGMLASNTSSASSDVKTWQAFPDTQTQARPKVDHGTNGSQNITKNTTSGASPDAWGFGTDSFRTSSAPVKAATQINRAAQGSSSQRFNSGVAKKVEQPSGWAGF

SEQ ID NO: 68025 - protein, 391 aa, Zea Mays
MELSKILEKIENIVTEAHKILQLLNLPSGSNVDKRQIVAENSRGAVTTVAPPRLVIGRDEDRVKVISMLRETLDDGQQDRSGAKPYSTIGIYGIPGSGKSTLAQYVCAHEEDNIHFDIVIWVHVSQKFSVRAVLREMIEQGFEGESIETEESFRCIFPRRHWLDPEYLVRLWVAEGFVTSRNTGEELEAVGRGYFDELVSASFLQPVDGDKERYTIHDLLHDLVSKVAGSDCFRADNGWEGEFPQDVRHLWVENCKLDLIAHKITRLKKLRTLIISAGENDTPVEEKALLENIFTGVTTLRVLQITPWTAGTLSFPASVGRLKHLRYLSVGRHIGGTKVILPSTVVLGLYHLQLLDCPSVAFSSCEDIVKGLFGCTGMSQDSFQLIKIYIN

SEQ ID NO: 68026 - protein, 342 aa, Zea Mays
MPDWRANANPTRPAGSGAPTQRLTHPPTQQHSLTRPSTATRSLARAPVLPFPLHLRGARGNLATPHRVRAPTVAGPLIKLPARRDPVSTAAPPEEEEEGGRGVEHRGMLEAKPPSPGSSGAAGAAAHIHAHRRWAAPLLASVLLSSILISASLFFSSSRALLLSFSPLPSAASAEPLFVEAKLRQQMRAEERPARGAVPRIAYLVSGSAGDGAALRRTLRALYHPANTYVVHLDLEAPAAERAELAAAVRADPVYARFRNVKVVTRANLVTYRGPTMVANTLHAAAILLREGGDWDWFINLSASDYPLVTQDDLLHVLSELPRQLNFIEHTSDIGWKEGRNR

SEQ ID NO: 68027 - protein, 466 aa, Zea Mays
MDRPINIRTSPRTPLSLSEQQTIKEFWRKKQEEIEAIEDFGEHTIPVTCLKKVICAKKGKMMMTSDTPTFMTKLKRKHNDRTENEAAESNDWMSPGYANAGSSPVPTPPSGKGLKASTKPKATKGQKSGPQTPLGFGSPGNPSTPVGGCRYDSSLGLLTKKFLNLLKGAPGGIVDLNNAAETLEVQKRRIYDITNVLEGIGLIEKKLKNNIRWKGVDDSRPGEVSDDMSILQADIDALTLQERNLDERISEMRDRLRGLTEDENNQKWLYVTEEDIKSLPCFQNQTLIAIKAPHGTTLEVPDPDEVNDYPQRRYRIVLRSTMGPIDVYLVSQFEEMSGMETPPRPTQTISMDSLENPRTPLAADCNKVTGMESNIHGGLILPSDAPSSSQDISGMMKIVPSELDADTDYWLLSDNTGVSMTNMWETGPDEWDGIEKFNAEDFLEVGTPQQQDKPADVVDDDPSCII

SEQ ID NO: 68028 - protein, 81 aa, Zea Mays
MSFVCLEFCEGKNGWRVELSRNSSGRGGRDRYGGSESKCYECGETGHFARECRLRIASGGLGSGRRRSRSRSRSRSGSPRY

SEQ ID NO: 68029 - protein, 208 aa, Zea Mays
MHLDMEALREDKSKLEAILEKKTDEERKLCSRVEDLELQLNKEKDDFQRMTSKTKKLIKAHGRYIKAQEDLKRSQARFERLADLLASDILKPYTKEQGSIGITANDDPYNGNEMSPSDQRQNHVSASRKRPISLPRSEEAKTGKRQRENGDDMIPTPENYRPEDALEHVQDSKGTDRLESFTVKKLRVGDYDDEGNIVSSSNIFADRF

SEQ ID NO: 68030 - protein, 215 aa, Zea Mays
MDCKASATREDLEFILLNEDAQPKPLPLSLLADITSDFSDKNIIGRGGFGIVYKGFIGNRTVAVKRLLRVLHFDEDGFYREIKCLMKVKHQNVVRFLGYCNETRGEMAGFNGTLVMAQEEERLLCFQYLSKGGLNNYINADASSALEWEQCYRIINGVCQGLHQLHQHNILHMDLKPENILLGNDMVPKIADFGLSRRLHEDQSYVITKNLCGTR

SEQ ID NO: 68031 - protein, 504 aa, Zea Mays
MAAALASRVESWVRDQAARLQPWAAALPQAPRWPWPPPRPAWPWPGDRRRQRERMFREEYERRSRQLRELCRAVRVDTVAELQELLCAMVLAECVYKRPVSEMMRYINKFKSDFGGNVVSLERVQPSLDHVPHRYLLAEAGDTLFATFIGTKQYKDIIADVNIFQGTLFHEDTAHDLAPDVDPEQNDTQKGEESHGKSYRETSKKLRKPKPAVHRGFLARANGIPALDLYNLAQKRNRKLVLCGHSLGGAVAALATLAILRVIATTSSEEDNRLHVKCITFSQPPVGNAALRDYVHKRGWQDYFKSYCIPEDLVPRILSPAYFHHYNAQTPEASFTNKTDVKSEEVMEASGERPRGNNREHLVLGVGPVQKSFWRLSKLVPLEGVRKSLSAIQKQTNVFGKAPSQLDSYLQSKVDESEEPPQSLEIQESSQGIALTPLSDKDGGNTEDNNRTEKINASEAGGSKRWSRVPSLPSYVPFGELYLLGDSSVNTLSDSEYSKMTSNI

SEQ ID NO: 68032 - protein, 383 aa, Zea Mays
MFNILHCKQAIRVAQVMDESLDNNKMDLVTRCIDLSENRLCIMPKRENTITPERLRSFFSRFSASWVYSKILTLGVSVYERDRRRRGYWALRLSIDLEHMGRPNESLSTAEGGATDPWVRAGSKFALQRRVLRLSKPPRRWKVPSYADYVKRNIREVSIEGRPLNCETGAKNVFYGYDGELCGVEQLALQYYADEGGGWQGTHSEGSIWMTIFGLLMWDVMFSDIQDVFQSKFQTAPLDLGTDDFYKSRENIAESQLKRIRDGMAEEMLISSWELHQGTSCQGVNWARYSLTDLRAVVACVGGHRLASLLRHLAVDYRSWSSGMPDLLLWRFLDERGGGEAKLVEVKGPRDQLSEQQRAWILVLMDFGFDVEVCKVSPVTKRR

SEQ ID NO: 68033 - protein, 119 aa, Zea Mays
MHPGNSTCKEVFPGLDHWKSGKISGWHNTEGNSVQWLCIACVDRKGMMAEVTSALTACGITIWSCVAEVNKRRGMGVMLFHFEGSYENVVSACSSVDMILGVLGWSVGCSWCPLGVLEC

SEQ ID NO: 68034 - protein, 378 aa, Zea Mays
MSAAILLAEATLLPSGVDLSLFSILIKAVGKQEVLVQVAAFVPLMYMCICTYYSLFKIGMLMFYSLTPRQTSSVSLLMICSMVARYAPPISYNFLNLIRLGGNAKTTFEKRMGNIDDAVPFFGRGFNKIYPLIMVVYTLLVASNFFVRVIDFLGRWKRFKFQREEENIDGLDPSGMIILQKERSWIEQGCKVGEQVIPLARNFNGVNADIESQNVPLVENTVEMKVGATSSRNDGRAGQLKYANNRETIASKYTSIREQNRQSGKVVRKEISPNSISLLEERNSEQGSNAGVPPTGVSATWASMKIGFQNFKANMGSKKFLPLRQDPGFVPNLNVSSPESLDDIFQRLKRRPANVPVDYLDDDDDDNIGDTDLHFQDQ

SEQ ID NO: 68035 - protein, 54 aa, Zea Mays
MFLSSSRVLPLRCHPSSPPSLEPGPGLHHHKRSSMHVLPLRCNKLLLLPGALGI

SEQ ID NO: 68036 - protein, 1116 aa, Zea Mays
MTTSPPPAEQHEEEEVLVPYGPHLELPNGAQPMEVVPAEPAATVENQQIEDPPISRFTWTIENLSRVSTKKLYSEIFVVGGYKWRILIFPRGNNVEFLSMYLDVADSGVLPYGWTRYAQFSLSVVNQIHNKFTIRKETQHQFSARESDWGFTSFMPLGELYNHSRGYLVNDTCIVEAEVAVCKVVDYWSYDSKKETGYVGLKNQGATCYMNSLLQTLYHIPYFRKAVYHMPTTENDMPSGSIPLALQSLFYKLQYNDSSVSTKELTKSFGWDMHDSFMQHDVQELNRVLSEKLEDKMKGTVVEGTIQQLFEGHHMNYIECINVDFKSTRKESFYDLQLDVKGCQDVYASFDKYVEVEQLEGDNKYHADKHGLQDAKKGVLFIDFPPVLQLQLKRFEYDFMRDTMVKINDRYEFPLQLDLDRDDGKYLSPDADRNVRNLYTLHSVLVHSGGVHGGHYYAFIRPTLSDQWFKFDDERVTKEDAKRALEEQYGGEEELPQTNPGLNNTPFKFTKYSNAYMLVYIRESDKDKIICNVDEKDIAEHLRIRLEKDREEKERRKKEKAEAHLYTIIKVARDDDLKTQIGKDIYFDLVDHDKVPSFRIQKQMAFAQFKEEVAKEFGIPTQFQRFWLWAKRQNHTYRPNRPLCPQDEAHTVGQLKELVNKAHNAELKLFLEVELGLDLKPLPLPDKTREDIFLLFKLYEPEKEQLRYVGRLFVKASGRPQDILPKLKMLAGFSQDDDIELYEEIKFEPNVMCEYIDNRLLFRSCQLEDGDIICFQKSSKADSADRYRFPDVPSFLTYIRNRQVVHFRSLEKPKEDDFFLEMSKIFTYDQVVEKVAEKLGVDDPSKIRLTSHNCYSQQPKPQPIKYRGVERLLDMLIHYNQTSDILYYEVLDIPLPELQALKTLKVTYHHATKDEVSVHSIRLPKNSTVGDVLNDIKTKVELSHPNAELRLLEVFYHKIYKVFAPNEKIENINDQYWTLRAEEVPDEEKNLGPFDRLIHVYHFTKDTQNQTQVQNFGEPFFMVIREDETLSSIKERIQRKLKVPDEDFSKWKFAYISLGRPDYFEDSDTVALKFQRNMYGAWEQYLGLEHPDTAPRKAHTINQNRHSFERPVKIYN

SEQ ID NO: 68037 - protein, 59 aa, Zea Mays
MIMCYFTVYDGNRTLEGGGTAEACFIKIQAAHELLIHDERRRAYDREDHVNPMKITTVS

SEQ ID NO: 68038 - protein, 748 aa, Zea Mays
MPNPPFKIDFERIVDDFIFMCFFVGNDFLPHMPTLEIREGAINLLMAVYKKEFPSMGGYLTDSCTPDLSRVEHFIQAVGSYEDKIFQKRARLHQRQAERIKREKAQAKRGDDLDPHVRDDLIVPIQRFQGSRLASGAVPVPYEQNGSHKDNKERNSRARKAARVSTSGSSIASALVEAENDLEAQECENKEELKSMLKDALREKSDIFNSDNPEEDKVKLGEPGWRERYYEEKFGARTPEQIEEIRRDVVLKYTEGLCWVMHYYYEGVCSWQWFYPYHYAPFASDLSGLGQLNIKFELGTPFKPFDQLMGVFPAASAHALPLQYRRLMTDPNSPIIDFYPTDFEVDMNGKRYSWQGIAKLPFIDEDRLLAEIKKVEHTLTPEEARRNSIMCDMLFVNGSHPLSPYIYSLNSKFGHLPDKRRNEIKEKLDPSASGGMNGYITLCSGDPCPPIFRSPVDGLEDIMDNQVICSIYNLPDHHKHIAQPPVGVIMPKKIVEAGDLKPPPVLWHEDSGRRPHDNSNRQNPSGAISGRQLGEAAHRLVINSLNAQGRGQHSGTSMPYRTIMNGLHHLDVASPVSNQGMRPQVGQSAGPPGWYVPRGSVSNGQPPAYASSGSGHYQYESSGHSQYEQGNHGRQQSHPYARDGFHDTRGRVPPAYGYQQSNMYPSGPGLYGQPPSAYPGVHGGGYQPPPYGGGQQWQQQSYSSYAVRGPYGGRPPPTRADSGSQQPQNRYGALDRSNNRRPSSGYRR

SEQ ID NO: 68039 - protein, 444 aa, Zea Mays
MMARGAVLLLLAAAFAAALLPDAAESRILLTLHDFGAVGDGVADDTKALAGAWTAACAAADDVILNVPAGGTFRIWPLTLAGPCRSEIKLLISGDIVAPESPQDWGQGQSDQWLHFHKVRDLTVTGGGIIDGRGQQWWAQSLARAQPAPKAVHFEDCQGISVKGITLQNSQSYHLTFTRSSDVEANYLRVTSPEHSVDTKGIHLVDSYNVHVMDNLISTGSADEFGFQKTISQQCDDCVSIVGNCTDVRLRAISCGPGHGISIGTLGVNSSVDYVEKIKVDTLFISNAENGVRVRTTENGGGGGFARKVKFESIVMRNVTNPIIVDQGISSDDPPPSSPEAVALAATASAAVQVEKINYIDITGTSASERAVTFSCSDARPCRRLSLDNVNLTQVDGSEASSYCRQAFGRSVGTVVPESCLSKEDFVHHVPPQRSEEDGEDSES

SEQ ID NO: 68040 - protein, 122 aa, Zea Mays
MTLLKCECSVSTTLPRKLLGNHTTLLSSVTGTSTILLDLTLIVSLKFTFVVVYNQISFVDLEKELFMKSFIASYGRNVIAITQMKHSTICQLQQNYCLDQNNHSPNDSPGDEGQDLPSFESP

SEQ ID NO: 68041 - protein, 242 aa, Zea Mays
MAAATCAGFFPRRRDQGPSFIIVRPWQHHCSRKEPAGGGGYDDMAEFDQALFLYLNSSQDQASVIQDQPQTLNIFPSEPMHVVEPAAPKESMGATTNNTAWNNAGAGPSKQPPSNLPSRTTATPAGPRKDGSKPPAAVKREGSSSGGAMGSGTPSTSNQQEGPTRTSDAKTLRRLAQNREAARKSRLRKKAYIQNLETSRVRLAHLEQEVHRSRTQGAVFGGGGLSGSNGGLLSPGTCMHSN

SEQ ID NO: 68042 - protein, 402 aa, Zea Mays
MELSMSGSSLRTFGRCVTFLARVASELVLQAHPAKLEMHTLNSSRSAYASISLARDFFDQYHLDAAASAPSSTPLQCSVLLKSLLAVLRTPHAALDRLAVSLPEPDAPKLQITLHCLNGVRKTYWIVCSAEPEVQSLSLDRGRFPSRLAIRPRELARLLSNFQSSLQELTIIATDPASGLPDASGDVGGKAVELRSYNDPTKDDCDTRLHTQLWIDPAEEFVEFVHAGDPVDVTFGVKELKAFLTFCEGCEVDILLFFEKTGEPVLLVPRFGLDDGAASDFEATLVLATMTVSQLSDSDDAQQPATSAQNAGEPGAAAPTLVPENVSNHTKIWSELSGSTPKSIEANRENHAQKKRNASTNMLNDMSMLPNVTNAPSKPPVADNANNIMQPLQMDHMEERPG

SEQ ID NO: 68043 - protein, 531 aa, Zea Mays
MRWMQRLCESTEAPFSSASSKYTYYHSQKIPVVHLDMLNASFFGHYICYIKGYQGRWYKIDDCKVMVVDEEEVHAQGAYMLLYSRRTARPRSLLTVDESVKQQQQCKSLLSNGQSHMILADTTLNCESSLKIPEDMLQQDCESNNESLHEMGIKDQESDMDLRTSIEDDKFISNGNLRLPGSLVSHVLEDTRAPDSVLEGSVQLGPPLEGGPTTMSSVQFGNCTSEASSEHSFAEQCEVPASCIDSVDYMDVDTEAGAEVERCDEQRPVLNDSVGRPNNNTATPTANGVPGEPKPSFSSGFFDKPSRKRSSFTEEASAGSPRKLNGYCNGHISSLEQEVLCNSGSEKCNGDAPVTSSNGKFCAANVDMQSIDDSLHEDKRDVPSVSHGFEPRPYKLQSDSNNNCGRTCNGKPKACQGDMSFLPRGFLGRPSSRGISVKADDSLPFSTDASSSFGNGNSKSSNNSSSMGGLSPGFLTRHRRESTVIGTSSDIPMDKKSNGATVVPDHAEKKVSDCTTNGSSFQIRAASDHLD

SEQ ID NO: 68044 - protein, 301 aa, Zea Mays
MFSAARSGTTVTFVIIDGWVVTVASVGDSRCILESAEGSVYFLSADHRLDANEEEVERVTASGGEVGRINIAGGAGIGPLRCWPGGLCLSRSIGDIDVGEFIVPVPHVKQVKLSNAGGRLVIASDGVWDALCFQEALNYIRGLPAEAAANRIVKEAVTSKGLRDDTTCIVVDILPPEKLSPPLKRPGKGVIKTLFRRRPSDEMSEDQMDRGCLEPDVVEEIYEEGSAMLARRLNINYPSGNMFKLHDCAVCQLEMKPGEGTSVHGNMPKHSRVDPWGGPFLCSSCQLKKEAMEGKLHSRTE

SEQ ID NO: 68045 - protein, 574 aa, Zea Mays
MVIRKFGITKGKRRLCLITGAQELLRDPPEGTKEDQVDTIANMLKKHNIKMECIIFREPGVHHNDVMEENDRLLHQFRNRSVAKVVQVDNPTSLLGALKTRNVLPVTVFRGDLEVNSNFKIKVWVYKKTAEEKFPTLKKYSDKAPPNDKFASHEVKVDYEYKSVVEPDKVVPPDQRIKGYLYGPQVIPVSNAEWEAVKFKPEKGVKLLGFTDRSSVPRHQFMKDVCLFIPEPGNMKASLAVSAIARAMHQMNKVAIVRCVWRQGQGNVAIGVLTPNISSVNNIQDSFYFNVLPFAEDIREFQFRSFSSLPSSSQPTEEQQEAADNLVKMLDLAPPGREVLKPEFTPNPILERFYSYLDLKSKQPDANVPPLERSLRRITEPDPDVVGQQTQLIQNLSKAFVLKDNPKKKKARTQDMLAYTGAGDQAKSVEDRVLENTHPSTENVVAIRDSNPVQDFEAMLAKRSSSTWTQKAIGDMQNYIAALLQNSSDGGNYQKALECFASLRKACIIEQEPQEFNQFLTKIYERLKEGDAAKFFQLLSSKNISLINKEEAPDSDVTEEMARSFYLKREKASQ

SEQ ID NO: 68046 - protein, 634 aa, Zea Mays
MLHELLLALLGFTGDFVLDVSLPRRRAASQDAGEDGNGDGEVGPSFRLAPDLTFLQPSERTAIERLISLGFYYRELNRFATESRDLSWIQSSIDVSSPHSDNTQKGKVRKGSVYRRAIANGITEILSVYRSAVLQVEQNLLSDPLPILATVTHGLNKFEVLLPPLYELVMEIQHKDIKGGQLLNLLHKRCHCGVPELQSCIQRLLWHGHQVMFNQLTSWMVYGILQDQYSEFFIRRQDDRDVENESSQRDVSDKLKQKLAKDTSLASWHTGFHVSLDMLPEYIHMRIAESILFAGKAIRVLRNPSPSATLQDPVIRTVGSHGMQSSVGGSGVPKELANFSNIRAEELLPQAEADKIDSMLKELKHSSEFHKRPFESAVGSIRTIAANHLWQLVVVRADLNGHLKALKDYFLLAKGDFFQCFLEESRQLMRLPPRQSTAEADLMIPFQLAALKTIGEEDKYFTRVSLRMLSYGMKSSTSQKDLQKPNASELPSQGKAASELTLDGWDSIALEYSIDWPLQLFFTPDVLSKYRKVFQYLIRLKRTQMELEKSWAAVMHKDHADFSDYCKDRKNNSATQLRRQRSKPLWRVREHMAFLIRNLQFYIQVDVIESQWNVLQSHVQDSHDFTELVSFHQE

SEQ ID NO: 68047 - protein, 831 aa, Zea Mays
MAGVPPPPRQLDVRRFAAARASELRSLYAAVSSRLDDAGGRHQPRSARRRTTGHLPSKRRRRGAGEVGPGDDDGLPARKQSRRVRRRRELAANPAEGFSVAGDGARRLRTHLWYAKRFSMERRWTFILPVGAQGRGKGSRSVLKRLKNGTTIHDAGYFIPIELDGPEDALLSVLRMVLRPSPAEKTPDLKHLQDQVMRGVCYENAMLWDVRSMHSQIVGPVTYMWRPFSRADDKSGIEGDQCTSHCIHDESGNSSRRQLWIWIHPAALDDGISAIQFACERQIQDSGGVVKCCSLEGKIGRLEVNGCKAMQSLKKILHPTSSSKINTISTSDISASTDTLLDSCIAPHLLKASVISNAEILQPGAILSMSEVWEKDVAPNANEASSEVANILPLMWMHPGKHDILLSDCRELWDSRQTINPPVSDEVLCKEKHSERIKFFCLDSGNDQEQTTQEKDNFIRSCPVILLKHAREGIPSLGWSIILPLSWVKPFWLFLVSHGAHAIGLRERRWIAAKLRMPCFPYDYPDSKAYASYMSKEAAGFDKVVERRPVAKRPPRVPVPPLWHCIMTCFRKDYDGILGVLEVDDLVRANMVLPKNSSAHCESGDAEPSQANVASLQLHVPRTTQMLRQYVEEFDRKYLSSSSDMKVDSDEPNLASDNTVGMTRFASELCLTRVLIRAFKEGSFEEGAVVCAPLPAELSAWKIRSKEEEEECVEKWELQLPQSHVSSYFSWFDPSTSSLQLPTDGVAREAFRWPIGFVTSGFIHGSNGQDAVAVAFCEAKLLAALRRQQWTHGNLQSREVCVLVRNARSAAYRRALATTVLEHQESDLAFL

SEQ ID NO: 68048 - protein, 235 aa, Zea Mays
MRVDHRSFPLRPPSQNPMAHLPSSPAAAVPTGHRVSPSPHSCRSLPQLKTVLLSIGAAAGPPRRSWRGMESVAAAPTGSDNAVMKSVNYLPNALTKVEGEENGAFTGIWLDDEGFVAEGSNMNVGFVTKNKELLMPRFDKILSGCTARRVLTLAEHLVAHGKLSRVISRNVSVEEGKMADEMMLIGSGILVKPVVQWDDKIIGSGQEGPIAQALYDLILEDMRSGPPSVRIPIPY

SEQ ID NO: 68049 - protein, 186 aa, Zea Mays
MSSPAAATLHPSPTFLASGPRYRRRGHPSSKVSFRRLAPRLKVNALFGWPRGDTTARELIPPAESYTLSGSASEVGAKPREVSISVASSIMDIPAADWDACACDLDDPGNFNPFLTYAFLSSLEESGSAVKETGWLPFHIVARDENGHIIAILGESLCLINHGQKLTTTMALNTIQSSSLVCLLLQ

SEQ ID NO: 68050 - protein, 599 aa, Zea Mays
MQHLGAMFFELGRTMMMLRTGQSPSEAFVNSGPAVYINSTGPNPIMVQPSFQNTPPFGVSNIPVLGGISGAFGIVDPSRHMNIPSNGASATSGSAAGTTTGSEGAIHGNRQDAARTQGGNPPGFLAATRGLPTRTVVAAVPARSSAVGNGAQGNSTSAIPQASVGGVSGVPLIAAQVANALANAPSQVSLSTQSAADQGFHLTTDNRADVLSSSTPATTPQNGPSGTSGSSLPSQDRNTLNVPSLDSIQQHPQLGDTCADTADLSGDATAISTHDAPSNPSVDSSVLKNKSSDEVGSQTTEPSASGSAEPLGLGGGLIPIPKRRSKAVKPSGSTTDPSRDLSSVSQNQDPISVAQQFLEGFASRNTNGSRSNTLSSGPPSSVPQATEVPPRRQGGGQPDIGSMISGMLNNPVFSNMLSNVATQAGGSSADLKSVMEGLQSPAIVDTISNIVQNVDEQDLGAMFGSGRGQGGMDLSRMLQQMMPVVSQALGGAGGRSAGANGGQHRSRPQRIDGEGNAPASSSQIDLHEARQSIEQHESPENIFRAVLETAAQAHGEDNSIQGMVEELATDQELADDYMKLLMEQVRQRIQSESQSGSQP

SEQ ID NO: 68051 - protein, 738 aa, Zea Mays
MVEYLKGKVLRGVSAAKYHTIVLGADGEVFTWGHRLVTPRRVVVARCLKKGGNTNLKFHRMERLQVISVAAGTTHNTALTADGALFYWVSSDPDLKCQQIFSMCGRNIVNISAGKYWTAVATSTGDVFMWDAKKRKDETPIFTRVHGVKRATFVCVGETHMLVLSSIYHPEYPPKPKSQGLKSMLEWNGGTEELGEDILFDDVQPNSGLSGSSGEMSKGVPSLKSLCEKVAVEYLLEPKNSIQLLEIADSLEAKELKKHCEDLAIRNLDYIFTVGASSIMNASSEILVNLEKLLDEKSSEPWSQHRLPTMTATYPAVIDSDVEEDEAREFPKTRKCGKSASRPSAMSSDDSFLQKDCTAEQAVSKQIRALRKKLQQIEILEAKQLAGHQLDSQQVAKLESRAALEGELAELGIPSEIYSTSSACPAEGRTNRKPEVSKKQKRKNKQSTQTPSVKNEPGQQIPITELQVLQVNVSAEKEAYAADPIKPMEAAAFSNTKDTASPPEKKPSQPTPSKKKNRKGGLSLFLSGALDDTPKPSLPAPAVPATPKPEGPAWGGVKITKGPASLRDIQTEQSRTNEPASAKAKDRHENSPDSAGRATRLSSFIPDARSSPVAVVAPARAAAAPSSEGDRSTPPWSSSATSPNVSQPSLRDIQQMQQRHHGGVSHSPKTQTSGFCIPPHGGAPEAAGGGGVKDNVPNRWFRPETDAPSSIRSIQIEEQAMKDFRRFYSSVRIVKPQV

SEQ ID NO: 68052 - protein, 134 aa, Zea Mays
MHQGYPKETLVHFLKAREWNVAKAHKMIVECLNWRIQNEIDSVLERPIAPVDLYRSICDSQLIGLSGYTKEGLPIFGIGVGHSTYDKASVITLMLAICLVGYNYSQNHKSVWFEAISTKPNKGFRLSSSDSPSR

SEQ ID NO: 68053 - protein, 224 aa, Zea Mays
MVMDILGPSLWDVWNNNSHSMSVEMVACIGIEAISILEKMHSKGYVHGDVKPENFLLGPPGTPEEKKLFLVDLGLATKWKDAGTGHHVEYDQRPDIFRGTVRYASVHAHLGRTGSRRDDLESLAYTLIFLLRGRLPWQGYQGENKGFLVCKKKMATSPESLCGICPQPFRNFVEYVVNLKFDEEPNYARCISLFDGIVGPNPDIRPINTDGAQKYIRLGRREVA

SEQ ID NO: 68054 - protein, 902 aa, Zea Mays
MPLRLEIKRKFAQRSERVKSVDLHPTEPWILSSLYSGSVCIWDYQAQAMVKSFEVSELPVRSAKFISRKQWVVAGADDMFIRVYNYNTMDKVKVFEAHTDYIRCVAVHPTLPYVLSSSDDMLIKLWDWDKGWVCTQIFEGHSHYVMQVTFNPKDINTFASASLDRTTKIWSLGSPDPNFTLDGHQKGVNCVDYFTGGDRPYLITGSDDSTAKVWDYQTKSCVQTLEGHTHNISAVCFHPELPIIITGSEDGTVRIWHSTTYRLENTLNYGLERVWAVGYMKGSRRMVIGYDEGTIMIKMGREVPIASMDTGGKIIWAKHNEIQTVNIKTVGAGFEATDGERLPLAVKELGSCDLYPQSLKHNPNGRFVVVCGDGEYIIYTALAWRNRSFGSALEFVWSSEGEYAIRESTSRIKIFNKSFQEKKTIRPSFSAERIYGGVLLAMCSSDFICFYDWADCRLIRRIDVNVKNVYWADSGDLVAIASDTSFYILKYNRDIVASYLEGGKPVDEEGVEDAFELLHEINERVRTGIWVGDCFIYNNSSWRLNYCVGGEVTTMYHLDRPMYLLGYIANQSRVYLIDKELNVIGYTLLLSLIEYKTLVMRGDLDHANKILSSIPKAQYNSVAHFLESRGMLEEALEIATDADYKFDLAVQLGKLEVAKAIAIEAQSESKWKQLGELAMSTGKLEMAEECLLQAKDLSGLLLLYSSLGDAEGIEKLASLAKEHGKNNVAFLCLFMLGKVEDCIQLLVDSNRIPEAALLARSYLPSKVPEIVAIWRDDLSKINPKAAESLADPSEYPNLFEDWQVALTVEKSVASQRGNYLPADQYLNHAEKSDMTIVEAFKRMQVVQHEEPEDVAEENGELDQQAFEETEMQNTDDDADEPEETVLVNGNKGEEHQVLTQHE

SEQ ID NO: 68055 - protein, 1663 aa, Zea Mays
MAFFSNSGSKADSEGYNLNEKADDDGIHESIRDGNDGLNSRQWNLNEKAEDAYHSEAEQYESGQSGLYASRQHVQRGGRSSGGPWGTNFLKDSRSKQTAKEVASNSGRGMDAANSHDDMDGSREDDELNRANGEVPAEEMLSDDYYEQDGEDQIESLHRGGMKQSSCSTSGGAAKSGSRQMKKMSKYNAYDNDEYNDENDDDSDADEDDPADMDFEPDGETDKATDKDKFMDSENSDGDDDDDLELSDDEDDFVENRRQPKRLKIVATKTSKGGQLPMPVQPKRGVSHSDEEYFSGKDSDVPSDSDFKHIPKKPDRLHQKPVGRSDVAPISSHNELRTSGRRRTVKKISYAESEESDDSEEKSNKRQKLIKEEPEEEDGETIEKVLWHQPKGVAEEAIRNHRSAQPTVASLTSDFDQQWDELEFYIKWKGQSYLHCQWKILSELQSVSGFKKVINYTKRVSEEQRYKRALSREEVEVERIFADRVSKADGDDLVPEYLVKWQGLPYAESTWEKDTDIDFAQDAIDEYKAREAASAILGKTVDFQRKKSKASLRRLDGQPEWLKAGKLRDYQLEGLNFLVNGWRNDTNVILADEMGLGKTIQSVSMLGFLHNAQEINGPFLVVVPLSTLSNWAKEFRKWLPNMNVVVYVGNRASREMCQQHEFFSDKKGGRHVKFHTLITTYEVILKDKAVLSKIKWNYLMVDEAHRLKNCEASLYTTLLEFSTKNKLLITGTPLQNSVEELWALLHFLDPVKFNSKDSFVERYKNLSSFNETELANLHKELRPHILRRVIKDVEKSLPPKIERILRVEMSPLQKQYYKWILERNFQNLNKGVRGNQVSLLNIVVELKKCCNHPFLFESADHGYGGDSIGDRNKVERIVMSSGKLVLLDKLLVRLRETNHRVLIFSQMVKMLDILAEYLSLRGFQFQRLDGSTRADLRHQAMEHFNAPGSDDFCFLLSTRAGGLGINLATADTVIIFDSDWNPQNDLQVLDHLVIQKLNAEGRLEKKESKKGGPIFDKNELSAILRFGAEELFKEDKTDEETKRNLESLDIDEILERAEKVETKGGEGEEGNELLSAFKVANFSSVEDDATFWSRLIQPDPADIVQETLAPRAARNKKSYIEDPQLDKNNNRKRRAVETQEKPRRLSGRTVETVNSLPLVDGAVAQVREWSFGNVPKKDASRFVRAVKKFGNATQIGLIVDDVGGVLAKVPHEAQIELFDLLVDGCQEAVKENTDIKGTVLDFFGVAVKAYELLARVEELQFLAKRIARYKDPIKQYRIQLPYKKPQWSASCGWTETDDARLMVGIHWYGYGNWEKIRLDPKLGLTTKIAPATLGERETFLPRAPNLDNRASALLQKEYAKFSGKSLKVKGNTRQTVNNDSNSGVRSMRGRQKDVPEKDDNKPNKDDIQKRRVIVEAEAREEGEISESEAETRYRQDKEEKWLEWCSEVLDEEQETLKRLDRLQNTSVNLPKEKVLSRIRKYLLIIGDKIGEVVRQHSESYRQSRMVMRLWNYVATFSNMSGEQLHDLYMKLSQDQLEGGVGPSHGGNFTSIPPNKGGNSNQLHPSRNQRPTRSLQYNSESFHNESSGSSEAWKRRRRADTDNQFDTQPLCQPPIMTNGNRLQESSSSAGILGWGPVEIRRYGNERPKRAVHPSHFPTGHGPLL

SEQ ID NO: 68056 - protein, 69 aa, Zea Mays
MIMMGEISANNYGNKAHWHVPILAMTADVIQATFEKCMQCGMDGYVSKPFEEQQLYFAVAHFLETDETE

SEQ ID NO: 68057 - protein, 104 aa, Zea Mays
MDQAVEPRSRDRVSRMFRTGAEMGLTVCRSWAFNDDTYNALQVSPGHFDERIFKEWLVAVKVISSWSGSVIMLMFDPYLNTDASTMSPFEHDEPRWYLPSMWYL

SEQ ID NO: 68058 - protein, 497 aa, Zea Mays
MVTCIEDLQEIVNCRKHESLTVQTFGTRIEKLHREKYLQLCDSVDMDKVDSASTIMDEEDNVVRSLRASPVHPIKDRTSIDDFEIIKPISRGAFGRVFLAKKRTTGDLFAIKVLRKADMIRKNAVESILAERDILITVRNPFVVRFFYSFTSRDNLYLVMEYLNGGDLYSLLRNLGCLDEDVVRVYLAEVVLALEYLHSMHIVHRDLKPDNLLIAHDGHIKLTDFGLSKVGLINNTYDLSRPVVSGASLYGDDEPQMNEFEQMDHRARRQNRSAVGTPDYLAPEILLGTGHGCSADWWSVGVILFELIVGIPPFNAEHPQTIFDNILNCKIPWPHVPEEMSFDAQDLIDKLLTEDPHQRLGANGASEVKQHPFFKDISWDTLARQKAAFVPSSDSAFDTSYFTSRYSWNPSDGNIYEAYEFEDSSDNGSLSGSSSCVSNRQDDMGEDSDGLNEFESSANVNYSFSNFSFKNLSQLASINYDMLTKGLKDDPPPRTET

SEQ ID NO: 68059 - protein, 69 aa, Zea Mays
MQRNMTNGKQTEGWGSLAHHSSCSSPAEVGSHSTVQPGGKLNDQVTPATISSREPVKNYATSKDESTNT

SEQ ID NO: 68060 - protein, 712 aa, Zea Mays
MEDEEMEKKVQQYLQRKGFRLTELALQEERNRLSTSAISDVALARSDNDPARYYDGYSRLRTWAYSSLDQYKHELLRVLYPVFIHSFMDLVAEGHMQEARSFFHTFREDHEVMHSRDLQKLEGVLSPSHLEEMELARSFRKNKFKIKLCEYSYELLLQYLQKTQALVVLGVINEHITFEVSPGQPSLISDDADVVALIGTSKDLAKQINQKEVHWGLLEDSVEERMEKALAESDKIEAESKDADAEDNKKRNAEGGKQGASLKKAKKDKLVGATGKSVRTETSMVSVAPRVKPELTLPATPVEVEQSILEDLRNRAQLNSVALPSVSFYTFLNTHNGLNCSSISHDGSLVVGGFSDSSVKVWDMSKMGQPAKISRSQGENGPSQGERISTLDEGKRTYTLFQGHSGPVYSAAFSPFGDFLLSSSSDSTIRLWSTKLNANLVCYKGHNYPVWDVQFSPVGHYFASASHDRTARIWSMDKIQPLRIMAGHLSDVDCVQWHVNCNYIATGSSDKTVRLWDVQTGECIRMFIGHRSMVLSLAMSPDGRYMASGDEDGTIMIWDLSTGRCVSPLLGHSSCVWTLAFSCEGALLASGSADCTVKLWDVASSTKTLKTEDTKGSSANRLRLLKALPTKSTPVYSLRKTRTGPVLTLSSEAGISETAYCTANIFISNSNELSMYCRIEHRRFVVAGCDIVTILLGCDLMNATKCTSADRR

SEQ ID NO: 68061 - protein, 524 aa, Zea Mays
MAASPSSPLTAPPEPVTPPSPWTITDGAISGTLPAAEAFAVHYPGYPSSPARAARTLGGLPGLAKVRSSDPGARLELRFRPEDPYCHPAFGQSRASTGLLLRLSKRKGAAAPCAHVVARVRTAYYFEDKTGHDEADGDVMMLVPPLFSVKDRPTKIALVPSSNAISKTMHRGVVQERWEMNVGPTLALPFNTQVVPEKINWEDHIRKNSVEWGWQMAVCKLFDERPVWPRQSLYERFLDDNVHVSQNQFKRLLFRAGYYFSTGPFGKFWIRRGYDPRKDSESQIYQRIDFRMPPELRYLLRLKNSESRKWADMCKLETMPSQSFIYLQLYELKDDFIQAEIRKPSYQSVCSRSTGWFSKPMIKTLRLQVSIRLLSLLHNEEAKNLLRNAHELIERSKKQEALSRSELSIEYNDADQVSAAHTGTEDQVGPNNSDSEDVDDEEEEEELEGYDSPPMADDIHEFTLGDSYAFGEGFSNGYLEEVLRSLPLQEDGQKKLCDAPINADASDGEFEIYEQPSDDEDSDG

SEQ ID NO: 68062 - protein, 640 aa, Zea Mays
MDDYCSQVPVGHLVFMVHGIGQRLEKANLVDDVVDFRRVTANLAERYLTSYQRSTQRVLFIPCQWRKGLKLSGESTVEKLTLDGVKGLRVALGATVHDVLYYMSPIYCQHIIDSVSNQLNKLYMKFLKRNPGYSGKVSLYGHSLGSVLSYDILCHQESLWAPFPTEYLNMETSDRNQGAKSANEADLHDSGAKDHDTSSLGYSCADNENSVIDEDSTRTDVSCMDSILPSCVLEDSPNNHDTVVPRGAVVADQNGEEKKVENYQSVYAEEGTTSGVITKKAEGSSISRSAKEVHEEVLDKEKLMVLAKDKLILSLEEEVKCLKAKLDQLEQHNHLVTENTSGVEYHEGQNYNHALNSGKLFVAQESTNQSYSPQIKYTKLNFKVDTFFAVGSPLGVFLSLRNVRIGIGKGQDYWQDKNVIEEMPCCRQMFNIFHPFDPVAYRIEPLVCEDYLKKRPVIVPYHRGGKRIHVGVQEFREDISARSQAIARQLKSLKVKAVAAILALSRNDTEEDGESANEKEKSYGSIMMERLTSSPNGRIDHVLQEKTFQHPYLSALGAHTNYWRDHDTALFILKHLYRDIPEDPPSDVIERMPIKLFYERDPVEEETPVTFSDHAAIKEFCRKVKAYSRKMEDDANCQAS

SEQ ID NO: 68063 - protein, 63 aa, Zea Mays
MVDLLDVTLSGQPLALSWKCLPMHVACACRPLPSWASAPVGVPPPVALAPDQRRRRADPLGRD

SEQ ID NO: 68064 - protein, 388 aa, Zea Mays
MASTQAEAEAGAPAPPEAAEAKEKGKQGGVLGRVWRALFGGREDFEKRLQYLSKEEAAVHARMRRRTQFSRRAVRNLIVLAVVYAIMTTRNEDLTWQMRAIRVLPMFILPAVSSVIYSTVVNFTRMFEQKDQKTLEKLRAERKAKIDELKERTNYYLTQQLIQKYDLDPAAKAAAASVLASKLGEETGLKVHVGEEPKLDAAVARSNDVEIVPSDGLRNRKQPSARGSRTGSPTSHTPAQGTETNLPPAPASAGLETAPAPVVVEHHQGSGASDGGGWIAKIAALLVGEDPSQSYALICGSCHMHNGLARKEDYPHVTYYCPHCHALNTSKQSMGQYSGSNSGRSTPVVLADGLSTSSSVQETELSNLTTLQELPEEGKTDKQQVEAS

SEQ ID NO: 68065 - protein, 718 aa, Zea Mays
MAQMKKTSFSLQMAINRLQIVKNEKSQIEEKKELCEKDVQRLMKEKEYSKSIIMNLTKDMEAMNRLHEQQLEQIGRKAKEMEEQLTTRVKEVEYLLLQSNKKVEELEIASRLKSQLWDQKENIFQSYMDNQQLVIKDIRILSQSYENDMYALQMQWRNEISNLGSGLKCLVDAAENYHKVLTENQKLFNEVQELKGNIRVYCRVRPFLSGQDKKSTTIDYMGENGELLISNPFKQGKDGHRMFKFNKVFTPFASQAEVFSDIQPLIRSVLDGFNVCIFAYGQTGSGKTYTMSGPTTSKQDWGVNYRALNDLFDISLSRRNAFSYEVGVQMVEIYNEQVRDLLSNDIAQRRLGIWNTSQPNGLVVPDASLHSVKSTSDVLDLMEIGQANRAVGSTALNERSSRSHSILTVHVRGMDLKNGSTSRGCLHLIDLAGSERVEKSEVTGDRLKEAQYINKSLSALGDVIFALSQKSAHVPYRNSKLTQVLQSSLGGQAKTLMFVQINPDVESYSETISTLKFAERVSGVELGAARSNKEGKDIKELLEQVASLKDTILRKDMEIEQIQVIKDKVKSPNLLLDRNVPGLTKTTANQPSQLLSGERMLKSSDRVLSDRQSYGEVNVDPNHHVMDTAPVSIDEAGYENNASDDGLSGETENDNSAAEMTAERLHRFPSRISRFTLTKNGQPSMSRSNPKDAKTPSNTKAPSSRLTGGSSARSKRRQ

SEQ ID NO: 68066 - protein, 485 aa, Zea Mays
MLWPEFLDCTARTSLDMLSKHYYQATGSWVVFFVPENDADMTAYNDFMSYLGDKQRAAVCKLGESSTLFLVPPSDFSEQVLRVPGNVSISGVILRFQQSNPDYSSPNRKPLDRAHPSSASNFNTDVRNCEDLHALRRLNPSDISTFPQGPDYVCSSGGSYTPANADFIPPYKPESAPPYVVPQSPQERPPAELPMGIAQGQHQQLPNRLPSGWSNNLDNPNPNPGSGNFSLAQGAISNRTQDPYTFAPGVVSTGTASGYASGEASNSMSWASMQYNSQQVARSDQPTIPVSLPPDQLAQLAALLARQNQPRKVGLPVDSSNNLSGFIQSPNPHGHATMMPGNSGSIPIQNSLPPVPSMQQLHANVPVSPIGSLPANPFNVPTSAPVLCNSTSPMLPSHALVNPAHSSMPMRPFIPPLPEGPPPFQQQTSSAVTVQPLGPSSQQSSQQLLAQDLDGDPQKRLQATLQLAATLLKQIQNQSNPGGQK

SEQ ID NO: 68067 - protein, 81 aa, Zea Mays
MELLPCARPALARPSPRSPAGAPSSSSMAVAPCRGCSHGHQCSLCSSPWLSHPLVVELTVGICFVAEGLKRRNTFIRSVQK

SEQ ID NO: 68068 - protein, 494 aa, Zea Mays
MMVSSTRVWHNGLGNTQSSERAFNACDATMIQCALVTCGAVIEACHKPANALCLVRILDFTDHVWTECFSNLYGRWMHLDPCEGVYDNPLLYEKGWNKKLNYVIAISKDGVRDVTKRYTRKWHEVLSRRIITSEETVVSVLSSITGKYRTGLSPDALSVIENREKEESEELRKSAYLQVETALSLPGRLSGSVEWRKARSELGQADSLSCSSCPIRKCVDGHVSNIYDALSAFLSHFFDKKIPKERIIEAFEALKTLMLTLKSSNFKSRSATLDQKAHHLFEEIFPSIERLLSAISLKAELGTAGYQSVTVSGNPVHSSLALPVALDAVNEILSNYKNNTFFTEGNHFPRGNRVCSGSVLASREQLPIGIATAAFDGIHSSKWEEPDGAKGCWLIYTMQDGKSCELESYDLMSANDAPERDPMDWVLEGSADGGSTWNILDARNSEMFESRFLRKTFTVDKRYKANAFRFLRVRDSHSNPRFQIGSIDLYGKTI

SEQ ID NO: 68069 - protein, 83 aa, Zea Mays
MEKGAGTRRWRLVERGSDRLAFINSQTRSLSCDPIPDSPCRPEFEGSAGIQRADGRQEMKASTLSYEDELFRKFKMGSSVPEI

SEQ ID NO: 68070 - protein, 1264 aa, Zea Mays
MPPGGRRGAKQRPNWTREPQLGDLVLAKIKGYPRWPAKISRPEEFNHEPTPKKFFVYFYGTDEIAFVPLADLEEFTEKTKNDLLDRAPNMKVKRKYVQVFNDAVEQICKAYNELPKTSEAANGALPDQSEKPSEHLVRSQDVGEIPGLGQMEGDSPTDYSHTSAKRPGTEEDVKDDGHEICDHSLAVYQKKTSLLEDPKHPMTKKSAASKSSLDIYMEQEHSPTSVRAEREAEEVKIEKESCPLDGFILEPNLEVVCALEVPKKSKSNKPLRNAERKENKRAGIGSPIERIVAEAASDVVLNMSADKESREFKKSKIMTKQSLTTDSEKMDYNKIVHGGPDEQLTGKSSAGFSSNKKSLPDSGQHKMDSSADTRPGKKPRLMDRAGETDKTVDKSEMKSNIDYGKHYAVKHERPTSMETCKNTILKTSTSDDRALRSGGVVSPISRLHSEVMEPACGSVTLSTVADSVKKGSSMKEDASRVDRQLVKPKRRACRFDEDEDEGQRTPLHRTSAKSLSTHIVPTEKAGIRGKFSSHVGNVFGKKLGPAREEKSRSVRMSPVKHEPIFSSPSQDKVHARHQVVEKRLITGLVETPAVIGNKMSLVDGKSSAQVKMPASSEVKKLRSSSSKPSHLTSGNSHSRNYPAPEKIPLLPQPEETKAKSKLATSVEHKVGTTLSTEQSGKRDHLKEERSSYVDKAVSSEPNPGSAKSIKHLIAAAQARRNLMASVHAKFDGSSTDNADITSTPYGLPGLSPSPVFRIPSPPRIAFPGSPGQRILKSPIEFDNGHGKSPKSRQASGSPSGGTDAAIARDALEGMIETLSRTKDSIGRATRHAIECSKYGIAGEIVELLIQKLQSEPNFHRRIDLLFLVDSITQCSHSQRGVARASYVPTVQAALPRLLGAAAPPGAGARENRRQCLKVLRLWLERKIMPEDILRKYMGDIEVPNDDTSTTLMLKRPSRAERSVDDPIREMDDMLVDEYGSNATFELSGILSSKVFEDDEDFPKNNGSSPFVSQARPVENDVIRKTEDTIAPVYVEEHIIIVENVTTDAAMEDALELPGNKQQTDGAVLIEHDSIQDPGSEQAIDQNDFPSLPDGPPPLPSDSPPPPPPLPPSPPPVTPPPPPPPPLSPASPPPPPPPPLPSGPPPQPAPPPLATQVTPLPSIPPPVPSSPPSLSYQPPAPEYFVTANGDQLTQMTGNILIQAIGNATTFIPSGPVNGQAAVNFVTSMQAEYGNNNIFMAPQASNVISKQSEPLSIRGTLADGIW

SEQ ID NO: 68071 - protein, 358 aa, Zea Mays
MEMVVAAPALPAEVERALIRDITVAADAHAKEGDTFFLITTRWWQSWIDYLIQDLTGATSNGSHHHEFGSKTPRRPGAIDNTDLIDDVPLEVSNMEIEIHDNLVEGRDYILLPQQVWEKLHGWYGGGPTLPRKAINTGFSQTDLAIEVYPLRLQLILMSRGERTFIRISKKGTVGQLHKMACKVFDLAPDEVCIWDYYGRTKHSLMDSLDKTLDDANIQMDQNILVEVTTDASGSLDGLVKRNNFFESDAPKSGLPDENFAANNYASRSYSSSLTPSIYLRSPNGDLDNVHGSSGMITRGSPLGLTGLLNLGNTCYMNSAIQCLVHTPQFTKYFCEDYHREINRQNPLGNVSCRVNLH

SEQ ID NO: 68072 - protein, 57 aa, Zea Mays
MYFSIWRLEREQQRETDVEENHRSNWLGLRLGIWQTGCVSTKIQNSLDQKLQLPIVG

SEQ ID NO: 68073 - protein, 317 aa, Zea Mays
MHKIGGSSNSTSGRVRAGEGDGDPGGHGARGLPERRQLRHHLGHRQQRLLLRGQRHGHQALLAGHADAVVQDPPPRARAGGGGGTAERQRGRAAERRAGGAGRDRRERLQLRLLAGRAAGRGAQVRAGRGGQAGGRHGGAHRHGGARLRGAREPTLRLHAAVPAAVPRQRRVVGLRPGHGLPRLVQPLRPVPQPGARGAPRQAPAPAPGRDHRLRRLVRGHDEHLPGPREARVHKRSADLLREPDRAVWQARVLRLQGPVHVRVLGRDAPDGGGVQGDRRRGAARAARVPCSSRRHLSSDMTLRRFIIGSFKSGGNI

SEQ ID NO: 68074 - protein, 121 aa, Zea Mays
MGFSSKLVDKVLQRHGDDDSNTILESLLSYSDLQQSGSESSDSFGSFFDNDNEENNSPSESRKGIYQDIKPELDSFSEKWSFLLRTMNFSQQEVDLAFKQLGTYTSAQLTNLLLSVQIAHC

SEQ ID NO: 68075 - protein, 66 aa, Zea Mays
MGKNISLILSSPSIQRAPPLLDPCCAGEDLEGGGSRGEGLPWGGEDGQPKGKGGRGGQVWEGGKGW

SEQ ID NO: 68076 - protein, 91 aa, Zea Mays
MESTRPRTARPAAEDRTPTSNSPFPRLCPYTTRTWKPMVCTSERPDHAQGPEEHCLGFLARWRQFLFPVSAWRMGPLLKPMPWTRGGGRVL

SEQ ID NO: 68077 - protein, 713 aa, Zea Mays
MLAAYVSPKDASLWKKLIPLAKKKGDASLARHCILKAMNADPEDVDLKYLCGYMYHNLCEYQKAAEIYEQIVRIYPANSAVRKVAAQMYRECGQIDNAINLLKDYADTQTFNIDWSVLDLLISLYLRNNVFSEALKQIKRAQLHLGSQQKLPVQLQAKEVICHAYCGDMKHAEIFLRDVRLEPSKENIDVLKELASNLEKMGRYEYAVKFYLLIENVATQNDGGLCFDHKEMGSWYVKAAQCYMILGDKKNAIPYFYKALQSMKDNIGIRLTLSSLLIDDDKTDEAATLLSPPKIPELQSANTPDQQKPWWCDGKVKMALAKLYYNKGNLEDFVDTIFHPILETLNVEYANRKVKSMRKLPNIVLHERVKVLGEQRPDSVFQGLRPIASPDELQKANRAKKLIEKRTAANEELKHDYLPRTKQVPPVPGLLTNVEHHQLVLNLCRTLALLQRYWDALQIINRTLKLGNDALTGDKKEELRSLGAQIAYRAPDPSHGFKYVRYVVQQHPYSLAAWNSYYKVVSRIEDRFPHHFKYLLRTREANPDCVPPIIISGHRFTAISQHQSAARDYLEAYKLDPENPLINLCVGTALISLALGFRLQNKNQCIVQAFAFLYRYLRLCDNSQEASYNIARAYHHIGLNTLAAVYYDKALSTEEKDHPIPKLPYEAGSRAPEDLRPGYCDVRREAAFNLHLIYMKSGATDLARRILKTYCTV

SEQ ID NO: 68078 - protein, 1025 aa, Zea Mays
MVNNSNNSVEYKTVRRNKYKRKTQSQVADLPTPAVPLPSSLSCHRRRRLPQPLSHPSRPHPLPPPPSSPRLGWCGADGRRSADLGLRCVIATPAEGVKMIDMVSAVEELSGLSSKELNEMLKESDNFVLQSKAEGGGPKQTLVDMEKLVSSLPLHLIAVCLELRQGPDLTYVLRGMRFLHSLSDLASRHTRLEQVLLDDVKLSEQVMDLIFFLLSILAEQKKENNVGASPLVHASLVAASLHLLTSYFSSQWHELVHILLAHPKVDIFVDVAFDSLHEDVRLLNIRLSSMDFGIFPVGSLESRLAHFICQQCEASLQFLLLLCQQKLFRDRILRNKELSRNGGILSLSHTILKLAVPECLKQSTDLVASISRLKAKILSILLQLCEAESVSYLDEVATNSNSMRLGQTLALEVLNLLKIAFGKKKYITSDSHDKVKIYPMGSMLISALRLVDVFSDDSNFRSSFLTNTVPFLTQILATPHGEFVSSWCSVNLPAIEEDASLDYDPFVASEVALLASNNVLTEAKADYSCPFRPSLPSVAYAQTRTSCVVKIIANLHVFIPNICEEQERDLFLQNFQKYLVSGSSKLSADQPASSDFDATKVCRNLGSLSDYAKTLVPNLLNGEDLLLLSDFSDKLQSWCKSQVAVKVVQNDIPPESMEDMHPMQQPLPTRASTPDSKMNNFPKDVQNMEVSAPIPPINREGNDKDETPKNTVSRNGGFLQNAVGQDLVHLGVARTASGGSSAVTSVVSTGHQRSKMDLDPASGSVDNFKTPELTKENGLQGDDKGESSVYDERQPKRRKRNIMNSEQIDELEKALVDEPEMHRNPVLLQGWSEKLSLQGPEITSSQLKNWLNNRKAKLARIAKERGTFEGDNADKPSTPHPGESSESAGEDNYIPPARVMTAPSKGRLVSPDGNEKTSQAELSPNTMLIRPFTRSFSLEPGRLVSLVDSDGKEVGRGKIFQAPGKSPAPVESRICTVDVTELRTEKWRELPHPSEASGRTFQEAEARNGGIMRVSWDSGRLLPVV

SEQ ID NO: 68079 - protein, 197 aa, Zea Mays
MAAAYRHVATRGLALALAAAVVTAWQCAAQRAPSGPGCMPELVSLNPCMDYMSGNATAPDGPCCSAVSGMLRASPSCLCMVVGGTAATLGVAVDGDRALRLPAACQVQAPPANQCDVAGAPVPSPVAGTNTPGAQAAAAPSDANNVTPADLERPSSSPLRHWRCYIVSETREFSRVHRLIVDEPFVFTCWCLSHRQD

SEQ ID NO: 68080 - protein, 589 aa, Zea Mays
MAGAKADVDAETGDGSGVGSGGGGLFSEQMLIDKLNRLNNSATSIETLSQWCIFHRKRAKRVVDTWEKQFTSSREEKKIPFLYLSNDILQNSKRKGADYVDEFWRVLPRSLKHVYENGGEEGRKQVARLILIWDQRKVFGTRIGSMKNSILGDNPPILDNNVNSLNPSSNPTSNSKAARKDSGTVVKKLTVGGMPEKIVSAYQSVFDQHFDEDTALNKCKSTVGLLERINKDINDASINGNQPASSLISDLQEQEMTLKQCIEQLESAGRVRISLINQLKEALSEQESKSIILRDQLQVARAEAEHAIQLRQQLGRVLVTNDTQSTSSPLMITPPDQTAAMMHGSGVRSTPPHSQPLNPAVSLPPTVSAVGDESKRTAAAMADKLASLSAPVQVLTSILSSFAAEQAASINGGSPSGELSGVPPGFHIDKRPRLEKTGQAEAGAPPFFGQASQVQQQVGAVPTSFGGTHPPTPGPFPPPPPPLPPLLPPLMQQFGQNTGGMMGMRGPFGMMAGSMPPPPPLSNILPAGFPGLSGPPPPPPLPPAQSQPQQQQTSQAPQQSPTSAGFFQSSGMGFFPPVQVQQSQPAQRQ

SEQ ID NO: 68081 - protein, 77 aa, Zea Mays
MGAVLTLPPSSSYHSVALGVHRVALRGGSLPRQLRRQPALDVGHLCTLHHRARQRRHGSLTSVNSRIQIVQRCRASR

SEQ ID NO: 68082 - protein, 78 aa, Zea Mays
MAHVLGAVLIYHSIRAHLCSGTRMVKQQTFSTSGHFTSFSSMCSLELTIMVICGIFFRAINNSTLISLLVTLNGLGPV

SEQ ID NO: 68083 - protein, 456 aa, Zea Mays
MAAKMAGAVQVLKDDTVKRTPMARPSNGREGKPIRLLSNHFSVKLRGVDAVFYQYSVCIKSEDDKVVDSKGIGRKVIDKLLQTYCSELDGKDFAYDGEKCLFTVGPLPQNNFEFTVILEETSSRAAGGSPVHESPTQANKKRVKRSHLAKKFSVDISYAAKIPLQSVALALRGSESEHGQDVLRVLDVVLRQQQAKRGCLLVRQSFFSDDSRNLVDLTGGVSGCRGLHSSFRTTIGGLSLNMDVSTTMVVTPGPVIDFLVTNQNVRDIRDIDWPRAKKMLKNLRVKAKHNNMEFKIIGLSDQPCSRQMFPMKVRNGNIEIKSVDITVQDYFKSKQVELTMPYLPCLDVGKPKRPNYLPIELCHMVSLQRYTKALSSQQRAMLVEKSRQKPQERMRVVTDAVKSNMYDDDPILSSCGIEIEKQLTRVDARVLSAPALVVGNSEDCIPNREAIRSSQD

SEQ ID NO: 68084 - protein, 188 aa, Zea Mays
MQVLDGGVNGIAAKHVDERRKPLNLLDGLVDARDRVAEPAMRDVRPSLSSILDCSRLSPPCSHRPTRRTTCQTLATGSAAAATTSGVCSLPSDSRQRQTLRLGDGHTGEEVIPTCHGRGGGEGVRLTGDWTRPPIPPAVADVSVQGTQAQTTVQIDEEPGSDEDDDLPPLEANTNMNRPYELISQRNN

SEQ ID NO: 68085 - protein, 613 aa, Zea Mays
MEMLALVLTLLLSLSAATGAAAETVKVTTTPVFSHIPRLQASKDFQVLVRVEAPPALQQHRRVPVDLAVVLDVGASTGAGTARLDAVKKAVKFIIRQIHDDDRLAVVGPSNYRLLPGFLNTRDARWNAEKSVDQLEPRGEFTSGAGLEEAIKILEELPATASRSSRARFVILVTDRAVAEGSSRLFNKLPRESLSLPPVHTLGLGAAHDPRELLHIARESQGTYSFVDDQNTDGITGAIAVCLSGLKNVVAVGARVRLEAPVGSGVTIERIQSGGYTYSRTRPITTRDDKTYVEVAVGAIYAGEVKSFLVHLSVPALLPSTSTVVADGCYRQQLLTASVVGHYTNSDEEHAAAPASPSPTVTQAILYVQRPPPEALDVACGGTLHRVPVPVVMNHIARFGVLEMVATFVDTDIGRHSTVTAEMATKLRVQWEKFVQARQFWSGLDLGVLDDEVSRMVNILEEAASRSGSSTSLSAATAYVLSWLSSYQMQRPTAMGSPGSVAAAFVTVNMQLTLLQVRNDFDRFDTLLPRAPPQSPICVDPMPPPLFEMSGRGDDTYRVVNTAYPPGVLVDAINEAMKQMHLALVQASNLRRCDAAGVEVPLRTPLSRAGAFA

SEQ ID NO: 68086 - protein, 453 aa, Zea Mays
MARAALRLGDRALALLVLVSVALLPLVSSDDGHKHCEGVVRGWADSSTGRVKDGDKLSLKDLLFFLHIPRTGGRTYFHCHPDCKLVVSHDDYSLTSKLPRERTSVVTILRNPVDRVFSTYEFSVEVAARFLVHPNLTSAKLMTTRVLKKSRAVSTLDIWPWKYLVPWMREDLFSRRDARGIDKVHSSKKVNAYDVEDMVMPLHQYINDPVAHEIIHNGATFQITGLTNNSYFDGAHEVRHCARKHPDLGRIVLEVAKNRLDQMLYVGLTEDHEESARLFAHMVGAQVLLQSGTLSLDLKEDLHSETDSHPSMVEPGDEEASEHLNNTHGWQNNEALNSTSDEQGKGNMTVGKLMEAYETCIAKLRKSQSSRRKISLKKVEEANFSKEARKLVPEAILKQIISLNSLDMELYDHAKKIFTQEHLMLKAQQSMAGQHRQLAEQEDPSDVQSASHG

SEQ ID NO: 68087 - protein, 202 aa, Zea Mays
MIDNGLLAKRVHIMTFERILSFIMAEIQFSFVKVKDEVVSKNEEDDVGPGSDLHITNDQVYCETEKVKEGGGNTLNDLARRTTDLDPLDKKEASSSKGHLAMPLNPSELQGVIWPPHINERPNSVFKEKLIEFLIKPFTQEEYDRYFALASDRIPMVKERRTRNTVAYYHWTHEMSKSYFDRYPGALPCRSKKQKALPLDAI

SEQ ID NO: 68088 - protein, 166 aa, Zea Mays
MRGKGPRASLTGLLWTYHGKFGWKSMAPRSRYQRTRKACLSRTSRATWEGLTCGKTRVRIPKILTRSRSMTRCSKWSALQEHGIWEHSRLDFLGRGGSRKASRSRYRCLPLSPFKSTAFMLRRAVEEPLGHAAAMITDVLEHAESSHVITASQKKALLREMALRLS

SEQ ID NO: 68089 - protein, 445 aa, Zea Mays
MAARSPNVRLQKVISRKKQSSMLKCPHSAPPKPPRARFARLSATTEAAEKAPAKPKPRVQRICALRASPIRIKAERVECPSERKKALTTPRSKAVRPSQELFHSVKHQKEPFTAAARKGKVVKALFMSTPKKAPAQTPAADRSKEAGSEACSKLRKLNLACREVPSRYMSQLKNPKTVKKGEETTVAKSEKRGQESKTNAKKKILGRSLKCTHAEPDGENRNGCSSTDADENSFAEIAASDQERKVVLQELRIEVDTSRADNSNDNKENLSSAPSEEALNNSHSENGNRQLENNENVPLNENVALKVAKLQSKVHQEQAGKLKKTTNPRPFRLRTDERGVLKEAKPEKRQPFTENNSTAVLKDANRGVTKRSTQIVTAQQLDESSSRPAVNSIQCRAVKPERVSRLASSTRTAKTASGLMAPSSRTGKKRKAATVKLSRIQTPAA

SEQ ID NO: 68090 - protein, 206 aa, Zea Mays
MFCFWYALTASCSSLCLSSVLPSHGALRARALQWLALPPPGLWHRRRQGRRHSRLVPFISIRFSRGASVLPPASLAGEVRHRPQVSELWSRPPSLVSNSIHDAGHASLVATAFYSASLALTQVPVRRRPGHGAHAGFLCSASLVPRTPLLAVLRLGLIYTRAQHPLDNMASRLSSLRRIDRAPVSFLRRPCSDATNIKRSSSVPWP

SEQ ID NO: 68091 - protein, 158 aa, Zea Mays
MTADAALLAIIVAFLLPLRLVSLGLSLASGRHGTSSRRVRRSCAALAVAAALLAVIFALPRDHVRECAAPIASVSSAGDDDGGFREELRLEVEQLKQQLARLESLWDSKSKAVDDKLDSLEEDNGRVMRAMALDVQSLINERENIKKHDFIFITLGVH

SEQ ID NO: 68092 - protein, 178 aa, Zea Mays
MLSREKANKPTEDSSLLLTSTNSQPTLSLLSQLKQQNKPDKLGPTLENESNPDTILKAWGGNQPSHKSISSTERHDAESLQSVLQNFSLAQNEKMESEKNKYSDSVLVSSTFYSADGPRATCLTPNMTQVKQDCISSSWEMPQGGPLGEILTNSKNSKDLSKCKPRSYGWLLNLDHAP

SEQ ID NO: 68093 - protein, 770 aa, Zea Mays
MHKILFNIDSSATTSNRIQDVQAVLICAQRLGARNTRAGQLLTKELEEFRASTSADSVTKHQSRYVLQVIKYVTNHPNNRWVAVGDATGDYPFSHHKLTVQFSEASAAQDRKLEVLVHKAIQELWRPHPSQLTLLQTKGISALHKELPKACTLTGSSDPCYIEAYHLADPTDGRITLHLKILNLTELELNRVDIRVGLSGALYYMDGFSRTVRHLGNLVSQDPVQSSVTVGVSHFERCSLWVQVLYYPFYGSGGSADYEGNYAEEEDSQMMRQKRSLRPELGEPVVLRCQPYKFPLAELLLPLECSPVEYFRLWPSLPAMVECTGTYTYEGSGFKATAAQQYDSSPFLGGLKSISSKPFHQVCSHFIRTVAGFQLCYAAKTWFGGFVGMMIFGASEVSRNVDLGDETTTMICKFVMRASNESITREIESDLQGWLDDITDGAVEYMPEDEVKSAAAERLKISMERISLLKAAKPKVPPAKTEQEEEEERKQSEELDGFGNPKGPSTLSKLTAEEAEHRALQAAVLQEWHQLCKEKAMKAQYCVANKLFVTVAFLRSGVKINYASADAPEVKKKRKLQCSLDMQPMSTQAKLDISDDVVDAGLVDDVEGGGMVKTVRYVGEEMEEDDDDDEGVLALVGYAADPVLTLEGAPAPEGALALEGVVLGSPSAASMEVQVGSLMPPIDDAVATSSTLPIRSRPDDPTTFGEATPSQVPEDATTTSTSVGIPMGVALRLGDLEPLALVPTSFVASTDVATSGLSWLHQLWIFQCFY

SEQ ID NO: 68094 - protein, 60 aa, Zea Mays
MTTQPLAHWLGRGRKLREDAKDSINYFWGGLQPMHSLYLCVCFVFPVHSIPFERHSMSGA

SEQ ID NO: 68095 - protein, 307 aa, Zea Mays
MSSGLILKLFLLALIWNTLGMNLCNASVTLTSATVASATGNSTPVITFCLALLLRMEVVKLRSVSGIAKVTGVALCLAGALVIALYTGPSLSPVNRHHRASGGAHGFKAPTRGGTWVTGTFLMLLSNVTWSLWTVLQGALLKEYPNKLLVTTSQCLFSTAQSFVVAAVAERDFSKWALKLDVSLIAVAYTGFLVTGVSYYLQAWCVQIKGPVFLAVWNPLCFVLTIFCSSFFLGENVHLGSIVGGILLVCGLYSVLWGKTLEVHQTVESGDNTVGEVQNGQEEKNHQQKVLEKGRQEEASMTAPGVV

SEQ ID NO: 68096 - protein, 892 aa, Zea Mays
MVSPPAGFAQVLGASRLREQGIISGGRHVWAGRQRQHEGVANPARSAGLRVPMETSEAAAAHPQKDSVKVAVNIRPLITVELQDGCTDCVTVTPGEPQVQIGPHVFTFDHVYGSSGPSSSLIFEQCVHPLIDALFSGYNATVLAYGQTGSGKTYTMGTDYSGEGNCGGIIPQVMDTIFRKVDTSKDGSEFLIRVSFIEIFKEDVFDLLDANQAAVRLDAGSMAKASAPGRVPIQIRETATGGITLAGVTEAEVKSKEEMASYLTRGSSSRATASTNMNRQSSRSHAIFTICVEQKRTSGTSDKSANGDYDILSSKFHLVDLAGSERAKRTGADGHRLKEGIHINKGLLALGFFKCISMHSPADIKAEETINTLKNANRARNIQNKAVVIRDPATAEMQKLRSQLEQLQTELLFSRSGSAALEELQLLQKKVSLLELKNSELNNELKEKELSYEQLAERARAAQLERDQLMLKIESVRNGKSLDDIENIDNDQDMDLLKGYISKIQQLESELMRQNFSNACRHGLHDQLAMDQDIFLNELGSGCEELVRAECWRWASKGVNVKYEVRDSRRGYKAGALREGMKRAYARGCDLVAIFDADFQPEPDFLWRAVPFLLHNPDLALVQARWKFVNADECLMTRMQEMSLDYHFAVEQEVGSSTYAFFGFNGTAGVWRISALNEAGGWKDRTTVEDMDLAVRASLKGWKFVYIGDLMKVTLWKKIHVIYNFFLVRKIVAHAVTFVFYCIVIPTTVLVPEVQVPKWGSVYIPTVITLLSAVATPRSAHLVVFWTLFENVMSLHRTKATFIGLLEAGRVNEWVVTEKLGDALRTKVPGKKPRMRIGDRLHVLELGVAAYLLFCGCYDIAFGNNRYYIFLFLQSIAFFIVGIGYVGTFVPH

SEQ ID NO: 68097 - protein, 197 aa, Zea Mays
MGDSRSKVKELSSWESDLKRREADIKRREEALKNAGVPMEEKNWPPFFPIIHHDIANEIPANVQKLQYLAFASWLGIVLCLSWNFVAVIVCWIKEGDSKLFFLATIYALLGIPLSYLIWYRPLYRAMRTNSAFSFGWFFLCYLIHIGFCIIAAIAPPIVFHGKSLTGILAAIDTFSEHVIIGSFTLWGLHCFVWRHC

SEQ ID NO: 68098 - protein, 189 aa, Zea Mays
MKAVGYNLYDSSGTDDDLPPAQNRGLRGRVFSGNGRASAGAFPYMRANNDLESEIHRVEQDAYTGVLRAFKVQSDAISWEKESLITELRKELRVSDEEHRELLNKVNEDGSIRQMRELRQAGGIPSGLHRGNRVLYDAEPGPTTKRQRASHSIPSQSAGLQSPMMPSHSVSSAKWGPLSARGKKAKMVN

SEQ ID NO: 68099 - protein, 972 aa, Zea Mays
MVDTRRSSAAKRRGPSEDSSPSPPTTQADPTTAGLPVEPASPPPSSGSRSGKRAKVAVARAEDPGAPRGKAVDPAAVDVLDSSVANLQGVARPPAANVAASSAVSNSVGRRKRNQSVRAIPTGEGTLWKPRPAGGRAEAWGRLISQSSEYPSIPIYTTHFTIGNGGKCDLKLTETSPGPLICKLKHVKRGAALEIYMNKVVHVNGKALDKAAKVTLIGGDEVMFVSLGTHAYIFQQLLEEKASTPSLCSKCVIQQEQYPVVKDKEIVSSLCKTVGEQSYHPSEENMTFGRHQLLKDDLKKAAISARSEIYQELLVKALTKSFGAKLLVIDYSLLSGGQPSKSKESKPYKKGDRVRYIGPIQSSGFMFEGQRAPDYGSQGEVRLTFAENGSSKVGVRFDKQIPGGIDLGGSCELDHGLFCSVDSLCLDGPGWEDRAKHSFDVVFEFASEESQQVPVILFLKDVEKICGNNYTYHGLKNKLESFPAGVFIVGSQIQTDARKDKSNNGSPWLKFSYSQAAILDLAFQDSFGRAGEKNKEALKMSKHITKLFPNKVTIESPEFLTRHGMECTDLESVVCVKDRNLTSECVDKIVGYALSYQLKDHPIQTPGKDARVVLSGVSLKYGIDLLESIQSGPKKKSTKKSLKDVVTENEFEKRLLPDVIPPDEIGVTFEDIGALENVKETLQELVMLPLQRPELFSKGQLMKPCKGILLFGPPGTGKTMLAKAVATEAGANFINISMSSIASKWFGEGEKYVKAVFSLASKISPSVIFVDEVDGMLGRRENPGEHEAMRKMKNEFMVNWDGLRTKDKERVLVLAATNRPFDLDEAVVRRLPRRLMVNLPDAPNRKKILSVILAKEDLADDVDLEALANLTDGYSGSDLKNLCITAAHRPIREILEREKKERTLAEAENRPAPPQCCSGDVRSLKFSDFKHAHEQVCASISSDSKNMNELVQWNDLYGEGGSRHKTPLSYFM

SEQ ID NO: 68100 - protein, 289 aa, Zea Mays
MERVALLRTSGRRLLHRCRRGRPVVVPAAAASSLARRASSFSLPARGYSALPRGGARFLVAAAPLHCSGRYWPAAAPQLARRLSASAVSTSPSPVPYDDVHEYATKLGFEKVSEQTIDECKSIAVLYKHKKTGAEVMSVSNDDENKVFGIVFRTPPKNSTGIPHILEHSVLCGSRKYPLKEPFVELLKGSLHTFLNAFTYPDRTCYPVASTNTKDFYNLVDVYLDAVFFPKCVDDFQTFQQEGWHYELDNPEEEITYKGVVFNEMKGVYSQPDNIMGRVSQQLKSGPDL

SEQ ID NO: 68101 - protein, 627 aa, Zea Mays
MLCMHCEKLLQSKQYCGICKKIWHHTDGGNWVCCDECQIWVHVECDLTCNNVEDLENADYFCPDCKSKSKTVPATENLNTSTSECASTSKGKLTAMIAVCCNGEDALYVPEKHMILCQCKSCKERMMSLNEWEKHTGSRKKNWKMSIRQKSTGELLINLLDDIPCGTSKYSNPGIKKEELLQLQANPYSPVCAKWTTERCAVCRWVEDWDYNKIIICNRCQIAVHQECYGACAVQDLTTWLCRACESPQQKRECCLCPVKGGALKPTDIDGLWVHVTCAWFQPKVSFPVDETMEPAMGIMSIPVEYFKKTCVICKQMHGACTQCYKCSTYYHAICASRAGYCMELQCSERSGRHITKMVSYCDFHSTPDPDNVLIVKTPEGVFSTKFFLQNGEKQTAARLVRKENHQEKVLPPIISDCLVAKCLTYEMSKYKKQPGEAIAHRIMGPRHHSQDFIDGLNACMDRKDDQSFSTFKERLRYLQKTENLRVSCGRSGIHGWGLFAARNIQEGQMVIEYRGEQVRRCVADLREAQYHREKKDCYLFKISEDVVIDATDKGNIARLINHSCMPNCYARIMTVSDDRSEIILIAKRDVSAGEELTYDYLFDPDESEDCRVPCLCKAPNCRGYMN

SEQ ID NO: 68102 - protein, 215 aa, Zea Mays
MQRRVGMADGEARCRTLGAVIKEKDEEFALFLEMRRREKERGAAAAAADQLLLSGDVAAENGMLLLDPPPPAEPKPAAYKVAGGGFRRAPGGVDDFLNADASDKNDYDWLLTPPGTPLFSSLKVEPKRSLVSQAGTPKARPTALKSRQLDVVMEEGQGEELEVMLSESDDSEFDHDDEFPPSTDGDELSKTEKTKRGGKRSRAGIQLSPSKCKAN

SEQ ID NO: 68103 - protein, 513 aa, Zea Mays
MDAFMGSVLGALLAVLASTLLIGALFFLVWKPYVVTRWFRGQGIGGPSYRFLVGSLPEIKRMKAAGSKITLDVGSHDFVPIVQPQYRRWVSDYGKTFLYWFGAVPTICVAEVGLVKQVLAERTGLFPKDYMNDSMEVLLGKGLVLANGEDWKRHREVVHPAFKPDKLKTMSVVMADLVQRMMQQWRSQIQRASNHEAEIELSSEFSELTSDVIAHTAFGTSYKEGKEVFVAQKELQELTFSTWLDIPAPACLSRRVEELDKKVRSMLMAIIEGRLAARGTSGYGNDLLGLMLQARALEQEGHQMLTTEEIVDECKTFIFAGQDTTSHLLTWTMFLLSRYSEWQHRLREEVLRECGDAVPNPDTVTKLKLVNMVLLESLRLYSPVVFIRRAVGSDILLRSTRVPKGTMLSIPIALLHRDKDVWGQDADEFNPDRFEHGVSNAAAKHPNALLSFSQGPRACIGQNFAMLEARIGIAMILQRFSFELSPNYVHAPKEAVTLMPRFGLPIILRNLHD

SEQ ID NO: 68104 - protein, 178 aa, Zea Mays
MTRHVSSRCFKCYSMLNNRQKVEWNNRGFSTLHALVAAAVSFYLVMISDLFNEDAHNSIIIDRKSWLSDCMFGVSIGYFLTDLTMIMLYFPSLGGNEYLLHHGLSMYAIGLALLSGKAHMYILMVLFTEITTPFVNLRWYLDVAGQKTCNLYLYNGVALFVGWLVWVFEFSTPRGTTS

SEQ ID NO: 68105 - protein, 266 aa, Zea Mays
MDNSDVDSRPRKKRAEKAKVTKKQKIVTNERKLSTPKAKKVAKQDLGSSTEEQGGNSAEEDNSHSSAEEDNKRKRQQTPAYGKQAEHLKSIIKSCGMTIPPTVYRRVKQAAENKREACLIKELQDILEKEGLSKNPSEKEIKAVKKRKERAKELEGIDMSNIITSSRRRSTSSFIPLPPPPQIEVDSDDDEDDDDDAEGNDAEGDDDDAEGDDEDDAEGDDDDAEGDDAEDDDEVDEENVKGRDEGDNDTAEAANGSADDAEKENN

SEQ ID NO: 68106 - protein, 221 aa, Zea Mays
MDSRCPHLLLLLPLLLLAALLPPPSSGVPEVIWLPTSGGAGPLSCAPPDPAVYDRPVIGIVSHPGDGAGGRISNTTATSYIGASYVKFVEAAGSRVIPLVYNEPEDRLLEKLSLLNGVLFTGGSEKEGVYFDTIKRVFQYVLDKNDAGEPFPLFAQCLGFELVSMIVSKDNNILEAFDAQDQASTLQFPSYALEGSVFQRQGTTRPHALQQSAVNLKNDWE

SEQ ID NO: 68107 - protein, 780 aa, Zea Mays
MRMLAIRYLHRTVAAKADTIMALKLCRRLSGFIVGANSRCCRLSDVDKFALLFQNCTDVRSLKKLHARVLTLGLGRDVILGSEILICYASLGVLCKTRLCFQGFLNNDLAEWNSVMVDIFRAGYPEEAILLYRGLKLRQIDLDEKTVTFGLKSCIELRNLLLGKGMHADSVKLGLSRDKFVGSSLVGLYSKLARMDDSQKAFEEILDKDIVSYTSMITGYSENMDSTSWNAFKIVSDMSWSNLEVNRVTLVSLLQVAGNLGAIREGKSVHCYSIRRDIGISDEVLETSLVHMYMQCGACQLASAVLKNSAQSVASWNAMLAGLVRTGQSGNAIHYLYIMLYEHKVVPDSVTYANVISACAELCNSGYAASVHAYIIRRSIPLDVVLATALIKVYLKCTRITISKRLFNQLVVKDTVSYNAMIYGYLQNGMVNEAIALLKEMVTECVAPNFVTILSLLAAIADHKDFARGRWIHGFSIRHGFCSNVDIANQIIRMYSGCGKIASARIVFASFENKNLISWTTMMMGCLFCGHGGQTVELFQLLMQQHDNKPDSIAVMTAIQAVSEFGHLKGVKQVHCFVYRALLEKDTKTMNSLITAYAKCGRLDLSVSLFLSLEHRDLDSWNSMISAYGMHGFYTKVLEMFKLMEEGNINPDGLTFSSVLSACSHAGLIKEGLHIFQSMTSMYSVRPQEEHYGCFVDLMSRAGHLEEGYKFIKLSTLNDKSSVLCALLSACRTYGNTMLGQVISNELLEVGQQNPGKCKVHSAFTNTHTHYRLLMKKKEI

SEQ ID NO: 68108 - protein, 131 aa, Zea Mays
MDLASQAGIQSLPSKFPPRQGQRVMRGFLLRRIFFASEKTLSSSSEFSSLILSHLHLRLQLSFSFSGPRHLYSDFHSQGIQNPRRPALGSVFASDGCRRPQSSIDLLFWSSCQVFHYTLLQLYPATLGKVF

SEQ ID NO: 68109 - protein, 534 aa, Zea Mays
MLRSPGNSPRRLSRRPHPRTPPLARPPRPLHRPSSKRRRSEVLDEDTYVAAIERIIERDYFPDLPRLRDRLDWLQAVRSHDPLILRDAQLKILDRRRRAQRHAAGPVPTPTPATSTALRSPSFLTTPAGSVAGGVGGPDADHDDDVAAAVSLDGFFRRFTSEDNDSFSRILDKVNQRRRERYAHLLEPPPPTEAGSKASEGAKRDRITDGYGTSGQPPSTLEGAKFTAKNQLMYYPADQGEAPLTEEERAERLRGMTKEINKPNTRLHGRATADDARPKEEGAAILYALVAGSTPGGMAYHDPDKLKKYDLEDLRKTPNPFYLESDKKAGNGYSFVRTPSPAPGVDESPFMTWGEIDGTPLRLDSDETPGGSERAHFKMPPPPARDVKAHLLSRDAARKIKERSNTFHRPPLPSPARGVSASPRTLSRAAQKFVRNAITKSAKSSSAIDESLRASYRGSTPSASTPKSRFSKDPGLASRSPSTRVCIHSSPTLIVGDSLKMPKLKQNLQTMRSHLLKKIQTNQLTAVTKHPRRR

SEQ ID NO: 68110 - protein, 106 aa, Zea Mays
MDGRKRKGKFRNSLRRMAMECLCSGEQLKASDETMRSSDSTITKDFSASGYSSWNGEIEQYLDNGNIEEAELSLREGICLNYEDPIRQENGKEHNSSHMPNYSLDS

SEQ ID NO: 68111 - protein, 1061 aa, Zea Mays
MEALGAPPPPRFTVADLLRLRRPTTGASSLLCLSVPTSTSTSRPRKKHKLSAPVPTWSTGTVPFAPMSHPVLLSGTLSLPSASSPISCRSNCFSFSDPCPTAASPATAAASVCCCILDFDPAALGRVIRVLAWNYLPSLRLHAEPGVLEVVRWHLEESAPPVKYSFLATVPFRFPDQEPDLATRGCAFGLVRSVSIVFSMPLAKADAGSRNSVGFLAEILCCGCRRCCRATPPEDAQTHMFETMKFVYFVDASSMWRPVLVWLVGRLVYISGLSKKMVSVGDKASHTILVSSAKTTMAWCPSYRGSLPLDNLPEKCGGEYAGVITGIYSQGLVVELDDTAWLLIDDQKLLPPHSLRVGAIVSVKNFRAVCLNFAWTRVVLLATCSKTCITVNCFSLVDSKIHLKTDNKGLLGTFVDSLEMPARFWMLLLISCFKQKFTKLFSDKEILGSQNKQGLVHAYATKILTSKCQPQESLIIKFCRHNCSSLSLGSKLEACKLVVPFSNLVCKCESLWILSMLKLWNGSEKVGKSQGFLCDGVSYTSSTKRIISSEDLDFILVGSIKTSPLSGRLQLVDSTGCIDVFIPDLPPNESLHDIYEIVNYKLALEGPMAYIDHYDVADALSCKAVFQKLPYKKRLHHLNIYVIVQWRQLIHIGPSSCIPSYINYRIRLFHLLKLSHIFPVNSNIQCSNMPGSSLYAEAVILPYVLKFIGQGEFLEHAEGFIMSHSTLLGNSEASVAKSCNIPCSLSFGSTNLCGTLVSTYASGSEGTVLNEPIVLRKEYSRILLEFEAGIFKKYQLPRINGSYILQCPSRSFTCTMGNCGCLQGGKVSIDAQDRLWSFAITIGGNINIKGSIGDQSIGVTSMKMDEIFSRNMVDDELRLVQPWNDFYRNSYFHLDFSYEAISKKMEDYNTVCHVLNGLCVSSSEVLSVSSCVDIMMPKDASVSADFKTKEVVHGDLLISVQGKVENIHSLVCKWERCIPGNEKYSLCIHIADNNHAVYIRGYSNKHFTVGIGPGATVTFHRIRFKQHGLFLTSETYIELHRACSFIRSILQTVDPCNFTAG

SEQ ID NO: 68112 - protein, 1141 aa, Zea Mays
MVLTTLDSAAYYAMQAPQGPVHINCAFREPLDYTNQHWNVDCLLGLDKWFKNSEPYTKYVRMKTVSALGNYSCSVMEVLEIIEKAEQGLLLVGAIHTDEDMWAVALLARHLSWPVATDILSGLRLRKVVNSLPGLDKSILFIDHIDQILLSESAKNWIRPDVIVQIGSRITSKRVGMFLETSFPSSYILIDRHPCRHDPSHVVTHRIQANVAEFAARLCRCTFQRKRSRWTEFLTILNSVVCQEIMFQIHAKCSLTEPYVAHVIGESLYGDAVMFVGNSMVIRDLDMFGNGWMDYTTNGNNVMTHHFPDFVGTVVAGNRGASGIDGLISTAVGFAVGSNKHVFCVVGDISFLHDTNGLALLNQRAWRKPMTIIVVNNHGGAIFSLLPVAKTTSPQILEKFFYTSHDISISKLCAAHRVKHFLVQTKAELHDALVKSNMEQVDCVVEINNSIDSNAEFHRFMSMFSNYSTSQYLGYLLGVPRFKNEVDAMPVDRIDAVEYMLYRIQLSAPRTSGLSDGRFIHEGFVLKLRVEDNIVGFGEVAPIEIHEEDLLDVEEQIRYLLHRVKDSVLDIIPLLRGSFSNWIWTSLGVPPSSIFPSVKCGLEMAILNLLASQRKCSLFKVLSGCDLFCRDENVVEYNQNSSASIQICALVDCNGSPMEVALGVAKLVAEGFTTFKLKVGRRESPIEDATVLHKIREVVGYQINIRVDANQKWTYEQAVEFGSRVQSLHLEYIEEPVSSVYDLIKFCEKNVLPVALDETIDNLRGDVICKLHQFVHPGIIALVIKPSVVGGFENAAHIAKWAQLHDKMAVISSTYESSIGLASYIQLAHYVDQQSSIVSRIRNKDTCRATAHGLGTYQWLREDVSEQKLKIHASPLGDGIRATVEDAHGYLHHLNINNEKIKSTYGEEKHRSYSIQVDVDDCSYLVKLREAGDHTNEKVVLLLHGFLGTSEDWVPTMKALAPSARVIAIDLPGHGESQILQRHKNSEQPAVTVQLVADLLLKLIYHITNGEVVVVGYSMGARIALHMALNQDHKIRGAVTISGSPGLRDEASRRRRIAIDKSRAQFLMCCGLECFLQTWYSGKLWTSLREHPEFNSLVRTRSKHKNIKALAKVLADSSVGRQKSPVGRPEALEEAFTRRCW

SEQ ID NO: 68113 - protein, 868 aa, Zea Mays
MIWFMGELSHISSEFDNVVQVVLENYKPQKMQNDDQSTNDADNQLVQEDQKAEHPPSPFIITPAPSWENIVNAKGGINLPEEDVRDPKVWSRICVHNMAKLSREATTFRRILECLFRYFGNNSSWLSENGLALCVLLDMQLLVESSGQNMHLMLSLLIKHIEHKTMLKQPDMQLSIVEVAATLAEQSSAIASPATVGAISDLVRHLKRTFHITLGSKDMELVKWNEKFRKGIDECLVQLSKKVSDAGPVLDMMAVMLENIASTPVVARSTAAAVYRTAQIIASVPNLQYQNKVFPEALFHQLLLTMIHPDHEARVAAHRIFAIVLVPSSVSPSIQASPSGQVKKHDMQRTLSRAVSVFSSSAAIFDKMKKDKHSENSQGESKDNSLHSVGEGTGQPKNQNLHVSQSRRSSMRISNFSMKRGPSMAMRAPSVAIRAPSISLRGPSMSSRASSVSVKEDQISPKKSDEETESVLVKLSARQITLLLSSIWAQATSPENTPVNYEAIAHTYSLLLLFSGSKASTFEALTQSFQVAFSLRSYALTEADSLQPSRRRSLFTLSTAMIIFSSRAYNVLPLIPICKQMINDRAADPFLRLVDESKLTAVKDCSNDPSKIYGSPEDNANALKSLSEIELSESQSRECIVSTIMNNIANMMDAELHNVRSQLLSDFTPDDMCPTSTQFFEMHVDNPSGFHETGHHEEGLLIDLGNDHDAFGEASEGAEARTSSVPASDLLSIDQLLETVGAEPAPQAGVVSADIGFKDMTSHCEALTIGKQQKMSAFMSFQQSVQAAGVPGSQPNQTTELDLFQDLQLPQAGAQSTNPFSDESVQGYPQYMNGPNGDNAQPGQDFQQQSLKLPAASPYDNFLRAAGC

SEQ ID NO: 68114 - protein, 297 aa, Zea Mays
MPPCCSPTTSAVTAAAASPGASRSGGLLRRSRPAPAAVEIASYLGLELGKITIKRRASAKNITAVIPYFGYARADRKSQGRESIAAKLVANMITEAGANRVLVCDLHSSQAMGYFDIPVDHVYGQPVILDYLASKTICSDDLVVVSPDVGGVARARAFAKKLSDAPLAIVDKRRQGHNVAEVMNLIGDVRGKVAVMMDDMIDTAGTISKGAELLHQEGAREVYACCTHGVFSPPAIERLSSGLFQEVIITNTIPLKEEKSFPQLTILSVANLLGETIWRVHDDCSVGHEPYSSLDID

SEQ ID NO: 68115 - protein, 70 aa, Zea Mays
MVVLSAGGLDLLISLTELSSPSDPFESLADPEAKKEDEITKMAEAIMDEAVTRLLNEAAEAVLKEEWLLL

SEQ ID NO: 68116 - protein, 550 aa, Zea Mays
MQQCCSVDCSHQSSHGKRRLGLLVKCPDKQPLHATLHCDIHHQPIPAKPVKSASVHERRHSRYQRGGGGTGGPSSAPSDGVPAPVRPPLPTPPPYGLPRRQGHHHAGPPAGGQRDAGLGRRGQLRARLLHPAGRQQHLPRRVVQQGLPPHRGVGGQPRGPDRGRRRGQPRRHALRLRRRHARHCRGEQDRRVVRGAGVQAGEPGRPDPGQRQPGAQGRCRRRGVGGVRLPDGHAAPGDEAGDRLREREEQDADVVEKPVGPLPGPRGHGDGHQRRPAGVHLERRREGLAVRALGRRPVHRRAGHGHLLRLHLQLRKQRAGGDVQLPGAQRVHHLAPGRREHGELRAAAALDVGGGGAGVEPVLVRPQGPVRRGVAVRAQRRVRHQQHAGLLLPPRLHPEDPRRVGAAGRPRRVRAVHAAGLPQRHRRLRHGAPRQGARHGAERGGLEPDAGPVPAGVPPQLLLHRVRQRQRQRRRRRWAPRRRRLGLRHVDHGAHRPARVPRLRPGPLRPPRRRGSRGESDRQVSLFRVCSSLKHKEGRPLHSTCTNGET

SEQ ID NO: 68117 - protein, 267 aa, Zea Mays
MLGLRRLPAVSGRLAPEVTSVSAASSHSAVFFRTLQILVQQGPVRLQKLSAPDTGIVELRLERPEAKNAIGKEMLQGLRSAIQEVEADTAANVVLVTSSVPKVFCAGADLKERRLMGPSEVRDFVNSLRSTFSSFEVCCKITIYSSVSVQLLSDFWKFRKSMVMKSETLDKAIQTNVHFVCILNCILTDKCCINSPIDVNFCIMFKQALSIPTIAVVEGVAFGGGLELALSCDLRICGSDFNLHQSYAYGNRFGSFLSPNESFLFSK

SEQ ID NO: 68118 - protein, 379 aa, Zea Mays
MAVVVAGSRARAEQARRQWREQEPRSPEMAAPPPRSTMPRPARAAAVVYYLARNGHLEHPHFMEVALSCPDGLHLRDVMDRLDALRGKGMARMYSWASKRSYRNGFVWHDLAEDDYIHPVVAREYVLKGTERLHPALLDAAAASSSSSAGSQETPTTSSSARWEAHRMTMKGACGGADLGEYVAAYMGEERGADAATQTEDDGRGRQRRVQSPAAQEELSRAETSPPTASTSPEALAKADGRAVLEGAVSGSGRARASSVLMQLISCGSVSVRDARASPVMPRAHHHHRPPRPPAVEAPSYRRAKLVVEDKEYFSGSIVETATKRSPADGVTSRDDLAVLRRSASYNAERLCQQQDLCFEAVVQTPPALAAPNLIRAEC

SEQ ID NO: 68119 - protein, 259 aa, Zea Mays
MPLGDGWSHPQDLGVQQQRLSFFSSPTSIAYNISSEGSTKVASEAADIGRPALFPASGLSNTFGFKVQDKQGRMQRFNCEMSSLTDLITSILQRVGDDIDRKHLPQISYEDEDHDKVILSSDSDLIAAIDHTRQIGWKSLRLHLDYARQKRGDGSSDFEYAGKDAWASAYFGVIKHLTFTLELFGEMLGRKRPARMESWNIGRRGAAAATDVSLEQSGFDKMQINLVYTVFHTFTDCLANYKIISVFWFGFRVHLCMKY

SEQ ID NO: 68120 - protein, 131 aa, Zea Mays
MAIPNPSRDPLLCRPLSPSPGALLHLQLAPSPPLPMAAPLGSLPPWLPSPPSPRSCRARPTLPHLLSTSLMISALTPWCQRRHPLLTACSQRLLPTLVLAWRSTMGCITPTSPAIPPAPPHRPQPQRHRRV

SEQ ID NO: 68121 - protein, 145 aa, Zea Mays
MVFSSNKIIIWMDGWMVFKRLACPVLPFVPSSPRASACSHFPLLRFDFEPGIIFTCCFVPLLCASVLPQIPLGRFASARRWERADVWVAGLGPIGVVRVRHDGVWRGDTGRFTIIVDFGFKDILKTMVPNRRLTMACFGLSPAIP

SEQ ID NO: 68122 - protein, 238 aa, Zea Mays
MARTPGADQAGSWALPSIGRRGGGVSGDLLPAFGELSPTGGNSNTINPYDCRYRWWQSFLIGPVLYSAWSSPFELALDRAATTPVVVASLVMDAFFAADIAVSFFVAYFDRSANLFVDDRRKIATRYLKRPSFAMDVASTIPFNVIYQLVSGRSTGWFRYLNLLRLWRLQRVSKLFARLEKDIRFDYFYTRLIKLCGVTLLALHSSACIFLWMAFHHGDREHTWLGSQVRDFADGSVW

SEQ ID NO: 68123 - protein, 314 aa, Zea Mays
MSGMAARIGEWKPVMAMLIFDLISAVTTALIKKALQEGLDRLVLITLRQLVATVFLAPIAYFRERSTRPKLTLEILVYLFFSAAFGAALSQYTFFYGLQYTTATFAITFTNVAPVLTFLIAVLLRVESLSMKNKAGAAKIAGTLTSFAGVMLLTLYKGVSLTHHQAGEASPEDHSLGAAAASPSDRKSWTLGTLALLANCLCFSFWLLLQSRLTKKYPALYSSTAYMFLISSMQGGALTAAIQRRASVWLLTRPIEIVTVLYTGIMGSGVGYVLMTWCVEKRGPVFTSAFIPVIQIMVAMVDFFFLHENLYLGR

SEQ ID NO: 68124 - protein, 455 aa, Zea Mays
MDCVGAVDSSGTDDDLPQSYQNSRGMKGSGRITGNGRDSVGASLYTRVQPQTDMETQIHELEQEAYCSVLRAFKAQSDAITWEKESLITELRKELQVSDKEHRELLNKVNGDDIIRRIRKWRESTGGLMINLVNNSQRTHDPIPSPTTSARKRQKMSQPILSACVPAPSAMHSQPLTAPMQPSSSGAKKGAQPGTKVKKTKPGQKIPGGSAVKSMPSSAGPGGRGTIINRNMSAGLPPESSQLNPLIGRKVMTRWPDDNSFYEAEITDYDASKDIYTLVYDINTADETWEWVDFKEMAPEDIRWDGEEPDLNLIGRGAPVHGMKSSSRGGPMSGTGRDRGPQKNSFKKDYPSQNGIGKKSVDYIEILHTETLIKEVERVFSSANPDPLEMERAKKALKEHEQSLIDAIARLAEASDADDRVRSLEYNRGWRNQHGGRYADDMTMDGHMAGDADAM

SEQ ID NO: 68125 - protein, 406 aa, Zea Mays
MFVSWTMLTELNLAKNLLTAIPGSIGALPKLIRLDMHQNKITSIPPSIKGCSSLAELYMGNNLLSSIPADIGTLSKLGILDLHSNQLKEYPVGACNLKLSFLDLSNNSLSGLPAELGKMTTLRKLLLTGNPMRTLRSSLVSGPTTTLLKYLRSRLSSDEEGSRSTPTKDDQIAAARRLSLSSKELDLSGLGVTSVPAAAWETSDVVKLDLSKNSIEDLPNELSLCSSLQSLVLSNNKIKRWPHTVVSSLPCLSSLKLDNNPLVEISSTDLVPLSKLEVLDLSGNASALPEPSAVSALPQLQELYLRRMKLHEFPNGLLGLKLLRILDLSQNHLTTVPEGIKNFTALIELDLSDNNITALPAELGLLEANLQVLKLDGNPLRSIRRTLLERGTKAVLKYLKEKLPSE

SEQ ID NO: 68126 - protein, 513 aa, Zea Mays
MRNNQMFQRLGINQLRTMMTATRVKSKYDGPEESGSLFDGEDSEGSEPEEDSHVAQGVRSHNPTHVADKPTQQTRDSKRVVAPDVHGQQIRFTRQRSAAINQQSSLSLTTTTQAGSRATTNQESTQNLAAATQFTSSVATEQDYTAGLTTTAQPTSPTQAEVNDNNRDEELVPRQRSRGKQLESLSRGLGTKIPIQISNGKRRPEPPIQTAKFASEGGIILRQHIPIFPHWKEYKKQENEGKITDYIGKLAGQFTMDVESNAVKDACVDMLKGGQRQMRYRLKKKYFTGVPANQVRTTSPVSCITDDQWRELVQMWSSPNHKNNCVKNKLNREKVQFPQCTGSQSYVAKAYVVRQEKYKDVEPSAIDLFKEMHCSKKKGFSEVVQKAIGDMEAMVATPAEDGQLTKSATEVVSNVLPGSSKFLHNAGLLPSSKRSNTGTVSARMQELQSQLDNERREKDGLREDMDTLKAKSQASEATIANQSTEIADLKKSLAENSILLRQILSISRDQLNP

SEQ ID NO: 68127 - protein, 195 aa, Zea Mays
MGVTPHLLPPHGCSSSTPPSRQQQPPVHGCQPLLPFCPTAQQLCAPPPMDAQKFQQQGLHSSSSLTLCSQPWRPKKNPLAEPPLPASAPVPLLLLPRTAAARPTFPRCAAPRRNAAVPASPGFLAATAARMPSARHNVKGDVLLQHVVTLPGCSLFLAQTRSRHRRPSPPSKSRSAFGRSTKCQALWTAHVTSLD

SEQ ID NO: 68128 - protein, 421 aa, Zea Mays
MRAQCSGQKGGRLGWHSRPSLTYTRQSQRRIDLNKKEVTEAEAEVKALKGSDVDQQDDERPATPPDGESEFTDDDGTIYKWDRTLRAWVPQNDASGSKEGYAVEEMTFALEEEVFQAPDILGPSALEEIDTLSESKNKGSDKAETRGDKKRKSSEKPSEKKEANKPPDSWFDLKVNTHVYITGLPDDVTVEEIVETFSKCGIIKEDPETKKPRVKIYTDKETGRKKGDALVTYFKEPSVALAVQLLDGTSFRSGGKTPMSVSPAKFEQKGDVFISKKSDKQKKRKIKKVEDKMLGWGGHDDKKLMIPTTVILRHMFTPAELRADEELLSELETDVREECIKFGPVDNVKVCENHPQGVILVKFKDRKDGAKCIEKMNGRWFAGQQIHASEDDGSVNHTLIRDYDAEVSRLDRFGEELEEST

SEQ ID NO: 68129 - protein, 381 aa, Zea Mays
MSISEELPGEGSDGEEEVFINEEDIIHEITIDEEVDSEDIDDSTYAFQGHQDEVFIVACSPTDSSLVASGGKDDRGFLWRIGSEEGALELTGHKDTVGTVAFSSDGNLLACGSFDGQINVWNTATRTLKGTLEGSGSGFEWLKWHSRGHLIIAGSEDCNVWMWNADHNAILNTFAGHSNTVTCGDFTPDGKLICTGSDDASLRIWDPRSAQSRHVVRGHGYHSDGLTCLSMTSDSQTVVSGSKDSSVHIVNLNSGQVVGSLAGHTNSIECLGISSSYGWVATGSMDQKLIIWDLTHQSSRCICEHDEGVTSLTWLGSSRYVASGCIDGKVRIWDSLSGACAREFSGHADVVQSLAITADGNTMVSASSDGSARVFDISMFK

SEQ ID NO: 68130 - protein, 51 aa, Zea Mays
MACAAAPMILTLTGGVGGAYATGNLACMRARAHDLVDRQQGVYYFSMAACQ

SEQ ID NO: 68131 - protein, 66 aa, Zea Mays
MDFGQTSQISFGIMLGIVSGMVFGYPLSLVVVTGYESRDRSQVFDRGQCGGAVLIFDQLIKSNAQP

SEQ ID NO: 68132 - protein, 61 aa, Zea Mays
MIFALSSRSQSSSIVAGLREITGRYGEESEAAPHRQVFNDKLEPGFISILASSESRLMLVS

SEQ ID NO: 68133 - protein, 167 aa, Zea Mays
MPRSPQLSLSGCSSLFSLSSTSTSRDSAALKAPVPAPPAGAVPPRRTPLLSLSVGEEEEDEGEDEEEYLLGAGALDLQLTGPGGGSNSSGGYDDERKNIRMMRNRESALRSRARKRELEKEVRRLVNENLKLKRQCKQLKLDMAALVQQSSSKSSSHIRRTSSSTQL

SEQ ID NO: 68134 - protein, 947 aa, Zea Mays
MADPAAGGAMVPAAGGGSVWANGAPRFGDMVWAKVKSHPWWPGHIYSVSLTDDEEVHRGYRYGLVLVAFFGDKSYGWFEPSELVPFEEHFTEKAAQGGSTRSSFAGAVAEAVDEVARRSALALLCPCKSPDAFRPHPSDGNFLLVDVPAFDTDADYHPDQIQAARQRFVPRKALDYLLDAAVTQRDAAEKAARTVPGMEMAALFSAYRRAVFSPIDNTYAQAFGVDPELALAAEQKAAAERAQRARPLKGGPRKTADQATPAAGRRRGGAGGAAARLMEKIVPGAPAMKTKSSKKDQYLLKRRDAPEASAHSQPQLPDAPPPAPTLAAEDGPPGFPASGDPPTPPLPGSSVADEDFMLQRRVPLVDVPPAVQAQPSEGPAAPKNATKLKKPRKREREEGPDATPDSADAAGDPKKKKKKKKLSDVDGAGGKVAFVVEGRDVLDLTQSYENDPPEELKSLDKPSAAATDGQSPKKKKPAPRPGAGNDPTKAGVKRGPSDRQGELAIKKKAKLDKIKVLSSEKKAAGLEQKDTAAAAAQQQARAAGAKDKAEMGAAKKKEPASARTVRTPSPTALMMKFPLNSTLPSVASLKARFARFGPLDVDGIRVYWKSHMCRVVYRFKFDAEAALRYAKANAMFGQVDTQYHLREVEAGAGREPLAAPEAAPQQRSELRLMETAAFRPGTSGNGAPLPMSRAGAAPARPAVGVGQPPKSILKKSTDEGSSGTTREVSRVKFVLDGADGGTLAPPPSVGGNGNGADGGSSMVAKAAKSVGFAPSQALQPPPRTLQPPMRPAHQQPPRAAVTQQLPPPPLPQHLPYHQHPRGADGTPLAPPPGQLLAYPPRGHGEGPSALPGLPPPLPYQPRPTGFPGGQQLGYPPRSGDNLPLLAGQPQFPPRPSNAKAGSEGPAWRRGEKEFKEEVWRLMTGIAKMVEPLTDKNGFFPYHLFRAQ

SEQ ID NO: 68135 - protein, 705 aa, Zea Mays
MNVKQAYYLSMEFLQGRALTNAIGNLEITGEYAEALKQLGQNLEDVASQEPDAALGNGGLGRLASCFLDSLATLNYPAWGYGLRYEYGLFKQIITKDGQEEIAENWLEMGYPWEVVRNDVSYPVKFYGKVVEGTDGRKHWIGGENIKAVAHDVPIPGYKTRTTNNLRLWSTTVPAQDFDLAAFNSGDHTKAYEAHLNAKKICHILYPGDESLEGKVLRLKQQYTLCSASLQDIIARFESRAGESLNWEDFPSKVAVQMNDTHPTLCIPELMRILMDVKGLSWSEAWSITERTVAYTNHTVLPEALEKWSLDIMQKLLPRHVEIIETIDEELINNIVSKYGTTDTELLKKKLKEMRILDNVDLPASISQLFVKPKDKKESPAKSKQKLLVKSLETIVDVEEKTELEEEAEVLSEIEEEKLESEEVEAEEESSEDELDPFVKSDPKLPRVVRMANLCVVGGHSVNGVAEIHSEIVKQDVFNSFYEMWPTKFQNKTNGVTPRRWIRFCNPALSALISKWIGSDDWVLNTDKLAELKKFADNEDLHSEWRAAKKANKMKVVSLIREKTGYIVSPDAMFDVQVKRIHEYKRQLLNILGIVYRYKKMKEMSTEERAKSFVPRVCIFGGKAFATYIQAKRIVKFITDVAATVNHDSDIGDLLKVVFVPDYNVSVAEALIPASELSQHIRWCKCGNQRGGWRGKLFPFWCRGT

SEQ ID NO: 68136 - protein, 96 aa, Zea Mays
MTHENFVDMLGDRIKRNLRIVSYEFATMGSLHDVLHGRKVFQGARPGPTFGWMQRVQIVVDATKGLDIFMGKFISPLSIGIIEQLISSCLKASRQR

SEQ ID NO: 68137 - protein, 170 aa, Zea Mays
MSSSISMMEARMPPGFRFHPRDDELVMDYLLQKLSGHGHHAGAAIVVDVDLNKCEPWDLPDSACVGGKEWYFFSLRDRKYATGQRTNRATHSGYWKATGKDRAVVAGGEVAVGMRKTLVFYRGRAPRGKKTEWVMHEFRLHPHAAPCLLAAAAPNKGVLQEQNNQPKARI

SEQ ID NO: 68138 - protein, 494 aa, Zea Mays
MLPSWVFVKNKPLIPKVVLLYVPGLDATLYMSHTRLLSSLKELCGNPKPVLASSRMPDERHTIDALLTCRVKRKRDVKTSNESSKPDIDGKLSSLDDLGDIPFPVTYYTLSEKDLEDNGYSFNLPGFVPTVSAPSGSSPHKVLALDCEMCVTKAGFELTRVTLIDIKGLVVLDRLVKPANSIIDYNTSGITAEMLADVSTTLQEIQEEFVGLVYKETILVGHSLENDLMALQISHGLIIDTAVLYKYKRGSRCKIALRVLTRKFLGREIQNTGSGHDSVEDAKAALELAILKIKHGPDFGFQPSLSRQKLTSILHESGKKCSLVDDVSVLERYSDTSCNSIAVFCDDDALSRSMKEVKNNKVTFIWTQFSGLISYFHRRAQDPEKLKSCVAEAIALKTCDGKTASKEARSKICPELKEILCGLDKKIKKLYGALPENAMLIVCTGHGDTPLVQRLRKMLHHEEETIDSRETIVQALGDLQAQAEVALCFCCVKR

SEQ ID NO: 68139 - protein, 621 aa, Zea Mays
MRKKFLVFQDKMDLAPQGLITQQQKANERRPVGSSQIWTRYGVLLPSQQTRKLKEWILTDEQQQLVNASGLGHLALTTGFTIDRSLLTSFCERWNNETNTAHFMGFEIAPSLRDVSYILGIPVTGHVVTAEPIGDEAVKRMCLHYLGESPGNGEQLCGLIRLTWLYRNFHQLPEHPTINKIAYSTRAYLLYLVGSTLFPDTMRGFVSPRYLPLLADFGKIREYAWGAAALAHLYRGLSVAVTPNATTQFLGSATLLMAWIYEYLPITQPQQKNQSTLLPRACRWNFGGATRGQRKKVMDWRKVFEQLQFSEVNWNPYKDMNPAIVPEYCIAADNICYSRTWLISFNIKEAYVPDRFARQFGREQGRLHGVPMWTRRTWSKWKDWRTEYAREIEEFHQLVGCHFTPPAETNINSFPLHESSAGQNDAGCSLNISHNFSAMVEDLKNDLPVIGRYLEGNLLPSDVASFLERVSTMIKSYTPPQGSRRKDRVSHGPADPVRSKNPRKRGRHSLFQDSFPHRYLGTPVNIVFDGTIPLLNGGEALKEQVAMDPWRVSQSHLTMTTSSSSLDSSSPESMKRRREGGDEIPITRDTDCLQSGRLCVQLKMFKHRDGVNAEAANPIFR

SEQ ID NO: 68140 - protein, 380 aa, Zea Mays
MTTSAADDGSSLAPTITEGETTADAGAGAGVECVEGKEMKVGAAAPVEEPDKEAAREEDPGDDDDYEEEEEEEEEEEEEEEEEEEEVEEETETANGKEAELMEPLAALKPGEEVKPEKLEGEKEELDEEPEASEEDPEEVEELKEEGDGIAEEGLVDGSEANDDKDADQLSSGSDSGGSRSRGMQNSELAGGLEIFVDDLPQDCVKEDIAMAFSQSGEVKSVRIIKNSSTGKNQDIAFVCYTSIEAAKKVLAEFKEGIEVKGKMVRVSACQDNNTLYLGNICKGWTRDQVLNTLKSIGIQECEISFPSYKGGSRGFAFLKFTSHYYARAALRRLMKSDAIFGTDRSAKVSFYRTPTKSSKRLIQEGCVSLCDRNKQSKYC

SEQ ID NO: 68141 - protein, 842 aa, Zea Mays
MPASSYSDQSFTGQSDEETEELSKITLENKDIQLDINIREEKHHESCSSSQQVNFDTEGTRSSEASLLGTVGSEKKLEELKQKSGRCVSAVEKANVELEHGIDGGQALDEKCDHASAKAAKAPPSKGREADETADTDKEAFGSRTEKTRRRLQPAAAMLLREFTGADIDADNEREERGRSSSSVATGRSDALVQLLMKGRPAHGDESRQLQSLMQLCEMRSIGSEDLLAAFVPILVGMLGQPATAGASPGVMLLAARALANLVYVLPSCSAISEEHAPNRLFASWNLPADASEFVMEAVPSLTNLLNHHDSKVLEHASVCLTVTRIAEAFAYYPDELDELCNHGLVAQAASLIALGNSSGQEPLSTSTYTGLIRLLSTCASGSLLAVKTLLLLGISGTLKDFLSGPALISGTLVPRAVTRPADQIFEIVILADNLLPHMPAIIIELPTYYHAYKDSSTNKSASIKQEGAGSTGNEKSGNERLLRDQPKLLEQFGMDLLPTMTQVYGSSVNAPIHRKCLSIIGKLMYYSSAETVQSLLGTTNISSFLAGILAWNDLQVLIPALQIAEIMMEKLPETFSKLFVREGSNTMARQVPPQDKEQLDKIISEMLSELSKVNGVSTFEFIRSGVTTALLDYLSCGTFGKEKSSRIGNGGSRLTSGLSALAQPFKLRLSPAQGEKPLRDYSSNIVLINPFASLAAVEGFLWPRVQHSEVASKPIIPSGNNSESVVPGTIAGASLATAMDQSGRRPTTRSKSSAAWGGTSKKDSHDESTTTAKGKLGDSNECNIGSASFSQVQPSSGSGARNTSSRGPDSTEFQSTSTFGSFVAATMAGLASVGGRSVIGG

SEQ ID NO: 68142 - protein, 450 aa, Zea Mays
MRKVCPNLERDDALDTVLEVPIPEEMFSGGGGGGGGSCGFRFGCTSVKAWMRSHAADRCGAGEPCSMSRGELQLMLGVIGAPLVPLPVAVCCRAEQSPCSVLCEQLKTGPIESSSAKYIVQQYVAASGGERALDRVKSMYAMGKVRMTAAEQLNGSDAAGGHCGGATGKGNRGGRRKGRGGEVGGFVLWQKRPELWCLELVVSGCKISAGSDGKVAWRQTPWHQSHASRGPPRPLRRSLQLTASLFADSVCIGERSVDGEDCFVLKVEAEASSLRARNSGSVEIVRHTLWGYFSQRTGLLVQLEDSHLLQIRSGGGGGGGSIFWETTVESRLGDYRAVDGVNIAHAGRTAVSLVRFGDCQQDGSSARTRMEETWDIEEVDFNIWGLSMDCFLPPSDLREGGKESQDVAVAVAKADARPPPIRIPAVAVRVGPSQVAAVSMDDSDSLIARP

SEQ ID NO: 68143 - protein, 813 aa, Zea Mays
MLAARTPVSLSLHHRIVAGGHRGRCVGGSQRRRGGAPCRQFTQALQSLWRHSPPIPPPAPPAAGAATSGEAEPSRQPPVLENAAFEEYYKVSLVFLFGVIVSRTKWHGFRVLFFWMCVSVQQIVREEEWDAFMSVLRKPLPATFRINACLAWHLNFSRKELRKNQALESFHEFLKHESEVGNITRQEAVSMVPPLFLNVQPDHHILDMCAAPGSKTFQLLEMIHQSKELGLLPGALVIANDLNMRRCDLLIHNTKRMCTANLIVTNHGAENFPYCSLAKDCSGSYKDPCKLQKLEFDRILCDVPCSGDGTIRKGHDMWRKWNSGMGNQLHLLQVNIAMRGIALLKVGGRMVYSTCSLNPVENEAVIAELLRRSGNSVELLDVSSELPELVRRPGLSTWKVQDRESWFQSHDEVPHNRKNVVFPSMFPASNSTEESHTVCGDVEVNINNMNSFSRNINIEETSKLNQDMDGVSVSPTKILECTSNIVSSKFPLHRCMRIVPHDQNSGAFFIAVLHKLSPLNGSQIKDTKIQHRLGTDRTIQFQKEPKPETRPYETTLTRRQHNVSEVDDTEVLGRGQKLGTDSQTSKDKNSSEVEIVSILAESGDRMELQKQSRWEGVDPVLVLNDEAVIKSIQSFFGIKESFPLEGHLVTRSPDNARRIYYVSKSVKEILELNSKVGGQLKIASLGVKMFERHRSKDPCPCAYRLSYDGLSLVLPSISKRILYASALEFHRLVQYRSISFAHFTDTRFGEQAASLTPGCCVVVLLEGNRRVDSICKDPSTIAVVCWRGKGTINVMVSPSDRKDLLERMAYRFG

SEQ ID NO: 68144 - protein, 686 aa, Zea Mays
MPGHPTPADALLGGGTSRHHAELLLHSGDDGVSVKDLRLRRVVPPAAGSLDTFPECAAPVKPGFVEITPLEAVSAATAAAAGDFDRKLAPPRSKLVRDPRSFGYRRLLPFLNELTKNDSSIGKEVFPQDTAAHSKDVLGGSDSRLADEAIGVSHCEPEAMVVNTGGDTDVKDACNNVSEEIKIAPHDLTNKPLLAGCTRSRFVHHPSSFSYKRMLPFLMENDISAQECNRVKIRKIAEERQLASNENDVSASGQHCLAASDDSSQECNRGQVETMEEEKPAKADENNVLGGRQLQPPVLEAPPPDFSVVEMQNVMQHEASASSQVPLTSFEGELTSAGDSVQAVGEHQLVASEESLDEHKRDEVKRSIHDAVKSDGGYALDSREFQLAASEVSPENSMAEVQGAAQEESLPLDGVEERSDKGDFVSTEQAQLCVTNESLAAQLQGNVEFAEVPQCQNLDPGCHDVGFGSRTKRVIPLLHRHCAQQPQDSVVSLDDQLLDDDIQMICRPDSRAVDRYLSVEEMSGCIMLTESASNKAGISRPRGAHSMEKGSLSPKKPSPKKGILKRNTRGCKGICMCLDCCTFRLHADRAFEFSRKQMKEADDIITNLLKEVASLRSLLEKPAGQESTQAACRHASRVEEVARNSCQQMFVDLNSHCRIPKPRVRFTEYVEEKKALPSPRRSNRSR

SEQ ID NO: 68145 - protein, 72 aa, Zea Mays
MARRDGGVLTPTSITAPVNARGPSPSDEIQGARAAHNLYSHAEQDQAFCCNPPAITTARIWGDLPTPHGAAP

SEQ ID NO: 68146 - protein, 196 aa, Zea Mays
MSSLLLLQALAPAMTVPRHHFLISPLRLASAATVPFARRFSNAASSNKPEPLLSEPDLESGLYLVSTPIGNLEDITLRALRVLKCANVILSEDTRHSGKLLQHYNIKTPLLSFHKFNEREREPTILRRLHEGEAVALISDAGTPGISDPGMELARLCATEKIPVIPIPGPSAAIAALSASGLPSNEFTFACSVKKR

SEQ ID NO: 68147 - protein, 389 aa, Zea Mays
MMPSGPPNPMGHGQPVGGAAPSLLRTSSSLLSGGGQPGMGGGGGGMLSSQSPFSSLVSPRTQFGGNGLLGGASLLNRPPFGNGGPMPGPGSMQAVGMQMSTLQQRAGLDGASDFISAEGSDPLSFPSSSQVNLGNQMGSDNLQATSQQQQQQMDAMQDMQQQLPMSYNQQQLPPQHSQQLQQPQATVKLENGGSMISIKPEQQMAQPDQMMRSASGVKLEPQQLQAQMMRSLSSVKMEQQTSDSSAFLQQQQQQQHLLQLTKQIRNCPELVSIGGPNAIANPQAATAAQLTLLQQQRLLHMQQQQQQQILKNLPLQRNQLQQQQQHQQQQQLLRQQSLNMRTPGKSSPYEPGTCAKRLTHYMYHQQNRPQVSFFIDRALLCSEDQVLTT

SEQ ID NO: 68148 - protein, 690 aa, Zea Mays
MNAIRVQKEMKKEWARPGRVFNRNITRGGYSRSSLPGVTQEFRVVKDNRIKLKEVSETLPEASQNGDSSNECAFSNVRDKCSTKKLAAQHHLVTCNVNGHGAAHADNGIKIAAQAHDKEVKPSIVRKMEQYEGTQASLVGSHAVLGKGNQNTVDTAASGKNNFGGELCCSSSDPIHVPSPGSKSAGTFGAIKREVGVVGARQRPADSAAIYTSTSNGLVKVVSAPKVSPHLEWKPKSVSPSTAAPPGAPSPVDDGSKTEVSALSKKLSHANVSHEHVIIPEHIRIPDSERTHFIFGSFESEIYPKASLAAYYDAVAKEDLNDHSPSRMDNVGSCSPLPQSEPAVSVSEHEQSLTECVDVRSPGVVGGTNETISSKVTHSQPRLQHQEAAQNFKAYEPDSGYGMSFITKVDGEAAQGIAYSSEAMVLHSVNGYQLPASTATQQPVPQMFSQQFQAPQYPNFLPYRHVFSPQFGSLMVVPNYSSNHAFPQLPHASSYLVMPNGASQLAANGMKYGSNHQYKQVFQGAPAGYGYGNHNGYPNGVIGGTGAIEDMNMSKYKDNCLYAPNPQVETADVWIQSQKESPNMPSAPFYNMVGQPVSPHAAYLPPQSGHTAFSPAPSHPGHLQYPGFVHALQPTSMTMVQNPQTMIHQPAAPPLAGNLGLDMSAMVPGNQVGAFQHNQLAHLGWTTQSF

SEQ ID NO: 68149 - protein, 222 aa, Zea Mays
MSSWLRSAVSRAVEAGGRSGVARAVKGYADTVAHHAGQAVADILHDRMNYKSFKKTVARLEEAAVSCRGGERVELLKRWLGALQDVDAENGSSDLKVSEANDPSGEMDTLKAQTVLFYDADIDGAPMNFCDVFLYSQALEGITLSMILEPPSEEEVSLLLEIFSICLTGGKEVNKEIMSNVQDLAKAFSEYKDEVLVKREELLEYAQSIISGLKRNADIVRC

SEQ ID NO: 68150 - protein, 321 aa, Zea Mays
MCATRCSGSLAVRYGTMRDNVINLRAVLPNGDVVKTGSRARKSAAGYDLARLIIGSEGTLGVITEVTLRLQKLPSHSVVAMCNFKTIKDAADVAIATMLSGIQVSRVELLDEVQIKAINMANGKNLPEVPTLMFEFIGTEAYALEQTLLVQKIATEHHGSDFVFVEEPDAKAELWKIRKEALWAGFAMKPDHEAMITDVCVPLSRLAECISTSKRLLDASPLTCLVIAHAGDGNFHTIILFDPSQEDQRKEAERLNHFMVHTALSMEGTCTGEHGVGTGKMKYLEKELGIESLRTMKRIKAALDPNNIMNPGKLIPPHVCI

SEQ ID NO: 68151 - protein, 608 aa, Zea Mays
MGTGVRSMVFHPDGKTLFCGLDQSLKVFSWEPVRCHDVVDMGWSNLADLSIYEGKLLGCSYHECRVGLWAADISLIGPYALGVLPKANFFAELVQSMEDNPVKPVDSTANSRPASAMAHSRSSYKIKESGIAQSRVRGSHLTPASTDKTKKDRSSTIPRRPDSSLKSSVQSTTLMRRMKLVDSPSTNTKNVERNVGQRDISLASRAVMANNSATAKKSNLTESALVKDIYTTSQAVSAPIVVPRDILEDKTVSNVRRGTGETAAVPDDFRIPVHRRKPSLSGSAADSDSSSRSVFTEPDVCSEGLSSLKFSFGLTPYHKKEEFGDVDNEGIAQIAEKMERTVSLDHSQQLNDDKSFESPCSTTETAKVKYVRGVAVPLGKTKSLVERWEKRETSSTDYSPQTGSCGDRASRNDNHPFHLAEPSTTFEKDLSTVDEAMAPVNLVRNHDEFLNAVKLRLTKLEMMRHVFEQSGIKGAIAAVAKLPDNAVQADVVSALKGKLDLFNLEFFSNFLPVLAGLLCSKTERHAMVSLEMLLDLIKIFGPVIHSALSANLGVGVDIQAEQRLQRCSRCFNHLQKIQQSLNPLILRGGQTAQLAQELSLSLQDLVVI

SEQ ID NO: 68152 - protein, 180 aa, Zea Mays
MSGSGDGLLAYLCCRLATEQKELQGLLRYEDTREDQFLPTAAAPSSSRQRRPVSGNSSGTSGLRAPWPWEGILAAAMGEEKRGMAPQQRTKESPSRGEMAWGKRRERAGAAIYRAKLWTCQTAPTGGRCCSDDLGRRVSAFFAWNRILVAAQNIFLDLYSTIIVKDLESYRSTKIGLSLG

SEQ ID NO: 68153 - protein, 72 aa, Zea Mays
MVDLQSSEADLAKSALFTKHPEMKDWPKNHHFKIFKMEIENIFLIDWFGGPKPISPSQYLEFGRNQGSLMYS

SEQ ID NO: 68154 - protein, 1339 aa, Zea Mays
MKFICLRPPVARAWIPEGEAEKQQTRGSASSFPKIPKLVDEEGLIGRFGSSNKRNITILKNVNGILKPSRMTLLLGPPSSGKSTLMRALAGKLDKNLKVSGSITYCGHPISEFYPERTSAYVGQYDLHNAEMTVRETLDFSRRCLGIGARYEMITELARRERDAGIKPDPEIDAFMKATAVQGQETNIITDLTLKVLGLDICADVIIGDEMIRGISGGQKKRVTTGEMLTGPATALFMDEISTGLDSSSTFQIVKFMRHLVHVMNETVMISLLQPPPETYNLFDDIILLSEGYIVYHGPRENILEFFESVGFRCPDRKGVADFLQEVTSKKDQQQYWYLDQEQYHYVSVPDFAERFKSFHACQQMQKELQIPFEKSKTHPAALTTKKYGLSSWESLKAVMSREQLLMKRNSFIYIFKVTVLIILAFVSMTVFLRTKMPHGQIADGTKFFGALTFGLITIMFNGFAELQLTIKKLPVFYKHRDFLFFPAWTFGVANILLKVPISLVESVVWVVLTYYVMGFAPAAGRFFRQFIAFFATHQMAMALFRFLGAVLKTMVVANTFGMFVLLIIFIFGGFVIRRNDIKPWWIWGYWASPMMYSQNAISINEFLASRWAIPNNDTTIDAPTVGKAILKSKGLFTEEWGFWLSIGALIGFIILFNSLYLWALTYLSPSSGSNALVSEGEDDVNEIALKERSRDARSEDEISQVVYGDLGANTCTNGATNTLVQSRVTLPFQPLSLCFNHVNYYVDMPAEMKEQGFTESRLQLLSDISGAFRPGVLTALVGVSGAGKTTLMDVLAGRKTSGAIEGDITLSGYPKKQETFARISGYCEQTDIHSPNVTVFESITYSAWLRLSSDIDDGTKKMFVEEVMALVELDVLCDALVGLPGVSGLSTEQRKRLTIAVELVANPSIIFMDEPTSGLDARAAAIVMRTVRNTVNTGRTVVCTIHQPSIDIFESFDELLLLKRGGQVIYAGELGRHSHKLVEYFEAIPGVQKITEGYNPATWALEVSSPLSEARLNMNFAEIYANSVLYRKNQELIKELSVPSPDYQDLSFPTKYSQNFYNQCAANFWKQYRSYWKNPPYNAMRYLMTFLFGLVFGTVFWQKGKNIDSQQDLYNLLGATYAATFFLGASNSITVQPVVSIERAVFYREKAAGMYSPLSYAFAQTCVEVIYTILQGILYTVIIYATIGYDWKADKFLYFLFFMTACFNYFGLFGMMLVACTPSALLANILITFALPLWNLFAGFLIVRPAIPIWWRWYYWANPVSWTIYGVVASQFGENQGELSVPGGKPVVVKQFLKDNLGIQHDLLGYVVLVHFAYIIAFFFVFGYSIKFFNFQKR

SEQ ID NO: 68155 - protein, 474 aa, Zea Mays
MRPCSRILAARHFVRSFRFDPSQTTSPAAGFRRLTGANRPFVPKPLFGILLGGFRSNCGVLPGKGVPLGSLGSFLPDSAYQLHGARLQRDTRGNAFSTSANAVTVKKPVGDKVQKDASKKDIDEEIADSQILKNLGKYLLLNDSPDFRFRVALSLVLLVGAKVINVQVPFLFKLAIDWLAALGGAEASLASFTETNATLLALFASPAAVLIGYGIARSGVSACTELRNAVFSKVTLRAIRSVSRKVFSHLHELDLRYHLSRQTGAINRVIDRGSRAINYILTVMVFNVVPTILEIGMVSSILAYKFGSTFAWITSVSVATYIAFTLAVTQWRTKFRMAMNKADNASSTVAVDSLLNYETVKYFNNEQFEVEKYDKYLRNYEDAALKTQSSLAYLNFGQNVIFSSALSTAMVLSSYGIMSGALTVGDLVMVNGLLFQLSLPLNFLGSVYRESRQSLIDMKSMFQLLEVCTRKEDS

SEQ ID NO: 68156 - protein, 352 aa, Zea Mays
MTIQMGSARAVNRRYISDCVPARIRMQASAGFVSASALGMACGPALAGLLQWKFKVYMVTFNQSTLPGWVMAVAWLLYLIWLWFSFKEPNRATEVNEAPQNPASGQTVDIGRLENGIAQPLLKDSVDKQNEDEDEVDDIEETADDSRKPATSIGSAYRLLTPSVKVQLLIYFMLKYAMEILLSESSVITNHYFSWNTSAVAIFLAILGLTVLPVNAVVGTYISNMFEDRQLLMVSQITLLVGIIFSFKVTSTYYVVQYVVSALVTFVSAEVLEGVNLSLLSSVMSSRLSRGTYNGGLLSTEAGTLARVVADCTITAAGYLGVGKLLNVTLLPSLVICVASIACTFLTYNSLF

SEQ ID NO: 68157 - protein, 138 aa, Zea Mays
MPTRLCLGSLTHNATQHKQRSSGAQKNGRKDWGSASKASKAGRGEGKGGGPAVVVRGWLPCPCPVSLVRCRASSPSSSAPPPAHPSKAGQATGGGRREHLSAAAGSRALVTRNFSFSLAASPCCTRRAAGVNCVRFGS

SEQ ID NO: 68158 - protein, 57 aa, Zea Mays
MHFMNPLCSMAQIYLADLLSFYESHICHISMILHLTTYVILVFQKGVWLWQANYFML

SEQ ID NO: 68159 - protein, 335 aa, Zea Mays
MRSAWPTQLARTDDTEKKTDRANTHKMEKSQGAGPVSVARHPSHPTHLLTTTGQHDTEGGSSQATSPRLYSPAVPPHTMSDYNRYGHSYSYGGGYGQGPAPSAPPAPHMPTATSAAPPSSSSYGAYAGYPPAYPPPPSQAAGGFGPAGSGYGFVPVAFPPGTHPDVERAFRAADRDCSGAIDERELQGALSSAYHRFSVRTVRLLMFLFNDPSSSTPSRMGPTQFVSLWDCLGQWRGIFDRYDRDRSGKIDSRELTEALRSLGYAVPPSVIELLIANYSNGVPSNGALDFDNFVECGMIVKGLTEKFKEKDTRYTGSATLTYDGFLSMVIPFIVP

SEQ ID NO: 68160 - protein, 453 aa, Zea Mays
MACHRSVVSDIPADLIIHVNNTKYQLHKFPLLLKCGLLQRLCSDTDDGDEEPVPVALHDIPGGEQAFELCAKFCYGISISISAGNLVPAMLAARFLRMTEAVAKGNLVAKLETFFDSCVLQGWKDSVAALQAAWRISGWNESRIVQPCIDSIVEKILLPPSKVTWSYTYTRPGYNSTRKPHQSVPKDWWTEDISDLDIEVFRSVISTVRASRLLPPPLIGEALHVYACKHLVDPLHVASDAGLTANGVLHQPPQSSDDGEEKLVAMQRRVLESIVTMVPGEPGSVTGRFLLRLLRVANYVSASSSTRAQLIRQAGSQLDEARAADLLIPLPSDPHAYDVGTAEAVLEHFLAQFQRPAPTDERRRMSAAMEKVARIFDEYLRTIALDRSFPVGKFVDLVECLPDIARSDHDGLYYAIDIYLKVRKLQDRNICHGFELMDILRWRAGAPGAEQGG

SEQ ID NO: 68161 - protein, 477 aa, Zea Mays
MEKESKQGFFSALKGEVVRGLSPGRSRGKSLLLPRSRKTAAAEEVAPPEKLAQYAPDPLVTHSGSLRLAGEVLAPLMEGPDVAEDDTFAEDSGRRDGFGQWVRGHLTRAPLIAGGGDGSFRRSDLRLLLGVMGAPLAPVSVSTAEPLPLAPVKGAPIESSSAQYILQQYLAASGGAKVLRSARNAYAMGKVRMVASEFETATRVVKNRGAAAAAAVEQGGFVLWRMSPDMWYVELAVGGSKVRAGCNGRLVWRHTPWLGAHAAKGPVRPLRRALQGLDPLSTAGLFAEARCVGEKKVGDEECFILKLSADIIRHVVFGYFSQRTGLLVQVEDSHLTRIQPHAGGDAVYWETTISSFLEDYRAVDGVAIAHAGRSAVTLFRFGETAMSHTKTRMEEAWTIQEAAFDVPGLSTDCFIPPADVRRDSDSVGEPCELPPRGAKAGAVHPACDAVHSRRRRDVAPADGELATRSTGRWRCDF

SEQ ID NO: 68162 - protein, 66 aa, Zea Mays
MTRYRQLLRSSWQMKMNIARQLKRDRTKLTMKEMVRIVRMRAAIWSYDFSAAVHGSLFHKFQCSEA

SEQ ID NO: 68163 - protein, 233 aa, Zea Mays
MNDNRFIRYYKGHLDRVVCIALCSGKENFLSCSLDRTILLWDHRAEKPQGLLRAQRRPTVSYDAQGMVFAVAYGGRIKMFDIRKFGMGPFATFSVGTDDSEAHVVQFSGDGRRILLTTKAGRVHVLDSFEGNSIASFRAKPILTNSTLEASFCPEGNHIVSGSGDGSVYAWNVESGKVACWESTDVKPPRVRWSPGSLMFVTGTSELSCWVPDLSKLESFTISHTNTRSSSSL

SEQ ID NO: 68164 - protein, 167 aa, Zea Mays
MMRQSCSKDWMISIPLLPIRLGSPSPLCPTGTKQPMELEQPMDDFHSPAANSPNCFDPSTQSACTQPIVAANSDWVRKPEGRGAWLTQNGRQDTAGGSLQPHAWWPVWEGAHCSSSDDFRNFSGQVVGREGSKESKQERSRFHWWLRFWIKGERCREKKVATPWAKQ

SEQ ID NO: 68165 - protein, 340 aa, Zea Mays
MGGGSSSDFHSPFDIFEQLFPGSSTFGGGSSRGRRQKRGEDVVHTMKVSLDDLYNGTTKKLSLSRSALCSKCKGKGSKSGASGTCHGCRGAGMRTITRQIGLGMIQQMNTVCPECKGSGEIISDKDKCPSCKGNKVVQEKKVLEVHVEKGMQHNQKIVFQGQADEAPDTVTGDIVFVLQLKDHPKFKRMYDDLYVEHTISLTEALCGFQFVLTHLDGRQLLIKSDPGEVIKPGQHKAINDEGMPQHGRPFMKGRLFVEFNVVFPEPGALSPAQCRSLEKILPPKPGSQLSDMELDQCEETTLHDVNIEEEMRRRQQQKKQEAYDEDEEEDAQPRVQCAQQ

SEQ ID NO: 68166 - protein, 810 aa, Zea Mays
MKPKSLPFIAFEHKRDAYGFAVRPQHLQRYKEYAGIYKEEEEERSDRWKNFLERQPESSGQDAGGNAKDDGSESLHEKTVVGPRKIEIWTPIRPSLSNIEQMMSLRIEKKQSSASKQQAKDVIHPVKVEEGKLSEDSDDEFYDVDKVDPSQEVQPSDTGNADVGSRSQEENYISKEELECLVHGGLPMALRGELWQAFVGTGARRVEGYYDNLAAEGELDNKRSDSRTSEGVHEKWIGQIEKDLPRTFPGHPALDEDGRNALRRLLIAYAKHNPSVGYCQAMNFFAGLLLLLMPEENAFWTLVGIMDDYFDGYFSEEMIESQLVLEELVREKFPKLANHLDYLGLQVAWVTGPWFLSIFTNVLPWESVLRVWDVLLFDGNRVMLFRTALALLEFYGPALVTTKDAGDAVTLLQSLAGSTFDSSQLVLTARMGYQSVNETILQELSNKHRPPVISAMEERAKGLGVWTDTNGLASKLYNFKRDPEPLVSLSDSTDQLSDVGDGDTNQESDLGNMDDEYGGVIVNSEIDSLPDPKDQVAWLKLELCRLIEERRSAVLRADELETALMEMVKQDNRRQLSAKVEQFEQEISELRQALSDKQEQEQAMFQVLMRVEQELKIAEEARISAEQDAAAQRYAANVLQEKYEEAMASLAQMENRAVMAETMLEATLQYQSSQQKAMSPCPSPRPSMLDASPSQSSQNSSQEFQPRRKNLLGPFSLSWRDKNKEKPNNADDSTNTKSTNNDEMVETSNTNDEKHRETLDLNSEQRAESPKADVKMRAETPEKDNDLPGVQLVTDDLNGHHEQMQEIKLD

SEQ ID NO: 68167 - protein, 372 aa, Zea Mays
MSRIICFLDQFLRSCSTYQTSSSPTQTPSSSSSPSGSPSPSNAASNSSSGSTARNSNSTSSKKKKPSTLRTVGYVLLAIVLFIVLALLVVFCLSKYQERQTRRDYSMAQLGRHQRAEEPKSKQASVQSRHDAKKGLSEVPERKKPREINLAVPVAIEKPPEKRKEHVINLERTESEIFAAAPPPPPPPPPPPPPPPPPPSTPPPPSPPPRLPSPPPAEKVTVNPIVRPVKRVNTPPRTGPSTSATSFSVASLQQYTNSFQEQNLIRESRLGKVYLAELPEGKLLEVMKIDNANGRIPVDDFLELVACISDIRHPNILELVGYCAEYEQRLLVYNHFSRKTLLDVLHEGEDIDNPLSWNARLQIALHAAKALE

SEQ ID NO: 68168 - protein, 174 aa, Zea Mays
MAEQRRRAEREPGSGDGFLSVFFCNRIRTFFFLGRSRERRERRSASRGSRRPWRLRLARAKQEAPRGSPAMGNAFGDDITDASPGNNVAAGLVGWLWPTAMTHTGLHLGALRLDGEGAGCTPRGLLDGPERDPKQRCGTDRLLRLRSARRGTRGRRERGVIPSQHDDEASRGAT

SEQ ID NO: 68169 - protein, 626 aa, Zea Mays
MRMRSHRWWQPAASKIGQRRPRVRIRGKHFVPHFLILRPFFSSHFSLSPESRDWSPLSCFSESLPQRTNLEWGKAACSEDDIQKCVAAGAFHPGELVEWRAPVKDETPTLSTMEDQFVILSLTHIICGLRVDASDFLVSVLEYYRLEWSHLTPNSITALSIFAHLCEAYVEAPPTVEVFTHFYSLYHNRKGETTTLGAVYFRLRDRMKKNYPLYYLRSSQFMWVSLWFYAKVPKSCRLTFRGDILKEENNWNWKDLLPLSCEQMKQVGQIMKLSNQGLTGADIIHDYLKRRISPLRRRMHLTCNYSGLSDPTRDSDKDLSVEDIESKLSYLLDLKRMGVKQPTGRLVRASTNDQANQPLDLLNVCSTHEAKKEAQPQVCASLRRYTRQSAGPRKVAVPPPLKIDPPPTQGPAPEEILDATTNIATAVSPNLGVEQKSIEHPTVAEERKIAELVKPTFSVIGAKRKASAPRSRSKRRAKYSLLSVVTKTRMSSLDTGSIKGTSRTKEAVLALNSRSIGLARCPPASLAEGTGNGGLFMLAKVVDHTKVVEDSMSNILLNQQVGDSSRKEVDPAQSITEIVQDQEAIEVSAAIPVPNKEEINSGVIWERMQKVQSENKQRSWSWRINA

SEQ ID NO: 68170 - protein, 67 aa, Zea Mays
MAFSSSLAPFFPPSGTFRAHPARRLRADAPGRFVASCLPPPDVVVTREQGKNARLISALMTSSTGLL

SEQ ID NO: 68171 - protein, 59 aa, Zea Mays
MDGRQRHWCGDKVGEHRRGARCASDTGATQKGAGDKVRCPLAKETSGNWNHVASVLQGR

SEQ ID NO: 68172 - protein, 315 aa, Zea Mays
MEDDEGKKQHQRIIPNANGHVMIVVPDDAHAHALPASASAPPRDADGPDEESGDEEERTPAGATSSLWRAAVLALAALALAAAAYACLYAGGDDDAGAAWRLLEARRQEDGGDDEHPGGRTSFLLPLYPKPPRRGGDDWPQNSTLFPHSLAGNLFPEGLYYTAISLGSPPRPYFLDVDTGSHTTWVQCDAPPCASCAKGAHPLYRPARTADALPASDPLCEGAQHENPNQCDYEISYADGSSSMGVYVRDSMQFVGEDGERENADIVFGCGYDQQGVLLNALETTDGVLGLTNKALSLPTQLASRVMYAEPKSSR

SEQ ID NO: 68173 - protein, 161 aa, Zea Mays
MPCQTQHEMPKAIGRQTIKHGAPPRIRIQKLALRCPVSAPASTHGSSTPLVRACLFASSPCRELRYPAPAVRGVSTPRGQEGEAAEREVRAGSQGRWRAGRVAEPRGDAGLRRSGGRGADHRERRASDVGLTAPVPTLALALTGAVGVLTAFLIFQSGTRD

SEQ ID NO: 68174 - protein, 69 aa, Zea Mays
MPCLRHSTIREGSCSMITTLARGTTCSLCGQSRTTNIYHFNFHSHGGCLRSLESKWETSYAECFVICFS

SEQ ID NO: 68175 - protein, 242 aa, Zea Mays
MARKHQHVAIFTTACLPWMTGTAVNPLFRAAYLAKAGDWEVTLVVPWLSKGDQELVYPNKMRFSLPAEQENYVRRWLEERTGLLPKFDIKFYPGKFSTEKRSILPVGDISQTISDDKADIAVLEEPEHLTWYHHGRRWKSKFQKVIGVVHTNYLEYVKREKNGYISAFILKHINSWVTDIYCHKVIRLSAATQDVPRSVICNVHGVNPKFIEIGKLKHQQLCQREQAFFKGAYYIGKMWGRC

SEQ ID NO: 68176 - protein, 585 aa, Zea Mays
MIHPAKKAKLEVQEDINVIGNFDFSSIHSHTTSPAKAITDDIMSESVAQQKSIPDIMSIVDGEVYRRDPGRELAKPVGRRAGDKPGPRVKKIFRKEEGKESSALVQKLQKEIKEVVRDTGTNILEKDESFDEKLLTAFRAAIGKSVDGPAKSTNTNQLIRTRRSLLQKGKKRENLTKKLYGTSTGRRRSDWHRDWEVEFWKYRCSPGINPEKIETLQSVLQLLKKSSEMDKESAKGKREENNNSSILSRLYLADASVVPRKDDIRPLSALAGCAPLEKSSQIKASCNKSSSIPAGGNETMKISSPSSTGKASSYSILNKEAPSRRENRNSQPSQDKRNQSSGDIKQDKRKWALEILARKNASSITNKDQTGGNDALKGNFPLLAQLPVDMRPQLAAGSNKKVPVSVRQAQFHRIAEHYLQKANLDVIRRCADTELAIADAVNVEKGIYERSNSKSIYVNLCSQATRQHAKAKSDNDTSTLTKRTESGSDQISQEATSEGTNVSGSDMEEDLNRAAISNQKNELEDDTAPEHIVHKDTVSFNSAEDALRKAGLFDSPPNSPERGNTAVEGNSESTAVSNCPKFSQK

SEQ ID NO: 68177 - protein, 488 aa, Zea Mays
MSPAAGGPAPTPAQSAPAVPQAIAPPPGPGRAAPAAPRRDPPGDPEGADPANAAARKTPWSMLVQPPAAASAAAAGETPESGGIIGGDASWPALAGSTRAGPKSGSSDSLKALSDASGPSPQEVPIAAPSVPPYPVVGANPIPTAQNPTSIPPPMAAASSQQNGGTTQTIPVRRGGSSGGNGGGGSRGYGSIGGRRAANSNGGDGSSGSGGDDNWNNGSLGTGSGCNSTNGDGSINLDDNAPGAGHAGGNGNGSSRDAPGNRHWNHNIRGGISSNGAGSGDGNNRNSSGSSNHWNNNPRISSGSSNGVGGRGGYRGRRDHERGANFPRNFPRVPVMPYQQQQQPGIYQPGPFYRPPPPAAHFMVPQHFYAPPFPYPVEQFQNMHLVRPPMQPSWVPPQDLPNLQDDIRNQIEFYFSTNNLCHDTFLRRHMNDQGWVPINLILGFNRMRAFTSLVDTNYILDAIRGSELLEVQGDNVRRRNDWMEWLLH

SEQ ID NO: 68178 - protein, 170 aa, Zea Mays
MSGRALKDLNVSQSADLENGKDNSVKSCITKPVLNGNKCANKEEKAPSACHDAVTNGNAAAIADVEYIDSENLVDLPDVDAALSTLAKRLDSKDWVMTCEALNNVRQLAMYHKERLQELLEPLVPLIVKSVKNPRSAVCKTALMTCADIFKAYGDLMVHSIDPLRQLLYR

SEQ ID NO: 68179 - protein, 128 aa, Zea Mays
MAAPAPATTGDLLRVDPLELRFPFELKKQISCSMQLSNHTDDYIAFKVKTTSPKKYSVRPNTGVVLPRSTCDVVVTMQAQREAPPDMQCKDKFLVQSVVAPAGITVKDVTGDMLRRSLGIRWKRSNCE

SEQ ID NO: 68180 - protein, 411 aa, Zea Mays
MARRGLMEQDLSKLDVTKLDPLSPEVISRQATINIGTIGHVAHGKSTVVKAISGVQTVRFKNELERNITIKLGYANAKIYKCEDDRCPRPMCYKAYGSGKEDSPLCDVPGFENTRMKLLRHVSFVDCPGHDILMATMLNGAAIMDGALLLIAANESCPQPQTSEHLAAVEIMRLQHIIILQNKIDLIQESAAMNQHEAIQKFIQGTIAEGAPVVPISAQLKYNIDVICEYIVKKIPIPERNFTSPPNMIVIRSFDVNKPGSEVDEIRGGVAGGSILRGVLRVNQKIEVRPGIVMKDENGNIKCTPIYSRIVSLYAEQNELQFAVPGGLIGVGTTMDPTLTRADRLVGQVLGEVGSLPDVYVELEINFFLLRRLLGVRTKGTEKAGKVSKLTKAHRACLHEPRREGCSEPSC

SEQ ID NO: 68181 - protein, 1024 aa, Zea Mays
MRASAVPMEASASARRSAAGPDPRAKKPRLAPPPRDPRSYAATASSNGNTSAAEQALVDELLGQYRTALGELTFNSKPIITNLTIIAGENLQAAKPIAALICANILEVPSEQKLPSLYLLDSIVKNIGKDYVKHFSARLPEVFCKAYKQVDPSIHHSMRHLFGTWKGVFPLPPLQMIEKELGFQSSANGSSSAAPSRTDSQSPRPSNSIHGILGSGAKTTVIADTGGDIERPNRLGTDRNAGRRLDASNARPNIQRTQRDPSSNSLHEKQAVRDVGGLGFSNISQQAVVGTGQVRSKPKAQDGIGGPYYASGVGSSEEQFDRRSNFYASKDARPSGSVRLESALLPTPSINADRVGKPSSNKSWKHSEEEEYVWDDVHSKAAEYGGSHNVIKGEWMSDDGNAKFANLQRAKWADAGPVERIDPNTHKLDNVSRFGLGAGQERRISEYMDQEEYLLGKREVEARIDKEIRSDGQQFPAARGSPLWVSQEKTLLDIGLEPRISRFSTQPAERSTIYTGTMSAGITSSVPVGLSGNYAGRSSLDTANGMPIRSTEAFGQQKHRYWSSSPPQADTSSSTAPFARQGSPNPAESDFYPSRSLSRQNPQEYSKRALPVLAKDSHVVVHNDGFTQGQPSLQATRQTQKYPILQSKSHIKPSDQLQASFSRENSPSLFRPSIELGEVSLPSDSTPISSDLTSASNLLASLVKSGFKPNNHSDAQALGPSGPLPVASLSLQNAAGENTTLQAHTPNTSRPPLPPPPSTQSAEKAAPLSSLLSSLVAKGLISSPAYDSSSAVISQPNKASSMNVKDATASAVPLLALRPSVGKASSNSDSSAPTNASLTKAIEIKMSDLIGLEFKPEKLRKYHEHVISSLFDDDQSHQCKTCGNRFRLEELSLHTSSCGQRKSETIYTGIAPKRWYPSKNIYIDGSHEIEDSTEASDGDLGSAEEVCEFMVPSDERQIICALCGEPFDDIYSFEKGDWMYKDAVFLDYPKGESSCRNSVEGEEHVPIVHVRCMPRGSNDGMEVD

SEQ ID NO: 68182 - protein, 496 aa, Zea Mays
MGHPLIIKVEVDEDPAEAKKGDDDIKTEPKKKTKTVVEKYWDWELSNETQPIWLRNPKEVSTEEYNEFYKKTFNEYLNPLASSHFTTEGEVEFRSILYVPATRKDDITDNRKTKNIRLYVKRVFISDDFDGELFPRYLSFVKGVVDSNDLPLNVSREILQESRIVRIMRKRLVRKAFDMDYERFWENYGKILKLGAMEDKENHKRIAPLLRFFSSQSNDELISLDEYVENMKPEQKDIYFIAADSLSSAKNTPFLERLTEKEYEVLLFVDPMDEMAIQNLSSYKDKKFVDISREDLDLGDSNEEREEIKQQFSQTCDWIKNRLGDKVARVDISNRLRSSPCVLVAAKFGWSANMERLMRAQTMGDTTTLDFMRSRKVFEINPEHEIIKALNAACRNNPDDPEALKALDVLFETAMISSGLSPDNPAELSGKIYEMITTAIAGKWSSQSQAQPDNTTLQHAAPGRSDEPLEGEVVEPEPVEADQHKDDISARIVLIT

SEQ ID NO: 68183 - protein, 340 aa, Zea Mays
MRRSEPRNLPFQALRSRSRFASLSFARFPSSRSRPSPLPGQESNGTSRKARAGLTCPHSTCASRLSEVLPPLFSFPFGPWAGRAPRRMASSRVMASSSPPQHAGAGSSSDLARFRSSGGIGSMNMDNIMREIYGPEAVNATVNGRVEPSPAAPEAAARRTSEEVWKEISAAGGLSAPVLPPPPAASTGAGARGGGGGASEMTLEDFLARDSCAMAAVMEGDMALGFPNCEGDAAGSVAGEAGGGRGSRKRALLDPADRAVMQRQKRMIKNRESAARSRDRKQAYIAELESQVMQLEEYQAELLTEQEDRRQKRLKELVERVVPVIRKKSPQDLRRNNSME

SEQ ID NO: 68184 - protein, 79 aa, Zea Mays
MEFSPRLLAVRVHKSDEWIQLKCHRMDPEFMLFFCALSACASWLSTSIAIGRYFVCLFCCLLDVNEQVCMLVLLLDKKY

SEQ ID NO: 68185 - protein, 547 aa, Zea Mays
MEGRNPVQRFVDSPKPYNRRKARGMQTRMDSSDHGDRQGPRACEELPGKMDNDRADRQRLKACEFPAKMDNNHADRQVSKACESKGNACELPGKMDNDHPVRQGLKARGLLQPKSDASEDGVCEGLKACGLTANKMDATDQCDHKGSKVCRVVTTKTDTSDQGDCQTFKVCGIAAKMDVNDHADHQGSKASGMPTKTDANDQCSNQGFVTCPFKTAERLDHLLNQPANRYCADCGAPDPKWVSMTFGVFICIKCSGAHRSLGVHISKVVSVKLDEWADEQVDILADSGGNAAVNMIYEAFVPENYAKPRQDCSAEERNDFIRRKYEAQQFLTNPQLSCPPRRNEKHNHQQHSTSSSRHGLGHSFRNSWRRKEHEAKSTKKTIEVGMVEFVGLIKIDIIRGTNLAIRDVMSSDPYVIINLGHQTMKTKVVKSSLNPVWNERLMLSIPDPVPLLKLQVYDKDTFTTDDRMGEAEINIQPLVAAAKAHETSAIADTAQLNKWLAKDGIWIPRDSAISIVNGKVKQVVNARLQNVERGQLEMELECVPLTQ

SEQ ID NO: 68186 - protein, 526 aa, Zea Mays
MKKYVFGLGSAQVLATTAAVGVIAHRFAVLPGPAAIVVGSGLALSSTAVVLQVLQERGESTSRHGRATFSVLLFQDLAVVVLLILIPLISPNSSKGGVGFQAIAEAMGMAAVKAVAAITAIIAGGRLLLRPIYKQIAENQNAEIFSANTLLVIFGTSLLTARAGLSMALGAFLAGLLLAETEFSLQVESDIAPYRGLLLGLFFMTVGMSIDPKLLLSNFPMISMILGLLIIGKTLLVTFVGRVFGVSTIAAIRVGLLLAPGGEFAFVAFGEAVNQGLLSPQLSSLLFLVVGISMALTPWLAAGGQFLASKFEQHDVRSLLPVESETDDLHDHIIILGFGRVGQIVAQLLSERLIPFVALDVRSDRVAVGRALDLPVYFGDAGSREVLHKVGAERACAAAITLDTPGANYRAVWALNKYFPNVKTFVRAHDVDHGVNLEKAGATAVVPETLEPSLQLAAAVLAQAKLPMSEIQESINEFRNRHLSELTELCATSGNSLGYGFSRVMSKSKSISSDDESETVDGALAI

SEQ ID NO: 68187 - protein, 914 aa, Zea Mays
MLAVREGRGNRRMPAKYLGALAEDRRPDLYRQVGCVTGILQAFDRRHHLASSHKRLLPPTGHAPSNPSKGGECTRYSPQVVLEKNSSKTWADSQRAPATELSQTSYSSSPSSSFSSLDGNRSTQQDLSSTDRMLFPERPFKSSPKLKSSFDSDNGLDYPDDALTKSKNMPIVQSSLPTLGIRNLVKDSIYKDSHELSVRISTEEEVKDHPSNCGDQPMQLNGPHHDSTQGKSKGLMDINESLRVLAKLREASWTPPESVHHARLSYDAPRFSYDGKEATSKLREVPRLSLDIKEGHLWNREIDSRLDPSLSSADRNSNTVTGSNAAFETQQEQPACKRLPSVVAKLMGLEELPEHNQSTASSHACNTVQENKQDAMLNSLSISYQYEHAPQQERNPDSTVRNLPNSKFPVQTAPWKQQERIVLPRKLPKGSKGAHGREPAAPWNQLKDLDFQQPNKDLRALKQILDSAKGLLENKKREEAFMPKLYNGNHDDQEMASANMRLNRNTNNMWMPEESNAESSFKSPIVIMKPSKSANLYSKVDSSVFPLGGSSDLPQPQTSNSTDRRKASTINRTAKGQYAKLSPRVPTSQPLVSCDRRSYGRNDDSSNNQKSSSLLVTESSTRRQQLPRNSSVSMQKNKNSTSPKLLQRKLDPERRARPPIPSAESNKSERQSGDRNNSETVSPRSKFRRKLVRPQGDDGMPIGLNNRTRSLYQHDNDMSIRSDGSISVASELDIISNDRSTGVNISNFEQGIGTPSGRNPQKVKTSYDANMDVPSVDPSAAISERPSPVSVLDSSFDQEDLFPTSRTPNSLAVDDERETLEEPWKPSVAIQSKNNKLANVASLLEKLQQLSVNKDEDAPPVDHIAFLCETESPDHRYVSEILLASGLLMKDLGSGQTGLQLHSSGYPINPEADV

SEQ ID NO: 68188 - protein, 337 aa, Zea Mays
MQTSLSTASSTNSYTKTFDGIDVAGRRLANEVLEVVNKMPSLRKISFLAHSLGGLFARYVIAILHSVSVETKNAGQSSALIVPTTRGPAKSRCASGLGSIAGLRPINFITLATPHLGVRGRNQLPFLQGLSILEKLAAPLAPLIVGRTGAQLFLTDGDPSKAPLLLQMASDCDDKNYISALAAFKNRVLYANVSYDHMVGWRTSSLRREKNLIKPSHRSLDGYKHIVNVEYCSPVSSEGPHFPSKAARAKEAAQRSPNRENTEEYHQMMEEEMLHGLQKVGWKKVDVNFHSSFWPYSAHNNIHVKNEWLHNAGAGVIAHVADSIKQQESRPCLPANL

SEQ ID NO: 68189 - protein, 212 aa, Zea Mays
MLYLYGGMMEVKDREITLDDLYSLNLSKLDEWKCIISASESEWLEISEEEDDDDDDETDDDENEEGDASQTDEDEEESDEDAAKNVSSAVSLLKGESKTMRRKEKRARIEQIRVILGLSDSQRTPVPGESLRDFYKRTNMYWQMAAYEHTQHTGKELRKDGFDLAETRFKELKPILDELAVLEAEQKAEEEASASTSSKRDTKKPKQKSARR

SEQ ID NO: 68190 - protein, 197 aa, Zea Mays
MYARARLTINPDKVYRLAMTKLNTSAAILEVMGAPLTGTDVRAYVMSGGGPKLKDFKFKLGSKRCFLIFPIKGSERRGLVSVEAKKKNGQYDMKLLAVDIPMASGPDQRLFLVGDEQEYKVGGGLISELRDPIVKAMAAEKEFDYLDEREDEEDERREREEAEQEEAEALRREEERLRQAGEERRRREEAESLEKAT

SEQ ID NO: 68191 - protein, 147 aa, Zea Mays
MSMGHCSEQRTGFEVTKDWNGADQFAIRSPRGASVRVCLHGGQVVSWRNHRGEELLFSSSKAIFKPPRATRGGIPICFPQFGNCGTLEQHGFARNKIWTIDDEAPPLNYGDNNSNKASVDLLLKPSEDDLKCWPHWYGGLYSLWIWM

SEQ ID NO: 68192 - protein, 53 aa, Zea Mays
MHFCMGLMAELCSSAASDSLFFFLIFFSPAAAPLGRQGASRLFLSLILCLRSR

SEQ ID NO: 68193 - protein, 265 aa, Zea Mays
MLGHGLVTDPSRTLRCPVNSRVSSAPLGLVSSLNFNRGCKGKNKIFNVDRHTKYSTSFCYAPRNARITPLATASFGDMADSSTPIFPRIHVKDPYQRLGISREASEEEIRAARNYLISKYAGHKPSVDAIESAHDRIIMQSFFDRKKPKMNLKKKFRELSQSRAVKAIQGRFQTPRSKVIWQTAIAFVLLGVLTLAFPTEEGPTLQVAISCAANIYFIYQRVKSGWRAFFYGFGSFFASWFLGTFLMVSVIPPILPGPRNLELMY

SEQ ID NO: 68194 - protein, 162 aa, Zea Mays
MKCLWKTMYYPLCSQSLLSEELIWIRMPLEPSSQNPSMQIAVIRHVVSGILLHNTIYDVVPLSSKLTVLDTQLPVKQAFKIMHDVGTITGMLTASDFVLILRKLQRNIQVIGNEEPISAWKEAKLQFYGGPDGAVMQRTPLIHTGNIDLRAKKEAQLGMLPV

SEQ ID NO: 68195 - protein, 108 aa, Zea Mays
MKNMPIGAIKPKEDEEEVQNIDRPSSLNVPQDDEKDERHANKDTFVSHEQARVQAEDVDAPGSSSQVVNRRNSSLLQAHPQNQIIGSPSQGVITRSHRHASFIEHHSF

SEQ ID NO: 68196 - protein, 978 aa, Zea Mays
MITGMERNGESHLKDPLLPTTSGASPAGASPRKERKTRKVLFSVRGISCASCAVSIETVVAGLNGVESIQVSSLQGQAVVQYRPEETDARTIKEAIEDLNFEVDELQEQEIAVCRLRIKGMACTSCSESVERALQMVPGVKKAAVGLALEEAKVHYDPNVTSRDRIIEAVEDAGFGADLISSGDDVNKVHLKLEGVNSPEDTILIQSVLEAVEGVNNVEWDTVEQTIEVAYDPDFTGPRLLIQCIQDTAQPPKCFNVTLHSPPKQREAERNHEIRNYRNQFLWSCLFSVPVFLFSMVLPMLSPFGDWLEYRICNNMTIGMLLRWLLCSPVQFIVGWRFYVGAYHALKRGYSNMDVLVALGTNAAYFYSVYIVLKALTSDSFEGQDFFETSAMLISFILLGKYLEIVAKGKTSDALSKLTELAPETACLLTLDKDGNAISETEISTQLLQRNDVIKIVPGTKVPVDGVVIKGQSHVNESMITGEARPIAKKPGDRVIGGTVNDNGCIIVKATHVGSETALSQIVQLVEAAQLARAPVQKLADKISRFFVPTVVVAAFLTWLGWFIPGQLHLYPQQWIPKAMDSFELALQFGISVLVVACPCALGLATPTAVMVATGKGASQGVLIKGGNALEKAHKIKAIIFDKTGTLTVGKPSVVQTKVFSKIPLLELCDLAAGAEANSEHPLSKAIVEHTKKLKEQYGSHSDHMMESRDFEVHPGAGVSAHIEGRLVLVGNKRLMQEFEVPLSPEVEAYMSETEELARTCVLVAIDKIICGALAVSDPLKPKAGQVISYLKSMGISSIMVTGDNWATAKSIAKEVGISQVFAEIDPVGKAEKIKDLQMQGLTVAMVGDGVNDSPALAAADVGMAIGAGTDVAIEAADIVLMKSNLEDVITAIDLSRKTLSRIRLNYVWALGYNVLGMPIAAGVLFPFTGIRLPPWLAGACMAASSVSVVCSSLLLQLYKKPLHVEDAPRPREDSDLV

SEQ ID NO: 68197 - protein, 242 aa, Zea Mays
MAPPLATRGLPLASRGPPSCAASCSSCLPSYLQLGRRPSRRFRCSSPQVDAAAVPPGKGGEYRPSFADDLLLAFFRSKMVKVRVLQSLFPPLLLVLYKALLAPIANGQLAAMMLARATAISCQWLMGSCSVNSVTLPDGKSWSSGVFVEKCKYLEESKCLGICINTCKLPTQTFFKDHMGVDLYMEPNFEDYSCQFNFGVPPPPLDTDKALKEPCLDICTNARRRRELGRNSSPDELSCPQV

SEQ ID NO: 68198 - protein, 240 aa, Zea Mays
MRMAVRSVAKHFPTAIVSGRCRDKVFGFVKLAELYYAGSHGMDIKGPAKASSSRHEKAKAKGVLFQPATASEFLPMIEAVHERLVETTRSIPGAKVENNRFCVSVHFRCVDEKMWGELWESVKGVLREYPRLRLTQGRMVLEVRPTIKWDKGKALEFLLESLGFAGCTNVLPVYIGDDRTDEDAFRALRRRGQGQGVGILVSKHPKETSASYSLQEPAEVMEFLLRLVEWKRLSRLSRTQ

SEQ ID NO: 68199 - protein, 316 aa, Zea Mays
MCSNFQEEEQCFPMERMLTLMNLHPSSHSLMALSELHLILDVGDSHEAQVQFALERGVPAVIGVLGTIKVPYPSRSFDMAHCSRCLIPWESNGGMYMMEVDRVLRPGGYWILSGPPINWKKYYQSWKRSKQDAEEDQHRIENIAEMLCWDKIFEKDDIAIWQKQGNSYSCHQKDGHASKMCKVQDSDDVWYKKLESCITPPIEAAQLKKFPERLSAIPPRILEGQVPDITEEVYEEDNKLWKKHVNTYKRVNKLIGSSRYRNIMDMNAGLGSFAATLHSSSSWVMNVVPSISERNTLGIIYERGAKPSQHTLGHTT

SEQ ID NO: 68200 - protein, 536 aa, Zea Mays
MWRRQQTLLRRLPPLRVVAQAPASWPACRLGRFCGSVPEKRKGKAAPLQARGMVDRFRMRAKGGDGGNGCVSLRRSRSNRQGMPDGGSGGKGGDVILECSRSIWDFSGLQHHMRGGRGGNGVSKNQIGTRGPDKIAQVPVGTVIHLVEGEQPSLTVNKPTRALDPWDIPSAEEHSSDLDQIVNIVAEGFDGGLSHRHIAPKHNTDGNDTVKGSSSHSEDPKYFHTCSKLQFSNSNRDVRIYSCQEGTDEKDQTESEDEEFWEDEDEFDMDEEEEEDEKEEQDVQYCVAEMTKPGQRLIIARGGKGGLGNAFVMKEMRPSKANRQEKIARLSTGQPGTESILILELKSIADVGLVGLPNAGKSTLLSALSRAQPEIADYEFTTLRPNIGSLTYEDYFSVKVADIPGLIKGAHENRGLGHAFLRHIERTKVIAYVLDLAATLNGRKGIPPWEQLHDLVTELEHYQKGMTRRPSLIVANKIDEEGAEEMYEELKRRVQGVPIFPVCAILQEGVPDLRVGLRNLMDDSDPQGVDFEENDC

SEQ ID NO: 68201 - protein, 1060 aa, Zea Mays
MANNRAASFAKNNVSAAAAINSSSLAPPISNFASASLVKSLNYVRSLVARHTPKLSFQSIVAAKQSLPSLSSFLNRSLLSQLTPEVISNREHLESKECHSSPDFISSASEKVDVGEPVDDSKYISFDILSWRWHVYGERQSSLSAKESDFVGLQDFHIHGFLEVGAAALLVGDMDAKINDQQWKYSVIQEFPDIDLLQPSSSAASTFASSQSHLKAITASKRMRSAPNQVWMNIPINTFQPRARPLFQYRYYSEQQPLRLNPAEISEVIAEVCSEATSNANQLIVPSRLSTQSRQPSADVAFSVLIKLVIDMYMMDSETAAPLTLYMLEGMLSSQKSSARTKALDLILNLGVHAHLLQPMVIGDAPLIDKSESVNRSYLSNEYGSSINEPREAEPEVEQKISPAIDQFESWLLKMLFEVLLLLVQIEERQEIVWASALSCLFYFVCDGGKIIRSRLGGLDIRVVKTLLEISVEHSWAKVVHSKLICMLSNMMYQVSDLTQNGVSDTHFVPERIDLLGGIDYICLEYSRANSREEKRDLFFVIFDYVVHQINEACLAGGISTYTYDDAQPLASLLAFADAPEAFYISVKHGVEGVGDMLRKAISAALSQSAQYDQLNVLLDKVMRKLDGTASTFSRIDNEFSYMIQVTKSCKCFGSIKDGCDDADVALRARLCWATLHSLLHSHISSYRHHGYIWLVELLLSEISEETDGSVWSKIQKLQEEIEVAGSQDLSCSEVSLPVCMLCGLLKSKHNFIRWGFLYVLDKFLMRCKLLLDDNDMQDHTTADHNKNCLDKAFAVIDIMNSALLLVVQNNETDHINILKMCDMLFSQLCLRIPSTNAMQVRGLQSLGQLFGYTSKNIDSHLETLASHQSIGNKNICRSETLQDIGIDQSGQSTSFCEASMAALLLRGLAIAPMQLVARVPTSLFFWPLIQLEGAASDDIALGIAVGSTGRGNLPGATSDIRAALLLLLIGKCTADQEALKEVEGNEFFRGLLDDTDSRVAYYSAAFLLKRMMTEEPEIYQRMLQSLISKAQQCNNEKLLENPYLQMRGILQLSNDLGVQ

SEQ ID NO: 68202 - protein, 678 aa, Zea Mays
MDAADPLCAITSPARLLPRTLGPTPSKVRGALLEAIALARSRAAMVLKEHGDIQTLYHDDAMKAMPPTNVSKGQQGRRAALDRKRARFTMKDTGSKAVPVVDRSKLLNISDPVAFFMALDRLEEAEDEIKRLNGEAEKRILIFDPLDEPIRQPGLRGRKSFRSFKVTEDATTQDPIEVLASQTATMTGSQFSQDVMHAVADKNEQSVPSRSGEAISDVSGKEDSLAEKDGRDDLAYLLTSIQDLDESEEEAFIRKTLGLKEIRKGRVSLCNSIPGVRSLRSDTEQKGSMKVRPPESHLPQTRQDRISELEKHLFPGGAANAKCTDDESEGSPDIVMGEPSLVHDSSEVLMTNENSTGSEIDRRTPNLCARAADHALDPEPNLPDHAYERQTRGSSLGLCKNTEVANEHEEDDVHIEYPTTGGSTYQTEVSSHDLEGSLTEELVSEPGRHAAPDDIYRTSHAAEDSIQHLEVVKQGGVLQDKSSQSLEMPLEDIDPLYRPQMHGGSTKKSTPVLCNALSPIEQKQQAAQEGKRKQQAKRVKKVSDESSHALEISQANFEPENEPHNVDVNMEQPTVMSSAKGQKGAQRRNKTKKLNQRKILGDVDLARQSGVRRSSRIRSRPLEYWLGERLLYGPIQDTLPAVIGIKAYSPGQDGKKTLKVKSFVSEQYSDLVAQFAKY

SEQ ID NO: 68203 - protein, 801 aa, Zea Mays
MAVFLLLLRLVVFSLSFAINAVQTAPASHAQVHIVYLGHNNDLDPSLTTDSHLQLLSTVFTEPNEAREAILYSYSCGFSGFAALLNSTQATTLSGTDGVVSVFRSRMLEVHTTRSWDFMGLRLHMHTEQSSQRHLKFGDDVIVGVLDTGVWPESKSFRDDPHYGPVPSSWKGTCVVGDEFDPAAACNRKLIGARYYLAGFESELGPLNTSDGSEYRSPRDRVGHGTHTASTAVGSVAPNASYFGGLGGGAARGGAPRARLAVYKVCWYRDLTGRCSDADILAAFDDALCDGVHVVSASLGSPPPLMPLLSTSTEIGAFHAMQRGVVAVFSAGNDGPDASMVQNVSPWGLTVAASSIDRRFPTVITLGNNASIVGESFLVKAMKNGLVDSSSVFTDGTCTFEQLINRTAAWGKIVLCFATMGGVSSDGAALAVYAGNGAGVIFADTISRKSSQDSFWPTVHVDLYQGTQILNYIRDSRKPTVRISPSKTVVGETPAPAVAYFSSRGPSSVSPKILKPDVTAPGVNILAAWPPKSSPTVIPLDKRLTEWNMDSGTSMSCPHVSGIAAVIKSVHPTWSPAAVKSALMTTAYMYDGTSDVMQAGGTVKAADAFDVGAGHVDPLRALDPGLVYDAGARDHVVFLCSLGYTEAAIRNMVLPQPALDTSCPRGGGGGGGPEADLNYPAIVLPDLGGTVTVKRTVTNVGANRDAVYRAAVASPQGARAEVWPRELAFSARPGGEQASYYLTVTPAKLSRGRFDFGEVVWSDGFHRVRTPLVVRVTNLPDDGVKVVQAANATGDGSQAAA

SEQ ID NO: 68204 - protein, 212 aa, Zea Mays
MYQYFMENLISQVFYMPQRTKYNNMEPDVVDFFGECMNSPRNGRTPLANEIYEQMVAEKERELEEGEAQKSPSKIVADSLSQISRSSTFLLNIGVCLNASNLCGGTFVCLNLYCGRTSVLELCMTCDENVVYDGFYVYYDSVSYHESSVYHESSVYDSASLLEELPRSKHESTSMPGKQKLLQKQGKSELIGNMTHILGNTKLRMMIFILLA

SEQ ID NO: 68205 - protein, 341 aa, Zea Mays
MEALKKQASKLREHVAKQQQHFQRNIVRGVEGFIAVSTKQMEIVKKLAGDCCKYGDDNQHFGFALARASEEFGKSHKQIEKEREDLLKILGEQIFEPLREMIMSAPLEDARLLTYRYQRIRQDMESQIADVMRKQLKSKESSGNTDNSVKLQHAESKLSDLRTTLAALGREATAAMEAVEAQQQQVTYERLLAMVDAERTYHQNAADILNKLHDEMLYAKHHNESANHYDEQSSEPESDAGPAQVHSRSTSEDPVLTKPSESTGNSQEVQFLGEVIHPFDAQADGELSLAVGEYVVVRQVAANGWSEGECKGKAGWFPSAYVEQRDRAPASKVIEPGLLTT

SEQ ID NO: 68206 - protein, 670 aa, Zea Mays
MTQKMKEMDDVIRRVHAASLQDNLDRTLLVVVSDHGMTDGGNHGGSSYEETDSLAFFIGHSVESPYCSPYDQNEALQVDLAPTLALLFGVPIPKNSFGVVLPKLLNSLTDDQKLRMLELNSWQILRLLQAQVSAFCLEDCINVESSIELDILPESIEQKLCFLLSKAISSHQSSRLHRGSDFKSVEAGYYGTAADNYHTFLRNASEWLSHRATDKPLYLLVSAIMLMTMSCLFLMGTVSYLFKGRSLSQADHHSESYLDQRWHLDEVLVLAGMFLYVISLGSSSFVEEEQYTWHFLTSTLYLIFLAKAVQSMLKGSNPTLGHKAEGNSFDRSSFFYATSYELTPGKRNGYKLCTILVVLVAGRVIRAWHQGGINWVHFPDISKLLAQADPSVVKSLQIISVLAVVVLFSISLTLLRARPEFVIGVWLTHISCGFLVLLHVWGNHIGTSLPINHTTASVARQFYVIASVSVSVTVLASPWVFPIFSREAKSPSSGSSPVKAIHGIRKSLVLTGMTYTAFWGLLQLLLQQPINAIPLFLILLQTVSSAVHFSLDKTLHKQWVQVVAMHFLGMAGHFGLGNTNSLASIDVAGAFIGISSYSTVLSGILMFMITYASPLMLYLGLVLHASVKDVDDASNLRQLKWSYILDKIVTLPCTSMPAQQQCAHMSEYPS

SEQ ID NO: 68207 - protein, 90 aa, Zea Mays
MVAKVFLDNVVRLHGTPRSVVSDRDKIFTSHFWKSLFQALNTKLALTTAYHPQSDGQSERVNQCLEMYLRCAISNSPKQWRTWLPLAEFW

SEQ ID NO: 68208 - protein, 563 aa, Zea Mays
MSAADPSAAPAAAADPDGPDSVRLTWNTWPRSKVEASRCVVPLAATISPTRVPDPSAASPPPLPYPPLRCKPPCSALLNPFARVDFAAKIWICPLCFSRNHFPPHYAAISESNVPAELFPQCSTVDYIVGGAGIPGVGGAPPPPPPVFLFVIDTCVIEEELEYVKMAMRKAVALLPEHALVGLVTFGTQVHLHELGFSDLSKIYVFRGTKEISKDQILDQLGLAGAGRPGFPKMPQQPGGPQVNGMHPPSTAGVNRFLLPVSDCEIALSTLLDELQPDQWPVEAGNRAIRCTGVALSVAAGLLGACMPGTGARIIALLGGPCTEGPGMIVSKDLSEPVRSHKDLDKDAAPHFQKAVKFYDGLAKQLVSQGHVLDVFASALDQVGLAEMKVAIERTGGLVVLSESFGHSVFKDSFKRIFEGGEQSLGLSFNGIIEINCSKDIKVQGIIGPCTSLEKKGAMCSDTVVGQGNTSAWKMCGLDRNTSLTVFFDVSPSERSSQPGNQNPHLYIQFVTSYQHPEGQMRIRVTTICRKWVDGSTNTEKWYFYETHAATANEKTGSWHFNA

SEQ ID NO: 68209 - protein, 264 aa, Zea Mays
MLRLRAFRPTSDKVVKIQLHPTHPWLVTADANDRVSVWDWEHRQVIYELKAGGVDERRLVGAKLEKLAEGDDSKGKPTEAIRGGSVKQVSFYDDDVRFWQHWRNCSAAAEAPTAVSQQSSTFIAPAPSTRGRHFVVICCENKVIFLDLVTMRGRDVPKQELDNRSLLCMEFLSRTSSSDAPLVAFGSSDGVIRVLSMLTWKLVRRYTGGHKGAIACLMTYMSAAGEVHLVSGGSDGLLILWSADHIHDSRELVPKISMKLNFLG

SEQ ID NO: 68210 - protein, 417 aa, Zea Mays
MGSSKDIAIGPVAVVSLLLGSLLQKEADHDKDREEYLRLAFTATFFAGITQAALGFLRLGFLIDFLSHAAIVGFMGGAAVTIALQQLKYVLGIRSFTKETDIVSVMESVWGSVRHGWNWQTVAIAFTFLAFLLLAKYIGKRNKKYFWVPAIAPVTSVILATLFVYLFRADKQGVQIVNKIKKGVNPSSVHKIYFTGPFVAKGFKIGAVCGMIGLTEAVAIGRTFAAMKDYQLDGNKEMVALGTMNIVGSMTSCYIATGSFSRSAVNFMAGCRTPVSNVVMSTVVLLTLLLITPLFKYTPNAILGSIIISAVIGLVDYEAAILIWKVDKMDFVACMGAFFGVVFKSVEIGLLIAVSISFAKILVQVTRPRTVLLGNLPGTTIYRNTEQYPHARHVPGVVIVRVDSAIYFSNSNYVRER

SEQ ID NO: 68211 - protein, 2333 aa, Zea Mays
MDLAGMKRRELQALCKRHGLPAGGTNADLVGRLDAVLSGPAVVEEEVAGVPARKGCLKQTGGGATEAKKVTFGAEVGKARRLRSRVIWSPVVAKTRGKSARAGTDSAAEDGISADVGADVPVRRSRRNSFNPAEAEEAGEAVAVDRKPKRKNQENDEGVAVIAQARVTRRSNLEWSATVLPPAVEKKRGRQNAAESDVQKSALVEVTARTTRSRSIVPVVVPPTVVENKRRKTGDPQTTVELTMLSDVPRSDFPATRSLRNKIVHVNNSVVDETHTTRQLENKMRPSTRRHQQVASSPEDKGQKIPATSKSPLLRWSRRNYSEANSANSVNIKLAKDSSTAQPLAHHNSHSEDLEKQPAVKEPIKRSTRKSIALAALEKEKDVIEGKNPEAHVRRSTRKSVVQVKDTKSIVEETQYANSEDVAKQPATKGPARGLRRKSVITELHEKEKSLIAEKNMETDEAILTRKPVIPVKNIKAVGEGIQIGKGKDVDKQFVVKQPTRRSSRKSVLPDMLENNSGLLAPKMNAEMNVRRSTRKSVLPDMHNEKQDHHKMARNENLQSGKYQDGEKQQKVKDSIRQSRRSIATVLLEGQNNDEGKKFKNPTRRTTHKSHALNAVEEVSMDHIEVGEEGLKLRKRSRFLLEISSSANVSWKHQNAQISNEKDNTEGSQQASNCTTSKRRSSKKRRTTAPEEVMPFKVANDDIVIMEETKDTLEYNNESSSKVQEICQVNAAREEFSSGPLLVTVAPSDEICTVQSVAVVIPGSESGDDANQSSDKSKQPQEHSVTQTVDDHLSETRSGKLDQSTCITGLVSDNCVVSEDKTLMSEDREEQSPVSGEQRVSLEANANEPEEKNLANVTSTDLHTKSLQHDIDRIAKETDKDVLSLVFPIEEHEEKYGVSPIAVEKCVCREASACESARKPLTVIFSNNLHTKHLQHDCDVLIKETGEEVLAQENCNDQPVPAQTDQEIKLNDELADPDVLAQENCNDQPVPAQTDLEIKLHDELADPDHEEQSPVSGERRVSLEANANEPEEKNLANVISIDLHTKSLQHDNGRIAEETDKEHEEKYAVSPIAVEKSFRQEASAIESAGKPLTVIFSNDLHTKHLQHDCDVLIKETGEDVLAQENCNDQPVPANEPEEKNLANVISTDLHTKTLQHDNDRIAEETDKDVSSLVFPIEEHEEKYAVSPIAVEKSVSREASACESAGKPLTVIFSNDLHTKHLQHDCDVLIKETGEDVLAQENCNDQPVPAQTDLEMKLNDELADPEVLAQENCNDQPVLAQTDLETKLNDELADLAMESGCSITERNEGLVAHNLDQEGFLEATPECKQECGLPEETVISSKETGSLLCADQSPIGLESLFSQESIVESVGHCALASATTHTENGFDDSKDCHNKSALENVHVPEPCSHNDTKGGIFKNVDCMHTSQRDDRMEGVPEANTDEEHVLSAFLLDANHLNVVINSEEVVCEGEDSKELLHSEDCKASSEKTDVNDGNVYGISDAVVRCALHAPADDNYEIFLGPNTDVPRQVYNDGCSDVKEDRFASKPWTIDIIEDASVKERSNLKDWQLDSKLEGTEIVESGLYFNKDIGNILHSGSIGEITPSGSGLSKDSSVDYRGEVLDGFSMEASLERSSTRGEQNGCRLDAIENPSITLATSGYKHEGALSEEAVYTKKNYAGTCLSNPRELIMELQSHFSKENINESDPHDSLVFPTAENSADEQLVKVHHGSNLSQLGLTDLLDGPIGCSNTDVLCQCDNHKNQSNEDKVEEVEAVSAAKYIESEVVLLPSQERSNLNNEQLNTKLESPNIMGSCLNCDNDVCNTSDNGSVFVIGKRTPSASGLPEDYPKDSDLQQPVLDSFSVVSSFQDNISGKKTVSGVAGSEILSLSLATPDYKHEDGFSEEAVCRTKNYTGTSSVDPRHLDMEGHSIYSEGGTEKSNLQDNLAFLSAESGKDEPIICHVEKLVDAHASSDTYQGPCQDLGRHEEQESCMSIPMQAKESGGVLRSSHTKGSVTAAQIDLAGDAHLIVSDNAAAKQVFSEEKEETKSISSSDIDILHEKSYSSGHDDHAACAAETQFYHPQKASISDGLHLGPSSLQVESLDALDSDILYVNTGVLEQHHKEGYYEPSVYQITSGICTMSEAEPFEVLETGKDVKTPSKLDEQLNPGLDGDEAEKHSLDCGTDTSPVMSKRTLSSPGSGPCQQYVNESTTSTQSTDNHPNDLPAPRSPEQSACFQNDNDSGSVGICQSSRRRGIDELCGKLQSFKVSSAVKGSYVAMGAPRPKPGDSTSRSAAALLRNIENTTAVKAGRPPVKPNADGKDSSRRALQPISGRPDSR

SEQ ID NO: 68212 - protein, 1238 aa, Zea Mays
MYAVGKVGSLISRSVYTVSGPFHPFGGAVDIVVVQQQDGSFKSSPWYVRFGKFQGVLKSREKVVDISVNGVDAGFHMYLDSNGEAYFLRNADPNGEEGEFIVSPASSGDEREVPIQEAQLRKSKSTSCDSSTMEADVGEGKILARTTSRRITILERMFGRKSIKNNAHAVDRVSSLERAEVAAELLDTKWSTNLPRSSKPNGSNDEPSKSNNDQMETSKPVFSEHSLDHGKEMDSNDNAHCNSCSPRGGRNSSADETDPCLQATIVKKEVVEIHARESSDFTDNITSITHQQGSESSSNDLGTDKLMQQSVDTQDELLHDVEDVTERETHAEEVISNDIFEIHVVETDITSGKSEVDSEIVTVDPEPDRANQNFTDTNYQNYGTTDISSERHEVSLIPSAQDAVQEKIVILSSSEAVEGSLDAVPEKVVILSSSETVDSSYAVSCILDDTVHDASDISQADGVQHEEHSSISDGSTEKLISEESSLVCYGVPSNKKDLVNIAVQESKAFILKNPASQILEESGPGLDVSTDSVSLSHADSAPDLACQHVSPNVEDTTSYEPGIGPEDVTKNSVVENGACSGELVVSVIQTSAGDGLTKCIAHPAVFSNKIEVEGSPTSAGFSSLISVEVQNTKLEDDTNKSSSVIGDEAGFVPEATAELDEEAEPVISLSEYTEEIQFQFSDAENFADRKATDDMVANKTTGEVEHDESDCDTEKQEEGDVGLVNDLENCSASLKPVSSPVSIPAIDFQSGNSNREAKSLPNLRSHIHDLERSYSFQLSRSLQSTAENNGIDLVKSMNYAFLEQKSEAIGDFSEENNSPPEVTNTVALDGNHADDLKVDAFIPFAELSLCRHLLSEGMGEDAACSAFDSEKVTLEEFRNMKQSLMRNNKLVVRIAGRYFPWDAAAPIVLGMISFSEEQVFEPKGMINVERVEQSAAPGGSWSIWPFSFRRTRTITAIQPVCESIVETSVSTPKELTHFKELDRERNKSRVKRIERKVRSLTPTSDELASLDLREGRNVVTFTFSTAIVGKQQVDCHIYLWRWNTRIVISDVDGTITKSDVLGQFMPLVGVDWSQNGVAHLFSAIKENGYQLLFLSARAISQAHITRQFLFNLKQDGKALPDGPVVISPDGLFPSLYREVIRRAPHEFKISCLEAIKDLFPHDSNPFYAGFGNRDTDELSYLKGEVAVNRRVDTKSYTSLHALVHGMFPPILSSSEQASIPEDYNAWNYWKMPLPDVDL

SEQ ID NO: 68213 - protein, 836 aa, Zea Mays
MAPALLLLRLLALIATAREACAARAFAAASNATAHGATVVAGKLNVHLVPHSHDDVGWLKTVDQYYVGSNNSIQGACVMNTLDSVVDALARDPARKFVVVEQAFFQRWWAEKIPNIQAVVRKLVDSGQLEFINGGWCMHDEAAVHYIDMIDQTTLGHRMIKKQFNKTPRAGWQIDPFGHSAVQAYLLGAEANFTRTNHIMWTMGDDFSYQYAESWFRNMDKLIYHVNKDGRVHALYSTPSIYTDAKHFSNISWPVKYDDDFPYADSKNSYWTGYYTSRPTFKRYVRVLSGYYLAARQIEFLVGRSFLGMFTTSLEDPMAIAQHHDAVSGTAKQHTTDDYSKRLALGASKVEKGVNVALTCLLSSNGTCAPSVQKFSQCPLLNISYCPSTEETVSGAKNLVVVVYNPLGRERSDFIQIPVNDENLVVKSSDGTIIESQLVEVDNVTRNLRKVYVKAYLGITTNKPPMYWLLFQASVPPMGWNSYYISRSTGSNSIRYVATMVSPRNDTVEVGPGSLKLSFSSASGQLERIFNSVSGVDLPIQQSFFWYSSNQGDIVDAQGSGAYVFRPNGTTPTIVSSSVRNYREDWDLEVTEPVAGNYYPVNLGVYVADGKYELSVLVDRAVGASSIQDGQLEIMLHRRVIRDDDKGVDEPLGEVVCLDGSCKGLTVRGTYYVKVDKIGHGAHWRRTYGQQVYSPYLLAFTHEDETSWKSYNVAKQSTMDENYSLPDNVAIITLQNLDDDTTLLRLAHLFQDLEDAQYSVIAKVELRRVFGKRTIKELAETNLSANQKKSEMKKLNWRVLGNDKSDPIPLKGGPVDSQALVVELGPMEIRTFLLKF

SEQ ID NO: 68214 - protein, 381 aa, Zea Mays
MASFAPSGEVSSKHGVVGYGIVGGPNGNAVAPAAKSTVVETTIERFAYASSVPRLLLLQINEVSKEYFLKTVSNIVGDKLLKQAASQYQMQAQRSPQTNPSNYSLSGQVSGQQTAPSGSVTGDEQKGYPWAHTIPMRQAIASTRPPQFRPSSSGQMRSNTVQTMQHHVQRPQTSSPVFGANSIHARPFLRPVGGPAAPFRPQMADSNPRAHLIQGAVTTISRSVPKRSIVSGNAPVNQALGSSKVSAGMESQSQQLSAPKPLAATSLSQTQSHGIQEEPKIQGKKQLLFESLPATDLKYWSLERKLCQPLLITEKMFAYRETVLEEAHQGMELHEHCRHIVDNDDQHCRFHSLCVHQVGLRNTEQQQQYRKESAYVGQMKV

SEQ ID NO: 68215 - protein, 604 aa, Zea Mays
MLVAYGQISDLAKSFEIFGQMQATGIHPNKFTYPCILRTCTCTGQIELGEQIHSLSIKNGFESDMYVSGVLIDMYSKYRCLDKARKILEMLEKRDVVSWTSMIAGYVQHDFCEEALATFKEMQDCGVWPDNIGLASAASACAGIKAMRQGLQIHARVYVSGYAADISIWNTLVNLYARCGRSEEAFSLFREIDHKDEITWNGLISGFGQSRLYEQALMVFMKMSQAGAKYNVFTFISAISALANLADIKQGKQVHGRAVKTGHTSETEVANALISLYGKCGSIEDAKMIFSEMSLRNEVSWNTIITSCSQHGRGLEALDLFDQMKQEGLKPNDVTFIGVLAACSHVGLVEEGLSYFKSMSNVYGLNPIPDHYACVVDILGRAGQLDRARRFVDEMPITANAMIWRTLLSACKVHKNIEIGELAAKHLLELEPHDSASYVLLSNAYAVTGKWANRDQVRKMMKDRGIRKEPGRSWIEVKNAVHAFFVGDRLHPLSDQIYKFLSELNDRLSKIGYKQENPNLFHEKEQEQKDPTAFVHSEKLAVAFGLMTLPPCIPLRVIKNLRVCDDCHSWMKFTSEVTRREIVLRDVYRFHHFNSGSCSCGDYW

SEQ ID NO: 68216 - protein, 257 aa, Zea Mays
MEFEITVCHRRWVIKQVAEQHQDMLELIGNESILVKEIAEKSKMNYRAWRHRCWLIPYMTRKQVLDELNESTRWSELHVADNCCFHYRRSLLLALLDNFFGNEEDSLSWESDICLLWKEELRWDEMLIKRYQGRESLWNHRRFLSHLWIQHLLTVEGNWPATTSQMDMFVIQEIQLLSECLHDPVDEFEESRVQAELSALYIMWITKQVPDVKGKLEERLHFASMGRLKDVLAGACRPEKRFWMNLLNLADQSSDVQ

SEQ ID NO: 68217 - protein, 189 aa, Zea Mays
MPSHGDLDRQIAQLRDCKYLPEAEVKVLCEQAKAILMEEWNVQPVRCPVTVCGDIHGQFYDLIELFRIGGDSPDTNYLFMGDYVDRGYYSVETVSLLVALKVRYRDRITILRGNHESRQITQVYGFYDECLRKYGNANVWKYFTDLFDYLPLTALIENQVFCLHGGLSPSLDTLDNIRSLDRIQEESCV

SEQ ID NO: 68218 - protein, 1015 aa, Zea Mays
MSRSFFPTCSSQKAEMEEMAKELDDLRAEVEALTAQLRAKSDLADGLKRASADHAARLRDARAEAERNAAEAAARGEEAAAAGERCEVLESRLAEKEQALRHLCAAHEALKATLREKIEGLEGDKRGLLAALEDAEARRGEHEAALRARDVEVARLRGLLSEKDRRCGEAEKRASAPRDVVMRDDMLGKLEEEKAAVQCKLKWKDEQFRHLEEALKKVQDDFRAAKKEWGSDRSTLVDRIDTLEADLDSKIRVAEDFRSRLDMCSQALAHEEGRRKRVETEMSELRHMYGNVISEYQGAKSMVESLSSKTDGDIAYLRSSLAEKATMLKEIEYSKARIEQENEDLRSKLKEYQEAQIGGADAVVSLKSLREKFRALEQTHRSCTEKLRGKEEEWRLQMTKLVNDLDGCLSQLESKDILIVQLQNELLGSHRSLELQTVDNWEALIILTVVQTKFYESCSFVDTAKLNMQHHCEEIEKEISSAKKQLEEQSCIIAQSQAEQKQQSGVITKLHARIEELEHMEQEHKKMQRQLDAYKEMRDNMLRDAHCLKDETSKKESTLQVKLREALSALDEANCALADRKRELSQLEISLHHQKEAIEHLEKLKVDMEAEAKSYMCDNRILKRDLDTALTAKVEAEELLRQEKMQLTCALDEAKYTLSERNSELTQFEINFHQQKQALANLEKVKVDMGTELKTCMDENCVLKRDLGVALIAKMEAEECHTKEKEEFCGIIKEKGMMIDKLQQYVAVLEEENMVKKLDLGSLIKMECDKSIREVKNWYSEIVEISDKKLLELEERLRFAEQKFSCREQEIMNMFDQEESDWYTLIAEKEIAISDIQQTVESVQLDIKHLLEAAAAKVAEVQLEVNLVQEKHQSRNLKNLIEQLEAQTASEMSEKAEEHLEVTNKLKSLEGRNETLDEHLRELKSRTTDMSKAVLQERNQLVNELTGLTNTIGEVIYGGESMMSNLRRIMQKVNEEPCNDRLTSEKTNGRSSSPLIRHKSGHVLDRRSPLKENNY

SEQ ID NO: 68219 - protein, 183 aa, Zea Mays
MAPIVSPTGGAVLVRKLANLSPTSSIAGQVNLLNAVSCSHGCHVQQFPCMRSSVDSVPCREVFVGDVVLLKDPEKSGNFVIRRLAALEGYEMVSNDEKDEPFVLEKDQCWVLADNLVLKPKEARDSRLFGPVPMTDILGRVIYSLRTAVDHGLVENSGMATKLDGPVLAVELDVEELAKNNKA

SEQ ID NO: 68220 - protein, 1061 aa, Zea Mays
MEAAALARRTRAVEELRRLSTVAESDDTPEQRLSTVAKSDGMPAEEQECDHFSLRGYVAMLQKKDPKLCSPHIFHSQPQYDEHHGHRPTSGNVSIEQDGMNDGCSISIVRILPNRVDPRRMFYCKQQSSQGNDQLTLSKTAQECNSKCSSPGNKAITAMNIPVAEENVLEALVERSVPATEDLQASPNNIDVSANILNVVPKDASDLPDDVQTISTIEENGTKNPCSPKLRVMPNEDESNIVQDVPNFDPNESNVCKPLSCHKGKQISGHKSSQVCNKGPRRASLKRKVGSDGKKKRDKSTDLPDISGLKFCQRKPKKMRLLSELIDADQVGISANAVQVDRTDSVDLCEGGKRKRHLEVGKDNDTPNQKLDKIQSRAVKNKAKHTAVDKVDDGPSLMNWLKNTHKKIRTDRKDSEHKNLDSSAISRSYPDIVASDDMYHDFIPSVGDVDQVKLPSTTSAKHGKVNAQNDNLEQNMQKVDESRNLKQRFFSSEKSTILLKRKVQSTSVAHDENIENSIIKRDMLRPDDVPQMGHEGSVQRCLAKVSLDKQKIQNVPGLRKKNIPKNKKKVSQEVHEKQNVIDDIPMDIVELLARNQHERHLMTQTDTNSLENCHDQPKAGEVDCAESAAKDCPVNSSNANFEKPLALESKQKSLQDHASSSTQATNVNPQDLHTQKLPQCPAASSTKVPNGPPSESQTQNSLQVHALPVPPIVQSFNAYPSKLPALDILECAQEQPTRFHRDDEVTIACTSPIFSNYQHIAETPARSWRDSREKKLMWDSFKTASRNPPSPPPSYGFQFGNRLQEVDSAPIHAYGAHQPVIVAVDQPRSVPSTALAMEAGRLYDQRIPGQPGLYPKEPMPATHLLRLMDSSTAPGFTNYQRANRRQMELQTQALGSQYTQHEHYNASPSTSYGSQPLTLEDLSRRHFQQDLRRPLRPHPRVGVLGSLLQQEIANWSGNCGPQSGYRLGDCKGTRPPDANRAGNYETLSSAGWNTLQLGSVSSAANLEYRFPWYGTGQPSTSGNGRTIHPLDKLVRKDICVTNRNPADFTVISDKNEYMRTL

SEQ ID NO: 68221 - protein, 391 aa, Zea Mays
MPHAAATAAAALPRASLLVISAPLRDSLAAAPYEPPAGASASVKSLLASLLPSPSPPQPQLQEPAGKESGDLLLFCAAVLAASPEYPALHWVPASLVGAAAAAVNELAAAGGWGSVGDMVVAVAPEVVPPLKAVVKDSCVDADSDEIGAVKPPKEHAAVAAHQFRWLVSQVQGMVSFVHIAKNVKATELSLYEDAILDACCQNIPADDELWYQVIEVSVMLLTFTQRSNPRSPWYDRMLSEMLGHLERQPLNKERRVAWLTLIGPVFDAMGLFLLAHFRRLFSLFFQWMHTDDNKTVLLTLKQIHAIIKLTWIRKSPYTLRLVDELVLLYKESATRSNREIMRDHILEILVLLQNCKGHQFEEAWKKHELDPDLTMLLSTFNKLCIKNSSP

SEQ ID NO: 68222 - protein, 173 aa, Zea Mays
MVPDRWKAAGQDRQRDQELLEHAHPAEAAEQGDRPGDTPPHQRAHVQHNHIVRGLGPGEGAQVPRPEPGPLHQPAVPGGGGGHAAEAGEAGGGRALLQLQPGAPQERGLQVQQLPRAQDRHARLQKTRDEMRASIHLCLSLSVTSPLITRSSSSHQLICRSINSVSLSLSLAM

SEQ ID NO: 68223 - protein, 211 aa, Zea Mays
MAIAAVAHAYVFTVEPYQHVPALPPDHGEVMCQESKMEVEVDVDDDTGGTPASIAQQETHVEAPGGTSIKESVQDVVLGGGQHVVKDVALTISQAIGPVEKGVGKIQEKFHHISLKPGDKKEPQVAVEEHVTENVVDGKPAVAVNAEVEVQQKAQDRRGEEEGVQLKRTEKEGRLSHLRVPWWKMQRKREQVQEQAESKAEAVRGPDGEQG

SEQ ID NO: 68224 - protein, 80 aa, Zea Mays
MVADLKMKRKSSATTDLRAFLARAAAKKKVIIAPSSNEREMQLVIFQGQTEASNATPAEQERVEKEDGTKKFKWMLGYFY

SEQ ID NO: 68225 - protein, 53 aa, Zea Mays
MEDPFLAQLYSWFSYFDTILEQKQQKLVASSPKNNMGQSPEYEVYFRKTYPTK

SEQ ID NO: 68226 - protein, 220 aa, Zea Mays
MILQIDTTDILFICGGAFVDLEKTISERRQDSSIGFGAPIRTNMRSSGASCPMVTSSLLESVESGDLVRYGLIPEFIGRLPILVLTEPKNSLSKQYRKMFNLNKVKLHFTDGALRLLAKKAIAKSTGARGLRAILETVLLEAMYEVPDEKTGNERVDAVVVDEEAIGSVDRPGCGAKILRGDGALDQYITRTNVMNLQETNDGLAGELEEAYMLSRIVSL

SEQ ID NO: 68227 - protein, 92 aa, Zea Mays
MPAIADELSTTARSQFLEILPTSSRRSSIIPSMFIRQSSSTPVACSRAPTQRSCPVVNSEKVAFQRDSCSATLRSHLESCSEKRRDNSSRMS

SEQ ID NO: 68228 - protein, 432 aa, Zea Mays
MTPKWSACSSNSYRELPSHENGECKSTLTESVPSPTSCFGLHTANTMCSLSSQKKDGNVYKRRKMDKDSNSPITFEDAKEMATQSCTISDDHSSLLLPIISSEALLLNSTAGMAGPILDCEEPADVPLEPNSGTDDRCFISNMSPTSMTPDKKNAAECSSSNIGPTESITEHISPRDLCIAILMKDGLINESRTRMAHKEEFTDNDANPLLACNNCGCLEHSLKMLICDSCEAGFHLSCCIPCIKELPTDEWYCAPCLCKKPKSLYGKLSEGRINPSRNTNTRPHGMSHIEYMLKDAEPYVTGVRLGRDFQAEVPEWSGPSSSSDVYFDEPCAIDSAELTTFNLCKMSNQSHSSIGNWIQCRETLNPGDSDKQVVCGKWRRAPLYVVQSDNWDCFCCLLWDPVHADCAVPQELKTSEVLKQLKFVNMWPSQA

SEQ ID NO: 68229 - protein, 75 aa, Zea Mays
MSARPCPCRCGLGAAHHAHAGASPCSSGVPSTSSSTSMEPRAGTDFSCLSWLLFRVSAYDDDDTHNLLLLAAGAL

SEQ ID NO: 68230 - protein, 61 aa, Zea Mays
MWTADNQKKGYMAITAHFIDQSWKLRSIVMRFIYVPSPHTAEVIAEELNESLIAWNLDEKV

SEQ ID NO: 68231 - protein, 295 aa, Zea Mays
MLTSRTVAYLNVDSAVAGHGFYASATPQLDELLKEASKQVQNPDNGTQSLYDLWMSSNSSPLIGRLGGGSSDYSAFVQHIGIPSVDMAIGSDYPVYHSLYDDFIWMEKFGDPLFQRHVAAASMWGLVALRLSDEEILPFNYSNYATELENGALGISERVQGMPVSLSPLHKSIKEFRKAVAKVDSELKALQTWKIWSPWRNNPLKVRDINDRLMMTERAFTDREGLSGRPWYKHLIYAPSLHNDYGAEVYPGIGDAIERVKKTNTSESLQSIQHEIYRVSRVINQAALVLSGGLT

SEQ ID NO: 68232 - protein, 317 aa, Zea Mays
MKNSGADMDTIDLKYIQKCRFVVASGIFDGYDIPHQPSNISHRSQKLFCFLMVVDEVSLDFVQKNASVKIDSAGGKWVGIWRLIRVHRLPFDEPRRNGKIPKILTHRLFPEAWYSIWIDGKMELIVDPLLILERYLWRGKNTFAVAAHKHHRSIYEEGDAIKRRKRYARPLVDLQMKLYYYEGMEPWSPKKKMPSDVPEGAVLIREHTTMTDLFSCLWFNEVNLFTPRDQISFGYVVHRLGGALKFFMFPNCEYNSLFILHGHTREHSSKVEWAKTTDEIVKKGLKESRGGLGLWTPYPADLSSVEVPAVKRTSPAG

SEQ ID NO: 68233 - protein, 393 aa, Zea Mays
MENMRYAEELVREFLVFRGFTSTLQAYETELSTEIGRNFQGDKIVDLVFSEYVPKYQLDKLLGLFAFFKQCFMSPADTELFSTLVKLELSVLRYYVINALKSGRQDKVIEFFGESGNYLMQKRGDWLAWFAIPYIKNPSLDPQFRLYFSKEWLDTLVLSFRNFLSGIFNDTRTPALMRISSEKNTIKSLKNDIKQLNNKLAELQASLEEKEDEISLLRRNYNSGGYGNKNVVGTSTAGSPHEEMSENYEESSASSSMIQGFDSRSSSSVKSYTRGGKFHESSEINHTEDQQVLVTEEEFPEVKVDFQETFLGHNSPISRCRFSASGSNIASSSIDGTVRIWTYDSSTASSRNATIYCGSEVSALSWECRSDRLAQLMEELKLGMLMQRELFAT

SEQ ID NO: 68234 - protein, 363 aa, Zea Mays
MAEPVACDTSREVAKLKSRLVLLERKNAAFKMQMKELSMKLQLAGQGKNEALYKAGPFGTVKALRTNPTVTPDLSINPRLASLLEQVAVKKELIVALANSNVKEMLEVWFTNIKRAGIPNYLVVALDDNIESFCKSKDVPVYRRDPDDGIDNIGKTGGNHAVSGLKFRILREFLQLGYSVLLSDIDIIFFRNPFDHLYRDSDVESMSDGHNNMTAYGFNDVFDEPSMGWARYAHTMRIWVYNSGFFFIRPTIPSIELLDRVAYRLSHEPKSWDQAVFNEELFFPSHPGYEGLHASKRTMDMYLFMNSKVLFKTVRKDANLRTLKPVIVHLNYHPDKSDRMKAVIEFYVDGKQNALERFPDGSE

SEQ ID NO: 68235 - protein, 1353 aa, Zea Mays
MEADAPLDLALFQLSPRRQRCELVVCGNGRTEKIASGSVKPFVAHLRAAEEQASAQPPPLAIRLQLERPAPWFSKGTLERFVRFVSTPEVLELANTYDLEMSQLEGARKIYAQGGTGDATSGGAAENVTASAAAAADITKKELLRAIDVRLSSLKQDLAAACSRASSAGFNPISVSELILFANHFGASRLSEACTKFMSLCQRRPDISPQTAQPAVSSHWKVFDDGNVRGSSSSDMSIDEPLVDLSESKNKSTVSGSGSQVHRLSNIQGLESAAAQQPKPTIQQAVDKQEAETDASPAPSKGELSRRLSVKDRINMFESQKKEQTPSSGNSNSAGTGRVVPGKGEHRRVPSGASMEKLVRRWSSVSDMSIDLSNNESSSLNDKKDNGTPAGTPTSTDLEADSKVRANEDSNGQKDSITSHSWPCQKDNVPMDLATTDLCPPSILSNTLAPHKESIYGDGAENDMVMNSSIESEASFGKEPGVIQGHTRMSNHATSNVSTQDRLKSSAKSVEEALLKNKVIVTSASSEEHVCMIDKEITAVAHEVPVASEQIPQNDIRGLHTKDIHTEAEVTGRKDQPSRSFGRVSGGVNPKPKASSNSRANAKGSSVRDAIASTETEFRDVSLQRNRLPRKSEDVGKKVTAGSDSDCSGRQGKNLSRQSSITDQELNLQARVTRPGKGNQDRHGELQMKANELEKLFAEHKLTSSRRGKPTDVQVESTPMVSEVKPTMVLHETIHTKQVVKESITVNDFDAGELLKMVNNQEFNISTPQKLGILSLEESRGKFYEHYMQKRDAKLKEGWKLQREEKEAMLKAMHDSLERSKAELLTKFSRSADVPDSTYVSHCSQKIPPSRSARKNKDQGVGSFLVEEEMNSDYLSGDGSSRSADSRKHFSNKVASTQNASAGPIHKRSSRTASSGYANRRNPPENPLAQSVPSFSDLRKENTKPSPGVSRVSARVQQKSFARSKSIIEESKSILKEDQSRRSQSMRKNQIPDELKDISSGNDDIYNWAPSRISKNQSEGPFAYSTRRSGPPKPFLRKGNGTHPVIGIAGFQAAAAMMANALQHGDSGDFEDQQEDSPDDAKEEEEYESMEENLRESDFPADSDSENPRVSHEFGNSDDPGSENGDADFPSKTPAIGSTKFTAFTGNVHNPAGDVPAPWSSRLPQLFPYTNDNSDGDAFADSPSGSPSPWNSHSLDEITDADVSRMRKKWGSAQMPFAGVNAPQQPRKDVSKGLKKLWKFGRKTRGGDGLVNDWVSASTASECDDDMEDGRDLVVGSSDDFRKSRMGYLASYDGFVENEVFSEQEQSLRSSIPNPPANFRLREDQLTGSSLKAPRSFFSLSTFRSKGGDARLR

SEQ ID NO: 68236 - protein, 942 aa, Zea Mays
MLKTDSEKGISGDDSDLIARKNTFGSNTYPRKKGRSFLAFVWDACKDLTLIILMVAAAVSLALGITTEGIKEGWYDGASIAFAVLLVVFVTAISDYKQSLQFQNLNEEKQNIRLEVVRGGRRITVSIYDLVVGDVVPLKIGDQVPADGILINGHSLSIDESSMTGESKIVHKDQKSPFLMSGCKVADGYGTMLVTAVGVNTEWGLLMASISEDSGEETPLQVRLNGVATFIGMVGLSVALAVLVVLLARYFTGHTYNPDGSVQYVKGKMGVGQTIRGVVRIFTVAVTIVVVAVPEGLPLAVTLTLAFSMRKMMKDKALVRRLSACETMGSATTICSDKTGTLTLNQMTVVEAYFGGKKMDSPDNAQMLSADVTSLIVEGIAQNTSGSIFEPEGGQEPEVTGSPTEKAILSWGLKLGMKFNETRLKSSILHVFPFNSEKKRGGVAVHLDGPEVHIHWKGAAEIILDSCTSWLDTDGSKHSMTPEKIAEFKKFIEDMAVASLRCVAFAYITHEMDDVPNEDQRAEWKLPEDNLIMLGIVGIKDPCRPGVRDSVRLCQAAGIKVRMVTGDNLQTARAIALECGILDDPNVLEPVIIEGKAFRVLSDLEREEAAEKISVMGRSSPNDKLLLVKALRARGHVVAVTGDGTNDAPALHEADIGLSMGIQGTEVAKESSDIIILDDNFASVVRVVRWGRSVYANIQKFIQFQLTVNVAALIINVVAAVSSGNVPLNAVQLLWVNLIMDTLGALALATEPPTNHLMERPPVGRREPLITNIMWRNLIIMALFQVSVLLTLNFKGISLLQLKNDDPAHADKVKNTFIFNTFVLCQVFNEFNSRKPDELNIFKGISGNHLFIGIIAITVVLQALIVEFLGKFASTVRLSWQLWLVSIGLAFFGWPLAFVGKLIPVPKRPLGEFFACCCICKGSKQAPDDATSNDKEDNKPEP

SEQ ID NO: 68237 - protein, 703 aa, Zea Mays
MVVLVRVLVACAKFRCPAANLLLSASTSRVRAQPGGPLLRQRTSKVSLRSIAMSTTQASEAAADKGLPLAVDATMIDEYASQSKLLQEFVKIPTIGKAWIFNSKDEIWGPCQLENEIHIAKSVHGSLYTDEWFEGISWNQEETFIAYVAEEPPQPKPVFNDYGFKKEGLSEKDCKSWKGQGDWEETWGETYSKKRIPALFVINISSGEVRPVKQIPRSLSVGQVIWAPSSSYSLVFVAWSSDNGFQGTPRKLGIKYCYNRPCALYAAPDPFGQEAEKSLTEGNKGETTTMIKLTANLSSAFFPRFSPDGKYLVFISAKSAVDSGAHNATNSLHRIEWCTDGKLDGSLGVADVVPIVLCPKDNCFPGLYCFGLLRDPWLTDGQTMIISSVWGSREVILSVNVVSCELSRVSPQDSDYSWNVLAVDKNNILAVSSSLITLPQMYYGIKVSQTESNWEWQGVSTPFPKPSDKISSVLAEHKFSILKIPISNPSDELANGAKLPFEAIFVSHKDSASNPTIVVLHGGPHSVYPSSYSKSLAFLFSQGYNLLVVNYRGSLGFGEEALQSLPGNIGSQDVNDVLTALDLVIKRGLIDPSRVAVVGGSHGGFLTTHLIGQAPDTFVAAAARNPVCNLSLMVGTSDIPDWCFVEIYGKEGKKYFSESPSVDDLCQFHQKSPISHIAKVKTPTLFLLGAQDLRVPVSNGLQA

SEQ ID NO: 68238 - protein, 181 aa, Zea Mays
MTPQKLPDLVEHNPLIAVEVLSKLIHSPDISGYFDVLVHMEMSLHSMEVVNRLTTAVDLPTEFVHEYITNCIQSCQNIKDKYMQNRLVRLVCVFLQSLIRNKIINVQDLFIEVQAFCIEFSRIREAAASEHSPFTNAELLCIGSMVAQSCTGATDVAVAVASGFDRQFKHLNTKYRKLLNS

SEQ ID NO: 68239 - protein, 811 aa, Zea Mays
MPTMEGIANVLNHIGAHKKGKQTRILWHSLREEPVIYINGRPFVLRDVEKPFSNLEYTGINRERVEQMEFRLKEDILQEASRYGNKILVTDELPSGQMVDQWESVVYDTVKTPLEVYEELQHQGYLVDYERVPITDEKAPKEGDFDNLVRRISQVDIETEIVFNCQMGRGRTTTGMVIATLVYLNRIGASGIPRTGSIGKVFYAGNDVDDYMPSSEEAILRGEYAVIRSLVRVLEGGVEGKRQVDKVIDKCDSMQNLREAIATYRNNILRQPDEMKREASLSFFVEYLERYYFLICFAVYVHSVSSAHQTTLSVEVSFSDWMRARPELYSILRRLLRRDPMGALGYSSSKPPLTKIVESANGRPQDMDVVAAMRNGEVLGRLTVLKSDHCPGSHSLNLPERVEGAPNFREIPGFPVYGVANPTVDGIRAVIQCISTSKGGRPVLWHNMREEPVIYINGKPYVLREVERPCKNMLEYTGIDRDRVERMEARLKEDILREAERYGGAIMVIHETDDGEIFDTWENVDNEAVLTPLEVYKNLVSEGLPIKYARVPITDGKAPKSSDFDTIAFNVTAASKGTAFVFNCQMGRGRTTTGTVIACLLKLRIDHGRPIRIPVCQYDHEDDAIYSTGGDATDHNGHLNSESWKPRTLTKLNSGFGINDILLLRKITRLFDNGIECRQTLDTVIDRCSALQNIRQAVLNYTRVINQQHVEPRVRRVALNRGAEYLERYLKLIAFSAYLGSEAFDGFCGQGQTKISFKGWLQQRPEIQTMKWSIRLRPGRFFTVPHEQKATYPPPQEKVKQCEFPGCTSCY

SEQ ID NO: 68240 - protein, 431 aa, Zea Mays
MGSLENGAGAGAAAAAGSYKRGPGPALRAGGARKARARSRLARFLLLEKVDYLQWIAAAAAFFFVAIVFVAFLPGSGVIERPRLTLPSSRAGEGRVGGGVEDRSGLVRWEAGAAFEFEPARLREKWARERREEAKSLAELGTPVRRLGVRKPRLAMVFGDLYPSAMQLQMVSVASVLEAMGYEMKVFSLEDGPCGNIWGAIGVPVSILPEDANLPISVDWLDYDGILVNSIEARPVFSSLLHEPFKSIPIIWTVHEYSLAHRAKEYNVSGMIQLINAWKDVFSRTNVIVFPNYILPVMYAAFDSGNYFVIPGPPSEAFQVDSFIAKSYHEDVKISLGLNPKDFLIAIVGNSFSYGDNLMEEALVLQALSPLLQRYRSENSAQSELKVKIFTGNITEKHRMALEVYLCLHALSDQVNCYLQSECFKLYLTVY

SEQ ID NO: 68241 - protein, 444 aa, Zea Mays
MPELRSSTRQACLRSKKLEDLQLGEPPAKPVSPAPPRAGKRAPTRAARGRKGATGKGVPPAPTTRRKRGNIVDLEADPACEDPPKAVKGLEVAAAAAPKNLPLKEVAEVGVLKMNGVSAEKIIGAEDESTATPVPERVQVGNSPEYITDRKLGKGGFGQVYVGRRVSGGAARTGPDAYEVALKLEHRNSKGCNYGPPYEWQVYNTLNGCYGIPSVHYKGRQGDYYILVMDMLGPSLWDVWNSMGQAMTPNMAACIAVESISILEKLHSKGFVHGDVKPENFLLGQPGSPDDKKLYLIDLGLASKWKENNGHHVDYDQRPDIFRGTIRYASVHAHLGRTGSRRDDLESLAYTLIFLIRGRLPWQGYQGDTKSFLVCKKKMATSPEMLCCFCPAPFKQFLEIVTNMKFDEEPNYAKLISIFDGLIEAPASRPVRIDGALKVPLQCG

SEQ ID NO: 68242 - protein, 188 aa, Zea Mays
MGIASVVHLYVFPAKPYALLTNQSHGNISVLGDYVSSEPVDPFEIKESNRPTKMKLPQLEPDERSVTNIKESVRDFVVGSGEYVIKDFKFTVNQAVRPVEKRIDKLMKKNDKSKKSQDDNWVSAATPERPVRGIDDPLLSGSASDSGVTKGRKYRRVVSSVTAVDSWGGGDQASDGYEIRGRRWAVKS

SEQ ID NO: 68243 - protein, 1453 aa, Zea Mays
MDDAGEIHALGSLRRDGSVWSAASDTVFSSLSSRADGGVDDEEALRWAALEKLPTYDRARTAVLAMPEGDLRHVNVQKLDPQERHALLQRLAWVGDDHQRFLSKFKDRVDRVGIDLPKIEVRYQNLNVEAEAYVGSRGLPTILNTYANVLEGIANALHITPSRKQKISILHNVSGIIKPHRMTLLLGPPGAGKTSLLLALAGTLPSSLKVTGNITYNGHTMDEFEARRSAAYVSQHDLHMGELTVRETVNFSARCQGSGHRYDLLVELSRREKDAGIIPDKETDTYMKAAATGDQKADVVTNHILKVLGLDVCADTIVGNNMLRGISGGQKKRVTTAEMLVTPGRAVFMDEISTGLDSSTTFQIVNSIRETIHIVGGTAVIALLQPAPETYDLFDDIILLSDSQVVYSGPREYVLEFFESVGFKCPQRKGVADFLQEVTSKKDQRQYWKHGDDTYRYVPVKEFAEAFQSFHVGEAIRNELAVPFDKSTSHPAALKTSRYGASVKELLKANIDREILLIKRNSFVYIFKAVQLTLMALITMTVFLRTNMHRDSISDGRIYMGALFFGVLMVMFNGLAEVGLTIAKLPVFFKQRDLLFYPAWTYSLPSWIIKTPLSLLNVTIWVFITYYVIGFDPNVERLFRQFLLLLLMNEASSGLFRFIAGLARHQVVASTLGSFGILICMLLGGFLLARENVKKWWIWGYWISPLMYAQNAISVNEFLGSSWNKQVIPGSAEPLGKLVLESRGLFPEAKWYWIGVGALLGYVLLFNILYTICLTFLKPFDSNQPTISEEALKIKHANLTGEVLEASSRGRVASTTTTGRSTLDESNDEAASNHATVNSSPVNKGMVLPFVPLSITFDDIRYSVDMPEAIRAQGVTETRLELLKGISGSFRPGVLTALMGVSGAGKTTLMDVLAGRKTSGYIVGNITISGYPKKQETFARVSGYCEQNDIHSPNVTVYESLAFSAWLRLPADVDSSTRKMFIDEVMELVELLPLKDALVGLPGVSGLSTEQRKRLTIAVELVANPSIIFMDEPTSGLDARAAAIVMRAIRNTVDTGRTVVCTIHQPSIDIFESFDELFLMKRGGEEIYVGPLGMHSCELVKYFEGIEGVNKIKDGYNPSTWMLEVTSTMQEQITGINFSEVYKNSELHRRNKTLIKELSTPPEGSSDLSFPTEYSQAFLTQCLACLWKQSMSYWRNPPYTGVKYFYTTVIALLFGTMFWGVGRKRDSQQDLFNAIGSMYASVIFMGVQNSGSVQPVVSVERTVFYRERAAHMYSPLPYALGQVVIELPYIFVQSLIYGVLVYAMIGFEWTADKFFWYLFFMYFTLAYYTFYGMMVVGLTPNYNVSSVASTAFYAIWNLFSGFLIPRTRIPVWWRWFYWICPIAWTLNGLVTSQFGDVTETFSDGGVRISDFVEDYFGYHHDLLWVVAVVVVAFPVLFALLFGLSLKIFNFQKR

SEQ ID NO: 68244 - protein, 1176 aa, Zea Mays
MFYSQFILAKKGPLGTIWIAAHLERKLRKNQVADTDIGVSVDSIIFPDVPIALRLSSHLMLGVVRIYSRKVNYLFHDCSEALLKIKQAFRSTAVDLPPEESTAPYHSITLPETFDLDDFELPEAAFQGDTDHHVSTKEQITLQDNPEKTGYSTSQFGLDERFGDASSSHIGFDLEEELILNKDHSIHLQSDDGIIIQGRSSVPSTDMDIDDNKSQDIIAEGYHNMDGGHSSHGKLGSLNLNAIDLGGNSIPNWTGYNVHTPDLNDILLHNEGIAGPSASYIQPSPYTCDEPASPEFISAQAPATPGLMEETVPSRVHESPVLSPQRKPSPSTNDETAKTDTPAAPASDFLHSATGNANDVGAERTELGLAKHVQVESSAFWDADASGQQHTSEGLPSQGQADHLEPAADKLVNSDGIAASVETVTVNATIKDVPLAVNDSEPCVDGSTEPSVVENLVQINGPLIDAQDFQHEAQAMQQVVASNDRLNELATSEFAEPEKMLSVPDSEFNHPIDLGLITAEKGTTESDGSNIIGSLASRKRHLEDSLPALESETTERLSSRPHGIRTNDFVPHDDDILASILVGRRTPGFTLDSTPLPPRESSLKRRRLGSKMGTLKRKVQIDDAMVLHADTIRQQLINTEDIRRIRKKAPCTRSEIWMIEKGSLEDDIFHEPIFSCLSEELNKLHNRTYEAIVHPAVQNMELQGQLDMPEAITEDSNIAGFGAATIDGPLHIPDGIQSDAMLPRANDAYGATAAFSLQVPPNNQVNGASNDFVIGTLFQGVTGPFIGNEKEVALADRERAQVNTLYSDHFQDVPSDLHSTDANISSQDVTLDNSGQACAHATDGMTRELTHFVHSNANIFESNEVPASEITGVEYNQGASGFPQSTEDENAVGYNQDVSGFPRPTEDENAVDYNQDASGFSRPTEDVQDASGFPRPTEDENMVDYNQDASGFPRPTEDVNAVGYNQDASGFARPTEDVNAVGCNQDASGFPRSMKDENAVEYNQDGSGFPRPAENENDVSAMGDNSGFHENNMGSLTDLDMVNDYELKESNDFGSAINGVDTDFLNYDDDDGGDFDDANDDEPNPNEFQSLDNSGWSSRTRGVARYLKALFDDESGLERKSVAIDHLVRGKTRKEASRMFFETLVLTTKDYISVDQPNPFDLVRIKPGSKLLMSEF

SEQ ID NO: 68245 - protein, 97 aa, Zea Mays
MALWRYRQQRPKEPVAIFILGFSTIFYNFISICFLDKLFPNLSVCANIHGCSFSFVCKHFYGLSFHDLIFPDIQVQGLTFQNILQALSHGCLINLLL

SEQ ID NO: 68246 - protein, 240 aa, Zea Mays
MLRALGYRSDVHIYVASGEIYGGEDTLASLKALFPNFHTKETLSSQEELAPFLKFSSRMAAIDFIVCEESDAFVANNIGNMAKILAGQRRYFGHKRTIRPNAKQLYPLFMKRGNMSWDAFASQVRTIQKGYMGEPMEITPGRGEFHANPAACICEKTSRNSAIVKSISGNNLEPVTDSGIRKTIGISRPPYPVYTDEEADGSDTEEDPDSSGRGEVIDTEPDDDSAVRQEDPELEEILSD

SEQ ID NO: 68247 - protein, 397 aa, Zea Mays
MGSCFSLEGGRSESIVPAQRSQIPEDEQVEPTVTSELAIPVPEVAESVVMLEALRTGFITDQRPERHIRVRSFTYDEVCAATHGFEVDRFLGQGGFGQVYRGFLESTNQEVAIKRLDLQGQQGHREFVTEVLILSNVHHPNLVKLVGHCTSHDQRILVYEYMPLGSLNSHIHDLPPGQQPLDWSTRIKILLGAAKGLEHLHHNLNPPVINRDVKCANILLGAGYHPKLSDFGLAKLGPTGDNTHVSTRVMGTPGYCAPEYLMTGKLTVKTDIYSFGVVMLEVLTGRMARDERLPESERNLVAWALNFLRRRELDNLLDPALRGQCPQACLEHAFFVVSRCISESPNTRPSMRDVVASLTVISEFRNRNTRRLERGGRSTPTRTPDRNHRGDDQGEGS

SEQ ID NO: 68248 - protein, 277 aa, Zea Mays
MTLDTPAAVVLELMTMGQQSAAHLGDLLRAASPAAASPHQELAAEILRCCGRVIDALRAAAAASGHKRKAAAEYQDAAAGGGASPPPPPPPPGPPLKRRARGGEATREVTSGTTVDGFIWRKYGQKDINGHKHPRLYYRCAHKDQGCDATRRVQRTREQPAAYEIAYYGDHTCRGAATAWQQGAPAPAVVDFGSNSWGSADTTSGGSPASVPLGGWWSPSASSEVGFEAHAAAHEWRDTAAAAPDPVMEFLDGAFGWESVLEDRFDLGGLHGIATFQ

SEQ ID NO: 68249 - protein, 315 aa, Zea Mays
MAPAARTRVCLVALVVALAFLFLLDGGVHAASSAAEQRRRQVRSLLRRLNKPAVATIESPDGDTIDCVDISKQPAFDHPSLKNHTIQMMPSCHPQQGGLYNKSNDVAHSALTQTWHQNGKCPENTVPIRRTREEDVLDIVQRYGRKKWPSSWSNDPNRYDDDVPDAASVLRGHQHAIASAPGDDNYYGTQATFNLWEPTVERNQGFSLAQLWITSGSYANNDLNTIEAGWQVYPGLYKDSHTRLFVYWTRDAYNKTGCYNLICSGFVQTSNQIAIGASNSYFSPVSIYGGSQYDITILVWKVINTTQSKAIGGCK

SEQ ID NO: 68250 - protein, 184 aa, Zea Mays
MLNIVTVRCGHCANLLSVNLRALMHSLPEQDHQLQENIKVHGINGTLHDDHQYCGHLDQLGSSSSSRFRRLPVMCSPQNEQHLLQEQTLNNNARPPEKRQRVPSAYNRFIKEEIRRIKANNPDINHREAFSTAAKNWAHYPNIHFGLDDSGREGKKKLVDHEAAASVVAVAAAPTAAKKIQGFY

SEQ ID NO: 68251 - protein, 290 aa, Zea Mays
MCCVNSKITIGSLRKHDTSSWFPIGNGSTTHSNSQVTVDDGSTNHPNSQVTVGSGNTHHPNSQVTIDSRSMCCLSFEAGIGSWSKDDPSSWFPIGTGSTDHSNFQVTVGTGSTQYPSSQVPTGIGSAYQSDFHVTLGDRSASIPDSQATVHYGIKHQPNSCVSVGNGSTGSVNSQDIVGHGSTYNPESLPAIGDGSMHNTNFEVVVGVGSTDKGNSQDTLVDGNLNRPSSMVSVDNGSSCYPNCKDAVGDTCAPSSEGSNPEYASCTVVVEQSRLSRDRCESLASDGFLT

SEQ ID NO: 68252 - protein, 257 aa, Zea Mays
MRPLIRTARCWLLRARVRAMATLPMASPAAAIPSSATRPVASPSSRSHRPLTRFFSVAPAPVGAKGLRAAASAVEVGGVKIAREDVVKEDDPTNNVPDTIFAKIGLQLHRRENHPLGILKNTIYDYFDKNFTGQFDKFDDLCPLVSVKQNFDDVLVPSDHVSRSYNDTYYVDDQTVLRCHTSAHQAELLRDGRTHFLVTGDVYRRDSIDSTHYPVFHQGSVCSLLMNGQVLAWMGQHMQLQNSRKHWKDWQDIYLVL

SEQ ID NO: 68253 - protein, 159 aa, Zea Mays
MLRECLVFSSMLLGVPFIALRQLGAVECIPGRQFLPSVAWRTGQSGAPPDTVRCGSPSLFGEADRWRFGAIGASDTVRCTPDSPVPPSDRWLGHVSRADRATDRWPGRPLAHRTVRCTPDSPVNYSRTPLITSREQQVRLSQPGAPDTVRCTQTELTLA

SEQ ID NO: 68254 - protein, 187 aa, Zea Mays
MTNGTMSRQVQKAKNHHQLALAISLSVTCSTILVLLFVYWLSYCRWRLPFASADQDLEFELGHVKHFAFHDLQSATDNFNSKNILGQGGFGIVYKGCLRNGTLVAVKRLKDPDVTGEVQFQTEVELIGLAVHRNLLRLYGFCMTSKERLLVYPYMPNGSVADRLRDYRNGKPSLDWSKRMRIALGAA

SEQ ID NO: 68255 - protein, 945 aa, Zea Mays
MDSNSSSIKLLWGPPGTGKTKTISSILWAMLIKGRRTLACAPTNTAVLEIAARIVSLTVKSSDGTVFLNDIVLFGNKKKMKIDNDYYLSKVYLNFRAERLLPCFKSNTGWRHCLCVLIDLLVNSVTKYQLNNEDKTFKQHLKDDYNKLSRNLHSYITILYNDHPRNLETGQSFQCMLEVRELLKILHTLINAGNGGDIWSDELLRSTIEEEVNPELWPSQLACIRTNSCNKSKFVAARSLCLQELIYLCKNMELPNCYSAQDVRLYLLSRTRLIICTVCSSFKLYNIPMRNSSPSLHQLLNKPKILIPLELLIIDEAAQLKECETLIPLQLPGIRHAVLIGDEYQLPSLVKSKISDSANFGRSVFERLSSLGYSKHLLNIQYRMHPDISRFPVGTFYDGKLSDGPNVSHKDYNKMFLAGKLFRPYSFINIDGSHETNEMHGRSLKNSLEVDAVVMIVQSLLKETLSTRSKLSIGVVCPYNAQVRAIQEKVGKPCRKYDYFSVKVKSVDGFQGAEEDIIIISTVRSNGAGTVGFLSNLQRTNVALTRAKHCLWIVGNGTTLFNSNSVWQKIVKDTRDRGCFFNATDEKELLNAIFKPAVEYPHADNLAKHEQHGQNISDLSATDTIQQLACQFTPGSDLPPKFSITLNVGYTTRKFSSSSTLLNSSPLQLTATAVPNAEPASHGSSATGAVELPVTEDGRLVDGKISFQNTVRSTLIRIDHDPRLAFDFLAVATTREQAAPLTREQFKKHDRMVESPAPVTAEGSECCIRLNEQEQVAPPTKLQSKKRGRNVKDPAAATTGALKCSIGLDEIATRQQAAPPTPEQSKKRGRKSEPLPQVITEGLRRSSRLSEKGKHHQVAPSQEQAKKHGRKGATLSPVTTEALRRSSRLNEKGTHQQIALSIPEQAKKCGRKAKRLPRVTIEGLKRSKRMSRNNSEELADVDCNP

SEQ ID NO: 68256 - protein, 308 aa, Zea Mays
MSLEIHEEDGGASGARSATKVMSVSGSGKRGRYVRQVTGRHNDTDLHVAARGGDAAALRRALLDAAAAVAATGEAPEDLEAARRAVAAEPNEAGETPLVAAAERGHLGVVVELLRHLDAEGLAAKNRSGYDALHVAAREGRHAVVQEMLNHDRMLAKTSGPANTTPLISAAMRGHIEVVELLLEQDDFGLVEMARDNGKNALHFAARQGHTGIVKALLEKDPQLARRNDKKGQTALHMAVKGTSCDVLRALVDADPAIVMLPDKNGNTALHVATRKKRAEVFTIDNENLTLICRKLMCMFLLIVAHSY

SEQ ID NO: 68257 - protein, 1058 aa, Zea Mays
MYRNQFRSDRLNDHATTARRPGRGSGSSSHWVVSGGRGSTAPATRLRSPPYRSGRPGSVQQQYRPRSPASVPIQGNAIGCAPPCGSGASAEHTGPVNQETFGSLDNVKPSNFPAQSDGLSCVSAEETWPADSPTPTLQTKGYSSPSFTLQFGTFNSGVINKQETTSCTSSAPPDLNGSKHEKACHGLHYCKPNTASSPPIQELQKQEARDDLVIGGEADLIGKYEVHVPELHETHTMLNSVSPSSKVCTDSRKVLLRTMSSPTQQKCENQEETKNTISVNQTDTAYKYPTTKPKISVQIPASYTPNMAPPQFMLPVPGRSMPVAFQQKQPQVPIEFRGPGFQMHSIGSVSSSLPVKMAVPLGNAPHIQPMFVHGAQPHAFHQQSFIHHGQGFGCAPPSNCYLPQFGNMRNVQELSQQYPRSGDEHKRTIKITHPETHEELMLDRHGHSFINVPASGQMPLNNINQLPHSVQTFSPLQKVYYPRPGTYNSAHVYLPNSTDVPLASRQFSSKIQPSMHGFDSTNSNQPFTSIRPPMPISRLDATSGPLTNLHTASEISNFKGMFPSSLPAPVHVELKPPITLPAEMNSESTISNQQNYCKIGLEMSLEPVNLVYEGNNKDSVATCDISCNLIPQPVSTPQTQTRPTSVDHATPVVDPQTILTSSLPLESTTCCKSSVKAKPIEVEQSLVVPTTLSSHTKLESSHATTSVILTATSLVSKIDGTPPTNRNYRYYGNSILGKPPLIYAQEILPSKFVGSNTSPEGLGKAKVNPVLFQEKFPSELNGSVPLRKHDFMIEEHVPNEKGMCSESKTEQVDVTMPSTAFGLEDDTSVAKSGRFHAYHQPVDLHPSIYIGDIQTSDDSQQPSPDLEIITSQSENKQNNSRVDSARDVKNAAPISTSAISQGKTEQERIGLEISNPCSITAALVAQPKKVVLESTKAKSTNGRRKKRKETLPKGSGHKYYDLDSAHSSLNENVESFVTSEDVQCSLATDLKLNFTCEAAKDNSTGGNDCQNRSDLFSWENTTENSADKLKLFGGTHSKSGAEVNKDKSEFDHKRQYST

SEQ ID NO: 68258 - protein, 308 aa, Zea Mays
MAGAKADVDAETGDGSGVGSGGGGLFSEQMLIDKLNRLNNSATSIETLSQWCIFHRKRAKRVVDTWEKQFTSSREEKKIPFLYLSNDILQNSKRKGADYVDEFWRVLPRSLKHVYENGGEEGRKQVARLILIWDQRKVFGTRIGSMKNSILGDNPPILDNNVNSLNPSSNPTSNSKAARKDSGTVVKKLTVGGMPEKIVSAYQSVFDQHFDEDTALNKCKSTVGLLERINKDINDASINGNQPASSLISDLQEQEMTLKQCIEQLESAGRVRISLINQLKEALSEQESKSIILRDQLQNSFTWFLHKG

SEQ ID NO: 68259 - protein, 449 aa, Zea Mays
MLHELLLALLGFTGDFVLDVSLPRRRAASQDAGEDGNGDGEVGPSFRLAPDLTFLQPSERTAIERLISLGFYYRELNRFATESRDLSWIQSSIDVSSPHSDNTQKGKVRKGSVYRRAIANGITEILSVYRSAVLQVEQNLLSDPLPILATVTHGLNKFEVLLPPLYELVMEIQHKDIKGGQLLNLLHKRCHCGVPELQSCIQRLLWHGHQVMFNQLTSWMVYGILQDQYSEFFIRRQDDRDVENESSQRDVSDKLKQKLAKDTSLASWHTGFHVSLDMLPEYIHMRIAESILFAGKAIRVLRNPSPSATLQDPVIRTVGSHGMQSSVGGSGVPKELANFSNIRAEELLPQAEADKIDSMLKELKHSSEFHKRPFESAVGSIRTIAANHLWQLVVVRADLNGHLKALKDYFLLAKGDFFQPPINAVTTSSIYSRSRSHDSISAGCTEDYR

SEQ ID NO: 68260 - protein, 424 aa, Zea Mays
MFACRSLLARASRLTRPAIPSAAGSPLRYLHQGSYCRNKLASFVMEGAQGSSIVTKHNKRQSPVQRWRPVSTEAVPQHHQDDIIETSNSGSKKIIEDCIASSENLPPDGTTNVVEVTANDASSSKNNLSFGYSSTKVVIEDHAELSGFNKDLAGSNVFGTHSSSVEAVQSRQLDYSHFISLPLALHPDLVNKLNYFQSSILGEENSNKDGSQSEGSIGEMDYDHKQAEAKMGAKGSQSDFGIDKSIFIKPETFHLTVLMLKLWNKERIDKASDVLQSVSTQVNEALENRPISIQLRGLTCMKGFPAKARVVYVPVLEVGSEGRLAHACKVITDAFIKAGLVFERDVRELKLHATVMNVRHRKRNKRNTWTDSFDARGIFGRFGKAEWGAYPIHEIHLSQRFKFDRSGYYYCCSSIPLPAEMHTE

SEQ ID NO: 68261 - protein, 861 aa, Zea Mays
MFGSTNPFGQSSTSPFGQTSFGTPQGFGQSSTAANNPFAPKPFGSPTTAFGAQTGSSLFGTTSTGAFGQQQSTPTFGTTSSSQFGSSTPAFGASPTPAFGATSSGSLFGQKPSFGGFGSSSSQSSPFGNTFQQTQPTFGSSTFGSSTPPAFGATAPAFGTTTPAFGTTTAPAFGATTSPAFGSTSTSLFGASSAPMFGSSAFGTSATGFGTSGTTAFGVSSTTPGFGSSSTPSFGTSASAFSFGSSPSFGQTAVSSGSTPFGTTPSPFGAPAPAFGSQTAAPTFGQPQFANQAGGTRIKPYSQTPDVDSATSGTQPAAKLDSISAMPEYKEKSHEELRWEDYQRGDKGGPNTSGTQTLAPSFPSPIQHNTFASTSNPFSTNPFSTNNPFAPKPTTTTSSPFNTSFNNASVASSSLFTSSPGTTMFGQPGVSTLPAPATFAQPTSSTPAFSSGSLFGSTNPGSLFTSSGPSLFSTPTFQPSAPAQSSNMFSFQPPIQPAASTGGLPFFPNTNQALTGQPTSSLSSMVMQSALVSNPFGMLPAMPQMSIGNGGSSPSVQYGISSLPVAEKPLPSRSLSMAVPRHLSQRRIKLLPRKYNPISDGKVPFFADDEESPATPKADAFFIPRENPRNLVIRPIEQWSSRRETGRQYTAKNVTDSNKYEDASIESERGKSAMSPSSRPPAVENDKQHEARAMAQHANGNGTSVERLLPKLPRADYFTEPSIEELAAKERAEPGYCGRVRDFVVGRHDYGSIKFFGETDVRCLDLESIVEFNDREVIVYKDDSKKPPVGEGLNKAAEVTLLNIKCVNKKTGEPCQGARVERYREMLVKKAEEQGAEFVSFDAVKGEWKFRVKHFSAYGLW

SEQ ID NO: 68262 - protein, 281 aa, Zea Mays
MGPTAGSGEDKAMSELRKKHRVDLERLTITSRPFKTLSFFVLAIAQNLERTCSSVLKKGYQLKTAMLLVVATWLLLMFTDGLNEKHLQELFWYVRFGLWWIILGVASSIGLGSGLHTFIMYLAPHVALFTIKAVQCGRVDLKSAPYDTILLERRPSWLEKDCLQFGPPIYHETIPFSKILQEVYLEAILWGIGTALGELPPYFLSRTASMSGRIIDELEDLDASISEGFLSSALRQAKRWLMSHSQYLSFTLILLLASVSFILLIFQICLFKSYFSMLHFT

SEQ ID NO: 68263 - protein, 95 aa, Zea Mays
MEELDNHRCKLQESTNDVIRLRQLISAKDAAIKELRASKKSIAQELETAQLAVKVAEETSGTLRAQRDRAMDKAIRAGRILMRRPGVTVPDDIKG

SEQ ID NO: 68264 - protein, 274 aa, Zea Mays
MVQKTSPLSLPFGRSSREPRYRVEFHPVDSPFHPENGQESVPMASHEGKRYKCFLPVEETKTMKSMLPQNATNIIIESERRIKPKEPDELLEVLKDQCFYRHEGWWSYEFCYYGKIRQVHVEDGKVIQEFVLGEFDDDATAAYHENSTSELADDDHHVKDISKRYHVHLYTNGTVCDLTDIPRETEVRFVCSEPTVLISSVKEISSCKYVVTIQSPMLCKNPLFQQEKRTLPIHCNELPAKAESGAEDGLLPKEAQISIIPDQDELHGFPAYAT

SEQ ID NO: 68265 - protein, 74 aa, Zea Mays
MVGMNQMNLRLSFLILVTLGVRLSGLKSRRMRTWITLRPWMWQRRRLCRVLWTLKLCLVQVLGVGGEGRLRSVE

SEQ ID NO: 68266 - protein, 442 aa, Zea Mays
MWLWTRQKSPPVGRRPPKVSSIRPLRATQSASPTQGWIASADELYSLLTVLVTRLATRHELRALRFPNAGCWPMAQHHGSHSLEVGGVGAGGVELDDDGHAARTGNLWTCFAHIITAVIGCGVLALSWSVAQLGWVGGPVAMLCFAFVTYLSAFLLSHCYRSPASDDGSLKRQRNYTYMDAVRTHLGEKRTWLCGLFQYLNMYGTAIAYTITTATCLRAIVRAIVLLEIQDTLKSPPPESETMQKGNVLAVLATTFFYLAVGCFGYAAFGNAAPGNLLTGFGFYEPYWLIDFANACIVLHLLGGYQMFSQQIFTFADRSLAARFPNSAFVNKSYAVKVPGAPASWSYSLNLQRLCFRTAYVASTTGLALLFPYFNEVLGVLGAVVFWPLAIYLPVEMYCVQRGVLPWTRTWVALQAFSVVCFVVGTFAFVGSVEGVIRKRLG

SEQ ID NO: 68267 - protein, 626 aa, Zea Mays
MSYGESPSLSSSSRLLRKAKYGEDVIVGVIDSGIWPESPSFDDSGYGPVPKRWKGVCQTGQAFNASNCNRKVIGARWYGADVSEEDLKAEYRSARDANGHGTHTASTIAGSPVRGASHAGGGLAAGIARGGAPRARLAIYKVCHDVGGGTSCGDASILAALDAAIGDGVDVLSLSLGGGSDEVYRTLHVVAAGITVVFSAGNDGPVPQSVTNALPWLVTVAATTVDRTFPTVVTLGDGETKLVGQSLYYRNRSAAASTSNDDFAWRHLMAFTGCDDAEKLRSENITGKIMVCRAPEFKSNYPPTAQFSWASRAAIAGGAKGVIFEQYSTDVLDGQASCQGHLPCVVVDKETIYTILNSDSNVARISPAATMVGPQVASPRIATFSSRGPSAEFPSVLKPDIAAPGVSILAAKRDSYVLLSGTSMACPHVSAVVALLKSVHPDWSPAMIKSAIVTTASVTDRFGLPIQANSVQRKPADAFDMGGGLIAPDRAMDPGLVYDIQPEEYKSLDDRVDRLNLPSIAVPNLMYDSVTVSRTVTNVGPVEATYRAVVEAPAGVAMDVAPPVIAFERGGVRNATFKVTFVAKQRVQGGYAFGSLTWLDDAKRHSVRIPVAVRTVVRDFVADVSR

SEQ ID NO: 68268 - protein, 91 aa, Zea Mays
MLQGALIGAQNVRLSWGRSLSNKQAQPQQESNQWGAAAGAGGYYGGYGQGYEAYGSGYAQPQDPNMYGYGAYGGYPNYQQQPAAQQQQQQQ

SEQ ID NO: 68269 - protein, 179 aa, Zea Mays
MISSAPQDQKIGCKDATKMMLVVKEIFTCQIQVELPITNPIYLMLGTSFGSSAKGTGLKALEFALSICDSFDMYGFTVDPGYKEWTRYFSEVRKGHTPLHGRAYYQMMECLGLVKIHSPMRGDPGRTVRWLPTKATIEAARVASEKLLKRPGAGSDDPLGTCTMIKKRRKGKAPNRSGL

SEQ ID NO: 68270 - protein, 676 aa, Zea Mays
MRSDDAGGGGFHELFDSVRRSISFRTGAAALDEPAASLSSSSASAGGAGGFRERISNRLRRSRGMGLLGMAAKGPSPTRRLLPQPPPPLAGVLASDGCGRVGGQGTGGGEENPPIRWRKGDLIGSGAFGQVYLGMDLDSGELLAVKQVLIGSSNATREKAQAHVTELEDEVKMLKNLSHPNIVRYIGTAREENTLNILLEFVPGGSIQSLLGRLGSFPEAVIRKYTKQLLHGLEYLHRNGIIHRDIKGANILVDNKGCIKLADFGASKQVEKLATATAAKTMKGTPYWMAPEVIVGSGHNCSADIWSVGCTVIEMAIGKPPWSHEYQEVSLLYYVGTTKSHPPIPEHLSTEAKDFLLKCLQKEPEMRSVASDLLQHPFVTRVLEDFCQLNHAGPKETSKNELPSYVVPTVDSDLSRPGKLRNLNSYKLSDTRPLWDQRCNDDDICEFADEDNVPMVGSSFNPMSEPSDEWENKLDISPEQQFSQSREFGGLAKLAESQMSENDFTFPCEGSCEEDDEFTESKIKEFLDEKATDLKKLQTPLYEFYNTVNAGVSQGVSDVCRANNVTNPQLPPRATKMVGGAALEPICVNLKNVNPKSCTRRFSRGSVESNHVLREIASPELNILEDKVHDDSEDSPSLSFSEIQRKWKEELDQELKRERGRVAMVKHHHRPQRAGD

SEQ ID NO: 68271 - protein, 463 aa, Zea Mays
MRAGGCTVQQSLTAEAAAVVKQAVSLARRRGNAQVTPLHVASAMLAAPTGLLRAACLRSHSHPLQCKALELCFNVALNRLPASAAVASSPLLGGHGHHHHHHYYPPSLSNALVAAFKRAQAHQRRGSVESQQQPVLAVKIELEQLVVSILDDPSVSRVMREAGFSSTQVKANVEQAVCSSTTTTSTAAAATAPSKNPNPSSSAATASPPQEAAKGNKLPLHQARDEDVAAVLDCLASRSKRRVVVIAESAAAAEATAHAAMDKIKSAEAKHDALRGAQVVSVRVSSFREMAREETERRLGELRCLVRGRRGQVVVLVVEDLKWAAEFWAGHVVQSGRRGYYYCSVEHVVTELRALASGGGGSLCWLLGFGTYQAYTRCRVGQPSLESLWELQTLTVPAGSLALSLNCAFDDSVLLAAFGRQQADLQMLRRRLLRREDRDDEGGAASDAVRLVVQPPFLAPALP

SEQ ID NO: 68272 - protein, 930 aa, Zea Mays
MPTCLHVQDPRNIAMSRPLDFAVLNYKNQRLAEQLEVHKFEFRALESRFNDLKEKQRTHNETLILVENYWERLVAELGIVPVCKSESSHSSCSTGNNNIRKGFLNGLLEAGASATESSGFSNCQLGNDVSSEESTTIDILQKMFLPSSGPWHANNEVVSAALKKLPENEHSRQLHSATNDVLSKLHVVMRAVDNLHLKHMQLAGNYQKQRDSSAWNRAEQKRLKEELTSVVAKLEESKQKLAVLKAQGDNKQATPILVPMLGKKTAEKVGDKQTELQDLEATHKELMESISKRLEEIRRLHTERIGILNNLATFQNILTDFKSIHSSKAFQLVNDQLQKSQAELDGHQTLLEKLQVDMDTFVWRERQFNQKVDLAEISQKVSAYYVSRIADLEKDVQKLCNEKNMLVLKLEGALREPGRNQVISEFKALVSSLPREMGAVQTELSKHKDASLQLHSLRAEVHSLSSIRTRKEQEIEETSRSAHAGSDISQLQSLVHELRENTQELKLFVELYKHDSADSRQLMESRDRELAELAGVHVLRYSLNESKLEQRVIAANEAEAISQQRLATAEAEVAELGQKLETSRRNLVKQSDILKSKHEECEAYMVEIESIGHAYEDIMSQNQQLLQQIIERDDHNTKVWRHGVEIFSGLLKLFMEGVKAKQSHDALHLEVCSLQRNLQHASTLMDLCNQKLIHLEDKLRGWSERLRRLSEDGMQQSISLGISQTKLTGMHGEAPKLGQALNVLQAKVGSNRLEVAELLIELETERWFIHTFAFYSGNWFLNTWSNKFSFSSRFSKKRLDDDLDLMSSKASSLREKADNSQVLQKLLHEAKEYRGILKCGICHDRQKEVVIAKCYHLFCNQCIQKSLGSRQKRRLAPVSHTPELPGALLIPGICAASQRLRYQKVLRSTEKHSQFSSRSQLPETFSNKQR

SEQ ID NO: 68273 - protein, 370 aa, Zea Mays
MLSCFRLPRPVGGGGGDADQQAAAVSPRRGPSLPFAASLFAASPSTSTSGRGRSAWPPEADGMEKKRWDSMESWSMLLDTVMGSGGEGSSRDSGRREEWMADLSQLFIGNKFASGANSRIYRGIYKQRAVAVKMVRIPERDEARRAELEEQFNSEGTLRMYLNKKDPYSLSAETILKLALDISRGMEYLHAQGVIHRDLKSQNLLLNDEMRVKVADFGTSCLETKCQATKGNKGTYRWMAPEMTKEKPYTRKVDVYSFGIVLWELTTCLLPFQGMTPVQAAYAASEKNLRPPLSSSCPPVLNNLIKKCWSANPARRPEFSYIVSVLEKYDHCVKEGMPVTAHQELRLWRSFAKIFRTGCITNNLSIPVHA

SEQ ID NO: 68274 - protein, 91 aa, Zea Mays
MREPGRETFPYGSGPVLLSHSASPSHPQQRRAHMDTAVFSPADLFHGVDDSDDDRDEMQICSDGEKPVALEYQERVHDFPDMWDRSACDLS

SEQ ID NO: 68275 - protein, 293 aa, Zea Mays
MLPSSGSGWGRGRGRHLLLSRALALAALLALASASESDHKYKTEEPVKLWVNKVGPYNNPQETYNYYSLPFCQPSENPTHKWGGLGEVLGGNELIDSQLEIKFLKNVEKGFICTLELDAKKVQQFADAIESSYWFEFFIDDLPLWGFVGESDKNSENKHYLYTHKNILVKYNDNRIIHVNLTQESPKLLEDGKKLEMTYSVKWVATDVSFARRFEVYLDYPFFEHQIHWFSIFNSFMMVIFLTGLVSMILMRTLRNDYAKYAREDDDLESLARGYHHNLHCVLCSYIVYFWIC

SEQ ID NO: 68276 - protein, 1115 aa, Zea Mays
MGFDNECILSIQSLPGEYFCPVCRTLVYPNEALQTQCTHLYCKSCLAYVVATTQACPYDGYLVTEADSKPLVESNKTLAETIGKVAVYCLYNKSGCQWHGELSACVTHGTACAYGNSPVVCNRCGTQIVHRQVQEHAQVCHGLQSQTQQADGSQVQLATATTQPVIQDSSLASAGSAAAAATTLTKPSSTTATAVTDSAAATGGAAGATTAAVPSSASSISASQTPTAEQWYQQQQQLQYSQYYQQQHPGSNPYMQQHQQYDQYQQAYQQYMQPPMQVPSQNVVQGSAQPASYVQPQVQSSQVMMQAQSQPQVHPLTSQPQLQQHPVQPRPQSHPHISHVQAPSGQSQLHQPIQSAQVPQVQPSQVPLQPSGLQVQSAAHPSAPTQVGNQQFATQAMAYQVQPHVQAQPPQQQHIVAHQQHPHMQALPLQQNIQPKMQLNSQVQLQPPHVQQQAYPQSQVYPQQTHHMHSQNTTYAQQQTQGALMQPVHVSHQQTHVSHHPAPMRPPSSGHQPALQHPQAQGIQHTSQHEKHIGFHAQWPTMYSNIPSQAPPQGLSVHSSVSSQSVQSYQQGMSSSQQMHSQPGQPYTQQHVTGNTGQHVQTSAGRPMAHLAPTQQFQQQHPAMLRTESPAAGHSIGQGPLDLEKHTSKSGKLDNATIAAVGENKNSGPESVVMRPTKSQLGDENMNSEHNGFVGVRKDAVQTGIVSHNLDGSIRRDGNTDQAGNSHGPLVQGGKDHKASDASTDHEKGRLFQQASLQNAGAPGSYVPPGVVPHPSGPDKMLPQHMTNHGHMHGFSENIRPPLQQPYGVFHSGTITRPFGENQIQMPMPQPGGIRPGDGMIRPCLVGPLPGHHGAVLPSFDLERLGQPRPLGMLNSNDFGGEGFNASGGAAYPERHDNTEDSRKHFPAPAPLDDQGLRRDPRHFERALGRPDGFLDSVPGRPPFANHRSAGLHEDFPRKQNATASHPDFLSHGAEFDHHRAIGMPNFRNPGPFAQGTSGGPGGPPKHQLGSGDMHPGDPHLVAEYAQHGFPKTAAHFGLGGFLRNGNSGWCRICMFNCGSAENLDLHVQTREHQQCAMDIVLKMKQDVAKRNYGGPKSFNNKKVSGKGHFRGNRR

SEQ ID NO: 68277 - protein, 69 aa, Zea Mays
MHLLIFPTKLDPMEGEGKGGAVWTASQSNFMQVFLANLVVDGIKTSTGGFKRVHLNACAKALNEHFKLN

SEQ ID NO: 68278 - protein, 298 aa, Zea Mays
MPSKPNAASRLVFLAFLLVISAAAANDDAAARRTMEQFAGFPASDDGEGPSSDFHVDSEGLQRQIDELASFSDSPAPSVTRVLYTDKDVQARRYIKGIMNQLGLVVREDAVGNIFGRWEGSEPGLGAVATGSHVDAIPFSGKFDGVVGVLGALEAISLLKRSAFLPKRSLEVIMFTSEEPTRFGISCLGSRLMAGIEELAQSLRKVVDNQNVSFLDAAESAGYKLNLEDLHSVFLKTDKYSAFIELHIEQGPILEKEGIPIGIVTAIAAPASLKVDFEGNGGHAGAVLMPARRSVLQK

SEQ ID NO: 68279 - protein, 1006 aa, Zea Mays
MGFAPAAGRFFSQFLAYFLTHQMAVALFRLLGAILKTMVVANTFGMFAMLLIFLFAGILLPRQDIKHWWIWAYWSSPMTYSNNAISVNEFLATRWAMPNNEANIVAPTIGKAILKYKGYFGGQWGYWLSIGAMIGYTILFNILFLCALTFLSPGGSSNTVVSVSDDGDKEKSTDQEMFDVANGTNEAANRRTQTGMVLPFQPLSLSFNHMNYYVDMPAAMKDQGFTESRLQLLSDISGAFRPGVLTALVGVSGAGKTTLMDVLAGRKTSGTIEGDIKLSGYPKKQETFARVSGYCEQTDIHSPNVTVYESLVYSAWLRLSSEVDDNTRKMFVEEVMSLVELDVLRDALVGLPGVSGLSTEQRKRLTIAVELVANPSIIFMDEPTSGLDARAAAIVMRTVRNTVNTGRTVVCTIHQPSIDIFEAFDELLLLKRGGRVIYAGQLGVQSRVLVEYFEAIPGVPKITEGYNPATWMLEVSSPLAEARLDVDFAEIYANSALYRHNQELIKELSIPPPGYQDLSFPTKYAQNFLNQCMANTWKQFRSYWKNPPYNAMRYLMTILYGLVFGSVFWRMGKNVKSEQELQNLLGATYAAVFFLGSANLLSSVPVFSIERTVFYREKAAGMFSPLSYSFAVTVVELVYSIAQGILYTIPLYSMIGYEWKADKFFYFMFFLTCSFLYFSLFGAMLVTCTPSAMLASIVVSFSLTGWNIFAGFLVPRPALPIWWRWFYWCNPVSWTIYGVTASQFGDVGRNVTATGNAGTVVVKEFLEQNLGMKHDFLGYVVLAHFGYILLFVFLFAYGTKALNFQKRIGAIFTTLYVSSVGVHTALFCHRALASLPAPAVPASAPAVPPRPQSPLPSSPAAPPPPANPTTTQQQIHHRRARRAPRRGTLDPTQQEVANQSPSPPAPTPPAAASGVRYRTPSSPDLLLPADAAKMRRYSALPNGGRQETLADRAHRYRGIVLVILAPLALVSLVLLLMPRSPAGTMGSARDRQRDRALRPGTHSPAR

SEQ ID NO: 68280 - protein, 565 aa, Zea Mays
MHGHEFGKASGMAPRARVAVYKVLYRLFGGYVADVVAAIDQAVQDGVDILNLSVGPNSPPTATRTTFLNPFDAALLSAVKAGVFVAQAAGNGGPFPKTLVSFSPWITTVAAGVDDRRYKNHLTLGNGKLISGLGVSPATHGNMSFSLISAADALLGSSASKYSALDCQRPELLNKRKVQGKILLCGYSFNYISGTASIKKVSQTARSLGAAGFVVAVENSYPGTKFDPVPVSIPGILITDVSKTEDLIDYYNSSTVRDWAGRATAFKATAGIADGLAPTLYNSAPQVALFSSRGPDVKDFSFQDADVLKPDILAPGNLIWAAWAPNGTDESNYAGEGFAMVSGTSMAAPHIAGIAALIKQKNPKWSPSAIKSALMTTANTLDKGSHPLRAQQYTASEMMTLSRATPFDCGSGAVNPKGALDPGLVLDASHEDYITFLCSIPDVNQSEVSNIAGSACNSNSKGQRPFDLNIPSIAVSQLRGTVVVKRTVTSVSDETETYTIMTRMPPEVALEVTPPAVTVVPGASREITVTLTARSVTGTYSFGEIAMKGDRGHLVRIPVVAMGFK

SEQ ID NO: 68281 - protein, 262 aa, Zea Mays
MQSSVKLAVLALLLAAAAHHGLLPLPTARCYWLNPEIYDAGGLSRRAFPDGFVFGTAASAYQVEGMAKHGGRGPSIWDAFIEVPGTIPNNATADVTVDEYHRYKEDVNIMKNMGFDAYRFSISWSRIFPDGTGKVNQEGVDYYNRLIDYMLQQGIAPYANLYHYDLPLALHEQYLGWLSPKIVEAFADYAEFCFHAFGDRVKNWFTFNEPSCCQAIPRQVSASPEGEDWNSPGFRVVRTFQRQQCGPGCSTASQGLPPRLVP

SEQ ID NO: 68282 - protein, 352 aa, Zea Mays
MGHDHMSRIKMHMAEGSFGDRNRCQQPGCNEVVDGRVVYCKTHSGELSCQQFSHLQSGLESSVPCTEQELHVKHEGDDRGMFCKNDSCSKQAHENSIYCKLHSGVSKGCMVRGCTRGAHGGTPLCIGHGGGKRCVIPGCPNAACGQGLSDRCVRHGGGRRCRFEGCAKGAQGNTDYCIRHGGGRRCKFEGCTKSAQGRTDFCIKHGGGSRCKFQGCGTSAKWGTDFCSIHRKALLGGDNAAVPEALPAASEKRRRAKKPKKAAKLSEASQENATAAAAIAGNSTQHMGGLLIAIPVANRDMLTKAVAATGQAAIASAQIVAPLSMKSPTPSGAAAATLTGREAGASREMLGL

SEQ ID NO: 68283 - protein, 332 aa, Zea Mays
MKHVNTSTDRDVLNLQDNVSSVMARQCLHISSHRTSQSTSKHKGNLSHLLHNEVPIRMGERNNLTENSENDSLSDSFSEPQTSDTLCIEAQRKSSAPSSSLRQSTLDSLYEFGETSRHEPAGRKKLDNVELRETSRSLLPFDLSGQEPAFCTQEQVDKCSLGTLADKKPMEKSSNMERQPELSCVICWTDFSSTRGILPCGHRFCYSCIQGWVDCLASRGKVSTCPLCKASFTCISKVDEAGTSDQKIYSQTIPCEASTDVFVSGNVGYDFSRPTSGQGACYQCHFREPEELLLSCHVCRSQWVHSYCLDPPLTPWTCMHCRDLRMLFHRYR

SEQ ID NO: 68284 - protein, 717 aa, Zea Mays
MTGEQIQAPSSPRDGEDVAITIGRPKESGPKFGTMMGVFVPCLQNILGIIYYIRFTWIVGMSGVWQSLVLVSFCGACTFLTSISLSAIATNGAMKGGGPYYLIGRALGPEVGVSIGLCFFLGNAVAGSMYVLGAVETFLDAVPSAGLFQKSVTVVNNTLVNGTETAGTSTISTPSLHDLQVYGVIVTILLCFIVFGGVKIINKVAPAFLIPVLFSLLCIYLGVFIAPRHNAPKGITGLSITTLKDNWGENYQRTNNAGVPDPSGSIYWDFNALVGLFFPAVTGIMAGSNRSASLKDTQRSIPIGTLSATLSTTAMYLFSVLLFGALATREELLTDRLLTATVAWPAPAVIYIANQVHPKNWYPIPLVFCRPWGKLPENVPCHPKLADFANCMKKKGRGMSIFVSIIDGDYHELAEDAKTACRQLDAYIDYKRCEGVAEIIVAPNMSDGFRSIVQTMGLGNLKPNIVVMRYPEIWRRENLTQIPSTFVSIINDCIIANKAVVIVKGLDEWPNEYQRQYGTIDLYWIVRDGGLMLLLSQLLLTKESFESCKIQVFCISEEDTDAEELKADVKKFLYDLRMQAEVIVVTMKSWESHMESSSNGAQQDNSHEAYTSAQQRIRTYLDEMKETAQTERQLLMENGRQVVNEQKVDKFLYTMFKLNSTILRYSRMAAVVLVSLPPPPLYHPSYFYMEYMDLLVENVPRMLIVRGYTRDVVTFFT

SEQ ID NO: 68285 - protein, 404 aa, Zea Mays
MPAIIIELPTYYHAYKDSSTNKSASIKQEGAGSTGNEKSGNERLLRDQPKLLEQFGMDLLPTMTQVYGSSVNAPIHRKCLSIIGKLMYYSSAETVQSLLGTTNISSFLAGILAWNDLQVLIPALQIAEIMMEKLPETFSKLFVREGSNTMARQVPPQDKEQLDKIISEMLSELSKVNGVSTFEFIRSGVTTALLDYLSCGTFGKEKSSRIGNGGSRLTSGLSALAQPFKLRLSPAQGEKPLRDYSSNIVLINPFASLAAVEGFLWPRVQHSEVASKPIIPSGNNSESVVPGTIAGASLATAMDQSGRRPTTRSKSSAAWGGTSKKDSHDESTTTAKGKLGDSNECNIGSASFSQVQPSSGSGARNTSSRGPDSTEFQSTSTFGSFVAATMAGLASVGGRSVIGG

SEQ ID NO: 68286 - protein, 476 aa, Zea Mays
MMDIATFAMAFRLLRMNGYDVSSDELSHVAGASTFHDSLQGYLNDTKSLLELYKTSKVTLSENDLILDRIGSWSGNLLKDKMCCSRVQKDSIFGEIEYAVNFPLYSTLERLEHKRNIEHFDAWGSLMLTTKSSSFRINQEFLALAVEDFSFSQRVYRDELRHLDSWVKENKLDQLQFARQKLTYCYLSAAATVFSSELSDARISWAKNGVLTTVVDDFFDVGGSKEELENLIALVEKWHGHHAVEFYSEQVKIVFSAIYTTVNHLGAMASAAQGRDLTNHLVEIWLDLLRSMMVEAEWQRCQYVPTVEEYMTNAVVSFALGPIVLPALYFVGQELLEHAVKDEEYDKLFRLVSTCGRLLNDYQSLEREGNQGKLNSVSLLVLHSGGSMSIEAAKKAMQKSIDVSRRDLLRLVLRKESAVPRPCKELFWKMCKILHLFYSQNDGFSSPKEMVSAVNAVINEPLKVQNSTTFLSSSSR

SEQ ID NO: 68287 - protein, 162 aa, Zea Mays
MEAQATATVKEALAALYHHPDDAIRTAADRWLQEFQHTLDAWQVADSLLHDESSNLETLIFCSQTLRSKVQRDFEELPSEAFRSLQDSLYVLLKKFNKGPQKVRTQICIAIAALAVHVPVEDWGAGGIVNWLSDEMKTHPEFIPGFLELLIVLPQDEATTTV

SEQ ID NO: 68288 - protein, 600 aa, Zea Mays
MPLYLFSSPAAAKLATGPHASLHRRRQFLFRVPHRPSRRAPLLTSAAERPAGRTMATADTGASTVTDSRLRGVKQALISLSDKTDLANLGNGLQRLGFSIISTGGTASSLEASGVNVTKVEEITQFPEMLDGRVKTLHPSIHGGILARRDQEHHLKALKEHGIGTFDVVVVNLYPFYDKVTSGAISFEDGIENIDIGGPTLIRAAAKNHKDVLVVVDHKDYPALLEYLEGKQDDPDFRRTLAWKAFQHVASYDSAISEWLWKQSNKADSFPPSFTVPLTMKSTLRYGENPHQKAAFYGDRSLSLVNAGGIATAIQHHGKEMSYNNYLDADAAWNCVSEFESPTCVVVKHTNPCGVASRHDILEAYRLAVRADPVSAFGGIVAFNTTVDEDLAREIREFRRPTDGETRMFYEIVVAPGYTAEGLEVLKGKSKTLRILEAKRRRSGKGTLLSLRQVGGGWLAQEPDDVTPEDVAFTNVSERAPDARELSDAKFACLCVKHVKSNAIVIAKNSCMLGMGSGQPNRLESLRIAFRKAGEEAKGAALASDAFFPFAWNDAVEEACQRGVAVIAEPGGSIRDQDAVECCNKYGVALVFTGVRHFRH

SEQ ID NO: 68289 - protein, 408 aa, Zea Mays
MEPPAASSSSDPHSPSPSPSPSASPAKRSAWKHPAPNDTAVMDANNWPALSDAAKGNKLPDSSAPSPAPVAAPSAVANSSSSQKHGAHHGRHKSARRIGGGGDHSPRDHPDRNVAAGWDHAAGGGGGRGAQRNHNNGGGRRGNGAPASATGPSHHGSGAGGGSGGGFGARRRGAYEPPFYRGPPPPMGMGHYMRDMPSPMSPVSPIYFYGPPPPEALRGLPLAPPMVGPPAYPYFQAQPEPEPQPDPEPDAEEERVKLLKQIEFYFSKENLCSDVYLRQQMDGQGWVDLSLIAGFKKVQGLKKDLQYIKETVQSSSVLEMKDNKIRKHGDWEKWVIPRESNPDAPSRLASVSRPNVNNLTSHLGGMGLHESASSTGAEELNHHDVVQNGSPSGKEPAAEDSSGQQELQ

SEQ ID NO: 68290 - protein, 302 aa, Zea Mays
MAMPGNCNVAMIPVVAYEGATAADYQWFVEGGFFLSYYLTDTEDDDYYDQCQACSYRAGHGQCRTIVSDNGFQCYCSDGVYSTTACGTKRANWKTTIVVESKRELNQECSIYIGLRMNEHQERVREEAYTVGTCPSQWRCSGDGGDRHWHGEAAKPTAAEPHLEEEVENLCRYELPNESWEVNLPPEKVSPELPVPTLGINFARDGIQKKEWLSMVAAHSDAWLLSVAFYLGAQFGFNKNYSNSENMRQTDLNRVEMIPSYLYEDFPSKARDNGYLLCDDSKRMRLIDCVAVVAPIEKYYQY

SEQ ID NO: 68291 - protein, 328 aa, Zea Mays
MTSMIDRWRPETNTFHHRIGEVTPTLQDVSMLCGLPLKGKPVYSINVRNDWLEDLNKRFSSIPWKEGMNVPEVEKIDTKHSNGPLLHWLKSLSSKYMPHDANEATISLSLEAYLLWLFGYVMFCNTWGSAVLAATYEGLSKICITTGLSMPKLRWASEDPKKARKTFTEMLDNIKDIDFLWNPYTRTCIETVAPHGLSLLCSCDKEYWKTKDGLIFNNTVQKHPVERVMRHFSLYQEQLLVAVEDQQEGEQLLVAVEDQQEGVAWPEREPTNVLKEERVHDVDAFKEYLKWFRERSRVRVAFIPEDPRMTNEDPKMTNNNHLLSKAIS

SEQ ID NO: 68292 - protein, 67 aa, Zea Mays
MPYAPSTAVPLLPSPGSCSGSATMNVVVHRHLALALAHYCYCIVSLSRIKLGRVLGLCLQLPPDIVR

SEQ ID NO: 68293 - protein, 255 aa, Zea Mays
MTQQATRHARRVYVGGLPPTANEQTVAIFFNGVMAAIGGNTAGPGDAVLNVYINHDKKFAFVEMRSVEEASNAMALDGIMFEGAPVKVRRPTDYNPSLAAALGPSQPNPNLNLAAVGLTPGSAGGLEGPDRIFDLNVTDIACAALNGIKMGDKTLTVRRANQGASQPRPEQESILLQAQQQVQMQKLVYQVGGALPTKVVCLTQVVTADELRDDEEYNDIVEDMREEGRKYGKPHEAHRVLLYLLCFKSSYIQLL

SEQ ID NO: 68294 - protein, 337 aa, Zea Mays
MEHSSAEDSDISDSDIAEHKEEICAQLRAGKLNVKRGEAFRCPFCPGKKRQDYNLKDLLQHATGIGAASKRSAKVKASHLGLAMFLEKDIASTLEQPLQIVPYKPKTPKDEEIFVWPWMGIVVNLQCEFKGKECSRESEERLTAQFSRFRPLQATTLRDGKNQQFCAIVKFAKDWSGFKDAMAFENHFVLEQYSKPDWKKRNCRKDDLYGWLAKTDDYNSPEPIGEYLRKNGNLRSVGDLEREGLKETGERVAHYARQIDATNKHMSELELKNNQNAMKLDRMLEENDRLVEEHNERILNMQKDARRNSWKIINDNIRLHKELETKKKRNWQETRGT

SEQ ID NO: 68295 - protein, 126 aa, Zea Mays
MQVHILGLARSEPMNVLRVVCWCVCRRRLLMTVCALCRVFVLAPGTEEWYVRRFCAAADQRHDEESNEDIPQDNAWSSRRLDDAVAAHLRGERTKGMQCRLEWRATCWEASKLSLLLLRAEPEDRR

SEQ ID NO: 68296 - protein, 337 aa, Zea Mays
MQRAIDEAGFGQHIKVVVPLNADIYSSPENKPVPSAGTFRKDINTLMVDIVNYLHANDAPFVVNIYPFLSLYQNPNFPLNFSFFDGATKPVYDQGMVYTNVFDANFDTLVWSLRKAGVPDMRIIVGEVGWPSDGDKNANTKYAQRFYNGFLKKMTKNVGTPLRPGRMEVYLFALIDENQKSVLPGRFERHWGLFTYDGKPKFSMDLSGNGKGSVAEVKGVQYLPPQWCVFNKDTKDKYKDLPASVNYACSNADCTPLGYGSSCNGLSHDGNISYAFNIYFQTMDQDVRACSFGGLAKITTTNASQGGCLFPVQITSASVTVVPLIFLPMLVSVITLL

SEQ ID NO: 68297 - protein, 486 aa, Zea Mays
MIVKQQFRWFPSSPQILLIVGVFQHLRVSTSPGYTQASNYRKIPLTYLHLIPDQVSYRTRKMEYTLLPDLAPHKIHAKIQVHVSRKWLFRGATDSGPLQHVDMVLSDREGNAIYAEIPGNLAEQKATNIEEGGVYDINRFRVCAAKTVFKIVDGDKMIQFTFHTIVKCATSPPTTFPLYVYRLTSFDLIEPHVQTTNNFVGVYLSGGPACRWYFNPTIPEAEPYLTSQSTKRIVLQLPQNLQHPPAMETKPIVEHKSLYELLTVNPYDFPETGFECTITIAEIPAEHKWWFPSCTKCNKATIPHTTGYHCESCNWDGYKFKYKLKFLASDETDIAEMFCFDTVARHIVGKSCEIVLRSVTEQSPIPPDLAQIISLKFTFRVTIDNQSLFQQTSCPNVFRINSIVAAHGRQRSLPMQIGISDQQGPSTPQNKSKPMLLEDSPSTTLEKLSTTTPTTVVRKLLYSETDNTPKTHSISFTQLSFIHFKI

SEQ ID NO: 68298 - protein, 182 aa, Zea Mays
MDMAEMYLTEKLTQQEISEASSRAEVDDASLTEDDRDEDYRSEPDGSNGSVIGYKPNIEELEMLLEAYFVQIDGTLNKLSHLREYVDDTEDYINIMLDDKQNQLLQMGVMLSTATVVITAGVAVVGLFGMNIGISLYADPTTEEETRAANRKFWETTFGTVAGCVILYIIAMGWGKRSGLLQ

SEQ ID NO: 68299 - protein, 1201 aa, Zea Mays
MYIKKVVIEGFKSYKEEISTEPFSPKVNVVVGANGSGKSNFFHAIRFVLSDMFQNLRSEDRGALLHEGAGHSVVSAFVEIVFDNSDNRIPVDKEEVRLRRTIASKKDEYYLDGKHVSKTEVMNLLESAGFSRSNPYYVVQQGKIASLTLMKDSERLDLLKEIGGTRVYEDRRKESLKIMTETANKRKQIDQVVHYLEERLRELDEEKEELKKYQQLDKQRRSLEYTILDHELNDARNELASMDDNRRKISESMSLADNEVVDVREMIKSFDKEIKVSTKGINDTKAQKEGVEKRRTEALKVVAKIELDLRDIKDRIVNEKRAKDEAARDLQSVRRESEKSKSELAEISKVHQAKLKEEEDISKSIMDREKRLSILYQKQGRATQFANKAARDKWLQKEIEDLKPVLLSNKKQEGLLQEEIQKLKDEINDLTNYIESRKSESSKLEETLAKRHNDYNDLRKQRDVLQEERKSYWKEESEVTAELDRLQEDLIKAQKSLDQATPGDIRRGLNSVSRIIKDHGITGVFGPVLELVDCEEKFFTAVEVTAANSLFHVVVENDDISTKIIQILTREKGGRVTFIPLNRVKVPDLSCPQSPDFVPLLKKLKYRSDHRRAFEQVFGRTVICRDLETATKVARSNGLDCITLDGDQVGKKGAMTGGFYDSRRSKLKFVKIIRDNKTAIDRKTGHLESVVNKLKDILFWFNYNLVTKQQQMDAERDHAKSELEQFKADIARAMKQRGSLEKALVKKEKSLNNICNQIEQVQSSIAMKNDEMGTELIDQLTSEERDLLSRLNPEITDLKERFLMCKNSRIEIEARKEELETNLSTNLIRRQKELEAIISSADSRTLPLEAEAKEQELKSSKRNLDELTSLLKANVDAINNFTRKMDDLKRKRDDLKAREAILEQTVQDGAKDLEQLMNSRNTYLAKQEECTKKIRDLGLLPADAFEAYKRKNKKQLHKILYDCNEQLKQFSHVNQKALDQYVNFTEQREQLQRRRAELDAGDVKIMELISVLDQRKDESIERTFKGVARHFREVFSELVQGGHGYLVMMKKKDGDAVDDDEEEDGPRDPGPDGRIEKYIGVKVKVSFTGKGETQSMKQLSGGQKTVVALTLIFAIQRCDPAPFYLFDEIDAALDPQYRTAVGNMIRRLADMADTQFIATTFRPEIAKVADKIYAVRHKNRVSNIDVVSKEEALDFIERDQT

SEQ ID NO: 68300 - protein, 600 aa, Zea Mays
MAATTSTTPAVSFSLPSPPHRQGAPRRRAPFLLRAASTAAPPSPDLSIQLSPRASPPASTNGAATALGRPVAASFARDRAEDLQAEARAMARAAGATVYSPELLASRYGSRPFKVALRAAEVLSKLASFGVKVLLDERRGESSSERRRARAVELRSILTRLGPTFVKIGQGLSTRPDLCPVEYLEELAELQEGQNARRFKKLYADKQDVLVPDIFWDYTSAKVLTMEWIEGVKLNQQAAIESQGLKVLDLVNIGIQCSLRQLLEYGYFHADPHPGNILATPEGKLAFLDFGMMSETPEDARVAIIGHVVHLVNRDYEAMARDYYALDFLEPDVDVSPIVPALKNFFDDALNATVSELNFKTIVDGLGAVLYQYPFNVPAYYALILRSLTVLEGLALYADPDFKVLAASYPYFAKRLLTDPNPYLRDALVELLFKDGRFRWNRLENLLVQGRQDREFAAKDALQPVLKLLLGPDGEELRVLVVKEAVRVTEAITIGTLIDSYNAAPAFLKPLISSGNPAGPFKFSEAEQEQMLELRDQVFRVWGLLRSSNNFDPSLLQPIVQVLQEPEARVLGSRVAGGVTQRLAARLLQQLLRIPSPGSS

SEQ ID NO: 68301 - protein, 121 aa, Zea Mays
MVLHVDLNTLDLPVMEGVNELLAISLKSSDFVSFKCICPFKHNTMMDCCDIMMYCFFLENSDSEPDFEETEQKTINEPHVNVRSEPLTTRRCALQPWMDGSSSSNSTVDLPDGVPPAPSRK

SEQ ID NO: 68302 - protein, 65 aa, Zea Mays
MRTVPELREVIRRSMPEVEKTRVINREEVRITDYLSEFLCFIVCLYALILCLYALILSIIERHHY

SEQ ID NO: 68303 - protein, 228 aa, Zea Mays
MLEEMASIEGNKTWPLVDLQKGHRARGLKWVYKLKRNESGAVIKPKARLVAKGYVQQQGIDFEEVFALVARMETVRVLLAVVAHHGWPIHHMDVKSVFLNGDLAEEVYVTQPPGFTAKGEEGKVLKLHKALYGLRQAPRAWNVKLDKSLGKLGFTRCKTDHALYTRKKGGQRVVVGVYVDDLLIIGESDAQITKFKEMKKEFEMTDLGSLSYYLGIEVRQTAEGLELK

SEQ ID NO: 68304 - protein, 307 aa, Zea Mays
MGMPDANRRINLAAPLLSVRRHGGAETAPTGTRLPAYKQAGAATSSEPPGRTTTSAVAVAVPFGWERRPGHPKSVRTRRQPPPPPLTTIVDDPSPATRPSDDTLSRDDAASCVTANCSATTGLSDAASAGAGTGSSEPRARARGGAMMDRFLPAAHAVAAAGSPQNAFRRKAARTAPAAADRRLYLLPAQPQRRVPLHHIAACHLPPPVPPAPMSSPRGKNDDYDGASSDARSTPGFVSRTRRCGLLSVRCVRSALRRRAGRPFRSNGGARSRREKKPLLPHTGDDHGINAGRKCTSSRCSGQAAAA

SEQ ID NO: 68305 - protein, 63 aa, Zea Mays
MDEHDVKDGQACRRRLESRPRHASESTTAAPPAESLTTRPRVARRCRHESPVAPSCGPRGRAP

SEQ ID NO: 68306 - protein, 358 aa, Zea Mays
MQEILDQQVAEEAAEAEGAGAMATITNQRRTAKKGAGATVTPRKGTQEKSKVQGKGYKDKCYESIRMAVEARFNKLLTELVFVEDLMEALEEAKAIGDELGDIYDYVAPCFPPRYEIFQLMVNLYTERFIQMLRLLSDRANDIQNINILKVTGWVVQYQENLIGLGVDESLAQVCSESGALDPLMNMYVERMQATTKKWYSNILEADKTQPPKSTEDGKLYTPAAVDLFRILTEQVQIVRDNSTDVMLYRIALAVIQVMLDFQAAERQRLEEPASDVGLESLCALINNNLRCYELSSELSSSTLEALPQNYAEQVNFEDTCKGFLEVAKEAVLQTVSVIFEDPGVQDLLVKLYQKGWW

SEQ ID NO: 68307 - protein, 451 aa, Zea Mays
MLMDANRINDLSRMYNLFQRVNAVELLKLALSSYIRATGQGIIMDEEKDRELVPFLLDFKASLDKILEESFAKNEAFSNTIKDSFEHLINLRQNRPAELIAKFLDEKLRAGNKGTSEEELEGILDKVLVLFRFIQGKDVFEAFYKKDLAKRLLLGKSASIDAEKSMITKLKTECGSQFTNKLEGMFKDIELSKEINDSFRQSSQARTKLPSGIEMSVHVLTTGYWPTYPPMDVKLPHELNVYQDIFKEFYLSKYSGRRLMWQNSLGHCVLKADFPKGKKELAVSLFQSVVLMLFNDAQKLSFIDIKDSTGIEDKELRRTLQSLACGKVRVLQKIPKGRDVEDKDEFVFNEDFSAPLYRIKVNAIQMKETVEENTSTTERVFQDRQYQVDAAIVRIMKTRKVLSHTLLITELYQQLKFPVKPADIKKRIESLIDREYLERDRSNPQIYNYLA

SEQ ID NO: 68308 - protein, 384 aa, Zea Mays
MKALGAHVVDLLRGPHLLRAAVLAFAVAVAFLVGYHWPNAYPRLVFFSSASSSLASRSSRSPAVALSPNSNISFEPSLIPTPTTPPASPAPNACPPPSLPPPTPAPPPPLLPPPPPARLGIVGEDGAMQDDFDIGSVGANDTDLASDETAPQEPSNGGASGGPPRVRIGRFLVCPESMREYIPCLDNEEEIKRLPSTERGERFERHCPAQDKGLSCLVPVPKGYKAPIPWPQSRDEVWFSNVPHTRLVDDKGGQNWITKVKDKFRFPGGGTQFIHGANRYLDQISQMVPNVAFGSHTRVVLDVGCGVASFGAYLLSRDVLTLSIAPKDVHENQIQFALERGVPAMVAAFATRRLLYPSQAFDMIHCSRCRINWTRDVFPLGLLG

SEQ ID NO: 68309 - protein, 2132 aa, Zea Mays
MATPSYAAVKCLNTSSSSRKRFSFKSFSQRVEEIDIDVYRSLHTLKAEPSSGSSFFLDAIVEWRELNTAEDFISFYEEMIPLVQTLPQIVLHRDKLFSALLQRVNMSARLSLEPILMLIAAFSRDILEDFLPFLGRHASALLSLLNDGGDRDPEILEQVFTSWSYIMMYLQKYLVKDTVQILRITAALRYFPKDYVREFMAESVSFLLRNAPNNQLTQGLLKVLLEAAKQPSPARIDGVVSLLWHVMKGTSTKLHSKAGQVLKFLLSKSIVSTLRDKFPDDKVKMIKLVELLVSRYVFPGSNITGSSSIEVLGSILDFMLSVLDVPTILGNLSIISPFYAPVFKLKNPRVIVFIKKLLVKGPQVAQHFESQILSAMDNFIVSSPEDVIFILLNFFKGSKKQIFLCSTDGNHLDSVEKTCKFFESKFSLWIELLDDTAGTGNRSSNQLVFLNGINSKDLHAGNMNGLPMTTWRGLLGAALSSYHKLLLVNTSRNSEFSFFLSLAKSHSTCPQVLSAVAEYLDSLQGVSSMEVTKEFDPQNLLELFSIFAFNLSSPTKDVRILTLRILSYFVKMDQRLITDEERPHKRQRTEVSGEEAVAKYANVVDILLIIESMPISVSTSRKIAIFISRIQMSLSSKMVHDDYIPPLLHGIIGILYNRFSDLWPQTLDCLAVLIRKHKELVWGQFVPFIAIHQSKGLTVKNQEKLEAATQPQSIFDCFNLYLAMDFDCTPAVTVATLLLQSLQRIPDVAESRSRQLIPLFLNFMGYDDSSIFSADSYMPEKCKGKQWKAILKEWLNLLRLMHNARSLYQGNFLQEVLTKRVLDDSDPEIQAKALDCLLNWKDEFLIPYSQNLKNLIDVKTLREELTTWAVSHDSLSILKDHRSRVVPLVIRVLAPKVRKLKLLGSRKHTGASHRKAILRFLLQFDSNELELFFSLLLRSLIPGSLQLKMFGSQPDNLLGSFSDIVGTSTEICVENFTWKKANGFIHLVEEIFGTFDMPHISPFLNVLLIIVARLLESCMRNLRNESDGKYPCNQTNDHGNGCSINSEVGNSVNVDECFKEMHLEGHMEQPHSITQTSVSIKQLKDLRSSCIRVVSSALSHYESHEFGENFWGVFFSSVKPLIDCFTQEASSSEKPSSLFACFMAMSRSPKLAPLLGSNNLVPAIFSILTVKTASGSITTYALEFIENLLRLDIDLQQQDEHLVKKVLLQHMDVLIHSLHDFVNHRKELNRRSGTWLGQRELRLFKLLLNYITDPSAADNFIDLILPFFSKKDLNSDDCLEALCVVRGIIQNLRCKVSEKVLNALNPLLAIVGLELRLCICDIYAGLSLNDPSMLFLAGLIGDLNAVSASELGELDYDTRLNTYDKVRPQLFLGLTEEHVGAILSHCVYDMSSEELILRQSASRALQSFLDFSASVMNNDVSKYSIDDKFRENNTRSICTMGCIQKILEKTYLHNMGVAMTKDVSIQKEWIILLREMVSNFNHLASLSSFRPLCKVDIEEDFFHNITHLQAGKRSKALLLFRQGIKENNFSEDITMKVFVPLFFNMFSDVKAGKGEQVRDICLDTLSAVAAKVQWEHYRTILKRCFRELNLRPDKQKIILRLICSILDAFHFMKPANDASGNSDALSEDIDSSLTFSLVTVSSDKQQYMQKVVFPQVQKLLGSDPEKVNVNINLVALKILKLLPVDYFESQLSSIIHRICNFLKNRLESIRDEARSALAASVKELGIGYLQFVVKILRAILKRGFELHVLGYTLHYLLSKNITADMYGRLDYCLEDLLAVVDSDLLGDVAEQKEVEKLASKMKETKKRMSFETLKLIAQSITFKTDLLKKIISPVSLHLQKQLTPKLKTRLEMMLHNIALGIECNSSTETSNLFIFVYCLIEDTITGSRSECKENTQSSPDQDSTVRKTFLGLGESGSQNSYILTKFALDLLRNRLKSIKLDKEDEQLVKMLDPFVDLLRKCMSSKHASVLSATFRCFALLVKLPLPSLRDNAITIKNVLMEILQRAGNSNGHLVTSCFKLLADLLRGFRISLSDNELQMLVHTPMFVDLQTNPSPVALSLLKTIVRLKLVSHEIYDIVVKIGELMVTTLTESIQQQCIQIMLQFFLNYPLSEKRLQQHIDFFLANLRYDEYP

SEQ ID NO: 68310 - protein, 73 aa, Zea Mays
MGADSEDAVKQLSLLMEQVEAPLKRSFQRPIVPVDLYRSIRDSQLIGLSGYTKEFSIGKLICRMKIALKRLKC

SEQ ID NO: 68311 - protein, 74 aa, Zea Mays
MSHQSLMLRPTRLIHHPIKVASSYSDCELEASRVFFSCLWFIVPPVLCMLYHRYLAGHLRRPLDSKLMYATVTH

SEQ ID NO: 68312 - protein, 612 aa, Zea Mays
MATATMATAAGAAALLYYTLNRRLQTERLNKEGECSDSRDVTPRAAQGSPSRSRVSRRDVRAPATWLETISTLSETLRFTYSETLGKWPIGDLAFGISFLLKRQGNLSVASIYAGNDSVELKGAEVIADLKYLLNLLTLCWHFSKKPFPLFLEATGYTTEDVLMQEPKAGILKPAFTILLDRDKKSILLLIRGTHILGYAHFGMVAAARWIAKLSGPCLAQALQMYPDFKIKVVGHSLGGGTAALLTYVLREQKEFASTTCLAFAPESGVHFITTVINGADLVPTFSAASVDDLRSEVTASAWLNDLRHQIEQTRILSTFYRSASALGSRLPSMANAKARVAGAGAILRPVSTGTQVVMRRARSVAQAAWTRPALQLSSWTCIGPRRRNNISTSTVTSEEIIASTGGGSESTSLLTETTAETTETVTSEAVSEVVQSSVSVAVDAVDLVDDKGDSDDDIVDHHGDEDRMTDVELWQQLESELYRKREGEEDDIAEEMAESTIAEEVGGVAEDVLSETKEVHRFYPPGKIMHILFSSREEADRGEEPEDDVTDGEAQSSIGIFLTPRSLYGKLRLSKMMINDHYMPIYRRNIEQLIAELEKDSSDQIGCVRCS

SEQ ID NO: 68313 - protein, 2684 aa, Zea Mays
MSRQDRHQWPRPNHGYDPRAAAAAAQWYGAASMLFPDPGAAALHGINPYGFAPNPFFNNFLPQNSAALAAYQLQQQQAHHFASHAYHQAPTGNTMHRSTKPAAAAKPAPPPGNQQAVLDRAQEAARKAREELVKGGDGVTAWKVAQAVLVALKADSWDSLGVQPQDVPLLRDLFLIEGKVNAFIHCYVAARKIVTVYDLEVEICKNEGVVQFEELGLGPFLQHPLVAHYFLVPADLSVVPKLCSEEIINTLLKFVDKSKKKITIEDFLNHLAEKKSVSGKEKLGVRVQSLGLHISLLRQAKQTEVSAAKLRANMSGSGNSSQEKDLLKNASFHTHKKALDKRFISLTNRIKELPGINKHIHFDSTDDETNSCTGSEDGKSDGNENENECSILDKKDGDKRVNSCPYPSKTEELERLGLKSEINKRQSLENSKPRDSGKKGKVLEMLANYYGRTISGKRRIRNFFSQYPGIGLLNVAVKSMGCGLLDSIYDVIQLADENDVASSPPPNTTTEVMEIEPPSKENTGSTNGAHEKSEDNMTAHGVAIDDVIRRISEYIESNSKISGDVALQVRALNDCETWVTTQFSANQFSALGHGTFLEFLDKHCHQFRTALSSFFKEGPSNSSSLEVSVLQQQIEFLLCQAESNWLEDSDFSEDSFVMLLKKQFPTISFNIVQDKSDGGVSGFIEGQKKDIRTYSLKFSISLLEKRWSGTLPSRHGNVDELGNIVAEQSCYHTTVCSREAINCLLRAPMLSDLHLWSHWDSLFAPTLGSFVHWLLNTGPIQELACIATTDGRFIRVDSSATVDQFLEAIIHRSPLQVAVKLLSLLYIYNGSMNTPMSLLKCYAQRAIKLIVDNNNDLMNAKSENKIFMPDEPQNLSSESSTCFADQCQESSQASPGRLIRSDSLPNINNTVHLITKFVLDCLDHLPSEFRSLAADILLAGFRVVTKNWHAVMLHEATENGQLCMLHDIGLSLGVVEWVEDCHRLCLTDEVHVQTEMHSSAKLATPASVGATHEDSNMHISSDVNMMDKRKQLFPVINDRAGIDKEDNKMLNPAGTEADVAELHTTSRSSMMEETSLEEASLVIETIRREEFGLDQALSDTENSLLKKQHARLGRALHCLSQELYSQDSHLLLELVQNADDNTYPEDVEATLAFILQEDGIAVLNNERGFSAENIRALCDIGNSTKKGSNQGYIGNKGIGFKSVFRVTDAPEIHSNGFHVKFDITDGQIGFVLPTAVPPYSTTSFSRMLSVEDDKDAHSLWNTCILLPFRSKFRECTDLHPSLLLFLHRLKCIKFKNLFDDTLLIMRREILGDGIVRISHGIETMSWLVVSKRLQGTIVRHDVCTTEIAVAFTLQQTEEGDYEPYLKQQPVFAFLPLRNYGLKFILQGDFVLPSSREEVDADSAWNQWLLSEFPSLFVSAQESFCALPCFQRCPGKAVTAFLSFIPLAGEVHGFFSQLPHLILSKLRLTRCMFLDGSTVQWVYPCNTLRGWDEQTKMLFSEGLLHEHLGLGYLSKNIVISDKLSRALGIHDYGPNILLDAISSICRIDGCIESLGLEWLCAWFVNLYLTLLSHSSQNVSSARNLEDILLDKVRKIPCIPLSDGSFTSISDGRIWLPYDVASSIPECSSIPNFPALYGNLRTVSPNLLSACCKNKYLMEEVRINDLADMLQRIGVRKLSGHDIVKNHIMVSLRNGLDANVADIVIREYVSFIMVHLQSSCTSCNFERGEIVSELRKSPIFLTNHGYKSPADEPIHFSKDYGNSVDVTRLLQNVEISWIELDSSYLQHHGSQSSSFAREKWRQFFEEMGVTDFVQVVKVEKTLSQVDSILAGGLSLADVSTKQCTVYDWESPELSRILSIFSSKRCKENCVYLLEVLDRFWDDHYSAKSRIFTDATHCGENRAVESSFMKCIQSFKWIASRMDEDLHYATDLFYDCENVRSLFGSVAPYAVPQVSSSSLKKAIGFKTEVSYCDALMVLKSWITSKVPFRASMSQMCKFYTFLSEGVADAKIDIKREFMSSPSIFTPLQRPRASEVIPGRFLAPEDLYWHDPTGCSEITEDFVATKNRSMFPRKMLSAAYPNLYELFTLTCGVPKAPTTSNYVEMLLRLSTIALPSQAGNHVFCVFVRWAKCMHSESDKMNDILYLKESLQKLETTILPTSADKWVSLHPSFGLVCWVDDDELKQQFVNSNDVYFIQFGDLSSEDKQMLYGRVAALMKSLGIQALSKVVYREAIFYGTSENREKVSLICWLLPYMQRYIYKMHRDTYINFQKNDIMKISNLQVVVVDKLFHKYVLRGLESSSKKRFQCHCLLQGDTLYATQEADSHSVFLELSRIFFDGSHDLHFANFLHMIKTMAESGTHAEQIETFIVNNQNVPELPEHEAIWSFSSLSAAKHGSANQGGADTQGVDFQPVHEFSIPNHQKAQVMVSSWPLNYWRTAPVFRTPLINQHASMQEAKVNDAGPSSNLNMPAMYGHTEDSLLSADLERDWIIEENPRTETTLFGDSSSEILDEPQMVMSAEPFHAPAYLNLEAGNSSPTVHVELTNSDEKLANLAEDKNQRLSDANQLRTGRLGEELVEKYLAKQLGSNNVRWVNNRIETGLPYDIVITHPEGFTEYVEVKTTVSSRKDWFDVSAREWQFALEKGDSFSIARVILGTKKASIEMLKNPHKLCKQKALRLALLISRSAAT

SEQ ID NO: 68314 - protein, 291 aa, Zea Mays
MPSCLLPGIAPRPPPAALRSLLLRRSRMASSGPARAFQLRLNPLTGDSEWLVVDEAETEAEVAAPAPTHHKQLLAATSYLDMLNDASRNRAYRLAIDATVTDPTSRVLDIGAGTGLLSMMAARALAAAGGEGRGSVSACESYLPMGKLTRRVLRANGMENKVKVFHKRSDELGVGVELDSRPDILVSEILDSELLGEGLIPTLQHAHDMLLVKNPKTVPYRATTYGVLVESTSLWKMHDLHSNEANAEDGVRLIPSGTQIVLSVKSQQHAMQCDALADEIRLIVIVKQRLR

SEQ ID NO: 68315 - protein, 448 aa, Zea Mays
MDEATTTVFLFFVFLSVSRLTTTHTYIHAWLMDGGGSSAIVCFRARTATPSTAWRRTSSTAWTTRSSGRTPSRRSRPRRRGAAARSPSRLALRRTGAGAAAAAAQARTAGGARGRRGTTAGTVPGARWPSGGRAPRTCCAPDPSPASAARGGTGRPPPPPPPPPPPRARPTRRTSSPATGTSTRSRTRRRRSSRCTAPRPPSTCGIRPSRSPTASASPSSGSSPAPSTAPTSTASRQDGSQVSPELYGDSRPRLFTYWTSDAYEATGCYNALCPGFVQTSSRIAIGASISPVSSAGGAQYDMTLLVWKDPKLGNWWLSYGDQLVGYWPAQLFTHLSDHATMVEWGGEVVDTRPGGAHTATQMGSGRFAAEGFGRASYFRNLETVDADNSLAEVALDAIQTLAEDPACYDIRKAYDDDDDDDDDGQHSARGGWGTHFYYGGPGHNPACP

SEQ ID NO: 68316 - protein, 71 aa, Zea Mays
MVRPPPSRRPHPLAQGLAWGLCQLQSARGSLRGPRPHRMAVPAPPPMPGAACYWAVCCPDHQDPQPRRHAP

SEQ ID NO: 68317 - protein, 128 aa, Zea Mays
MADLVAVGIKRRDAEVGSHGFPILLGPKRIKLEDEAEIPEPMEEEEPLADVDADAGAAAPVVVQAQPAVSVSMPSPSPLQPAQGHEEAAVLREPQPGLQQAAPMDVEEDFRQPQPQPGLHPRFWSGLF

SEQ ID NO: 68318 - protein, 106 aa, Zea Mays
MATHYQAATLIASPSYPNAIAWSSDNLVAVASGHIVTILNPAALDGPRGLVGLRHSDPFPIGVVKREDLLEPCLLPTSLARETEPCARSISWSQQGFAPNYGYTYL

SEQ ID NO: 68319 - protein, 464 aa, Zea Mays
MCIILRLCSSIVSIGQMDEGRCQVLYNGIIICIHGYEHWPRAPGICFLHRASLPCRAATSQAGIRRPQEDRELVQPPRRVESATCVESSVPRASSTELDREFIAASAFVTASVASSTSALEAGAHVDVAGEPEFPPRVTLDGHPDDELLHVEGAVVRPLLEEREQQHGTAQRVIVARGQSVLHRQYQLDSSPLDSCNIFAPERPADREMVEASAVMVVWAYDAACDRVGVQEVKHACEVGCSGGEMCLFTDLLGDLLCRIHRSPDSLMLVVETTIGTNSTEIAGIVRGCAKTAVSVGTTQQAKDDPIYTKVGSILGLRVSPSHWRKGMGKKLADREEDEVVQASYTYNIYNNWAPLEDALRLFDRMCMEHDSPRTSAVNLGSFNVMVDAYCHAGRGQYAIKVFGKMPRRGLCQMYSSNNLIDWLGKNKLVGKSEGWYMEEAARAVLGEWNKAIMATTCAKCDTG

SEQ ID NO: 68320 - protein, 474 aa, Zea Mays
MENAGASLIREVASKTNDSAGDGTTTASVLAREIIKLGMLSITSGANPVSVKKGIDKTVQKLVEELEKKSRPVKGSGDIKAVAAISAGNDEFVGTMIAEAIDKVGPDGVLSIESSSSFETTVEVEEGMELDRGYISPQFVTNLEKSIVEFENARILVTDQKISSIKEIIPLLEQTTQLRAPLLIIAEDVSGEALATLVINKLRGILNVAAIKAPGFGERRKALLQDIAIVTGAEYQSKDLGLLVEDTTVEQLGIARKVTISSSSTTIIADAASKDDIQARIAQLKRELSQTDSTYDSEKLAERIAKLSGGVAVVKVGASTEAELEDRKLRIEDAKNATFAAIEEGIVPGGGAAYVHLSTFVPAIKETLDDPEERLGADIIQKALVAPAALIAHNAGVEGEVIVDKIRESEWEFGYNAMADKHENLVEAGVIDPAKVTRCALQNAASVAGMVLTTQAIVVEKPKKAPAAAAAAAP

SEQ ID NO: 68321 - protein, 2259 aa, Zea Mays
MGDGGVACAVRSVESFRAGALVRRGGAGEAMPDKGERAHGHRHQHQHWKNQQSATAADLEEGELLNGEAGTNGLPERSMPPKKWRKVLAASAAAVEVEPGEIVSTKQAVPLKKERRNGDVEKVELLPERQRKEKSSGKSTRKSIKDDVEPGEIALPGKRRDAKSQLAHDNSRRPSSSAQKGSLRDSDEEPGEIKPESGISGSVRKNRPTEPHSSNHKHHTDTSDQSGSKHRRKGEGKSSSAARHLSGRIREVSPPTRDRRDKHERSPGILGRFPHDRFRHDRYDRSPSRLERSPHRTRHYDSRDRSPYISPRHRARPPQFRDNTPSRVDNSPRGRVQHEDIRDRSPFRHDRSPSERCRPTDTHEASKKSRSSNNSEKSHHKSKSAKQSSKIKSGSNGKNEEKISKEKHTESSQYTELPPPPPLPLPPPPPPPPPPPPLPPAVPPPLPPSPEPEPPGVLAEDMIEDMDICDTPPHTSAVPEPTEPICDIGRWFYLDHFGIEQGPSKLAELKKLVQDGYLLSDHLIKHADSNRWVTVENAASPLVPSDFPSLYSDTSTQLVNPPEAPGNLLDEALEEASNLASGAEDKQMEETSAEDSEEFCIDDRVEALMDGSILVHGQELEIIGELLGADFQPADWQRWSRREDFTRLNVHTEVNNEINGGTENRATDAYGLVSVEKNFHHNAESSEWFSGRWSCKGGDWRRNDELSQDTPFRKKLVLNEGYPLCQMPKGSCEDPRRPCKDELYYPVRAKKYELPLWAFSLTEEDIDSVNDTTKSGVVPGRPGQTRQPSRGVKGMMLSVVRINSRVVKDQSSVEPHTKPRGTDRPLSRSSRSHSIGAERSSVHEGSSHFRKHHDHDSQSSHKSKPVPNIPKDRVCTVDELSVYRGDWYYLDGTGHEHGPFSYSELQELVKNGTIIEQSSVFRKIDNTWFPVLKDLKPGSSVPSAARSSSFTAALMLPDQYNFGVNQGSGSFNQLHPQFVGYTRGKLHELVMKYFKSRELTLAINEVLDPWISAKQPKKEFEAYFSHNSASRNLLPEDGGSAKKAKLLPDQSDEDIHLSQDILASRKEDICFDELCDAEPSVDNDSLNPGAGNETWGLLNGHVLARIFHFMRADVKALISSAATCRSWNAAVKYYRNMCRFIDLSSVGPLCTDSVFCDIMAGYEKQNIRTLILAGCSNLSSHALGRVLEQLPQISYVDIHGCGHLGDLKNKFQHVKWIRSSLNPEESYRKIKTLKQIGDGNNYASKVARNFTNHLDGSDELDGYFADISNRENANLSFGQGFYKRSKLLDARKSSAVLSRDAEMRRLMQRQAETSYRKMEEFIINRLREIMRSNRFDFFIPKVSKIEGRLKNGYYARHGFRTIKHDIRTMCQDALRYKDGNDSGDIKQIVVSFIQLAKRLGNPRYISDRYGAGAQDSLDINQYSFDTKLKKKQNKIRGANSLAAGADNSSRAFDLEIKRSLSKLKKKDVYSGSETSDDDDGYSEVDETESETTVSDTESDLDVNSGAWDLKGNSLKLIEPGESVTDDRILGARMTKASLVPPVTRKYEVIEEYLIVADLEEVQRKMRVALPDDYSEKLLSQKNGTENLELPEVKDYQPRKVAGDEILEQEVYGIDPYTHNLLSDIMPADLELSPTDKHIFIEELLLNTLNKQVRHFTGSGNTPMTYNLRPVIEEIQRSAEDNGDRRTSKMCLGMLKTMRNRSEQNFVAYRKGLGVVCNKKGGFGVDDFVVEFFGEVYPSWRWYEKQDGIKHIQNNSEDQAPEFYNIMLERPKGDGDGYDLVFVDAMHKANYASRICHSCNPNCEAKVTAVNGKYQIGVYTLRPIAEGEEITFDYNSVTESKEEHEASVCLCGSQVCRGSYLNFSGEGAFEKVLMEFHGVLDRHSLLLQACETDSVSQQDLIDLGRAGLGTCLLAGLPGWLVAYTAHLVRFIYLERQKLPDEILRHNVDEKRQFLIEINMDSEKNDAEVQAEGVLNSRLQQIVHTLDKVRYVMRCIFGDPKNAPPPLVRLSGKSLVSAIWKGDSSIVAELIQSMEPHVEEEVLSDLKAKIRAHDPSESEDIEGGIRNSLLWLRDELRTLSCTYKCRHDAAADLIHLYAYTKCFFRVRDYKTVKSPPVHISPLDLGPKYADKLGPGFQEYCKTYPENYCLAQLIYWYSQNSEPESRLTRARKGCMSLPDVSSFYVKSAKPSQERAYGNRTVRFMLSRMEKQAQRPWPKDRIWVFKSDPRFFGSPMMDTVLNNSPLDKEMVHWLKTRPNVFLG

SEQ ID NO: 68322 - protein, 596 aa, Zea Mays
MANSVAQDMFGIIPGDTDYRIFAEDITNIPGLDIIFVLGGYFYHTSYDTLENLLPGSIQARGENLFNLVKAFTNPMLLKENEISNKAAKDGIEDVGAVFFDYLTWFMVFYSRDISLILHSLPIAIFLLVPLFLKFPNITLMSWFVTLLGFMRGMVLHTFGVILAIFIPALAAALRLLFTKNAMNWFAHPYLAFLMFVPTSLIGLLLPRLTWGLSEQAHFWGAFGLYSLITMVYTLAGLSGGFLTFFISMSMLLGRFVSRIIRKQWSQQSPRSLVAYVLPMTPCLLYGLYYGGFLIQFLIEKMGMMGSLPKPYGYFVPDVIVGAVVGLVVGWCFGPLSPVASRWLSKTSIIHGFLQITVVALAISSQLFPYSTGAPKRVVLQHTFVTDANNIVDSSYGFSVVDSNSLEFLFNNAPEAAKWLKDNSELSFEEKYRSDRSSWLALYPVPFLFSGSLKFQAQTEEIKKYYQHFPQLAVQEIWDNNGQRRVHLKLALGSLSEIWTSVLNITGPLSNWSFADNMLPAPQTVSGGPPSYICRLSGKSDVDWSFWLEANSSESLRVDVAVLDQYLVDSTKKLKSLFPSWADLTAFTTFFSTYHL

SEQ ID NO: 68323 - protein, 62 aa, Zea Mays
MSPVSLMSMANAGTTRDLGALRLYLPNDGYDYLAHLREFRPSLSSTGGGGPRPYSSLAVAPR

SEQ ID NO: 68324 - protein, 442 aa, Zea Mays
MSRFFEKRWCNVTRCPPGYFKDESIDKILVPRMKKMPVKMFRSIRHTKDFDMSLNYDKAYELPPGIPSHKFAEYSVSGLTDASEKYAHRNLSAPIKANLHFSLSRSGIIALDRAEAVIEITEWVEVPKKILTPESNITNQNSSSKVGVANSTTDIKENLSSGSDNNSSTPINGSNVQEIITEKVLKKRTFRVPLKVVEKTTGGGTILSKELYSEAKNRLEALDKKDAERRKTAELKNNLESYVYSMKEKVQDWLYMDGEDAQANEFKERLGQLKAIGEPILFRLSELKARPAACENARLYLDELQKIVNKWETNKQWLPKKRVDEVVSQAEKVKAWLEEKENLQKNTPVYSSPVFTSEQVYEKVLDLQDKVSSVNRIPKPKPKAEKKIAEEEPASKGKTTSSESAPNEGEYTETSQEPKAREGDHSASANSSDLDPESHDEL

SEQ ID NO: 68325 - protein, 685 aa, Zea Mays
MSSTSGALPQPRRGRPGPWPPAPPPQPQAQPLSWAKRTGFQSRVSGESLPSSSAHNSGQAPLPRPAEAPSDLESGPPARPSSTLPAPPAAAGNGERQHPPPPPPQARTRRRDSDSGRPNGQIAAPSLPQLQEEEEAPERPAHVKYELRDTPGIFPLVVYGFQHYISMVGSIILIPLVMVPAMGGSADDMAAVVSTVLLVTGVTTLLHMFVGTRLPLVQGPSFVYLAPALAIINSPELFGINDNNFKHIMKHLQGAIIIGGAFQVFLGYTGLMSLFLRLINPVVVSPTVAAVGLSFFSYGFTKIGTCIEMGILQLLMVVIFALYLRKIKLFGYRVFLIYAVPLGLGITWAVAFVLTATGVYSYKGCDANIPASNNVSAFCRKHVLRMRSCRVDTSHALRSSPWFRFPYPLQWGTPVFSWKMGLVMCVVSVIASVDSVGSYHASSLFVATRPPTSGVVSRGIGVEGVSTVLAGLWGTGVGSATITENVHTIAVTKMGSRRAVGFGAILLILLSIVGKVGAFIASIPDVMVAALLCFMWAMLCALGLSNLRYSATGSSRNSIIVGLALFLSLSVPSYFQQYGVHPSANSSVPTYFQPYVVASHGPVHTGSGGVNYVLNTILSLNMAIAFLVALVLDNTVPGGRQERGLYVWSEAEAAMRESTFMKDYELPFKIGRPFSSSGEGWGAAP

SEQ ID NO: 68326 - protein, 66 aa, Zea Mays
MGHLLETGMTPEEPPTARSGPRWHCAVWREIAGDCRFPHPIEHSSTFLGPWRLLPPSCGAQSKPVA

SEQ ID NO: 68327 - protein, 142 aa, Zea Mays
MALPCFCCVVVSIRTRSERESAPGGLEEHLPGQETRGVRGTFAGGGRQGPGAGDSGGGEEAGRFAPRRGAEEAVRHVAAAVHVDRRRQGRGRGRLHQRRRLLRAARGVHGAGRPAQEPARGRLPHHHQAAEGFLAPGLTIVE

SEQ ID NO: 68328 - protein, 491 aa, Zea Mays
MQGKTSMMGSNARPHAVLIPYPAQGHVTPLLQLAKVLHSRGFFVTYVNSEYNHRRLLRSRGADSLAGLDDFRFETIPDGLPPSGSDDDVTQDIPALCESLSRSGAAPFRDLLARLNGMPGRPPVTCVVLDNFMSFAQRVASEMGILAVVFCTMSACGFMGYLHFKELMDRGYVPLKDESYLTNGYLDTVLDWVPGMRGIRLRDMPSFIRTTDPDEFMVHFDSGEAQNARRAQGIIVNTFDALEQDVVGALRGVFPRVYTIGPLLTFARDMVRPDASAICGNLWKEDPSCLGWLDAQGPGSVVYVNFGSITVMTPAQLAEFAWGLANCGRPFLWVIRPDLVTGEKAMLPEEFYAETRERGLFLSWCPQEQVLSHPSTGLFLTHSGWNSTLESIRAGVPMICWPFFAEQTTNCRYACANWGIGLEIDNNVTRDEVARLIEEAMDGEKGKDMKAKATVWKEKAVAATESGGTSSVSIDRLVEFLLEGNVPTAAG

SEQ ID NO: 68329 - protein, 236 aa, Zea Mays
MGLKEQQLDATDQTRDAANSLASVSDEHHEGPRVSSCSTDKDSGLPSCRVCHCVEPDLRGESALGFLGIVPPSPPRTDTGGPKDDAATSPKGEIFVCATDVELQQQQDHLVDLGCCCKNELALAHYACALKWFISHGSTACEICGTVAANVRPDDFNKVLASLKDYQALRESTSTYWWLQQHSGVDPDAVAAIRSILVLWQTQDGVWRVLEFLLLSAWLSLFLHGWSLHMLARKLL

SEQ ID NO: 68330 - protein, 84 aa, Zea Mays
MEVDDMLIQRMRLWRLVPSLYGHPSCDALSYRFQCCRAVPGRKRNHVGLPLSRSSMSSSPRTHPPFRITQVRSMLSAPLFFDWC

SEQ ID NO: 68331 - protein, 411 aa, Zea Mays
MAAAAPSSSSSSSARARARAPPRPLHPLARGGPEREEMEAVAATHPGAPPMRRKGRKQKQRCSLVPSGPTTQLWPRTVLRKWLNIRSPESDFSADEGDTTGDDTDSEVDYEGNQLGVVPCGLRRRRKSETLRAQYIDVRELRICAGTWNVAGRLPPNDLDIQEWLDMEEPADIYVLGFQEIVPLNAGNIFGAEDNRPVAMWEHIIRETLNKISPDKPKYKSHSDPPSPSRFKPSDDAFVMEDELISESDSEGDGEVHPLNEQDLVDSVDGIHGNKCEPQTILQDEEFSRLPSVKTFDRSNNLSFKESNLEEKICQKILTKTFSHSERLGMIWPEPPLDMFAQCLPDSTKPFASGKVLRSYLSFKSVNGDSGPFAEDNSVPDFYMSCAAVKRKRPYFVRIISKQMVGVYLSI

SEQ ID NO: 68332 - protein, 398 aa, Zea Mays
MDGSELENPTSRSSSQKSSRRSSSRRSQKSAGQHSLTGAQEKRSKSKSSRQKHLVIDDKEAKKGKKHDHKIDVADERSNFLGYEVYAGKLILQKKNRSASDNNQLPSNGKADAIDARLTSKALIWGSSVLLLEDVVSVSYNSGVKHFTLHAYSTKKSLFKKTCRVQKDFCFIASTLDEAILWVTCFAEQSIYVNLLPRLGASSINQDSENPLSESLFDQPPIKCKSPQRVLVILNPRSGHGRSSKVFHEKAEPIFKLAGFQMEVVKTTHAGHAKSLVSTFDFSACPDGIVCVGGDGIVNEVLNGLLIRSDRAEAVSIPVGIIPAGSDNSLVWTVLGVRDPISASLLIVKGGFTALDILAVEWVQSGQIHFGSTVSYYGFVSDATSMNWNIFLRQRRWP

SEQ ID NO: 68333 - protein, 756 aa, Zea Mays
MFGSTNPFGQSSTSPFGNNNSFGTPQGFGQSSTAANNPFAPKPFGSPTTPFGAQTGSSLFATTSTGAFGQQQSAPAFGTTSTGAFGQQQSTPTFGTPSSSQFGSSTPAFGASPTPAFGATSSGSQTAAPAFGQPQFANQAGGTRIKPYSQTPDVDSATSGTQPAAKLDSISAMPEYKDKSHEELRWEDYQRGDKGGPNTSGTQAVAPSFPSLIQQNAPNPFSTSNPFSTNNPFAPKPAPTITSPFNTSFNNASVTSSSPFTSSPSTTMFGQTGVSTLSASNSPSLFGNTNPAPVTSSLFATSVTNNPSPFGTGSLFANTQSAPLFPSAFAQPTSSTPAFSSGSLFGSTNPGSLFSSSGPSLFSTPTFQPSAPAQTSNLFSFQPPIQPASTGGFPGFSNTTNQALMGQPTPTLSSMVMQPAPVSNPFGMLPAMPHMSIGNGGSSPSVQYGISSLPVVEKLLPSRSLSMAFPRHLAQRRIKLLPRKYNPISDGKVPFFADDEESPATPKADAFFVPRENPRNLVIRPIEQWPSRRETDRQLTVKNATDLNKYEDASIESERGKSASAMSPSSRPPAVENDNQHEARAMAQHGNGNATSVERLLPKLPRADYFTEPSIEELAAKERAEAGYCGRVRDFVVGRHGYGSIIFLGETDVRCLDLESIVEFNNREVVVYKDDSKKPPVGEGLNKAAEVTLLNIKCVNKKTGEEYCEGTRVERYREMLMKKAEEQGAEFVSFDAAKGEWKFRVKHFSAYGLPCC

SEQ ID NO: 68334 - protein, 139 aa, Zea Mays
MSELPIWIPWAVYGLVCKLSYFHKPVVNVTGMPCRDFFMFVFLLQGGWENDETVEEAAAREAIEEAGVRGDIVHFLGSYDFKSKTHQDACCPEGMCRAAVFALHVKEEALLTGFSDWHDKWSIGDGGGGGANCVTRPNC

SEQ ID NO: 68335 - protein, 449 aa, Zea Mays
MAFLVPFLLGLSSVLAAWIYSEFLGYRASSSHEKVHSDVHVGDKTIKENDRAVLLEEGESKPPSTKAPNMSARAKLIRFITLDESFLVGNRATLRAIAEFGIILVYFYTCDRTNIFAESKKNYNRDMFLFLYILLVVASTITSLKKHPENSVVSGKTVFYLNRNQTDEWRGWMQVLFLMYHYFAASEIYNAIRVFIACYVWMTGFGNFSYYYKKKDFSIARFAQMMWRVNFFAMSCCMVLDNDYMLYYIAPMHTLFTLMVYGSLFVLNKYNEIPSVMAIKIAGCLLTVILIWEIPGVFEIFWAPFTFLLGYKNPEPSKMNLPLLHEWRFRSGLDRYIWIIGMIYAYFHPNVERWMEKLEESETKVRVLIKGTIVTASLMAGYLWYEYIYKLDKHTYNKYHPYTSWIPITIYVCLRNCTQQLRSTHLSLFVWLGKITMESYISQFHIWLR

SEQ ID NO: 68336 - protein, 310 aa, Zea Mays
MLWSGDLPDVETLKENIVAYFNILQGFLLVCHGSMVGAGPTLHKSIFGSAKDVVDSSFSLFKHAVSAYESRSSDRNTTIPQVTGTVWEACAALKKVPASNCIAIGRAMTRIGVCLKDVLREMNELPIGGSGDSTAEKSSNGVVDTTSCSDRDERSDLDLDDDDDDEFTEEEVAVAKLVINVVSDSLVVVKEAIRFITGLLRSSGNKDKDGANEDRVEPMEKLLSHCKEIADQVNDLGASVYPPQDSSEMELAIKRLYNGINGMRKEIGNLGGAPESTFAALEGFENCLGSLRARLADDVVNEMEGLNISH

SEQ ID NO: 68337 - protein, 455 aa, Zea Mays
MEPPAASSSSDPHSPSPSPSPSASPAKRSAWKHPAPNDTAVMDANNWPALSDAAKGNKLPDSSAPSPAPVAAPSAVANSSSSQKHGAHHGRHKSARRIGGGGDHSPRDHPDRNVAAGWDHAAGGGGGRGAQRNHNNGGGRRGNGAPASATGPSHHGSGAGGGSGGGFGARRRGAYEPPFYRGPPPPMGMGHYMRGAPPPPPMTVAPPFMGPPPPPVSSMRPYAGPMMFHDMPSPMSPVSPIYFYGPPPPEALRGLPLAPPMVGPPAYPYFQAQPEPEPQPDPEPDAEEERVKLLKQIEFYFSKENLCSDVYLRQQMDGQGWVDLSLIAGFKKVQGLKKDLQYIKETVQSSSVLEMKDNKIRKHGDWEKWVIPRESNPDAPSRLASVSRPNVNNLTSHLGGMGLHESASSTGAEELNHHDVVQNGSPSGGGVGQLVKQQRRKAVVTSGGASDDMED

SEQ ID NO: 68338 - protein, 139 aa, Zea Mays
MTHIVREVEKPGSKLHKKETCEAVTIIETPPLVIVGLVAYVKTPRGLRTLNSVWAQHLSEEVRRRFYKNWCKSKKKAFTKYALKYENDAGKKEIQLQLETSRLALEEIKLKFIDTSSKFGHGRFQTTDEKQRFFGKLKA

SEQ ID NO: 68339 - protein, 351 aa, Zea Mays
MGNFLACLRLCLQVVNCLRLRAAGGMGAESIPPSPTSPGPTPSFSSLTPRPRRPRLRLLPLTGALLAEATSALFHTKAEKRRKGVWIEINNDGDDNQSARSSTVSTAPPRTPPLPGLPHPTPARHDLHNPTPARHLARAPPPPRAVSPAPALPAIPPALPVVSPPQRPPRRGAFSFLRQYDSGLGVWLLFAVAIGGEQEDTVEALSRAVQRSGSRGGIKGHRWRQHAIAACGGETEVRPGKQDREGDVISMQENMSARTLTLSSSTQQTIVRFVKLPLVDKITAWIFLEKLLRYSATTARAKVLKEVRNIAVTISMEKGAMARGKKENLMLPGSSIKKVPWWGGGGDMSLD

SEQ ID NO: 68340 - protein, 252 aa, Zea Mays
MKQSHEKSKDKKKFKDSRKSKELKDSSWSNQSLIHQDSTDEGTSETSQMLADCDDLCCKCSTSEDYFNEQEEELRHRVQLEAEERKLEEALEYQRWIEEEAKQKHLAEQCRSTHASSVIGIKFGDFSYTENENNFSQKLNGIEFDSSDAHALTSSDMSVSMLTLKMNGVCNNAQPIKPLGNFGTQNPKRSSSEPQRYSQGHSAGIEKPNFEKVVQYHQRMCASRMILIKGFKKILMKQCAKALDAMLILLVQ

SEQ ID NO: 68341 - protein, 710 aa, Zea Mays
MESDGDTSPPRPPTPAPVRACGAGHPASHSLPTSAGGRVCLSCVVALLSSAGNASTPSHHVAHALANLSLALADPAFLRPLRAAHPHLLAAPLAEALEGAAERRDAALAAQACDVAADLAAVVGAPADSELVARLARVLSSGSLVKHLHTGMAPEVERVGRTQSVSAEVEVVVVPALLLTLAKKEPFDHLLISNQSSNKCIEAESMQTDYMSLNASLVLFAEAVKGSLLSTNLEVQAGTLDLIFHFLSSDANICALLQTLIDENVADYIFEVLRLSEIPFHPVQSHVLRLVWICMANCSGILSLPQEEQIACTLTAILRRNLNGELDMSSETFILVCSILIEILKSPHAHDIEKLPSFIEEASKYAISSTLSHGYDSTILSTHSLLLLKEALIFCLEGSKYNIARTKDLEDSIMGTCGTILLQWLESAVVDGNDEETLAEILQIFQIILSRASDKKPLKFAELLASSSWLCANNQILASVEQYILLNGGTFPYEINGSIMLTLLVHLYAFIRGLSHSCSIPHSPEAENTLFHLIIHKDWDLLVIRVHSVAIKWLFQKQEIMEPLAFQMLKFCRTFCEDETVMLSNSSQLVDMQMIAELALSGETTISSLLVSLLDQMLKEGTEDELFSVVSVIAEILMISPCSSDQFISCGIIGSFHGIYCLPYSSRSRTVCSYLIFNILCSANASTFGQEDEWLPLVLKLLEFISSGID

SEQ ID NO: 68342 - protein, 440 aa, Zea Mays
MFASLASSISSHLLFLEGPFSPATQILTAGTRPGVWTILQNCTVISIACCVFYSHCGNLAVHKSKSFGSSSDPNLLAFLKNENGSTWISNFLRMNQLKDEICSSWFAPVGSASDYPILAKWVIYGELVCSGSCAGPSDEISPLYSLWATFVGLYIANFVVERSTGWALTHPSTDLEDEKLKRHMKPDFLDMVPWYSGTSADLFKTAFDLMVSVTLFVGRFDMRMMQAAMKGPTGNTPNDDLLYDHFNEREDLWFDFVADTGDGGNSSYTVARLLAQPSIRTVIGGSMHTLPRGNLLIIGGDLAYPNPSSFTYERRFFRPFEYALQPPPWYRDEHIALDKPELPPGVSKMTEYDGPQCFIIPGNHDWFDGLHTFMRYICHKSWLGGWFLPQKKSYFALHLPKGWWIFGLDLSLHGDVDVYQFKFFADVCQNKLCRLERMIL

SEQ ID NO: 68343 - protein, 604 aa, Zea Mays
MGMWSGEHTERSEATANESASLNGLVGDMVDDDVSHQLHAGIMKSARRVLIDEIFSSILPDLIVSKKTEKQLAAKLKNQVTKSGSVSNKKDSTAKVKVNTLSTIPKKGNSYNTSQVDCLAEIQSTAVHGKFADIVSAVWQTVYHESMNNVWDEILSERVMDYCDVWLQRNCILNLPSTSISVISDDNIKAQGSHELSPKDLDATECDMDFPPGFGPCWKSPESSLSPSLLEVNGSAKLDGKSESSTTLFSGPLAVVQRMLANELYISSKQSLFHYFEEVIADDITNCLCFGLESNIDQEQIGTPIHAPESPISAETSMHETANSIEMTGGDVLNIVEIATSTRTSPLEMTVDEKLNTVEATRTSRTEPTSVETSTVAEMATDKMTTYHVEEHLSMSYARVFEKMNICKTAELDEKFDEVPPGMETGLVPLPLMDKNIYQPSKSVNSIPLISRYITLALCRQKLHENVVREWTYLFSDTISKCLGSWYTRRNAVPKSADGSSKLKEKTYYRKRKFEKTCQAKSSKRPVEISMDEQLSKPLCQLVDRKIYVKNIQEPNKSLTSKRVSFVDKPSEKGAKTVANDAYDLNIQQDLTLLSSEVPKRHLR

SEQ ID NO: 68344 - protein, 486 aa, Zea Mays
MVVWTADGAHRVSCIPCGHVYGRHCLEMWLLQYGKKKAPCPQCGKRYTQNNIINLYVPEIVVPNNDLENQVLSLRERNEYLEKQQAKLLEEIKEHKRQIMLQQNVIYESNKKRQRVAEQSSDGILGAELIASHTKDIDHSNLSSFALQNEFLVDGARVMGIDASSQIIFTSGRAHGVSAEHILTKVSMFHGHGMEKIHLPPGTKAIRDICVLPGGHVVFASLGRKLSIFSVATNNVVLQYDLPAPGWSCSGDYTTSSHIYAGLQNGMLLVFDIRQTSAPLHSSMGLSTHPVHTIHCAVDGSGSRKVFSASSIGPCVWDASENRPSLVSGMENQGVCISLACSSPSSDVLVASYRPRVELPDAIATSQASTPQSPAPTGSGKLGCHTLLRRTTATSFARDHICSGSVSELRMSKSAIIPCRDNQHLFAYGDESLYGVRTWRLPSFQRYTDLKPHRQPVLDLRYAESSTGERYLGCLSAEKLQVFTIR

SEQ ID NO: 68345 - protein, 548 aa, Zea Mays
MAMIDEPLYPIAVLIDELKNEDIQLRLNSIKKLSTIARALGEERTRKELIPFLSENNDDEDEVLLAMAEELGVFIPYVGGVEHAHVLLPPLETLCTVEETCVRDKAVESLCQIGAQMKENDIVDWFAHVVKLCQDDMPMVRRAAASNLGKFAATVEQSHLKTEIMSMFDDLTQDDQDSVRLLAVEGCAALGKLLEPQDCAAHILPVIVNFSQDKSWRVRYMVANQLYELCEAVGTEPTRGDLVSAYVRLLCDNEAEVRIAAAGKVTKFCKILNPQIAIEHILPCIKELSSDSSQHVRSALASVIMGMAPVLGKDATLEQLLPIFLSLLKDEFPDVRLNIISKLDQVNQVIGIDLLSQSLLPAIVELSEDRHWRVRLAIIEYIPLLASQLGVGFFDDKLGALCMQWLEDKVFSIRDAGANNLKRLTEEFGPEWAMQHIIPQVLEKINNPHYLYRMTTLQAISLLAPVMGPDITCQQLLPVVIASSKDRVPNMKFNVAKVLQSLVPILDQSVVEKTVKPCLVELSEDPDVDVRYYAHQALRACDQMVISS

SEQ ID NO: 68346 - protein, 210 aa, Zea Mays
MAHERGAAASAHPAAPTSEEDALFIDLLHEAPLSGHREPRSIVGGTLYCILLVGFAAVAISAPWIFLFAPDMISPLLCSSNAILLVLTGIFQQYWVHQVRKVRLQGYYDFSQKLKRIARLPFATIACGTALMLLIMVWQPLLQILSVSLLLRIAIVVEVTCAGCFMGLYLWHIHKYNSLNGQPDILRSLYSALQPSNTLEDRRFSACKNA

SEQ ID NO: 68347 - protein, 892 aa, Zea Mays
MDIGGSGGIILSPGSEDDKFARRRSRRVSFADTTAVHVFDRDEDFETPPEEREPDSTPAPPSPRRSSVGREVEDDTEEDFNRPPVIFLHDVDSSYPDSAAESIASADDENFFGPVSASFIQTGRPSDSGMSEDDNHDITMDSRTFSLHFRNIAPPDDCTAYSAGSLMTPNTASEGPLKELTASNPARASINGRDTLTDMSLLSGNPRTYGYDKLSPTLNSMMKKIKGSKQTNSPKLGISDVTSDCVLTLSTSEEESREENLCIDNGVSSDELVMVNTIAEHISMRNPVSTSTDLIQDDNEMIIDVQENSKNCNHDHMDDDPGANNTAEPPAKISPAYKSFMINGDVQSHLVDQSSSKDRPSGSNCTASVSSMCNVDMETHLLDQLPGKDNTYAAQSSSEATAILLMDAEQLRQKNEVMDTETVLHTPRTAGLQLQVPRGSISSLRSKRHKLFTNTVSNSKVARQEGCSSGTEFVHHDKRLSSLKHQELAAASQLQLVEKNELGHRASDMFSNTEDHDSTLSVSSHSVPKLKKTNESFVLGTPRRHGLNESTKVLDTLCHAFTLDSQPSRECNSHVDLNGVGRKRTAEENGYAVQECPEKTTKTARSPRKSRKEIPCVSQPSMIEEKQNGAHDNGKSVDIDWSKVVCTITNATEQVLPASISKYNLQQLDMLSDRLDEIHMARKYKRLSTAVKKAQLCQDGIQECCFLKSKILGAGHMEDSSLPAATTVSAGDRQEELDIISEKRLELKIIQRKVEKLRSSLECFHNIEGGIGSDSVVRYAEEQLMMRNQHRIIHWQAGLCKLNDIVKRGNKCDIILNYHNLLFQRIILNISDTSSIFVNNSLNGNQIGKTFPNLDASLAFNFVFEAEENQRVSDLQSLQKKTMVNLASTCLS

SEQ ID NO: 68348 - protein, 202 aa, Zea Mays
MEHGVGEGGQMRVCATCLVGVDDELDCGPPGDLFVCLDIEEPSDIKRDGINLYSTVSISYLEAILGTIKKVRTVDGTNDLRIPPGTQPGDVIALAKQGVPSLNKPTIRGDHLFTVKVAIPKRISGRERELLEELASLSNGGFVRTDAKPKPAQPKRVHLEKEVGASQEDTDKSKAAGDWLKKLTHFAGSIANGAAKWLKENL

SEQ ID NO: 68349 - protein, 117 aa, Zea Mays
MVFVVSSTYGSGHRSSRRDPFLLVLSMKPRPAPTSTISLAHLPAPSIRRQYSCQAILLSQFIGRRSPLHLSPSVLSTVRPVVSNLIVVSHLQSRQPLLDMCLVKLSQVLLLLPGIYN

SEQ ID NO: 68350 - protein, 113 aa, Zea Mays
MAELVGPRVYSCCTCRNHVCLHDDVISKAFQGRNGRAFLFSHAMNVVVGAKEDRHLMTGLHTVADIYCNDCREVLGWKYVRAYEETQKYKEGKFIFEKSKIVKENWQVENLVS

SEQ ID NO: 68351 - protein, 83 aa, Zea Mays
MGWGSCRRGCQWHVAPYREVEWGRHSPYDPTLPCPLVCDPRVLLAWTWAMAPSVEVDAAAAPSRAGGRSCSPSFSLGRTDWPN

SEQ ID NO: 68352 - protein, 151 aa, Zea Mays
MKFRIFGLSFSDKSFVYLAGLQLLFSSGRRSIVPGLSGILAGLLYRLNTFGVRRLKFPELATSLFSQLSLPFSSNPYQGLPITENDGSIPSHQAHQIEDARAATQDPTESSIAALVTMGFDRSAAIQALALTNYDVNLASNILLEAQALQQ

SEQ ID NO: 68353 - protein, 237 aa, Zea Mays
MLSPTTLRPLVPAAAPAHLTACFLPASGRRAPAAAVRAVRNYDSIPKREPFTSNRSTLDEFLRLDKPLVQRTKDQITECSGERAQEENVLVRVLSIVSEAQSICSDYCMTVEGDECCSCWDAYFELNKLERELPKEEISRMVKDSEGDVRYLIESIHHRSDLRKKIAEKSRNSVPSGSQGQTAKPRPFPVPDGIPKTQEELTEEEEALMPESPYTRLLRRMGRYPEWYTPRPDHETD

SEQ ID NO: 68354 - protein, 179 aa, Zea Mays
MSNEMYSTIARVTDGIYEGIAIGGDVFPGSTLSDHILRFNNIPQVKMMVVLGELGGKDEYSLVEALKQGKVEKPVVAWVSGTCARLFKSEVQFGHAGAKSGGELESAQAKNQALREAGAVVPTSYEALESAIKEVEEGKISPVTEITPPPIPEDLKTAIKSGKVRAPTHIISTISDDRG

SEQ ID NO: 68355 - protein, 780 aa, Zea Mays
MSFNWHSKFKIACCRPSAAQMIDDEVNFGNIFDASEEVQVTAKFGPKQRPKTRKTALSSRSAAPNPTEETGDRKVGTFSQVNSSKELTSQERTSLMCPSTESVDIIAGSHSILDTPLEDALTVPQGSLSGASAADRTSQYGEHNDDPSKLATHQENLVVSDINVPPNSSCSKAIDDIVEFGDMCDVQIEEERVTKFQPKVQTKLLKEIAKSRKTNQKVETSTVDVVTQNGKGNNIQTRLHGDPVQDPKSHESVQIPDSEGLLATDNSKGCNLANLNNLLEESVQEETIAKFRSDLQPNLGKASSQVAAIKINVVAVAPIVGVCDSNNDMYKEPKDQETITGPVAWSPQAVHADVDLDNHNEPINPPIDGTQSMFGEVPGTAFTGREKGKSKSVSFALSDVSGIASPIDTNSEMGNIGDSCSDKLTDENLSNSSRHIAEKHSITKDQYSNEQDHEREPLDHAVQQQPKSDVGERASSMKRRCRKKVQKVGTPNHTVDDYFGEDCVEPSLAEEDNDTGDHYTTGNKHKARKKSRGGVEESQQQKAQKNKSKVSSRGRKRTLKDESTEKPEKKLTHRIRQRIPKEVKALLETPREQIKPMKLCASHLRLLQEARERVDPKGIPSGPSSNTRNFQLDDMDDLGYRDEEARFFDNDITEEHVQNATKLNYHSYMNKPARGKWSKSDTDLFYEGLRQFGSDFAMIQQLFPDKTRHQVRQKFKSEERKNPLLVHDAIVHRSGDSLYFKKVIKQLNIEDVVLPDIKSTQNKMVHQVKEALEMRMYWMI

SEQ ID NO: 68356 - protein, 814 aa, Zea Mays
MSGMSARIKEMVRVATARLGGEQAGGGGASSSGFARRESTARLGGGGTSLRRQPQPMAPSVRTVCCNDREANAPVGYKGNSVSTTKYNILTFLPKGLFEQFRRVANLYFLMISIMSTTPISPVHPVTNVVPLSLVLLVSLIKEAFEDWKRFQNDMSINNAHVDVLQGQCWESTPWKRLQVGDIVRIKQDGYFPADLLFLSSTNPDGVCYIETANLDGETNLKIRKALEKTWDYVIPEKASEFKGEVQCEQPNNSLYTFTGNLIMDKQTIPLSPNQLLLRGCSLRNTEYIVGVVIFTGHETKVMMNSMNVPSKRSTLEKKLDKLILALFATLFTMCVIGAIGSGVFINEKYFYLGLRGHVEDQFNPQNKFVVTILTMFTLITLYSTIIPISLYVSIEMIKFIQCTKFINNDLHMYHAESNTPALARTSNLNEELGQVEYIFSDKTGTLTRNLMEFFKCSIGGEMYGTGITEIEKGGAERAGIKIDDDEGKRSANAVHEKGFNFDDARIMRGAWRNEPNLEACKEFFRCLAICHTVLPEGEETPEKISYQAASPDEAALVAAAKNFGFFFYRRTPTTVMVRESHVERMGSIQDVPYEILNVLEFNSTRKRQSVVCRFPNGRLVLYCKGADNVVYERLADGNHDMKKTSREHLEQFGSAGLRTLCLAYRDLSREQYESWNEKFVQAKSSLRDRDKKLDEVAELIEKDLILVGCTAIEDKLQEGVPTCIETLSAAGIKIWVLTGDKMETAINIAYACSLVNNDTKQFIISSETDTIREAEDRVTSLVRKGAQKITLSIGDGANDVSMIQAAHVGIGIS

SEQ ID NO: 68357 - protein, 68 aa, Zea Mays
MACGSSSAPARSPQLSGYPQCHTEPRTGTVVLWRSPRRHSLRLADGVDTRWLPPSLSISPGPMAALDH

SEQ ID NO: 68358 - protein, 57 aa, Zea Mays
MNFGHGSAVWIGGAASFSRCEVVTLIGRRSWDVRLGIRSGPYRFGVRFQPSIIDLVD

SEQ ID NO: 68359 - protein, 464 aa, Zea Mays
MPMCEGAFFNYLREVDCSDVEVYSIPEGSVVFPKVPLMRVEGPVAVVQLLETPFVNLINYASLVTTNAARHRHVAGKSKVLLEFGLRRAQGPDGAISASKYCFMGGFDATSNVLAGNLFGIPLRGTHSHAFVSSYMSLDEIPDKALKSKDGSRLCQDFVSLVQEWLQKIQAANSLGGVFGDTNKSELAAFASYALAFPSNFLALVDTYDVMRSGIPNFCAVALALHDLGYKASGIRLDSGDLAYLSIEARKVFSAVEKEYNVPGFAKMLITASNDLNEETIDALNKQGHEVDAFGIGTYLVTCYSQAALGCVFKLVEINNKPRIKLSEDVAKVSIPCKKRCFRLYGKEGYPLVDIMIRESEPSPKAGERILCRHPFIESKRAYVVPQHVEELLQCYWPGTSDKPRAELPSLEKIRSRCMQQLEMLRPDHIRRLNPTPYKVSVSTKLYDFIHRLWLNEAPVGELQ

SEQ ID NO: 68360 - protein, 225 aa, Zea Mays
MLKKASAGRAAAATGRGDPAAPASRPSPTAKVAEGGACSARPASRLLSTRSVPSLFAESPMTTSPAASAPELLSRAPLRSGGSPGAAGLAGVLVAEEADERGSLLRNGRRVLRGTRLRVQLPPPPPIEFGVKNREAQLALLSPVQRSPARLARRRSEVEEELAGEDYTCVIARGPNPRMTHIFEDRVVESSTSTSSSTSCDGCNKDAALLLVLESSTWCCLCLLD

SEQ ID NO: 68361 - protein, 255 aa, Zea Mays
MDLILPYKVGDLAESKSLVSGYRGAWFRCKIHNMRVRLGYLECYLEYIDYPGETIVDETWQIGDRVDWLKEGCYWSGTITKIINEDLVEANGKGWHAARLLQHYKSESDDDNDDNDSWDARQTVCRASNTPEEAPGPMVPAPPSATNNAPSHMYQKDAAVTSTEDLLKPSSTSKSPDPRHDAQASTQPAGTGVSMKPEPVIGVSTIKKEDSSLTEGEVDGGTEECLEKLGAIKARLKYLMQGTRLEHERSATFRG

SEQ ID NO: 68362 - protein, 523 aa, Zea Mays
MVVSVAATGPGTDAEPVSSTFFASRYVRDPLPRYRMPERSIPREAAQQIISDELMLDGNPRLNLASFVTTWMEPECDKLIMDSINKNYVDMDEYPVTTELQNRCVNMIAHLFNAPIKEDETAIGVGTVGSSEAIMLAGLAFKRKWQNKRKEQGKPCDRPNIVTGANVQVCWEKFARYFEVELKEVKLSEGYYVMDPVKAVEMVDENTICVAAILGSTLTGEFEDVKQLNDLLTEKNKETGWDVPIHVDAASGGFIAPFLYPELEWDFRLPLVKSINVSGHKYGLVYPGVGWVIWRSKDDLPEELIFHINYLGTDQPTFTLNFSKGSCQIIAQYYQLIRLGFEVLLFFDRFFLLLIEHSEYICAGEQKGVLSDTFLEGESFLFLFSLCAAVTASQSGRVFFFWCRFYLVCRGTETSWRTARRTRRYCGRASRRRAGSTSCPRTPGCRWWPSRSGTAAGSACSTSPRTCGGSAGSCRRTRCRPTRSTWRCSESSSGRTSAAASPNGWSRTSARSCASWTRARPTP

SEQ ID NO: 68363 - protein, 217 aa, Zea Mays
MTPHRSGEKKTCCLPVSSQCGVSLSSSSCLSSSPPASPRRQRSPRPLPPLLLLLLLLLLLLLLHRLRRPSPSSSRSTACPRASSPRPSPPSRSPATAASPSTSRGPATYTSSISPTSSPTSRGCSATAPSPTSRASRSAASSSGSTSSASRSTYPRLRATSTSTSGGSRASSLLRTSSRSTPARTPGGAASPPRLPSPPNGSRTSLPNFRGWGRPTI

SEQ ID NO: 68364 - protein, 141 aa, Zea Mays
MHWALFIFFNHENGRNGIIDLFFQDRYLNAIQTNAHHLIRYLATAVVVNKRRRNMLEELIKVIQQEHHSYKDPVTEFLECLYVNYDFDGAQQKLIECEQNQYNNMDYLEWSLNELGCWCIRLQHRLVEVDKASKLYFYLQM

SEQ ID NO: 68365 - protein, 698 aa, Zea Mays
MDAWEATKVVFDRVRALDPENASKMMGLLLIQDNSDKELIRLAFGPEHLLHSFVATARAELAAKPASPPSPVLGPLQSGAPWGLPSPGSGAGGGGGGDHHHHSPFAAADQLGYDGGADAFYADEYDCWSPAGAAGAHRRSFSLSDAEAAASWRPCMYYARGYCKNGSSCRFLHGVPEDDAAEREMAVMRAKALAAAPPTQQQQLMASAYPFSPSPKGGVSLSFLLQQQQQSETQRAAAGMLLGGEDMHRFPVRSPRMDRGDLIGSPAARQIYLTFPADSTFSEEDVSNYFSMFGPVQDVRIPYQQKRMFGFVTFVYAETVKAILSKGNPHFVCDARVLVKPYKEKGKVPDRFRSVLPSSPLHIALPLPACACIAFSSFSLQSHCNALHVALLVCFDSFRCHLKKASFFGFIVLSGCRKLQHTHHGGAEFVGCASPTGLLDSRDPYDLQQPQIGSRMMYGNIANQHEAFLRRKLEEEQAAELQQAIELEGRRFMGLQLLDLKSRGHHHLGSGAPMPLRQATDGKGSGINGNGNASHLEDAICIQDKRMMSSLAMSAPAAADAEGEHEEQQEEGGGGCDGSSSSSPKQAVNPGEEEVVESGPVTATPNAACGFQESSYGVVEVELVLPDSPFASPTKEEASYADAVTTAAARNGSISSSPRHVALFAPASSTTLELPPYSSSSFFQVPSLQEVTAWCSSY

SEQ ID NO: 68366 - protein, 136 aa, Zea Mays
MQVNNEAPLGCLKPNISQYNSPEQIGGVEGFPENNEKRNDIVAAEKIWEATPNQGLSRPIYRQEFYAWPYIYSDYQIVRQPLPYGFDNQFYQINRDHGFPIENRVQYLPFKMLPQVQLENSKNASKHMFGRRIINF

SEQ ID NO: 68367 - protein, 58 aa, Zea Mays
MDEAQVVESKDGTISVASAFAGYQEGESIAAVIIIISLIPLSLHSFTCWQKFNIAIDQ

SEQ ID NO: 68368 - protein, 213 aa, Zea Mays
MATQCRAQSRRCLRRALSSSCRPYGGCRCRNDRTYAYASERRPVTDGPGPVSNIQPFSRAGPNDHASRSRMCRRPRSRVRRKHQTSRGARAGAGRQAGMRRPREREGERPANASPSKPCGACVTPPCISSPYAIKQTDTSCIGFEMRSRSYTMQPRTASAHGCLTTTTTTVPVPASARSLLWRFSFLPLRLATPIKRSSRDMAWHGSQKGTDL

SEQ ID NO: 68369 - protein, 139 aa, Zea Mays
MGAGLDPSPSFGGCSDPVLVELSMGGDYYRACCGEPDSDIPEGPKLPCVGDKEPLSSSAAEFQSGSPILQEKIKLLGEQYGALRRARGDGNCFYRSFIYVFLPGSICSVLFTNIIVHNSGYDPFLYLLTGTHPRETRQS

SEQ ID NO: 68370 - protein, 266 aa, Zea Mays
MFDPSVRKIYISMTPTEFRLSMHLNLQFAIFGSVLTVGAMVGAVTSGRLADFLGRKMTMRISATICIFGWLSIHLAKSAIMLYFGRTLLGFSTGVLSYVVPVFIAEIAPKNLRGGLATSNQLLICSGSSATYIIGALVAWRNLVLVGLVPCVLLLAGLFFIPESPRWLANVGREKEFHASLQKLRGEDADVSEEAIEIKEYIESLYSLPKARLRDLFLSKNIYAVIVGVGLMVFQQLGGINGVGFYASYIFSSADSNHIVWGHTHG

SEQ ID NO: 68371 - protein, 119 aa, Zea Mays
MGCEPLIPHLGHWRPPHPLTLATPSHFPRCSRPPLPLSPLKPTPLPLSPFAAATPSSSPSSCTLLHMQTLAATSPIPPLQGVATPSLGSSLGLCKSPLEDWWEEEGWGEEGVQGGGHPD

SEQ ID NO: 68372 - protein, 315 aa, Zea Mays
MAAVAIHQFAECITCHAWSPDQSMIAFCPNNHEVHIYKFFTDKWEKLHVLSKHDQMVSGIDWSKSSNKIVTVSHDRNSYVWTQEGSDWVPTLVILKLNRAALCVQWSPKENKFAVGSGAKSVCICYYEQENNWWISKVIRKKHESSVTSLAWHPNNIYLATSSTDGKCRVFSTFIKGVDTRGSKSSTSTDSKFGEQIAQLDLSSTWVFGVRWSPSGKTLAYAGHNSMIYFIDEVESSPVAQNLALRDLPLRDVLFVSERTLIGVGFDCNPMIFAADDTGLCSLKPLESYTANQSKGLVVIPLNHQNLVAGPMRIA

SEQ ID NO: 68373 - protein, 134 aa, Zea Mays
MAGIVAGGRTPEGATPGGVPPRSRRHARLSDPPLRVRLPNPRSWENTTVGHRSVLGERRRRMILGECSRRSILGEVAVARSFRSIVVARSWGAPPSVALLRAPSPLPPGSSSLARPRKPPPLLARPRESLPRKT

SEQ ID NO: 68374 - protein, 396 aa, Zea Mays
MAVVVAGSRARAEQARRQWREQEPRSPEMAAPPPRSTMPRPARAAAVVYYLARNGHLEHPHFMEVALSCPDGLHLRDVMDRLDALRGKGMARMYSWASKRSYRNGFVWHDLAEDDYIHPVVAREYVLKGTERLHPALLDAAAASSSSSAGSQETPTTSSSARWEAHRMTMKGACGGADLGEYVAAYMGEERGADAATQTEDDGRGRQRRVQSPAAQEELSRAETSPPTASTSPEALAKADGRAVLEGAVSGSGRARASSVLMQLISCGSVSVRDARASPVMPRAHHHHRPPRPPAVEAPSYRRAKLVVEDKEYFSGSIVETATKRSPADGVTSRDDLAVLRRSASYNAERRHGSSRMIKLELAKEAGDMHGRCIPRKAQAQGRRRIPGHLLQRAGE

SEQ ID NO: 68375 - protein, 280 aa, Zea Mays
MDQSIRTACEFLSSVLNHAESSSRELADAVSQRPVHLEMARTSFLQKLEHRVEASAADLQHIESIALDTVSFEELLGHCGEALKVYARHADALQSHLASFGYEPPDAQHPEIDVDVEDGDVGKVGDPGDRCLSVSRSVLRSGKRRFDSHSDAIFEESLKDLGFSDACLATLSSEGAHYGESPKKLYKNAESTDDGEKIMNEAEIMTPLNERNGQGNSFEGVIRASKEDYEQLPPYMKSLASWEELQEGISKLNSYLGGDKLQGSVALNQDRVAEIGLECR

SEQ ID NO: 68376 - protein, 52 aa, Zea Mays
MKAEFFTSEGLLKFAPGGVSCAPPPSEADVLYMEAAGGGSTIYDTSIALVDC

SEQ ID NO: 68377 - protein, 351 aa, Zea Mays
MARGDGGQLAELSAGVRGAAAVVDHVAPISLGRLILAGMVAGGVQYGWALQLSLLTPYVQTLGLSHALTSFMWLCGPIAGLVVQPLVGLYSDRCTSRWGRRRPFILTGCMLICVAVIVVGFSSDIGAALGDTKEHCSLYHGPRWHAAIVYVLGFWLLDFSNNTVQGPARAMMADLCDHHGPSAANSIFCSWMALGNILGYSSGSTNNWHKWFPFLKTSACCEACANLKGAFLVAVVFLVLCLTVTLIFAKEVPYRANENLPTTKAGGEVETEPTGPLAVLKGFKDLPPGMPSVLLVTAITWFRGSRSSSTTPTGWAGRSTTATPRGATPRSRRSTKVSESARSGCYSTRLF

SEQ ID NO: 68378 - protein, 183 aa, Zea Mays
MASSAGNRFLRQLSASNGDEAVCGGLQMDQQEYGGAGVGRRGSRRWSKKRAAAAAAARGYGAGSGNGVKQPASAAGKRVMVVVDESSGANHAMMWALTHVADKGDFLTLLHVLPRSGSGRGEEASSLANSLGTLCKASRPEVEVEALVIQGPKLGTVLSQVKKLEASVLVLSQCRPSPCWLSW

SEQ ID NO: 68379 - protein, 205 aa, Zea Mays
MAAEGAPVLVRHAGGVEELRQLPPGFRFRPTDEELVVQYLRRKALGAPLPAAVIPVVRDLYSLDPWDAVDVPAAPDASSQGERYFFAVRPAGGVGSARRATASGRWRPAGKEKPVALPRPCGGGSLLVGVKRAMAFVPRRKKKKAAAAAALAIGWVMHEYRLAAPLHKHPGPGSGRVGRLPRLPEGQRQAEEEEATTGVTVTVVR

SEQ ID NO: 68380 - protein, 773 aa, Zea Mays
MPQIQNTMRQNCTLLAVLCGEFAEKRQTPASLAPDTKRLRLSYPFPELASSGRLEVHTLINPTLEQFREAQQAVHPVFLYLQGQQQENEEEIGTLVWGDTDLSDPQMFVSLITPPFPTMVYLEVPTGEKLAQSLHSKGIPYVVYWRNLFSSYTASHFRHALISCSHTWDAFQLAHASFRLYCVRNNHVQSVKLGPCLLGDAPKTNVIPAGDEVNEEQGCSEGFPDIRIYDEDVSMKFLLCGVPCTLDACLLGALEDGLNALLNIEIRASKLQNRASAHPPLQAEDLPHGVVTMRCDITTCSSAHVSFLVSCSAQTCFDDQLLGSRIKNEIIEKRQLVRALLNNEDNKPSSYEPLPSMCVACGASTFEVWITMPKWAAQVLKHLAPEISYRSLVALGIAWVNGTPVSSFDRQDADRLLFFCSNQCGDQAIQNGSYAHVSSWSAPLTKDRTTGSLESKQMSFGAKGVVGDNTISLSSLKPRLKPATMRPLPHSRKQQMHPFMGFPQSIIHDASQVKPSLPAPPVKHNAVPVTAVTPRKSSSGSPSSWSRVQLPIPLNPLPIKKHECNRLPIHSCSEVHFGTILLFPSVLKHLPSKYPLILCYLLQEDFLKDVMQFLLQRGHIRLVPQGGLAEFPDAVLNSKRLDLYNLYKEVVYRGGFYVGNGINWKGQIFSKMHNHTVTNKMTGVGNTLKRHYETYLLEYELAHDDIDGECCLICHSGALGDWVNCGLCGEWAHLGCDRRKGLSTFKDYSKADGMEYICPQCSLAKYKPPLPAP

SEQ ID NO: 68381 - protein, 838 aa, Zea Mays
MESPFVPNSFTGKRKSPVGNSAIVQPHVGSRAVHEYQFLPEQPSDTYERATRSHYYDTPVEVSNARIPSITSGSQLLHGSEEAAPSYAFQGHTSGSSLLPPSSRPQVFPAAPTDYEMTQSNSNLSSVPVEGQFDISQVAAFENPPVSSEIIAYHDEDTSRVERKRKHSEEAKIAKEVEAHERRIRKELEKQDMLNKKREEQRRKEMERLDRERRKEEERLLRERQREEERFQREQRREHERMEKFLQKQSRRAEKQRQKEELRKEKEAARQKAANERATARRIAREYMELVEDERLESMELAAQNKGLPSMLYLDSDTLQQLDSFRGMLSQFPPTTVRMKLPFSIKPWTGSEDNVGNLLMVWKFLITFTDVLGLCPVTLDEFVQSLHDYDSRLLGELHIALLRSIIKDIEDVARTPSIALGVNPGGGHPQIVEGAYAWGFNIRSWQRHLNLLTWPEILRQFALSAGFGPQLKKRTVEDSYYRNDNEGHDGENVILTIRNGTAAVNAAAKMKERGYTNRRRSRHRLTPGTVKFAAFHVLSLEGSNGLTILEVAEKIQKSGLRDLTTSKTPEASIAAALSRDTKLFERTAPSTYCVKSPYRKDPADSEAVLSAARERIRAFQNVLSDSEAEKEVDEAERDDDSDCDDGDDDPDGDDVNTEVEDDKDPLLAVKSQDEVPSTTTVIGIKANLDGVGNALNSSSSFTKSAKGAPLPSLGRSNAADTSNDLPLGVSSANHEVVPDDSENTQIDESNQAEPWVRALAEGDYCDLSVEERLNALVALVGVATEGNSIRAVLEVYIVILLNYSILSFLIGKHLIKSLAGAFGVSKCLKEANVGRSAT

SEQ ID NO: 68382 - protein, 318 aa, Zea Mays
MRTTRWLCRPSRSMDGLQDGEIMSHTYRFVSDAQAAEGNLEERTLSGTVHIMTPNTPAELSQHADAPEQNQLGTDMAVDITRAEIEDAQVEETTDISTNGENDDPLSRFLPPPVTTKCSAALKQKINKFLAYKRAGKSFNAEVRNRKDYRNPDFLQHAVRYQEIDQIGTCFSKDVFDPYGYDKGDYYDEIEAEMKRELERKEQEKKRNPKVEFITGGVQTPHSASIPKIPGLAGVCTLPVPTEGVQKETRPNKKSKWDKVDDDVKNHVVPSGHDNLSATASVALLTSANVGAGYAAFAQQKRKEAEEKRSDHKSDRRS

SEQ ID NO: 68383 - protein, 969 aa, Zea Mays
MVWQFPEIQQRKFAWHLVRRTHFAGVLIKFLLFFCLRENSPVIRAKALRAVSSIVEADPEVLGDKRVQSAVEGRFCDSAISVREAALELVGRHIASHPDVGLKYIEKVAERIKDTGVSVRKRAIKIIRDLCASNPNTDTTHAFVEIISRVNDEESSVQDLVCKTFYELWFEEPTGSHKHLVADGSSVPMEIAKKTEQIVDMLRKMTNHQPLITIIKRNLTLDFLPQSTKAAGINSYMVASIQKRCELICKRLLERILQVEEGAAKEMEIHMLPYIVALQAFCIVDPTLCIPVTDPSKFVVTLQPYLNIQVDSKSAAQLLESIIFVIDAVLPLIRKPTQNVVEELEKDLKHMIVRHSYLTVVHACIKCLCALSESAGRGPGLVENLVNIFYKHLSGANSDSQLLGRSLFCLGLLLRYGYQLMQTSENQLDFPKIINLLQRKYLLRDDFSLKVRALQTLGYILIAKPEFMLQKDMLKLIETALSSEVDYRLKIQGLQNLYEYLRDAESQLTAESTVKPPVRCEINGRSKVPVAAGAGDTNICGGIIQLYWSSILERCLDTNDQVRQSALKIVEVVLRQGLVHPITCVPHLIALEMDPLEGNSKLAHHLLMNMNEKYPLFFESRLGDGLQMSFKFFESIVSNHKMAANIKSNPIAFVKPGISRIYRLIRSNRNSRNKFVHSIVRKFESDSRSRSTVSFLVYCAEVLASLPFTCSDEPLYLIYDINRIIHLKAGGVESNLKRWTSMSQSQNTVDMPTLPGERHVVMQEPGGYYDNVGYAHERVNANPCSTSDVDMAKVQVDVDMAKVQGDCLDAIALQLLLKLKRHLKVVYSLDDARCQSFSLKEPPKSGETFSRQNIPFNVSSTNISLPSCLQDVASVYQDFKTVLHEDSMDFAVFIPSVQIRKRPTPRNTTNPTPRSTTRVRRTAASSVTKARGGARGDDSDDSDDDDWTGGPRVLDFSGGGRVTRQRVQV

SEQ ID NO: 68384 - protein, 141 aa, Zea Mays
MPYHNVLEVTAADYASCNAGSPISTHSGGSTAFKLTATGTRYFICGIPRHCLNGTMHVTITTVPYDSATAAASGPAQAPLQSSSSPPAADAYAPGPAAGHKVALGAAGKSPAGAPSSAPRYQQPAAAVAGLAVAALVALVA

SEQ ID NO: 68385 - protein, 86 aa, Zea Mays
MRIKGQHFLPQDDPVKRIPHGTSRMALPRVVHPAHEFFCAIRRITVLSTGRIHYFAEKCCNPSAHSKDYCIAYDSFLILKSFTGDN

SEQ ID NO: 68386 - protein, 386 aa, Zea Mays
MGSEGRVWNGAGVAAGSGYGGSVEAKATTAAPADVPTSAASVDISLPLPEMSPHIIGLCKELVKGWSSIDSSRFSIETVSGGITNLLLKVSVKGNNGNDSSVTVRLYGPNTDLVIDRKRELQAIPYLSAAGFGARLLGMFENGVVQSFIYARTLSPADMKEPKIAAEIAKELRKFHQVDIPGSKEPQLWNDIFKFLKKAAALKFEDNEQQKRYVKISFTEIQDEVKELKDLLDILHAPVVYAHNDLLSGNLMLNDLEGKLYFIDFEYGSYSYRGYDIANHFNEYAGFDCDFNLYPDKDAQYHFFRNYLHPDRPSEAQDMEVLYVETNTFRLASHIYWALWALIQAKVSPIDFDYLGYFFLRYGEYKKQRDSCFALAQSFLSGLRNG

SEQ ID NO: 68387 - protein, 601 aa, Zea Mays
MSLSSARQRRATAASPPTDDGYAKDAKDRRRRPGGDGDSEDEGIKWFLPFLALGLLRHMSASSNLIHDCDEVFNYWEPLHFLLYRSGFQTWEYSSDFALRSYLYLFFHALVAGPASLIFGEHKVRVFYSVRIFLGLISTITETVLVVALSRRYGKRLACYVLAMLCLSSGCFFASTSFLPSSFSMYAVTLSSALFLLEKYAGAVSVAAAGVILGWPFSILVFLPVTVYSLIRGSFRRVFLSGFVTSLCFLVLSFVADYYCYGRLTFSVFNLLKYNVIGGGESHLYGTEGFSFYFRNGFNNFNFAFILALLFLGVVPFARKKYAPDLLIVVSPVYIWLAFMSLQAHKEERFLYPIYSLICVAAAAVIDSLPDFFHDKYSSDQSIFEKIAKGLRPLILGFILCASHSRTFSMLNGYGAPLQIYQHLEHHDDTGPGSILCVGSEWHRYPSSFFIPSYISEVRWIDDGFRGLLPFPFNETLGGTTAAPSYFNNKNKAAEGQYLKDIGACNLLVELDLRRPYPSRGSDLSTWEALAALPFLDRELSPALYRSFFIPYRWQQNNVFGLYKLLRSLQIFTAIDFLIPMCNGVPIFVPLILPSYKFITR

SEQ ID NO: 68388 - protein, 259 aa, Zea Mays
MAWGVSPRRQPSFPVQALYELCKRSFPSPSAASSSPPPADVVRSISSLMDTITPADVGLRDYNLEDDRGHGFFDSNLLKGSGRLPRWARPIKYLHIYSCDAFSIGIFCLPTSSVIPLHDHPGMTVLSKILYGSMHVKSYDWIEPTVLASSQPARLAKLHTDDVRTAPCPTSILYPQSGGNLHCFTSVSSCAVLDVLAPPYNDDAGRICTYFHDYPFSSLSAGRTKVAGNPDNYAWLEAINTPVNINMHTGMYTGPTVQT

SEQ ID NO: 68389 - protein, 205 aa, Zea Mays
MDVVEKIQRGTKLFLYDFDLKLLYGVYKADTRGGLDLVRHAFDGKFPAQVKFSVFKDCLPIPESSFKHAIKENYSSKGRLLALFKPISLSKPAPQHIEDIRKPSDYEERRQLQHIEERAAPINVHAHPLEDRYKMTRSLHPPLFDEPRRGLVLNPYHMQEPQHVPLNYYHQVATRSPYHQPHMDIMHESSTMSTTMFNHCLLIRH

SEQ ID NO: 68390 - protein, 169 aa, Zea Mays
MALLVKSHQQMLVSSSTTSSSSPSSASQQRHPPPPPPPSSSCLTDQQQPSPAKRKRRPPGTPDPDAEVVALSPRTLLESDRRWRRRRRPPEARVRVPRAELPPPRPRPRAGRPGGHQEALPAQARRAAAVGVRPLRQGLRRAVRLQGAPQDLRHPRPLLRLRPRLLTVT

SEQ ID NO: 68391 - protein, 729 aa, Zea Mays
MDTERGAGSEQGSPDSEMGDGDNDSVGYGAEMEVDAGSGSAGASAPASSASASASVSASAYAARAGAYDGVDPFEGMEFDDEEEAWTFYNVYAHRVGFSTRISVMHRSRRNGSVMSRQFVCAKEGFRTYRGKNEVSRGDAVDAGDDDSGRGRRTRAVTRVGCKAMIRVKKQDNGRWSVTKLETAHNHPLVPANQAHCLRPHKPLSECGKQRPFGGHRNGSLPLAIEPPPPPLTPPVPHTSIAQVVPEYVSDGIGHDTRVILDYVKRMQAEDPAFFYAMQFVEGRPVGNVFWADSRARTAYKDFGDAIILDDYCKRSKHELLLSAALKVFPLTRLQFCKWHIMNEAQDKLSYLLDVFPSFHEDFINCINMSETINEFEASWKALISKVSSQKSEWIDLMYSCRHQWVPVYLRDTFFGDVSLKLQCSSRSSLFEGYISAKTDSQSFIQQYEKALDCCYEKEVKEEFETKYSLPDMKTSSPIEKQGAELYTRSMFLKFQQELVGASVYTADMVKEEGDASIYTVTRSEGSEKSVTVQFSSSGSSATCSCHMFEYFGIVCRHILTVFGIRGVSALPSHYFVKRWTKNALDRSSGKNVDEVSRVAEPKEEQRSSAEDDEQSPTWRYNSLCREALRYAEEGASSLEVYIVAMQALQEAANRVNMAKRGIGQVAPLAVMPIAAQPPESFARNQEISSNKQKKRKRNSNSSRENVTPNQLISFNWKSARWRNKIHRD

SEQ ID NO: 68392 - protein, 344 aa, Zea Mays
MILSVSFGPSFCLEQTLGPRIGYLPLLIPVIRAHFSNALPPGVDTVWFEYKGLPLKWYVPIGVLFDLLCADPERPWNLIVHFRGYPSEILSPCEGEDSVKWSYMNSLKEATFIITGNSKSVMNMSHADQVALWESVMKGNLDGYKNISTRLKLGPFEDDVLVRTASVERQRQQNSDEPESPGSSKPCRVPVRLYVRNVQEDLEYIEHAVPVSDWENVSYINRPFETRKAEGRSYITLEHALQTLLPEFFSSKPPGSADGSQHAGAMDAAADSSDATNSSSRSQEAEQALASPAEAGSAKRAKVKLVRVQGVELDMDIPFLWVADHLKNPEYYVHICVYVGTRKQ

SEQ ID NO: 68393 - protein, 806 aa, Zea Mays
MASPRRIPSVPARSGNKENISQDGEAPLDFATLPKEGPATTRRKKKLAGFNLRKSIAWNPAFLTEEGVLDNSELSVLTGSQPMANRSPGSGVSSIMSPSCQSGRYGNTYVRKEAAGNSHGKLPARYHRAESQGRKLFSSAKTPQGDNQKESAGTQNRSSARIIQICTPRVPAGSIQKKVQNSSASTSQMSRIPKQLRPSLPKVPRSTSSVTNNLESHKKIAPVKAELVHRVTGFPARLKINPVSSGPSIEKAVVPAVTAIHEEATVKCKKNPAHPQISPSTPFDSTVSKLAKPSALRLPSPSLGFFTQEKAHVPHGDAAKRNVGRCFSSNTSALDRPPRYRQSEESRLHLAKQLSTNGTVASNLVLPVTREGHLKSLVVPENESSSKVIITYLEKSGNVNNQAMPKADFLLAGTGATDTTQPMNLEKKDDAGNSETLLVEGMDDIKEIEPLDNFYAPEAICSSTIRPVEDSFSLEASYSSTKPIVESKLSLSCISSKVHSSSELSCQGKSVSDPSAAMDMENSNVGDTALSASLSKGRSCTPALDLLQGFYSFDRQNIECPMLMESVSTICADQLPHCDSLSDETPALAGSHSDLNDSLCDEAKPALSKEPNTEGEMELQTNSTIAVKETPLLDVGCGHIHNYRTTDCSTRLEAPTPCVERRHALLVEPNMEEKMVLDTNRLSAIQYTPHIEKNKALERSPANTIRKDHLKNLIPFTEEWLAVMESCGQEVLEQKTGAVQNSPPDKTPPEPSPWSPVKRKAQDVGPFDCTKYSKSIRTSGQLKQLETEQLEQPRPVALFCPSNSDE

SEQ ID NO: 68394 - protein, 78 aa, Zea Mays
MTSLADSSSPLLLSINGDSRALSSLLPTQAPHLSSSPLHCSTPPFDAAVRRRSSLLVAGARGVRRSVPSSPEFTGAAY

SEQ ID NO: 68395 - protein, 486 aa, Zea Mays
MAAAWRPRDNDDDDEDDAGGGADDDDPHRSGPRPTQTRVVRGFVDQESIQQIFHYLEPLISRVVREEIQNIFSHCHNDHMPIRSLPLRIREAHVLPHLKLVFAKQLKQPIFTNNKIVDIANNPIEIHLMDTTTNSMIPPADTHLGPSSVVRLEVLVLNGDFQCEDRDVWTADQFNAVVLKAREGKRPLLVGSLNVPMNNHGVAVIDDVFFTDNSSWIRCRKFRIGVRIMPADHLGSRVKEAVSESFTVRDHRGESYKKHYPPLMTDNIWRLKNIGKDGPIDKRLQSEGIRNVQDFLKLNTIDPEKLQALVGMSDKQWNTTLNHAKTCDMGRKCYTFKTVGCDITFNPIGEVLRARIGDHTFPLQELHPYQLFHVKQLAAQAYQMWDQLEEVPNEKLFAANKSFVPRSSSDQERTESQAESMISSGSQNTKYLDYTGTATSGAAAMPNSCSTSDSIGAAPADDAMLWRPSIPPECNFSWQDSAACWD

SEQ ID NO: 68396 - protein, 187 aa, Zea Mays
MGSSGGSSEHFLRQLSSSDGGSAPHHLLQREWECGGVTGSGSRRGSRKKTRARGHRRRGGGFCRAEEAAPGRKRVMVVVDQSSGAKHAMLWALTHVANKGDFLTLLHVLPPESGHSSRGAAEDASALANSLGALCKACKPEVEVEALVIQGPKLPTILSQVKKLEASVLVLSQRSPSPFCCCFSSYG

SEQ ID NO: 68397 - protein, 626 aa, Zea Mays
MPIDMPRGLPFAVDTWGSSSRSRRHRFLTHAHRDHLVGAGADIDGGGIVYATRLTLHLALRHFPQLGSWEFVEMEVGRTLVVDDPVGAFSVTTYDANHCPGAVMFLFEGQFGTILHTGDCRLTPDCVQNLPMKYITKKGNENICRLDFVFLDCTFSKCFLKLPSKDSAIRQVISCIWKHLHAPFVFLACDLLGHEDILVEVSRTFGTKIYVDRKLDCFKALSLTAPEIITDDSSSRFQMVGFHQLHDRASKELAEARANLQPEPLFIRPSTQWYATCARSPKPSLTEAEQDELGIWHVCFSIHSSRDELEQALQLLQPHWVISTTPPCFAIELSYVKKHCFKTRLTADDPLWKIFRDPLGKSVSSPCSVLATQTDENNSNFVVDDDHSSSSSDGCTYLNVISTLELKFVPPQPPEEPDITLFGRARFASQAIDFMKEDYIALEEARACAPTDSVHGSSEEVETYSGMDFGVKQPPASQQDLMEVGDDVSFKKVGDDVDSCKHEVTSTQLEGFRVKSLPTVQSNMLVVSDQLERSEVVGESKLLKSTEDLNLTIVRSAERTDCQKEPLCYIGSSKCLNASLKRFYRSRNIPVPRPLPSLVKLMESTKRVKIQPNTNYTLLNSRHSLP

SEQ ID NO: 68398 - protein, 55 aa, Zea Mays
MHISIELNTGLVPCLPQQYNTSHSPPHNIVEGKTFFSYELKHELAGGLVPKHKTR

SEQ ID NO: 68399 - protein, 663 aa, Zea Mays
MMQFWNIYAAFTVCTKSADKPSLGDELDTSGPSKEHQNDLITEKQKIPDLKRRKHGRLSNSLQKKAERLKYLESRKAVKVGKQRDIKKVLPLHSILKKYTKHTSVKMVKEKHGNSKGTGVIQLCRKSVKRVKFSETDDAKKQCSKRPPLESIRELLSAISSSSSSSIEMSSEEEHVIAESSSSHMTEKAVTMASEANENTNHDNQYELSSTRLSTGLLDLNQALPEPTDLNNPYVPNSEVSNLEQAQVGTWNLDQQVLGNGRKNIDSSFDLHGQEQLRHSTELDTTSKGKSPCTLSNGFQDSVHLQQNWSSMTLHHGVSQLSTGGEPSSFEVRESNISHSEKRNFSSETNVEQELRPSAGQTLRLMGHDLTVSDTRVDYLSDAAQNHTNNTADHLTTKVVLELPRQGQPFLALQTQSIPSVSASSARTAQAHFGYRTTHNISHPLLAANVFSGDPSVYEDRCRDFTNLQSHRNSILGYPPLSNHGSAAFLQNSPPWRYYSDHSTRRDSLSAPFTPTVMQHVATPSDYRANLPHQSYGVYSGSSTVRPLNSASFTCTNQIVQAVDSRATANLPSRSPTTGTTRTHHNSNTSSSSRLVLRSGPVKLSAGAKHILIPNENTEDDNSAPMYSCVSFGSSGGNVSAAYQNKGAGSHRHQNKGAGSRRF

SEQ ID NO: 68400 - protein, 578 aa, Zea Mays
MQHLTVIAFVAASLIASIPHAKSADLNSDKQALLAFAASLPRGRKLNWSSTTPVCTSWVGVTCTPDKSRVHTLRLPAVGLFGPIPSDTLGKLDALEVLSLRSNRLTVDLPPENNSLSGPIPDLQLPKLRHLNLSNNNLSGPIPPSLQRFPLSSFLGNAFLCGFPLEPCFGTAPIPSPVSPPSPNKIKKSFWKKIRTGVIIAIAAIGGVLLLILILMLVICIFKRKGHTEPTTASSKGKAIAGGRAENPKEDYSSGVQEAERNKLVFFGGSSYNFDLEDLLRASAEVLGKGSYGTTYKAVLEDGTTVVVKRLKEVVVSKKDFEQQMEIIGRVGQHQNVIPLRAYYYSKDEKLLVFDYVPSGSLAVVLHGNKADGRAPLNWETRVKISLDVARGIAHLHAEGGGKFIHGNIKASNVLLSQNLDGRVSEFGLAQIMTTPQTSLPQLVGYRAPEVLETKKTIQKSDVYSFGVLLLEMLTGKAPLRSPGRKDSVEHLPKWVRSVVREEWTAEIFDVDLLRHPNVEDEMVQMLQIAMACVAADPEQRPRMDEVIRRITEIRNSYSSSSGTRTPLEDRPETAQAP

SEQ ID NO: 68401 - protein, 258 aa, Zea Mays
MVTMIVGEIANFAAYAFAPAILVTPLGALSIIISAVLAHIMLREKLHTFGILGCILCVVGSTTIVLHAPPERQIESVAEVWDLATEPAFLCYAAVVLAAAFVLIFHFVPEYGQTHIMVYVGICSLVGSLSVMSVKALGIALKLTFSGMNQLVYPQTWVFSSVVTLCIVTQMNYLNKALDTFNTAVVSPIYYTMFTSLTILASVIMFKDWDRQNPTQIVTEMCGFVTILSGTFLLHKTKDMVDGMSTFTPLLTCNYSRS

SEQ ID NO: 68402 - protein, 448 aa, Zea Mays
MSMLLIQKQPLPLSVRPRTTLRQCRLPTTRFSAAAADSASRAAPFAVEDYLVAACHLTPAQALKASKVLSHLKSPSRPDAVLAFLSGLGLSDADIAAAVAYDPKLLCSEVERTLAPRLAELRDLGLSPSQIARLALVDPARFRRPTVVSKLQYYVPLFGSFENLLQALRNNAYLLSSDLERVVKPNVAFLVECGLDACDIAKLSIPVPRLITTNPERVRAMVERAEAVGVPRGTGMFRHALLAVAFLSEEKIKAKAEFLKTTFRWSDAEVGVAVSKLPLVLKHSKDRLRRMSEFLITKVGLEPEYIAHRPALLTYSLERRLMPRHYVVNYLKENGLLEQDRSYYTAVQMSESAFMDKFICPYKEAAPSLALDYAAACRGEVDASYDHSHLLGFYSPFLPCRGKLEAILNQRRFRNKTVWEINPLWTSQKHLLSERFKVLKHLLPNTII

SEQ ID NO: 68403 - protein, 362 aa, Zea Mays
MNQCVPSWDLVDDPTAAVAGGGGGLNHQVSTTGGAHRGLLLQASAGGAGGGGAFAPVVVPMSNQYYEVAELTWEKGNISSHGLLNRPAHNKYPPAAAPSSAQLHAIAGGGGRGGGSPSGDRETLEAVVGEAAARSHFLSQPAPPWLIGADAVARAAADALVPCAARAGESAADGGEAGASRRKRPRVVGDDSLVVCASQGSTAPRRRGESALLTQLDACGTEADDVCGFRTTTTNNSTSMDRDDKGSPDTENTSIGGGASDSRCFSRRSQRDGLCDDDEENVVINGDDGAMRSSISTKRSRAAATHNESERSSERNRQRFRSIPAIETTTAIAVVDCGLQIRCNTTPYSLFSLFRAFCFSFN

SEQ ID NO: 68404 - protein, 75 aa, Zea Mays
MFPAEGYRCIVTISRIVQNSRWWYPSCSRCHKSSSQISTGYHCTSCGCTNIKFRYKLSFIATDGTCEAEFFFLIA

SEQ ID NO: 68405 - protein, 486 aa, Zea Mays
MESRRGGSGAAAEDAGGAMPSFGPTQHAIRAGADVNSMQPSRVTDFGALAQSAGFRIEDLANLNANALFNLKPNSHTIDNSPLQFGNYGKSISPHINTTEATTAATRIDPQLSAQQTGAQPILVALPTGNMENWGESAMAGSPMTDTSTDPDTDERNQMFEQGLVAVPTASDSSDKSRDKLDQKTLRRLAQNREAARKSRLRKKAYIQNLESSRLKLTQLEQELQRARQQGIFISTSGDQPQSTSGNGALAFDMEYARWLEEHNKHVNELRAAVNAHAGDNDLRCIVDSIMVHYDEIFKLKGVAAKADVFHVLSGMWKTPAERCFMWLGGFRSSELLKLLAGHLEPLTDQQLVGISNLQQSSQQAEDALSQGMEALQQSLAETLASGSLGPAGPSGNVANYMGQMAMAMGKLGTLENFLRQVNIIGGKLCRRHRTSQSHQNMPEGGSMTYLPAPRAMFRTPSSHTTRPLEIVISTIPCTNEMNIST

SEQ ID NO: 68406 - protein, 1010 aa, Zea Mays
MEYERGDRAKRGRGGGGGGGGGGGRGGGGEYGRQHGGAYGGGGWHGHDEGGGYGGGRGGGGYYHQGPRGRGGWRGPGAGGSQAYGSGGGRAWAPGPGEGRGLGVGREYAPVRRAAPAPAPAPREVATAPMVKEAPSSSGSVERITSSELAGVEPLASTLAATSSVGTRVPMQRPDCGGALSQAKVKLLVNHFIVNYQKVSTIFHYDINIKLDEASSKASGKELSKAEFLSVKDELFRESSLRRLSSCVAYDGGRNLFTSAELPAGLFRVRVRSKAYIVSVDLKKQLPLSQLSDLPVPREVLQGLDVVVREASRWRKVILGRGFYSPSSSIDIGQGVVAMKGTQQTLKYTQQGLNLCVDYSVMPFYKAGPVMDLVHKIVGYLDYRTTLNKRQMENLVDELKGRRVTVIHRRTNQKYTVQGLTPLPASQMTFVDAESGQTKCLVEYYAQKHGIVIEYQMLPCLDLSKSKDKPNHVPIELCTLLEGQRFPKANLDKNSGRILKGKALIPASNRRKEILDLVNASDGPCRGEIAQRFGISLDLRMTEVTGRILPPPNLKLGASNGQTSKFSIDQNCQWNLVKKRLVEGRDLQCWGIVDFSAEPSDPQQEPLNGRMFIEKIVRKCCELGIRMNSNPCFVHKSKMAVLSDPHRLQEELNKAKQAAVSKKQRLQLLFCPMSEQHPGYKTLKLICDTQLGIMTQCFLGDRANKPNGQDQYMTNLALKINGKLGGSNVQLFDSLPRVGGAPFMFIGADVNHPSPGNVESPSIAAVVASINSGVSKYVTRIRAQPHRCEVIQQLGEICLELIGVFEKRNRVKPQKIIYFRDGVSDGQFDMVLNEELADLEKAIKVGGYAPTVTVIVAKKRHHTRLFPKDPSQPQTKNGNVPPGTVVDTGVVDPSAYDFYLCSHAGILGTSRPTHYYSLVDEHGFRSDDLQKLVYNLCFVFARCTKPVSLATPVYYADLAAYRGRLYYEAAMMPSHQRGTGSASSGSSAGTFGVTNFPRLHKDVENNMFFI

SEQ ID NO: 68407 - protein, 372 aa, Zea Mays
MFLTTTTGKVYEYQFPKYTGGAQSNKIRGQWINHMSPEHAKVARNVPGVHVQVGRMVFPLDDGRLGELHFPGMGGTDFGPSAQSTIRRKLSNKYEWSILDAPETEGWNAEYCTEEHGPTNCISGAKNIAADTESNDLSNNPPSRRRKVEEKQHYLNVNRYQQSDETESYNFLSRTIDLNFHMRVMHADRSLFLIADNGLTFEYLNSNGVWLWLRHEHVTAMKGTLGSYNGSLYLVDVHGNLHIRERNGDELLWINCTAMKKGRQVASGSPWDGIPGLLRRVTTDDALFFVNKRGRLLQFTVALRKFKWKDCHSPPDTKIAFIVDQEVFRRNIIFVGRPCGHRRCPWPAPCSWCPSTGGWWSTTSAHRTGGSG

SEQ ID NO: 68408 - protein, 729 aa, Zea Mays
MGEHSHMSAELDNVVSAVLENYESPYANADNDAAVEDIRTQWVDEVLKAEGHEPPAVTILTRVPSWKVIRAVHGELSLTIEESTSPNFWSGICLHNLARISRETTTTRRVLEAIFRYFDNNNLWSPSKGFALCVLLDMQIVMEKSGQNAHILLSMLVKHLEHKNVLKQPDMNLDIIEVTSRLAEHSKAQSSIALMSSISDMVRHMGKSMQSLASDAGPGDNMVKWNSRYGKAVDECLVQLSRKTRKIDLRRTLSRTTSVFSSSAALFGKLKRDMLSFRESALQDNTKLLPISENANEISANDAKLFKSQTIQRMVSTRDISLPSSTDTSTSSEPTSYQEKDAVTLMLSVRQANLLLSSLWTQALSPENVPRNYEAISHTYSLMLLFSRAKGSGAEVLVGSFQLAFSLRSVSLQAGFLPPSRRRSLFTLATSMLVFFSKAFNVLALIPVVKQVLTESTVDPFLCLIEDCRLQALDSANESCTKLYGSKEDDELALKSLSNIDMNENQSKETSVPLILDSLEDMSESELSAIRKQLLEEFSADDSCLGSHFTETPSQYPAQNGKLHHKSMEVIPLGFVFEDDTLAEASDSSVEPHLQHPPCNNILDVNRLLDSVLETSQHVGRSSVSTNQDLPFKDVANQCEALLIGKQQKLSACMSVCEKEAGESSVEQSSRQDPQADTFLCTADEQWHPNSWPACRCVFNPKPGVMKVSWTELKNSLYKPEDLVMSHQG

SEQ ID NO: 68409 - protein, 369 aa, Zea Mays
MASSPSPSPGTIRAPLPPSSATPSPATTTPTPASPAPVTQPNATPADPPSSPVAPPPVPSASTPPPQLTSPPPSLPPPPPDAVPPPPLVASPPPAPAAVVPPPSPPAPVAVPPPPTPAAPPKASPIHIRPPAAASPPPTILPTPNPPADPTPPTLAQPPPPRRRPPRTPQTEPPPLAPPPSGIPVKPSTSSPSPTSADPLIPTPSSPSPPGTTTPGSGSTPSVPAPAMAADPVRPVTTGGSNKSSSPASQSSGSPVDSGGMSSGAKAGIGAVVAILVLISFVGAAFWYRKKRRRVHGYHAGFLMPSPASTTTQVLAKTNFSAGSPESKDSMPEFSMGNCRFFTYEELYQVTNGFSAQNLLGEGGTRVPC

SEQ ID NO: 68410 - protein, 214 aa, Zea Mays
MLAPILSKFNSLKTSRKGLVAMIEYPSLEAATGEFSESNVLGVGGFGCVYKAVFDGGVTAAVKRLEGGGPECEKEFENELDLLGRIRHPNIVSLLGFCVHEGNHYIVYELMEKGSLDTQLHGASHGSALTWHIRMKIALDMARGLEYLHEHCSPPVIHRDLKSSNILLDSDFNAKISDFGLAVTSGNIDKGSMKLSGTLGYVAPEYLLDGIVSA

SEQ ID NO: 68411 - protein, 336 aa, Zea Mays
MNTMPSVFGHSKSTATTSGTIKGQDNVFVRSYSDRLLKCDLTLDMLSENEKIKITERLVKIQNDGTVEVDVTRSALVASELSEIDAFGCVPHDIEEVTPGITKSVPKLKIAILVVGTRGDVQPFIALAKRLQEFGHYVRLATHVNFRTFVKSAGIDFYPLGGDPRVMAQYMTKNKGFFLAAPTEIAIQRKQLKEIIFSLLPACTEPDLDTGTPFRAQAIIANPPAYGHLHIAEALGAPLHIFFTFPWTPTNEFPHPLARMPQSATYRLSYLILDLIVWWGSRGFINDFRKKLNLPPIAYFSTYHGSISHLPTGYMWSPQLMPKPKGHKIFLVHMQS

SEQ ID NO: 68412 - protein, 295 aa, Zea Mays
MLFSRSPAATNQPLVPSRRTLLLSPCPRAGATPAPVADAALLPGGLRAESLPRHVAVVMDGNSRWARARGLPSAAGHEAGRRALEEVVRLSRAWGVRTLTAFAFSHENWSRPKVEVEFLMGQFERAIRESVAEFLSFLLFTFYREGIRLRVIGDSSRLPVSLQRTAREAEEATRNNSQLDLTLAISYSGRRDIVQACRTLAQKVRDKLLEPEDIDESLFAGELETSHANGNELPYPDLVIRTSGELRLSNFLLWQSAYAELFFTDTLWPDFGEADYLQALVSFQSRDRRFGVRKL

SEQ ID NO: 68413 - protein, 249 aa, Zea Mays
MEPASSSALPSPPPAEARRTPPEELKLRRRTLETVLEQCQRALEMMHEDGLGTAAEGASFKEVEVEEEEEEEEGSGDSGGVERAPPPPPSEADYEADELCNLLKSRVQSPEFLEKLDTLQKSVYQHGAVDETVSWDIISAADIWDDKSMNVSDDSEDGYVLVKQEDIVDGIACFMAAYLLSLKQTKDLTPNQLQQALSKTFSAKKRKSKLQKAWDGTKVVYNIASWSATAIGILRLCKQQLQPSGHPVV

SEQ ID NO: 68414 - protein, 160 aa, Zea Mays
MASRKFFVGGNWKCNGTGEDVKKIVTVLNQAEVPSEDVVEVVVSPPFVFLQQVKGLLRLDFAVAAQNCWVRKGGAFTGEISAEMLVNLQVPWVILGHSERRALLGESSDFVADKVAYALTQGLKKKYQIGQILCWHMNQFGLLVPAKLQLLLRLRRFMMV

SEQ ID NO: 68415 - protein, 139 aa, Zea Mays
MSYPSASSSPQSFSCSEMDILYQCKEVLKIQKFRRMVSYAGFYCFTSLITYAYTSNTTRAGMSRADQYYSSYPAGTELLTDTAKLYKAALGNCFEVDEWGPIEFSIMAKHFDRQGKPPYAYHAQYLAHLLSHGQLDGSG

SEQ ID NO: 68416 - protein, 327 aa, Zea Mays
MAYCKPLILLYSYSSLGPFNFQNRRQQDTVAPLHGGYRIPKCRRMDTASRNTRQPGPEQPRRGGPRDPRPRPIPPPPPPPPRLPDPHPMGSLGGDAEPQGARRRPRFLCLHGFRTSGEIMRKQVLGKWPADVTARLDLVFADAPFPAEGKSDVEGIFDPPYYEWCQFVGEDFLSCRNLDRCFSYLEELMAREGPFDGLLGFSQGAGLSAVLAGLQEQGLALTGVAQVKCVIVIAGAKIRAPAAVARAFDTKITCPSLHFIGEEDFVKVHSEELVRAFADPLVIRHPRGHTVPKLDEKGLQTMLTYLDKIEREIWEHSSTDAEIVGSN

SEQ ID NO: 68417 - protein, 645 aa, Zea Mays
MGAPRHLLDVAMLCALFVSAASFTDPPDALGLLGLYHTLESPWQLSGWTFQGGDPCGEGGGSKHWRGVFCKGPSIVAINISGLGVGGWLGPDLLKFQSLKKLDMSFNNIAGEIPSTLPPNVEYLNLAANKFEGNIPSSLPWLRSLKYLNFSYNKLSGVIGDVFVNMDSLETMDLSFNAFNSDLPRSFSSLTSLRYLYLQHNEFTGSVILLAGLPLSSLNIENNHFSGYVPGTFQSIPELRRLRLFHIKTHIFHFTVPTANEVLYSWSSLLIGSDTSSSNGITSERVPKIKSWFKASKKLLTAKQFPAADILAATKDFNEECFIGEGLTGRVYRGEFSDGQLLAIKRIDMVDLSLSEQDELMDMLWNVSRLKHPNISALVGYCVEFEHCALLYEYAENGSLDDILFAPATRSMALSWKARMKIALGVAYALEYMHLTYSPPVAHGNIKARNILLDAQLMPYLCDCGLAKLSHFVSTTRMKDSEAIISAKGYAAPELSDPGANDIKADIYSFGVILLVLLTGQKAFDSSRRQSDQFLVDWAAPHLDDLDSLERITDPRISGSMPPKAISSLGIIILLCVKQSPDLRPPMTIITDKLVKLVESTGLQKISTTRHLEIDAQDPSFITTRPYFEPSSTVSQGGTESCISR

SEQ ID NO: 68418 - protein, 1380 aa, Zea Mays
MKLTDLSLLSTEYYRQPAGVKLELLRSLSDDVLEIGAIRSRLSESDGNDEGFRSTGVRRKKRGRGSSAKVAVGSSQFPEGSAEVDDGNSDECYLCGMDGNLLCCDGCPAAFHSKCVGVVEDLLPEGDWYCPECLIRKDGSRNIANPMRGAEILGTDPHGRLYFFTCGYLLVVDSCDGYSPCYYYGQIDLHHLVAVLNSCHPSYSSMVNTISSFCDTAIKSPNLNSRYQSSRECSTSDAEIDSKHLSLLKQPSDHDQFKVEQRSSFEHLNSGKISTSNSDDLDQDLSQHSIKLRYSLMSRSGIVAEGDLNQIPENRSSSAKNDNCNSPKDIVYSRANGSLAKNQKDSPPKEKPRDWQLHSDPARYINYYSFGQIAASAAEELKHKLSENKDVKKPVQDVLSFHLRTICKKYANFFALTDQKLSAELLKEKCGWCNSCQISGGVDCIFRLTDIKYMEGPKPHTLDLGAENNMESHIILAMYNILSVEERLNGLLSGPWQNPQYSICWRNAVLKASDVSSLKQPLLMLESSLRRVAITTEWQKAADSVEVVGSAAHILVRSSNKSLSHVSATARKPGRKPSPNGELKVDSRDVGVYWWRGGKLSRQVFHWKRLPQSLVNKAARQAGRRRIPTISYTDGSQFARRFKYIAWRAAVEMAENAAQLILQIKELEWNIKWTEILSTLPSSLMTKETQKIARLFKKVIIRRKRIEGTNVEYLLDFGKRENIPPVISKHGTKLEESSSERNRYWLSEVHVPLNLLKAYEAKTFARLLKKKETDELSKKTKKLCGSKPEMPRKTGFDYLFEKAEKRSTMPCGHCHKEVIASEAVNCQYCAALFHRKHFKVPRGATNAVYVCNKCLDEKVLKVESPQKKTAPKKLSPKKKQKKQKKQSRKIETRRNQIVLKCKTKIGKKGKRGRPRKNPTDLSKNEPSKIHESEPSNVSKNEPVKRISKRLHDKYMKSNSNVSENAASSSKRKRTVSQYSYWLNGLRWSQNPHDERARSFRKERVVFPSEDAEISEVNPVCCLCEKCYNEEDIYIACEKCEDWFHGDIYSVNIENVNNLIGFKCHRCRRRSLPVCPYAETVTVVKGQSDEDHCIKLVDQCVGKFVEDEDPNCPKDLGAPGSLQELHDHEIEQGLNVHITEIEFSYDNCLEELNDHGCSKEFDAHSTEKDLEDDKSLRKVDIHNELRALDDLGSEKEPGDHCNPKDLNSHINLKDPGNCRSDKEMKDNNCLNELDGDNNWKALDSYNSWKLLDSHNSQEELDCTTNSKFSPKEIPCPMELDGFSSLKLVSHNILEELDNHNCLKENGNENSSKELDNNGSPKDSGDCLADHFNSSRISGNEALVLTPETDSVNESLGLQSKDDPGKSVPTEHEIDLQVVVTL

SEQ ID NO: 68419 - protein, 892 aa, Zea Mays
MESDRVVDNNNEMSMQDEITHGTGFLSDRIPTSKRKDASDWVKNFQLVERKSEMNQLGNYIAKARVYGLQILSVWGIAGVGKSALVRNMYFDRIHRNDQLFEKYGWVDVTHPFNLRDFSRSLLLDFHSEPVQAMGIKDPTQECHKILEDNRCLVVIDDLQSIEEWDLIQAALVSRPSRSIIIVITTEASIATYCADNEGVVFNVKGLEDKAALKLFKKQPWGIFGIGIHNSYKKSGWLSPFLQFTGNLKFITKLHGKLCMVHRQKPSSPIKDSIDEELQELILKCGGLPKVIVAVANFLAPKTVSWMDSASSMNLKFMQELESSPEFACLQPLFGWLHSYFRTCPDFLKPCIFYLSIFPRDHSIRRRRLVRRWIAEGYARDTDKISAEERGEQFFCRLLDLSIIMQKPYSVTTGFRDSRMTLCQVNSFVREYIISRQMEENLVFELGGSCTLTSQRMGRHLIILKSWDRDRIVFESIDFSRLRSLTVFGEWKPFFISDRMRLLRVLDLEDASDLKDEDLKQMMKLLCRLKYLSLRGCTGIYSLPNSLGCLRQLETLDVRHTAIATMPRTITKLKKLQYLRASTTKPTKEQPTPDTAVTPKPTKKQPNPHTSVSWTSSLFHRHRQLEGVVVPTGLEKLTALLTIGVVNVNSARGRSILKEVRKLTQLRKLGVSGISRNNSKDFCLAISSRAHLDSLSVKLKKDNQDCLCVTPDGYLPPKNLQSFKLYGLADSFPKWINQLENLRKLVLEMTILTQDTIKGLKDLKVCILRLITKQLPDGKLNFCVMLHGQQLRCYETVKILEISCSSSLDVAFGSQSLQNLELLKVSCCSGSGSVMKLSGLEKLSESELKEVQIKGSDDFIVKTDVEEQLARHPKKPVLKVEKVLSSTGDFEL

SEQ ID NO: 68420 - protein, 573 aa, Zea Mays
MPVSADGNAGVCCARHRVHALRSRRGFGWEEGSGVWTPIVSKKHPTQHRRREKRKRGQRSRNKFPTKGQTVVVDEVNLIGEPTQPEGVHSRFASSIRATVRDILDCSIPTWSLVLVGEKRKIWKKLLEAFGLPRDPGDLVEKFAMKQAAKTFKTLEQPWRQQYSHFLKRKCKENLYRDERFYAAEVVAALEYIHMMDIVYRDLKPENVLVRADGHIMLTDFDLSLKCDPTAPTLAHVISDPLSLAARSGAAASCAISSCIVPAASCFQLFPGRGRRRRCWRTKKLSSNSGNNFASSGGGGGSSGSGLELEFVAEPVELRSMSFVGTHEYLAPEIVSRQGHGNSVDWWTLGVFVFELLYGVTPFKGYDNEMTLANIVARAQVPQGPDGLVCRQGPRHCAPRQGPRSTPRRHRWRRRNQAPPFLRRRQLGAPPLRRAALRAATVQRRRQRQGWRSEQRQRSCGRRRRRRVGRQLSRHARGVLLERRSQGEEASTVSVRRRTCDAHKKEAAGRLVPSCRRSGVGPNQAPPLVRVRRGQARARGGGMDGPRRMARTRRPAGQRRQGCAVASGLVWIL

SEQ ID NO: 68421 - protein, 124 aa, Zea Mays
MQSIVNTSSKVLLNYFKGDRETVENRLRNMVDVRDVADALVLAYENPEASGRYICSSHPLKVSDMINILKTLYPSYPYPKNFVETDGNITCSSEKLQKLGWTFRAIEETLRDSVESYKAFGILN

SEQ ID NO: 68422 - protein, 701 aa, Zea Mays
MRKMLETWAYLGVSISKRCPSGHRMCSTIAVINYACEVDKVCKALEAVNLKSTEIHDHPNVQICNEGRQAALVEILEILTVVCEEHKLPLAQTWVPCKYRSVLAHGGGLKKSCLSFDGSCMGEVCMSTSDVAFHVIDAHMWGFRDACVEHHLQRGQGVPGKAFISHKPCFSKDIRKFCKLAYPLVHYARMFGLAGCFAICLQSSYTGNDDYILEFFLPPDCSDEDDQNALLESVLTLMKRCLRSLKVVGDRDLSGVSLHLSNVLKLENEEFKTDAQFDNSDGSLCQSPNGDRHGGSHEFDGGNKKVLDVPEGQLLTDDFSQGNGTSAGRPNGSGASDSSVLHKTNKPPERKRGKAEKTISLEVLQQYFSGSLKNAAKSLGVCPTTMKRICRQHGISRWPSRKINKVNRSLSKLKQVIESVQGSDAAFNLTSITGPLPIPVGPSLDSLNVEKLTQSKVAELSNIAVDGDRDSLQKSLGNDGHFGIVMPQQGSTDHNNDTQLEADKASHSRSSSGEGSINSRTSEGSCQRSPANQTFVCKPIASTFAEPQLNPEEFNKEPFQEPQLPLSRMLIEDSGSSKDLKNLFTSTSDQPFLAPPNNLVPMKHSGSVTIKASFKEDIVRFRFSCSGSVIVLKEEVAKRLRMDVGTFDIKYLDDDHEWVKLTCNSDLEECMEISRLSGSHVIRLSVSDIATHFGSSCGSSG

SEQ ID NO: 68423 - protein, 218 aa, Zea Mays
MLGHRFPAALGLPRGLLLGRSVTRRSLSAMAGGEAEGPLGGFFDYMERLRNYERSGVPRGAGTDSDDGFDLGRMRRLLRRLGDPHTDFPAVHIAGTKGKGSTAALLSNIMRAQGYNVGSYSSPHLLTIRERISVGNDGGPVPVRLLSDLFDGAKEAIDEAIELENGSLTHFEVFTALSFLLFSQENVDIAIIEVSYRTSVTALYDLSDFVLIAVKCQD

SEQ ID NO: 68424 - protein, 175 aa, Zea Mays
MQDRMRRQGQYGEADINSMVAAQLHHYQAQQRVQKHPENSYTGRDPAQASAEHQYTPPKARQSQWDRGGPNAPSQVPSYAYNEAQGAGGAQSFYDGQRSDTKVGLEKQPSKESREQPRTERTETRYENYNLPRTFEGLEQSFHEDIILLSKELQEAEDAENSRHMEVDLFYARSQ

SEQ ID NO: 68425 - protein, 305 aa, Zea Mays
MAHLRLLFSYLRRNPQRHRLLSLFHFSSDAKSSSASPPPPPIKPVSYAPKPQQQAPPEESAAPTTPDVAPRDQSPLPRRPQQPMPPREWTRQDMRYVKDAAPAISPVSYPSRVAPLPEDRPVGGEVEEVQDGGLQGESERIQMNAARPTRSVFGMHEEDRLPYPTVIPVVKRPQKVAIDLIDAIRLVKTSANEKKRNFVETVEAHVILGVDPRRGDQMVRGALTLPHGTGKTVRVAVFAEGPGADEARAAGADVVGGDELIEEIRTGGGKLSFDKCIATPMFMPRLSKVARILGPRGLMPNPKDL

SEQ ID NO: 68426 - protein, 1150 aa, Zea Mays
MQEVIVQQEEQPVEIALDQSRTDSIVLPGSREDRWRSLSWLLGARGRFVLTSERPNKKRKLLGADAGLEQLVLLPSPEGEAGSVCDVCCLGESDMVSNRMLHCKNCEISVHQKCYGVHVVPDRFWFCVWCTRNIGMPRRLTRSDACRTVLMPCVLCPKEKGALKPFKRDPGPSIDGGNQEFVHLFCSLWRPEFYVEDMESMEPVTNVVDTQENQSKLVCSLCKVMHGACVRCSHGACRTSFHPICAREFKLQIEIWGKFGHDNVEMRAFCAKHSSVKSISSIQNDKSVSELDSAQVELHDGKPVTGKEQQVRFTRSNKDKFVNSTITTSSCSLNEAHTNEVATISPVLGRTQETQSADMAADQPSSDGNLMSDSGDVSGILRKLVDQGKISLDDIELEPSLRSESVEAAFQPETTAYSPGLKLKMIKWLQNSECAPSVQVKSFKEGSLAQGTLPRSESKNLTTATFQSGQEEAISSIDHHFLENDNANNGDLVQNGFHRCPDPDVNQISGRHLLNMDGYCCYIHPIIEKRLQGLWSNSLEQTIQKNGYHEELSWSLHDEDFGGSSTKLVQLTGKTAMEVCKAQSSDTLKLSPDDEIEGEIVYLQSRLLDGVVSMKQRYEDLILKVVQNISYELDSFNKRKWDHIIVNQFLRDLREAKKRGNSERRHKEALAILAATAPSVTPTSRNTTVRKETENNVTPAKRENMPRSITGSSRIGQLSSSPQAKDLSFSNSDVSDETNFGIFNLAKFSKKSALPCDICMRCDTILNRIFVCSSCKATVHLDCYQSLVYPTGPWKCELCHEMPSDSVTSGEQSDQNGPKACLVQCGLCHGTSGAFRKTVKGQWVHAFCAEWLLETTFRRGQHNPVDGMERLHHKDKDTCSICHRCVGACLKCCTLDCQITFHPSCARDAGLYMNTKRLGNMLQHKAYCCRHSIEQRKAYSQQYGPDEIKGMKQMRVELELLRFLCERIVKREKVKKDLVGCAHDILAARRITAVSSLWTSCYTSGPGASSESATTSVNNKSYGGTIQRSDDVTVRLEDVTVDSTVTKKHTVRFSLHNRDTDRNTADSSTSTISYKRKLDDGESLAFKSHPGTPATALLESRDAEKPIDKKGYVSKGACHGYFSPSFVEEQDPSREICLHSPQLHVQKEAM

SEQ ID NO: 68427 - protein, 342 aa, Zea Mays
MKYFEDEVVNGNWDEVERYLGGFTKVDDNRYSMKIFFEIRKQKYLEALDKHDRSKAVEILVKDLKVFASFNEELFKEITQLLTLENFRENEQLSKYGDTKSARAIMFVELKKLIEANPLFRDKLQFPSLKNSRLRTLINQSLNWQHQLCKNPRPNPDIKTLFVDHSCGQPNGARAPSPANNPLLGSMPKPGGFPPLGAHGPFQPSPTPVPPLAGWMSNPPAVTHPAVSGGAIGFGTPTNPAALLKHPRTPTTANPGMDYPSGDSDHISKRTRPVGMSEEQVNLPVNMLPVTYPQSHNYQQDDFHKTVARTLSQGSTPMSMDFHPLQQTLLLVGTNVGDIGLW

SEQ ID NO: 68428 - protein, 194 aa, Zea Mays
MRESRSRTSMLRYGKATYVSRYVKTVRLKQEEYFGGAKFMKTLFLLVHFNALLGHGGTAGNKFWMSLGLPLIATVNCAGNTGAKNLYIISVKGIKGALTGVLLPVLVTMENGKPNLRKKKQDKYKDAEPSAIDLFKEMHCSKKKGFSKNVQKAIVDMEEMVATSVQDGQQPKYPTEVVYSVQLGSSVFLCNLGL

SEQ ID NO: 68429 - protein, 140 aa, Zea Mays
MLTGKPPFVGGNRDKIQQKIVKEKIKLPTYLSSEVHSMLKGLLHKEAGRRLGSGPGGSDEIKNHKWFKSVNWKRLEARQIEPSFRPNVAGKTCIANFDECWTNMPVLDSPVASPVAANSNFVGFSYVRPAPFLQKPSPLG

SEQ ID NO: 68430 - protein, 503 aa, Zea Mays
MTFEALRRRHLQMDETQDASRRADLKAGAIMMASNIRANSGKRVGTVPGVEIGDIFYFRMELCVIGLHAPSMGGIDYMTTKFGKDEDSVAICIVSAGGYENEDDDTDVLVYSGQGGNNRNTEERHDQKLERGNLALERSLHRKNEIRVVRGFKDPFCLTGKIYIYDGLYKIHESWKERTKYGVNCFKYKLLREPGQRDGAALWKMTQRWIDNPATRGRVLLADLSSKAEILPVCLVNEVDHEKGPVHFTYTNQVKYLRPLSSMKKLQGCGCQSVCLPGDASCACGQHNGGDLPFSSSGLLSCRKPIVYECGESCNCSTNCRNRVTQKGSRLHFEVFRTTNRGWGLRCWEPIRAGSFICEYAGEVIDELKFNLNDSEDDYIFQTVCPGEKTLKWNYGPELIGEVSTYVSPDEFEPLPVKISAKNMGNVSRFMNHSCSPNVFWQPVQYDHGDDGHPHIMFFALKHIPPMTELTYDYGVAGAESSGSGSRRTKNCVCGSQNCRGLF

SEQ ID NO: 68431 - protein, 723 aa, Zea Mays
MARIQLVVDERTDPFLGRLTRPATIDQSHNFFSDVTNNFKDFSTVVSELHQHLLDANVEVTYTEYLDLMKVEVDQHLNKLSEDIRDLKSCNLAHKYDTDGSCCTACHVGKLAEIDDRFNSLKFLLAVVFRQIREILTVVNSSIHDLQWEHELQSEVTGIIIGDCIRGLQDELERKLYEQSSMVNSLRKNCQETVAQFASIREELIAISNILLPSEEEPQISLCRHESLGNWSDRWKFSFFRKRAHQDHSLSSTQNQNSATQKSISPSEVISERSDFRHLKGMTRHEMLNYFRSEISKLRRLHELDLQEKTEELFKFKREKWSLALKYDVEFEPLRRKFPEVISRFDQIMSNGMAAAVPTICSNSDAFDETSRLSSIIDSLYRENQHLHCLLAEKMKNIQELSSQISDSTRKMSLQYSLEKQILRQLNSTQVEYEDLFVESTIRDEIYQTVVRTLVDSHRNVLEDTTQTFRAKVSSLEAALSEKDKALCLSDEENQMLKEKLSTLEKEHFIQNNQQDLELIKQESEEMVLRDIEMEPQRSCEISDRDIQYEGLIKLNQVLEIASTTAKEIETKRLNLSDIQGKREQEKQLDCILVSIMDLSKEFMETEHRVPKDIKGNEKKTDNLHDQCNYMIQQAIVLTKKGLWYKQMLDTKRSELRKAESEVDIMGDKVNALLSLVQKIYVTLEHYSPVFQHHPVLLDAFLKTCKLVAGIRSRQKKDLQDTI

SEQ ID NO: 68432 - protein, 234 aa, Zea Mays
MSCNGCRMLRKGCSDACVLRPSLQWIDGGAEAQGHATAFVAKFFGRAGLMSLLTAVPEPQRPVAAVRGGREDDRPGERRRGAARRGELAPVPGGGGDGAAGRRHRPAARVRLRRGPPRRVRCGGEAGRGVLDVLDGEARAGERGGAAGAVVRPRAVAQPRVTPGDRGAAPAAAARHAVHDLRGVRDDDERRRRRRRRREGARAAEPFCLRMADGLAKSQRPIVPCAPRRAVWCA

SEQ ID NO: 68433 - protein, 412 aa, Zea Mays
MSRRGAMPSTAPRARLSPPAPASHPPRKRGRSPSAPGSTASWRASAENTVPLYHRRRWHNPERAPGRVWQRFRAPQPALLSSRLWICSEDASTSSSGDACTIMSYNILADYNARNHPDLYLDAPWDAMRWDSRRRLIIREIRHWDPDVVCLQEVDRFQDIAAGMKSRGYEGIFQRRTGDTRDGCAIFWKSKQLHLVEEDSIDFSEFNLRNNVAQICVFELNGTHKFVLGNIHVLFNPKRGDVKLGQSAIYKFLSTMKLNISLHDRRHLSGLDSTEFGYELCSLLKYQWTDEEVRNATGYSNVMVAEHPLKLSSSYAMLKGNSNNRGLHGEPLATSYHRKFLGTVDYLWHTHGIECSRVLDTLPISVLKRTRGLPTREIGSDHLPIVAEFAFTESVEDDSDEDDESEQDDESE

SEQ ID NO: 68434 - protein, 575 aa, Zea Mays
MAAMNGEVLGECGRNINSLKRKRESPAAYAAGVFCTSELHQHTVNDSAVRFHLDKDRKAKIVCHFNKQVLQSYKKFMSSAPPKRILLRQGAVWKDFPEKIVKLAQADFRAKKMITETGYQNQLFLLDFAHMTFIDTKTGFQRPIAWIDENEKCYFPESFIQDQKLFMKKDFGNGNHEYISEERNGTRETNHQFGASESSAESSNFESSIGDVSSPKRARAEKNFIVKKYCDMGEAIGENESCTLLPTACNLLPHQANLGEVSRAQRTIEAVEKLLLQGMGSVIESKDIIGIYRTPLLDDHGQVRYHIHQKQVQVTGCHRGNANVRYAWLPCSKSTVHVMMLNGVLQVDKPPNKCAAYGEGTLLTPANRSDACVKYSDVDENGIVRMMLCRVIMGNVEIVHPGSKQCQPSNKYFDSGVDDLKNPRHYVVWDMNLNSHIYSEFVVTVKLPSKTKDSFVSQENCQNSSDLSLVLNSSSPDCISQEMNLEAPPALGGGCAAPMLGDSMEKAPSSPWMPFSMLFAAISTKVSPENMDVIIGCYEEFKSKKISRGELVKKLRHVVGDRVLISTIMRLQDKV

SEQ ID NO: 68435 - protein, 861 aa, Zea Mays
MTPDDNALIALKKGSKLIKYSRKGRPKIREFRLSSDETSLVWYSHSKVKYLVLSSVSRIIPGQRTAVFRRFLRPEKDYLSFSLIYKNGQRSLDLVCKDQAEVEVWFSTLEALITSCRKSYSADGPSDRLSVSDEVSHYQDTFHDTTLDIASSITRTFNSAKTDVVSDRANMLRASTDSSRLSISSAPSSSSQGSGQDDIESLGDVYVWGEVWTDMIPAEGSANYLCSKADILIPKPLESDVVLDVQQIACGYRHIALTTRQGEVFAWGEELGGRLGHGTDADISRPKLVEALAVSNVEYVACGEFHTCAITASGDLYTWGDGYYNAGLLGHGAGTSHWLPKRVSGPLEGVQVLSVSCGSWHSALTTSSGKVFTFGDGTFGALGHGNRHTVAYPKEVETLSGFRTIKVACGLWHSAAIVETTNQAGVNVISRKLFTWGAGDKNPLGHGDKDARLVPTCVQSLIDYNFHQVACGHSMTIALSTSGHVFTMGSSSNGQLGNPKSDGKHPTPVQDRLAGELVEEISCGSCHVAVLTSRSEVYTWGMGANGRLGHGGVEDKKKPTLVEALKDRHVKSIACGSNFTTCICIHKWVSGADQSVCSGCRQPFGFTRKRHNCYNCGLVHCHACSSKKVLKAALAPTPGKPHRVCDSCFMKLKAAETSSNSSHSKRNAIARRSVDSKDRSERPEIRSSRLATGSTAEPLKQAELKAVRNEIKPDPMSTMRAPQVPSMLPFNNLAFGATFGGPASLKPMTMAPMPMAMPMSPAPLTKKPTPAAATPLCGKSDTDNLKMAKQVLNEDISKLQSQVNKLKQKCDAQEEQLQKAERRAEHSASTAAEESSRRNGVLEFIRFLDNEYQLSRLLYSS

SEQ ID NO: 68436 - protein, 869 aa, Zea Mays
MPRLSASCNDESSGKRTITRRSSRLMRRLESQLTRALPAERPRRNASTSSSSSASSSRRDGTRPRAHQCRPVLGGAPFVVCGECSEILQLPPALPAGRATTLQCGGCGEAFQVTLPTIGSVDLPKKIFSAPQPAVFVGQDAEEYPLARSSNLSGEQPRPAGPLHRVLGYSSVSSVLRSRRYKMPTLSHSDPIQRLRKSITLLAARARPPDKHMIEHLTVSQMTNDSPWSMATESSAVAFAGDANSTESWSARVRTLTRLGRHKESIALLRHGGPSPPPHALALPASVISCAALSLPTGVAQIHALAAKRGLLPAADAYLLSALLTAYSRLGCLRLAHQLLDETPIESTSHTTLRTAFNSLISGCARHSLPVACFALFRRMRAIAVRFDAVTLLALVPAAPLSVVPQVHALAAQVGLATETSVANCLMSTYARGGAFGAALARRVFDEMPLASRDLVSWNAVLSAHAQNGLAVDALDLYRRMRSPEGSGVEPDAVTIVGVLSSAAHLGARGVGFDAEHYVVQRLPGFRTNVQLCNALINFHARCGSLPRAQQLFDEMPAKSIVSWTALITGHGMHGNGGVAVSLFERMVSEGIHPDNVAMVGVLSACSHAGLYDEGRMYFSTMESVYKLRPTLEHYTCIVDLLGRAGRLEEARELISSMPMPADGAVWGALLGACKIHKNVEIGEEAFARVVELEPRNVGYYVLMSNIYTDTGQLDCVARVRAVMRKRGLKKEPGCSYVEHNGRVHLFMADDHSHPQARRIYELVTRLELMVKEKSGVRESVVAVPKGRMEKEAAQPLVGFHSEKLAVAFGLLNTEAGSEIVVIKNLRVCGDCHSFLKAVSATTNRSFLVRDASRFHRFDGGVCSCKDYW

SEQ ID NO: 68437 - protein, 143 aa, Zea Mays
MYIPRWFGIPAHTYRFVKETRNYGAPAIGAGRGRCSFCGGRMGPRREFGEGNGNGVEGGYGGGGFGDSGFPRREEGDGKAMGRGHGPRQPYRGGGRRGGYTDSEAGDESGRPPRRAYERHSGTGRGYGMKCEVRWPWHLGNCD

SEQ ID NO: 68438 - protein, 379 aa, Zea Mays
MQRNGVVECSVCRSRVVVPSPRSVSRAYDKHRNKMSSKFRALNVFLVVGDCILVGLQPILVFMSKVDGKFQFSPISVNFLTEVMKVIFAVVMLIIQSRKQKVGEKPLLARSTFIQLYFNPATVKMLSNLKVLVIAFLLKFIMRRRFSVIQWEALALLLIGISINQLRTVPVGNTAFGLPVTAIAYIYTLIFVTVPSVASVYNEYALKSQYDTSIYLQNLFLYGYGAIFNLLGILGTVLFQGPESFNILRGHSRATIFLICNNAAQGILSSFFFKYADTILKKYSSTVATIFTGLASAAFLGHSLTINFLLGISVVFISMHQFFSPLAKVKDDKPADSIELEDTQNDRPSESSFVNMTAGAADDASHRIGTDERQPLLPI

SEQ ID NO: 68439 - protein, 307 aa, Zea Mays
MLSKSMDCSYEPLILKKMKISRDQFGVKHGCLHAGEATTMDFDPVEPRVSPTNTAEKFRGILGRSSERSRMLFGKMDSPFEKSEMLGTTPAESSLRFAGGKDSSLEKNKTLIRTPAENSLQIAARGKESKVSKVLTNLDKSPLGFAGGKESKMSNVPSTSAENSLQFAARRVRSSEKSKMLTTPYESSQAFLGEKDSPSEKSKILINSPVEYPFKKGSPGENPFKTCSPVENSLKFAAQRDSPSEKRKSCISNPLPPFQQAVQCTKQVGVAGQPFDIKEYCKEILRSRNDSQGGDPFAGYKSIFSFL

SEQ ID NO: 68440 - protein, 173 aa, Zea Mays
MAQLVKILSQDGDKLYLLSISGDDVVLAREDPRDKTQQWFKDYSRSSNLTDDNGRRTFALVNKATRQAIVNRKDTSMQSDLQYRRGDVIKQVELAPYNYDDRVDISMLWTELAENGNDDGFNIIAVLSDNSLMLCWQHDGNNVSTGQGMVTVNYFSGQGNRHWKIVPVGRNAW

SEQ ID NO: 68441 - protein, 138 aa, Zea Mays
MDGLELATGIIVLGATNRPNAIDAALLRPGRFDKVLYVPPPDVEGRHEILRIHTRKMKLGEDVDLWKVAECTELFTGADLEGLCREAGMAALREDISASLIHDAHFQAARSSLSPSLTKAVVDEYSKVDINDPSSRKH

SEQ ID NO: 68442 - protein, 708 aa, Zea Mays
MDPDDEPAAQRKAVDLHLPRDTEPASSPACTRRAAPRVLSYCDVPFASASAQRCASFPQRHGELAHARSASFAAWIEGGSASAPAAALERAMSQYGGADGALPEFVGAGGGEGIFRVPLRAAMHPARPPPLEVRPHPLRETQAGAFLRTLACDPRRRQLWAGAESGVRVWGLHEVFRGWWPGAGPRRRGDEEAAPFRESVPVPPALCAAVDGANGMVWTGHRDGRIRAWRMDHAAPAGGYSAGSAPMFKEALSWQAYSRTPVLAIVVTLYGEIWSGSEGGAIKAWPWDTIAKSLSFTSGERHNAASLVEKSYIDLRNHATIGNMCSLPAADVKHMLADNCRAKIWSLTSMTFALWDAKTRELLKVFGIDGQVDLARPEAPVMPEQFIEEEIKVKPTKRERPQGSFTFFQKSRNALMGAADAVRRVATKGTFVEDNRRTEAVAQAMNGTIWSGCTDGSIIVWDGNGNRLREFHYHSSSVRCIKTLGDKVWVGYASGTIQVVDVEGNLQAGWIGHSCPVIDMAISDSYIFSLAHHGGIRGWPLSSPSSLDDILCYELASRELLYTRLENLKILVGTWNVAQEKASPEALRSWLGGAFFDVGLVVVGLQEVEMGAGVLAMAAAKESVGLEGSANGQWWIDSIGKTLDEGISFHRVGSRQLAGLLIAAWATNDLRPHVGDVDTAAVPCGFGRAIGNKDMFCKQSFCCTSREC

SEQ ID NO: 68443 - protein, 186 aa, Zea Mays
MEREDADGALDSWAQFCTLSNELLAGDGDLAVGPRLAPVVGDLCTRGLATLVRDYFLHSLEETFRNHAVKKFWQHFHPYCSASTVDRIKFCVKEHWPEEILSKALEDICLERGYQEKCVLVLVQVLQSYEDRMPRKKIKEVVCSSSLMPRYQLMVSSVLLTTLPLSFPGTLCCPDTAIRICDTPIP

SEQ ID NO: 68444 - protein, 521 aa, Zea Mays
MLEDIGKIGEFKKCISHARQVTTFIYMHGKLLDATREKIWGDLVRPAVTKFVTSFLTLQSIYKHKQSLRCLFVSDDWTRSKLSSIEAGKKVTEILLSTNFWNSVQDCIRASQPLIVLPEVAAAMDMAKAKITSGFEGREAMKRKLLAIINRRWQDQMEVKLYGAALFLNPNKFFELQKKDPTKREVGKLRATFNEVLWKMVEDYDLQAIISKQADEWKKTKVDMNMYRKAAALWVELRVELLSAIEYYAEDKVNSAQIWRLYWASHQRFFRHMCMSAKVPAVVRLAKEALAEEKCVVIGLQSTGEARTEEAVAKYGIELEDFVSGPRELLLKLVEDNYPLPPKPDCFEQGEEKVQEFQHKRHYGSDMSLKGRVSKLGKKEDVSEDGGDEYPPHSDHESTESDEDFYMCQICNTEEEKNSLFCCCICASRVHPGCLTPPSTDIVNDDWSCYGCKEKVKSYLKERDAYLTELSKRYDAALDRKSKILDIIRSLDLPSNPLDDIIDQLIFISHNLTLQEDDVNP

SEQ ID NO: 68445 - protein, 602 aa, Zea Mays
MSSRLCVKNLPKGADERRLRDVFSRKGEVTDAKVIRTKDGKSRQFAFIGYRTNEEADEALKYFNNTYIDTCKITCEVARKIGDPDAPRPWSRHSLKKSEYGSKDKNNAGAVDAPPKGSNAQGTSAHASGSKGSVANDPKFLEFLEAMQPRSKAKMWANDTAATLDTAAKDSVVAAKESKGPLKNVLTSENDSSSEDTSDEKVANDLSSENASEQLKTENKQDKNMTDADFFKSKVKKNWSDSESDDEGSAHQSNTTTDDEDSSDESQDSDNQLADTKGDPDKRNIVDKDTLVENTDLQEPEDLDNKESEDLDGRPRGTEIHEDQERADENGAPITDEKKLALETGRLYICNLPYATSEDDLVELCRQYGDVEQAHIVVNKATKISTGRGYVLFSLPDSAVRALDELDNSSFQGRVLRVKAAKPLNKLESFHETAVEKVSLKQKRLEQKKASEISGDTRAWNSFYMRQDTVVENIARKNGISKSELLDREADDLAVRIALGETHVIAETKKFLSRSGVNVAALEEHASKRNEKFKRSNYVILVKNLPFNSTEEELATLFQKHGSLDKIILPPTRVFALVVFVEATEAQYAFKKLLYTRYNTGG

SEQ ID NO: 68446 - protein, 58 aa, Zea Mays
MSARGTYKVPCVQFAFFDDTILSESVERAANTRLYPNRIRCTILGKTHRKRFTNKWSQ

SEQ ID NO: 68447 - protein, 730 aa, Zea Mays
MRHIEYCMHRVNMLRHFGVRPILVFDGGLLPIKSYQEGKRARSRKENLERAREHEAAGNSRAAFECYQKAVDITPRIASELIEVLKKENVNYIVAPYEADAQMTFLSVNKLVDAVITEDSDLIPFGCSRIIFKMDKFGQGVEFQITRLEQNRELDFNGFTRQMLLEMCILSGCDYLPSLPGMGVKRAHALIQKLKCHEKVIKHLRYGAVSVPPQYEEDFKKAIWAFKFQRVYDPATEDIIHLSSVPQSLIEDLEFLGPWLPQNIAKGIALGNIDPLTKEPFEINPECSAPSVHKVCPTREPIAPSNGRKKLDLPVQKNILTNYFCLASLEAKRKFRAPKVTHKQQILNEALPSPQAQGSATSDSVEDTRLPTDRIQASQCSSEHLSSEPPQNDPISVGSQCSSERFSCEYPLDDSANISQCSSLDGGSDPPYKDTGNKDRKVEAGYDNKNRIPTSPCIMGNLPWTSEPFLVPHNVGPSIPVQHYTESTVASNNNGITVSSYFKTANKRICTDQGDQLDDDYDVSTGNLCGDQLRKSGMLKRRKLSGIQKFEDETLQPIHSDDSPPFVDEETSAGQDTDDPDDTNIRTEGRFGCNVSHVNTYSGIAEKSMDKFAALISSFRYPGPRASGLRAPLKDVKNTLSVRSILKAPEKDTFRRTAKKTGLGPPSKSRYTSDDKGSAASPPDISAFAYRPMKTVASDQGKTTVGRLNGSRFRETAPKATGGTSRSQFK

SEQ ID NO: 68448 - protein, 858 aa, Zea Mays
MFSSKAKGIEWSMDHDASNAAVLVASEAHTITLALEGLLGVVFTIATLTDEALDVGELESPKCESNSMECSGQLALLCMALVNSTWLTILDSLSFILTRSQGEAIILEILKGYQAFTQALRTLFNVAHRLHNVLGPSWVLVLETLSALDRAIHSPHASTQEVSASVSKLSRDTSGQYSDFHILSSLNSQLFESSALMNIAAVKSLLSALHQLSSQHISGSSQLSVQQIGSISFSVERMTTILANNLHRVEPIWDQIAAHHLELANCSNPQLCNMALNSLDQSICLVAGSEKFQGISAAPHQFPESHLVKESETVSFEYAVLSPLMILYSSNKNVDVQMGALKILLHVLERHGEKLSYSWPSILHMLRMVTDASEKDLISLGFQSIRVIMNEGLATIPVQCLDECILVTGAYGTQKTDINISLTSVGLLWTATDFIVKGLVSKPIEQASHMNDDVQSCEMTEEANSKQVPPKLVDYSILFFSVFSVLQKLGSDDRPEVRNSAVRTLFQTLSIHGQKLSKSMWEDCLWLYVFPMLEHVSHLASTSSRDEWQGKELGTRAGKAVHMLIHHSRNTAQKQWDETIVLVLGGIARLLRSFFSYLQQLRKFSSGWVLLLSFIKNSILNGSKEVAIAAINCLQTFVGANCPKGNLESSYVKSVLDIYELVLQTSSNFKNDSTDKVKQEVLRGLGDLYVQAQSLFTGDMYLRLMAIMHLMIKTTLNPTDYDSELGSIPAVQRGILEIIPMLRPTVVLSPMWTHLLLELLCYLNGHEGPLQKNNEQTPDHNSQALVDGAKHALVERSNLNGGGTKLDMVGSGWGILFVEKLVPIIANLFLEAPPNERFSVSPEVIQGLGRYLLFMIYI

SEQ ID NO: 68449 - protein, 421 aa, Zea Mays
MTRAAALVASRLNKTKHKPSLKPERKEPGGRKHGGEKETVRPTVCILQLHAPLPPLYSWRQSKAVRLLVTISNPTRAALSVPPHHLSFPKKTIAPCQCASPRRAAPPSPHVRHCVSAMRPPSSSSSSSSSPAAVPEPGGRMSALTMRAVARMSRARWFVFLRRVYQYQNGPRSDLGSNPFNSPGWLALELGVIVAQVVLTTAVVATSAAERPAWPLRLWVAAYNVGNVLSLPLLYWRHRHSSSSSSAGGGRGDLEMHGANDAPGNRSYLMNKARAFLELFFAMWFVMGNVWVFDARLGSFQRAPRLYALCVSLLAWNAVVYSLPFLLFLLLCCFVPAVGYALGYNMNSASVGRGASDEQLAALPRWRFKEPDVARDRERDDQYGEKEEVRQLPCTHVFHLKCVDRWLRIISSCPLCKQELK

SEQ ID NO: 68450 - protein, 226 aa, Zea Mays
MALKTEGDTKGSKSSDQNGKKQMLPNGELGSSRTKYNNMEPDVVDFFGECMNSPRNGRTPLANEIYEQMVAEKERELEEGEAQKSPSKIVADSLSQISRSSTFLLNIGVCLNASNLCGGTFVCLNLYCGRTSVLELCMTCDENVVYDGFYVYYDSVSYHESSVYHESSVYDSASLLEELPRSKHESTSMPGKQKLLQKQGKSELIGNMTHILGNTKLRMMIFILLA

SEQ ID NO: 68451 - protein, 448 aa, Zea Mays
MNQCVPSWDLVDDPTAAVAGGGGGLNHQVSTTGGAHRGLLLQASAGGAGGGGAFAPVVVPMSNQYYEVAELTWEKGNISSHGLLNRPAHNKYPPAAAPSSAQLHAIAGGGGRGGGSPSGDRETLEAVVGEAAARSHFLSQPAPPWLIGADAVARAAADALVPCAARAGESAADGGEAGASRRKRPRVVGDDSLVVCASQGSTAPRRRGESALLTQLDACGTEADDVCGFRTTTTNNSTSMDRDDKGSPDTENTSIGGGASDSRCFSRRSQKRRDRINQKMKTLQKLVPNSNKTDKASMLDEVIDYLKQLQAQVQLMSRMGSMMMPMAMPQLQMSMMAQMAQMAQMAQMAQMNMGSLGQPGYAGLTPPMMHPPPFVPVSWDTTATATTSLAPQAGSGTVPADAFSAFLACQAQQNGQQPGSMEAYNRMVALYQKMNQTQQSAPSNPSKQ

SEQ ID NO: 68452 - protein, 57 aa, Zea Mays
MKWRIRGNGRHARFTRNICRVVRDPQLSKSIRIAVISPESGDLISDLQPKSGCEHYE

SEQ ID NO: 68453 - protein, 899 aa, Zea Mays
MMIIIWWILMHRRTRRVTQIQNHDKGGAKSRDKCSTAKKLFADTTAEDGEKNSRCLAGLSYAGSQEPGDLSQANAFDVVDRLISINCGLSSQETIPNKLEIAKPHASSKRGTLMLAEKVDLGRSSNGKAEIFEFVDNLEDEGGGDFFSKNRDILLPKPIGRGEPKSHYTRAKKPSTKKSCGENKIGEAMNKRNSKLPGRLETIPLSHSRLFKSDVKSKQAYGSRTKKNLLKDLDNLSNAKSLEEQERADVALNDVGPDTQMAVEAMEALVQCSPAKSLSAEDQPLLNRDTMAEKSGIAKSHLKNGSQRTSNIQEGVTTRSKRRKVPDFSTKPQKERLRGSKVQESSEPIVKVKHKQTKSVPEKSKVSKEFIDENKYHGTPIAHRTRHCGRNDPSAFIEFSNKHLRRGKKLTGDSSTIQQVQNNRIAIESGLSYFEKESTEQICTNNDQDLQQSKDGSTQRTSVNNAQNLETHRVEPTTDVTCRDIPLHPKRRRTPTKLILSTSAAAANHEIPSEVARPYKKRRIFVRSVSDLLKYAKREPSHGRSASMLSSILEKSLAASPVLNFSVCGDSKTSSDVISSAQRPKESSHDEDTSKSPENNPQVPNRSMKTPSKVVNELSPTFSPANPSKGSSRNLSKASVARELLKLDPENVLPNQQRKDSRRRKDMAHVSILLSHHLDDDVVKRQKKILARLRGSEAFSMADATHFVADRFCRTKNMLEAITIGKPIVTSMWLENCGEAGCFIDERKYILRDEKKEKEIGFSMPISLASACNHPLLLGKRVFVTSNVKPSQAVVTSLVKASSGQPLERVGRSIMNEKEVAPDLLVISCEEDYQTCAPLLEKGASVFSVEFLLNGIVIQKLEYERHRLFLDRVKQTRSSRWLKDTVQDRFVPVPKRRRR

SEQ ID NO: 68454 - protein, 209 aa, Zea Mays
MYSDQISTGRKRSIHDRLDGDLPAGTGAGGRVRHTVSKRQRQIDEKWKHDLYREDDEPASNPKDLRLKLQRRSSQQSFTSTRSSGVRDLREKLSGIMHPQPSNADPKPKPKPVSEVVNISRRQTADEMPARQSKRAPKQTSLKKTSQPKVESPLSSFLSSLGLEKYSITFQAEEVDMAALRHMTESDLKALGIPMGPRKKIILALEPRA

SEQ ID NO: 68455 - protein, 216 aa, Zea Mays
MTPSSTGKNSELPDEPANVPPSQFGSQKQAHVPITQAFEDDQGMNCVAISAVEWADTLTNISFGHLLTEASKGTHLDCGGTSPPGSKKVQTLLAALLILTMEFIPQILKDLKDLAGEADADNHYNNDDAKDEEFYAKSPPRNDETNELKDQSLADIYWPDSLGPLDLDIPSVRYEADDILIGDSQNSWNRLMANSLDAFRNLSFFSDKNDSIPSIM

SEQ ID NO: 68456 - protein, 792 aa, Zea Mays
MATPSTSAPSPSPSSAFPLTTTTRFPRSCSCPVRASALAERRRTRRRRAPDGGGAGGDRSAAAGAVEKGLRLVFLEQLAERARAADATGVADTIYDMVAAGLSPGPRSFHGLVAAHVLAGNAEGAMQSLRRELSSGVRPLHETFVALVRVFAKKGLSTRGMEILAAMERYKYDIRKAWLILVEELVKNHYLEDANTVFLKGAKGGLRGTDDIYDLLIEEDCKAGDHSNALTVAYQMEAYGRMATTFHFNCLLSVQATCGIPEVAFATFENMEYGGEDYMKPDTESYNWVIQAFTRATSYDRAADVAELLGMMVEDHKRIQPNARTYALLVECFTKYCMVNESIRHFRALQRIPGGTEVLYNEGNCGDPLSLYLRSLCLDGRPVELLEALEAMANDNQSIAPRAMILNRKYRTLVSSWIEPLQEEADVGFEIDYVARYIEEGGLTGERKRWVPRRGKTPLDPDEFGFAYSNPIETSFKQRCFEELKLYHRKLLITLRNEGPGILGDVSEEDVRRVIERLKKLVVGPKKNVVKPKAASKMVVSELKTELEAQGLPTDGTRQVLYQRVQKARRINRSRGVPLWVPPVEDEEEVDEDLDELISRIKPEDGNTEFWKRRFLGETRNYLCEEDSKEDGQDLDDELEDDDDNDDDEDDDESVKEAEEDEIDDEEVVEQTENQVGDDTKDKPAKEPNHHLQMIGVQLLKDIERTPVSSKKLKRMPEIDDDEDWFPEDPIEAFKVMREERMFDVSDMYTTADAWGWTWEREIKNKMPRKWSQEWEHHSHLLLYQYCKQHTV

SEQ ID NO: 68457 - protein, 663 aa, Zea Mays
MDEENVVELLQRYRRDRQVLLNYILSGNLIKKVAMPPGAISLDDVDIDQVSVDYVLNCAKKGEPLDLGDAIRLFHDSLDYPYVNNTGAVDEFYLLTKPEYSGPAPTREPPPIPATAPSSVVIPPPDVEPAPIIVSSPVTATNLPKSQPFDSPTEKELTIDDIEDFEDDEDEFDGRRASRRHQTDASDLSLLLPSFETGITDNDLREAAYEILVAAAGASGGLIVPQKEKKKEKRHRLMRKLGRSKSESVDINTQRQPGLVGLLETMRAQLEITESMDIRTRQGLLNAMVGKVGKRMDNLLIPLELLCCISRTEFSDMKAYLRWQKRQLNMLEEGLINHPVVGFGELGRKVNEIRSLFRKIEESESLPPSAAEVQRTECLRSLREVATSLSERPARGDLTGEVCHWADGYHLNVALYEKMLGSVFDILDEGKLTEEAEEILELLRSTWRTLGITETVHDTCYAWVLFRQFVLTGEQGLLKVVIDNLRKIPLKEQRGPQERLHLKSLRSSVDAEGSYQDFTFFQSFLSPIQKWTDKKLNDYHLHFSEGSSLMADVVTVAMLTRRILGEENDKVAESPDRDQIDRYITSSVKNTFLKMAHSVEFKADTTNEHVLASLAEETKKLLKKDTAIFTPVLTKWHPQAAVVSASLIHKLYGNKLLMLWSNT

SEQ ID NO: 68458 - protein, 399 aa, Zea Mays
MSCLPCSGSSGKEDKSLAALSPSPRPAAKAAPVRSNSRASSSRKEDSVPVRRGGNAAHGPAQIFSFRELAVATKNFRRDCLLGEGGFGRVYKGHMENGQVIAVKQLDRNGFQGNREFLVEVLMLSLLHHPNLVRLIGYCADGDQRLLVYEYMLLGSLENRLFGPAGKEPLDWNTRMKIAAGAAKGLEYLHDKANPPVIYRDFKSSNILLGRKAIDHTQPSGEQNLVAWARPLFRDRRKFCQLADPLLHGGYPKRGLYQALAVAAMCLQEQAASRPLIGDVVTALSYLAAHPYDPNAPSTKDSKTCPSTPRAKTHRRTTSVPDAQHAAESLILNFPDMRKETVRGGEFEKDRTEGSGSSSSSGRNDCLDVPRLLSVPNGKVCGEGNNIQKSTVKVGAREN

SEQ ID NO: 68459 - protein, 75 aa, Zea Mays
MVLAKKIPEPWPPTTNGTTSTVHSAMAQPKGGAQDIATRERMGHSEGIFLTKPENSLPIGIEPRTWRCYSEVLNR

SEQ ID NO: 68460 - protein, 1104 aa, Zea Mays
MSSKWRSLQHRHRYTYTSIVFPKHYLEALTLVPAEISSSNFFVRLSNLISLTSTYSQVVVVKDLASAYVQFLSTTGTPDEAVLAATKLYLEILFLENSLPLHRTLISVLAKCKKFSTVISGCFALLCEEYGGSGSKAKKRFMVSRAALSLIGYPKLGFLDEAVERCAEIMALDVVDGLDGVTKDIGEGSRPSPVVMEQCQEAMSCMYYLLQRYPYKFIGLDKASSVFKSAVRTILSVLKSSAFSRDCLVASGVSFCAAIQVFMSTEEISWFISQGLFGIYANHEDRKNQSVHNVFSDFDLCEQIRDLSVLSRLCLLRGILTSIPRTVLNMHQLHSSGPLWTVLYDGILPELCKHCENPVDSHFNFHALTVTQICLQQIKTSVSSDITDFSGDYKPFSRDVVNRILGIIWRNLEDPLSQTVKQVHLIFDLLLDIELCIASEDREHNNNLFLCNVANDLLRLGPRCKGRYVPLASLTKRLGAKSLLTLKSNLLSETAYAYIDDDVCCAVTTFLKSFLETLRGECWNDDGVELGYDAFRALCLPPFMRGLVSGNSKLRSNLNTYALPALIEVDAESIFTMLGFISIGPSTNETKLDVVLKNDQCIAALVSLLKVSRNLALVEGDIDLDPDELSQIQQMDSKGAAVISVKGIKVTVPFNWFALALTHSDESLRIDAAESLFLNPKTSSLPSSLELSLLKEAVPLNMRCSSTAFQMKWTSLFRKFFARVRTALDRQVKQGSWIPSLTSSVKGAGSIDTSKATVVKRAEDLFQFMKWLSSFLFNSCYPSGPYERKTIAMELILTLLDVWPICRSEGKIDLYPYNDSIILPDSTISFVGSIIDSWDRLRENSFRILLQFPTPLPGISLSTSINDVIRWAKKLVLSPRVRESDAGALTFRLIFRKYVLQLGCILVFSKESDCLECYTQSMNGDTEVTSQNPVAQYISSLIQWLCIVVEEGERDLSEACKKSFVHGVLLTLRYTFDEMDWNSEVVQSCISEMRYLVEKLLQLIMRVTSVALWVVSSDALSLPYDMDDMIDDGSFLSDIYDDQPTTTSEREEKNAKPGSNGKPAEQVVMVGCWLAMKEFTFWNHHQEDTIAWLFSFSFISEWLA

SEQ ID NO: 68461 - protein, 62 aa, Zea Mays
MMNHTACTTTTISIVLLSVTAIVLLHLCGQRIKACQDGVECGASRRLSKAKLVETRGRRSDR

SEQ ID NO: 68462 - protein, 307 aa, Zea Mays
MINFLKDFEDKLGITITCSQETEPLGTAGPLALARDKLADGSGQPFFVLNSDVISEYPFAELIKFHKCHGGEATIMVTKVDEPSKYGVVVMEEATGRVERFVEKPKIFVGNKINAGIYLLNPSVLDRIELRPTSIEKEVFPQIAADQQLYAMVLPGFWMDVGQPRDYITGLRLYLDSIRKKSAAKLATGAHVVGNVLVHESAKIGEGCLIGPDVAIGPGCVVEDGVRLSRCTVMRGVRIKKHACISNSIIGWHSTVGQWARIENMTILGEDVHVCDEVYSNGGVVLPHKEIKSSILKPEIVIVIVIY

SEQ ID NO: 68463 - protein, 142 aa, Zea Mays
MLLGGEDMHRFPVRSPRMDRGDLICSPAARQIVSNYFSMFGPVQDVRIPYQQKHMFGFVTFVYAETVKVIPSKGNPHFVCYARVLVKPYKEKGKIPGRFRKLQHAHHGGAEFGDCASPTRLLDFRDPYALLLLSGAQVFSWA

SEQ ID NO: 68464 - protein, 324 aa, Zea Mays
MPDVQPLVSDFVLKLKRRKVEGSHAVARQTAELLRSVVSQHRMGSSANQAATLADAVRAVGEQLIAANPIELAVGNIVRRVLHIIKEEDISSTAVGIEGLSVTVDSDDEYDSEHDDRPALSAAVLAAHARNALRAPSLQTLLEDIPVSPAISRTASSTGDSDGKSKSAGDKSSTRKLKHDVIAAIGDLIDEIDSCYEPISEQAVELIHQNEVILTLGRSRTVKEFLYAAKEKKRSFRVFVAEGAPRYQGHVLAKELVEKGVQTTVITDSAVFAMISRVNMVIVGAHAIMANGGVIAPVGMNMVALAAQRHAVPFVVVAGSHKIA

SEQ ID NO: 68465 - protein, 125 aa, Zea Mays
MMSSSDIDDARARASRALEVFEKSIMDRVGPEAVQNLHRENVMLKEQLAIILRENAVLKRGVAIQHERQKEFDVRTQEVDSLKQLVLQYQEQIKTLEINNYALRVHLKQAQQGNSMHGRFPPDVF

SEQ ID NO: 68466 - protein, 889 aa, Zea Mays
MIVRTYRRRSRSISEGGGGVSSSQEAFDFDADVDVLGSSASQPLPPSQESSSMWDFDEDPPPSPPRPGKEGRRSGRGGARRGGGLELAEAPAMAPTVTLMEAEEYGEMMESVDDVTFALDGLRPAAQKRTRRASLLALLGICDSAERRRVLRSQGLVQQIIDAILVLDIDDPPCAIAAGALLFVLASDVQDNNLLSSETCVHFLLKLLNPPVNVVDAKAPSIGSKLLGISKFQMLNGSNKDVDSCSEDILLKVEEILLSCKEIKPADRDYKRTTRPELCSKWLALLTMEKACLSAVALEDTSDMVLELGGNFKETLRQLGGLDDIFNVMVNCHSELEKLVKDASTTVVEGKEGAPLQSTTLLLKCLKILENATFLSDNNKTHLLSMSRKLSPKCRSLSFVGVILNIVELLSALSLLQKPSTVSRKADPKNTKVCNGACSDSRGLSLLNHHCKCNNSKKKSILLNRRCQYCSSTKSEASHVTLSSSSDVSQSERILNCSSFSSNGTSSGSFGVKHINGASLKLNVRMDRSKAYPVRGSTGWISMKAQTSDWNSREMAKKRRLSENVRTDLSNGGDDPFAFDDIDQEPSNWDLFGPKRKSPQKRAKRTNGEVLDDCGTALMGSPKLCQPEDIYQSVATSGSKVVDESNLLEDCLLASVKVLMNLANDNPSGCEQIASCGGLNNMASLIIKHFPSFDFSMNSNNQMNESVSSGDPLSSQNSKSPQIKTKQLRDYELDFLVAILGLLVNLVEKDSLNRVRLANARVSVNLSQNPDSKEVQRDVIPLLCSIFLASQGTGETAEAISPDDEESLLQGEREAEMMIVEAYAALVLAFLSTESMKVRGAISSCLPDNNLKVLVPVLEKFVSFHLQLNMMTRETHSAVTEVIERCRLS

SEQ ID NO: 68467 - protein, 73 aa, Zea Mays
MRHHLILDVISSSTVATFLGLGGLHLVLYSGLKVGHKLLQPPTTLSPGDVVWVRAPLLEGKALLIILRKMATT

SEQ ID NO: 68468 - protein, 341 aa, Zea Mays
MHLDMEALREDKSKLEMILEKKTDEEHKLCSRVEDLELQLNKEKEDCQRMSSKTKKLIKAHGRYIKAQEDLKRSQARFERLADLLASDILKPCTKEQGSIGITANEDPYNANEMSPSDQRQNHVSASRKRLISLPTSEEAKTGKRQRENGDDMIPTSENYRPEDALEHLQDSKGTDLPESFTVKKLREGDNDDVGNIVSSSNIFADRGLDVGVDEDVAVVNSFISSRMIDKRPIPSSNSLKELSNSLKELPPAGHATPKQQLASLGGASGRVIFNRGPTVAQFRSTLRGAVLRRVRCKGGTDGGGRTSRNGSTRDETNRRATHLCVGPLTLERCLVAWASL

SEQ ID NO: 68469 - protein, 395 aa, Zea Mays
MSSPSVASLRLPMLPASPPLSRRAIAGVTPSAAAPRALLLQPLAPKALAAYHQPALLLHQRRRHGPPPVAAVTASKPVLKDPKKYQEWDSMTAKFAGAANIPFLLLQLPQIVLNTRNLLAGNKTALFAVPWLGMLTGLLGNLSLLSYFAKKKETEAVIVQTLGVISTYAVLVQLAMAESMPVPQFVATSVVVAAGLILNFLNYFGWIPGTLLLLWEDFITVGGLAVLPQVMWSTFVPFIPNSVLPGIISGSLAVAAVAMARMGKLSNAGVKFVGSLSGWTATLLFMWMPVAQMWTNYLNPSNIKGLSAFSMLLAMLGNGLMIPRAVFIRDLMWFTGSAWASVLQGWGNLACMYCFNSISGEVFFATSAGFTLWRDAIAYGNSSPFSSLKELFFGK

SEQ ID NO: 68470 - protein, 461 aa, Zea Mays
MAGRGGGGKGAAGRMMSLQEFVSCMQPLIDLEKAAEISAESETSAKSLERRGCVIANLKCTDAQTGLMGKTLLEFQPNKGDVLPSHKFGTHDVVALKPNKADAGSASLGQGVVYRLKDSSITVAFDDIPEDGLNSPLRLEKLANEVTYRRMKDALIELSKAVQTGPCANLVPVLFGEKAPMRSKDAMKFSPFNKNLDDSQKEAISKALGSRDVFLLHGPPGTGKTTTIIEIILQEVKRGSKILACAASNIAVDNIVERLARYRTKLVRLGHPARLLPQVLDSALDAQVLRADNSSLAGDIRKEMKVLNSKLLKAKDRNTKRDIRKELKTLAKEERKRQQLAVTDVLKNADVVLTTLTGASSKKLNGITFDLVVIDEAAQALEVACWIALLKGPRCILAGDHLQLPPTIQSVEAEKKGMGKTLFERLTEAYGEEITSMLTVQYRMHEHIMSWSSKELYNNKV

SEQ ID NO: 68471 - protein, 86 aa, Zea Mays
MGSRKAHGVLEEGSWRMKRITRSIPLPLLKRERRRLQGWRQMIMGATIRLRRFPSLASSLYPTDSLCCLASLCHTKVSKKYGFVDV

SEQ ID NO: 68472 - protein, 272 aa, Zea Mays
MPRAATGAITAAFLRAQAPHMAPLASRIARAFPGLATAAATRFAPSSSASSPRLGLVPRLRSARSFSGARASPVSGAVSGSSTSEEGQQLQSELIFLGTGTSEGIPRVSCLTHPTKICPVCTKAAEPGNPNRRRNTSILLRHATPSGTTNIVVDAGKFFYHSALQWFPTFGLRTIDGVIITHSHADAIGGLDCLRDWTNNVQSSIPIYVAERDYEVMKMTHYYLIDTSVVIPGAAVSALQFNIIKEEPFMVHNLECWVRMTARSKLAILASM

SEQ ID NO: 68473 - protein, 1050 aa, Zea Mays
MAAGGVGPAQHQAANGASGSVSNGGAATPLHGSAADGYDSDGYSFAPPTPSTLSMSIPPELAGAIPLIDRFQVEGFLKAMQKQIHSAGKRGFFSKKSVGPQAREKFTLEDMLCFQKDPIPTSLLKISSDLVSRSIKLFHVILKYMGVDSPAIITLDERIELVAKLYKHTLKRSELRDELFAQISKQTRNNPDRGWSIRAWELMYLCASSMPPSKDIGAYLSEYVHFVAHGATTDSDVRVLALNTLNALKRSVKAGPRVTIPAREEIEALLTSRKLTTIVFFLDETFEEITYDMATTVADAVEELASIIKLSVYSSFSLFECRKVVNGSKSSEVGNEEYIGLDDNKYIGDLLSEFRSAKDRNKGEILHCKLVFKKRLFRESDEAVTDPMFVQLSYVQVLKDCQFVCYSSNLGSKIELTSNIVLQLQHDYILGNYPVGRDDASQLSALQILVEIGFIDNPESCVEWISLLERFLPRQVAITRAKRDWELDIISRFQLMEHLSKDDARQQFLRILRTLPYGNSVFFSVRKIDDPIGLLPGKIILGINKRGVHFFRPVPKEYLHSAELRDIMQFGSSNTAVFFKMRVAGVLHIFQFETKQGEEICVALQTHINDVMLRRYSKARSANSVTSQNDVNHAYKPPNIEMYEKHVQELTKTVEESQKQADQLREDLQLKTKQETEMQEELEGLKDTLQSERQSSKEVKNELDKLKSLCDEKESALQAALMEKSRLETRLTSSQGRERDTLTTVGSVNSDIEMLTKLKEDLKSYQKELDASKQVSKKLMSEKNLLDQKVQRLERMKNEEKSTMEKVYADECRKLKSQIAELEQKLEDATQSLNVAESNLAVRNAEVDSLQNSLKDLDELREFKADVDRKNQQTAEILKRQGAQLVELENLYKQEQVLRKRYYNTIEDMKGKIRVFCRLRPLSDKELSFEEKNIVCSPDEFTIAHPWKDEKSKQHIYDRVFDANTSQEEIFEDTKYLVQSAVDGYNVCIFAYGQTGSGKTFTIYGSDNNPGLTPRATSELFRVIKRDGNKYSFSLKILSMPSILSLNCIL

SEQ ID NO: 68474 - protein, 228 aa, Zea Mays
MMSGGGYSALDDPKASGSVPAATGTDPPAIRFADSNLQTFPPSEARGKISGAYRPPTDADDTFSSKGGGAGSGGRGGSAGLDDAAQGGWFRMFSVAAYKPYFDVDTSDVVERIWESVFPFRGTFTEKTSENPDLYGPFWTCTTLIFVAASIATFVTYLSHKWHKKEWNYDINLVTWSAGLFYGYVTFVPLLLYVILKYFSAPAGLVQLWCLYGYSLFIFIPASKYSDG

SEQ ID NO: 68475 - protein, 272 aa, Zea Mays
MTPTPTTTATRPASRPGSPTSAPPPPSAEDLDPNLKYPKQPFPFAQLIIYATAPHGVHEHSGEHAGGGRLRGRPRPVRRAVRLPVRAGRAGAPVAADRREQPLAAADAQRVRQHHAGAVAGPQPLLLRQEHDAVPPGHRLRGRRGAVPRADTAARRGPAGARRAPDVPRGHRRRHGGEPRVRRPRLRRGPREGGLWRRRRDGEPGQPHRPDQGVVGLAGAGRRGGGAAQGVAFRHAQRQERAGADHKDHRFYQPERHELSSFLLECFALVDN

SEQ ID NO: 68476 - protein, 1828 aa, Zea Mays
MGDGGVACAVRAVEGFHAGALVRRGGAGEAMPDKGEKAHGHHHQQQHWKNQQSASATDLEEGELLSGEAETNGLPERSMPPKKWRKVLAASAAAVEVEPGEIVSTKQAVPLKKARRNGEVDKVELLPERQRKVKSSGKSTRKSIKDDMEPGEIAPPEKRRDAKSQRADDNSRRPSSSAQKSSLRDSDEEPGEIKPESSTSGSLRKNQPTEPHSINHKHHTDTSDQSGSKSHRKGPKGEGKRSAARHLSGRNREISSPTRDRRDRHERSPGILGRFPHERSRHDRYDRSPSRLERSPHRERARHYESRDHSPYVSPRHRARQPHFRDNTPSRVDNFPRGRVQREDVRDRSPFLHDRSPSERFRPTDTHEASKKSRSGNNSEKSQHKSKSAKQSSKTKSGSNEKNEKISNEKPTESSKYTELPPPPPLPLPPPPPPPPPPPPLPPAVPPPLPPPPEPEPTGVLAEDMIEDMDICDTPPHTSAAPEPTDPIYDIGRWFYLDHFGIEQGPSKLAVLKKLVEDGYLLSDHLIKHADSNRWVTVENAASPLVPSDFPSFYSDTSTQMVNPPEAPGNLLDEALEEASNLASGSEDKQMVEASAEDSEEFYINDRVEALMDGSILVHGQELEIIGELLGADFQPADWQRLSHPEDFTRFHVHIEGDDEIIGGTEFLENRTTDAYGLVSVDNFHHYVESSEWFSGRWSCKGGDWRRNDELGQDTPFRKKLVLNEGYPLCQIPKGSYEDPRRPCKDELYYPVRGKKHDLPLWAFSSTEEDIDGVNDTTKNTVVPGRPGQTRQPPSEVKVMLQVVSINYHVIKDQSSVEPRTKPRGTDRPPSRSSRSHSIGAERSSIHDGSSHFRKHHDHDSQSFHKSKSVPNIPKDHVCTVDELSVNRGDWYYLDGTGHDQGPFSYSELQELVKKDTIIEQSSVFRKIDNTWFPVLKDLKPGSSVPSAAPSSNLIAAFTHPDQYNFGVNQGSSSFHELHPQFAGYTRGKLHELVMKYFKSRELTLAINEVLDPWISAKQPKKEFEAYFSHNSASRNFLPEDGGSAKRARLLPDQSDENIHLSEDIIASRKEDICFEELCDGASSVDNDSVNPRAGNASWGLLNDHLLARIFHFMRADLKSLISSAATCKSWNAAAKYYRNMCRFIDLSSVGPLCTDSVFCDIMAGFEKQNIRTLILAGCSNLSSHALGRVLEHLPQISYVHIQGCSHLGDLKNKFQHVKWIRSSLNPEGSYRKMKTLKQIGDGNNYASKVARNFDQLDDSDELDGYFADISKIEGASLFSFGQGFYKRSKLLDARKSSAVLSRDAEMRRLMQRQAENSYRKMEEFVINRLREIMRCNRFDFFIPKVSKIEGRLKNGYYARHGFRTIKHDIRTMCQDALRYKDGNDLDDVKQIVVSFIQLAKRLGNPRYISERNGAAAQDSLDISQYSFDTKLKKKQNKTRANLVAAGADNSSRAFDLEIKRSLSKLKKKDVCSGSETSDDDGYSEGDETESETTVSDTESDFDVNSGAWDLKGNCLKLTEHGESVIDDRILGARMTKASLVPPVTRKYEVIEEYLIVADVEEVQRKMRVSLPDDYSEKLLSQKNGTENLELPEVKDYQPRKVAGDEILEQEVYGIDPYTHNLLSDIMPSDLELSPTDKHIFIEELLLNALNKQVRHFTGLGNTPMTYNIRPVIEEIQRSAEDSGDRRTLKMCLGMLKSMRNRSDQNFVAYRKGLGVVCNKKGGFGVDDFVVEFFGEVYPSWRWYEKQDGIKHIQNNSEDQAPEFYNIMLERPKGDRHGYDLVFVDAMHKANYASRICHSCNPNCEAKLEFTHFDQLQKARKSLLITIL

SEQ ID NO: 68477 - protein, 630 aa, Zea Mays
MMQRPPLRPEEYSLKETTPHLGGAAAGDKLTTTYDLVEQMQYLYVRVVKAKELPNKDITGSCDPYVEVKLGNYKGQTGHFEKKNNPEWNQVFAFAKERIQSSVVEILVKDKDLVKDDFIGRVIFDLNEVPKRVPPDSPLAPQWYRLEDRNGHKVKGELMLAVWMGTQADEAFPEAWHSDAASVPGDGLASIRSKVYLTPKLWYLRVNVIEAQDLIPNDKTRFPEVYVKAMLGNQVQRTRALASRTLNPLWNEDLMFVAAEPFEEHLVLSVEDRVAPGKDEVIGRTIIALQHVPRRLDHRLLTSQWYNLEKHVIIDGEQKKETKFSSRIHLRICLEGGYHVLDESTHYSSDLRPTAKPLWKPSIGILELGILTAQGLLPMKTKDGRGTTDAYCVAKYGQKWVRTRTIIDSFTPKWNEQYTWEVYDPCTVVTIGVFDNCHLNGGEKANGARDTRIGKVRIRLSTLETDRVYTHSYPLIVLTPGGVKKMGEVQLAVRFTCSSLLNMMHLYSQPLLPKMHYVHPLSVIQVDNLRRQATSIVSTRLGRAEPPLRKEIVEYMLDVDSHMWSMRKSKANFFRITGVLSPLFAVARWFDQICHWKNPLTTVLIHVAAEAATAHGHPPLPRRDRPPGRA

SEQ ID NO: 68478 - protein, 208 aa, Zea Mays
MDTLGALALATEPPTNHLMERPPVGRREPLIINIMWRNLIIMALFQVSFLLTLNFKGISLLQLKNDDPAHADKVKNTFIFNTFVFCQVFNEFNSCKPDELNVFKGISENHLFIGIIAITVVLQFGPLSHHPSNHGRGTQSKRQKNYRGRAGHSLQLNLRFLFPCLEEVMIIRMVIRISKIKNCHKGADEFFDDICNFNYMNYKKVQIE

SEQ ID NO: 68479 - protein, 471 aa, Zea Mays
MATGAINVVRGTRSSDEELFQIYTHSESIALVVDSPQFFNRLAESFMSRINTRFIVLLWGDKSCIDSQAIKDIPLYGYKDIIELGRESRNALFLSDEQGQQDVFESISPEDVATLIYTSGTSGTPKGVMLTHRNLLHQINNLWEIVPAEPGDRFLSMLPTWHAYERACEYFIFSYGIQQVYTTVKYLKILVYKKIHSAIGISKAGISGGGSLPMHVDKFFEAIGIKVQNGYGLTETSPVVAARRPFCNVLGTVGHPIKHTEIKIFDIETGEVLPDGSKGIVKIKGPQVMKGYYKNPSATNEAFDQEGWFSTGDVGWIVPHHAMGPSRQCGGMIVLEGRAKDTIVLSTGENVEPAEIEEAASRSTLINQIVVIGQDQRRLGAIIVPNNDEVLAEAKRKSILGEDGELAKDKVMNMLYDELRTWTAHCSFRVGPILVVDEPFTIDNGLMTPTMKIRRDKVTDKYRREIEALFK

SEQ ID NO: 68480 - protein, 445 aa, Zea Mays
MTHQTLIACTHAVVAAAAFSPASHSLHASLPLLFTRSSSPSCGPAPPPLQPLPPWRPSSCTTTVRREGKVKMSALALRSSLRPCEAAEEVGAGQAWCRGADMGIAAFADEFSVEDLLDLEDLCEVDKDCAELGDTVPAAESVQEEDKVSSDSHGSSVLSYELMTLPVPHPMIDLPLPAHDAEELEWVSRIMDDSLAELPPPPKLPAAPLGAARRPLEGAVAGPMRSPTTTICALSTEALVPVMRAKRSKRSRGSVWSLSGGAPLSESTSSSSTATTSSCSSSASFSPLLLLPADPSLVLSSHLLDETPRPKKKSKHGKHGKSGKPKKRGRKPKHHPKPPQFSGGAAYAPAQGDRRCSHCGVQKTPQWRAGPEGAKTLCNACGVRYKSGRLLPEYRPACSPTFVSSIHSNSHRKVLEMRRKKDGDLGQLPLPVPAALLLGPAVESF
